United States Patent Application Publication US 2024/0167057 A1 - sequence listing, part 2

SEQ ID NO: 8933 - protein, 10 aa, Severe acute respiratory syndrome-related coronavirus
  REGION 1..10: note = Table B: HLA-DQA1*03:02-B1*03:03M HLA-DQA1*05:01-B1*03:01L HLA-DRB1*04:01L HLA-DRB1*13:03L HLA-DRB1*01:03L HLA-DRB1*04:05L HLA-DQA1*01:02-B1*06:02L HLA-DRB1*01:02L HLA-DRB1*08:77L HLA-DRB3*02:01L HLA-DPA1*01:03-B1*03:01L
  REGION 1..10: note = CONT. FROM ABOVE: HLA-DPA1*03:01-B1*04:02L HLA-DRB1*14:01L HLA-D RB1*11:02L HLA-DRB1*14:02L HLA-DRB1*08:01L HLA-DRB1*11:01L HLA-D QA1*01-B1*05L HLA-DQA1*05:05-B1*03:19M HLA-DQA1*05:01-B1*02:01L HLA-DRB4*01:01L HLA-DPA1*01:03-B1*04:01L
  REGION 1..10: note = CONT. FROM ABOVE: HLA-DQA1*05:05-B1*03:116M HLA-DRB1*09:01L HLA- DPA1*01:03-B1*04:02L HLA-DRB1*12:01L HLA-DPA1*02:01-B1*13:01L HL A-DPA1*03:01-B1*105:01L HLA-DQA1*03:01-B1*03:02M HLA-DPA1*01:03- B1*104:01L HLA-DPA1*01:02-B1*04:01L HLA-DRB1*07:01L
  REGION 1..10: note = CONT. FROM ABOVE: HLA-DRB1*10:01L HLA-DRB1*16:01L HLA-DQA1*01:03 -B1*06:01L HLA-DRB1*08:03L HLA-DQA1*02:01-B1*03:03M HLA-DRB1*15: 03M
  source 1..10: note = Severe acute respiratory syndrome coronavirus 2
FVVPGLPGTI

SEQ ID NO: 8934 - protein, 10 aa, Severe acute respiratory syndrome-related coronavirus
  REGION 1..10: note = Table B: HLA-DQA1*03:02-B1*03:03L HLA-DQA1*05:01-B1*03:01L HLA-DQA1*01:02-B1*06:02L HLA-DQA1*05:05-B1*03:19L HLA-DQA1*03:01-B1*03:02L HLA-DQA1*05:05-B1*03:01L HLA-DQA1*01:03-B1*06:01L HLA-DQA1*02:01-B1*03:03L
  source 1..10: note = Severe acute respiratory syndrome coronavirus 2
VVPGLPGTIL

SEQ ID NO: 8935 - protein, 14 aa, Severe acute respiratory syndrome-related coronavirus
  REGION 1..14: note = Table B: HLA-DQA1*03:02-B1*03:03L HLA-DQA1*05:01-B1*03:01L HLA-DQA1*05:05-B1*03:19L HLA-DPA1*03:01-B1*105:01L HLA-DQA1*02:01-B1*03:03L
  source 1..14: note = Severe acute respiratory syndrome coronavirus 2
VPGLPGTILRTTNG

SEQ ID NO: 8936 - protein, 13 aa, Severe acute respiratory syndrome-related coronavirus
  REGION 1..13: note = Table B: HLA-DQA1*03:02-B1*03:03L HLA-DQA1*05:01-B1*03:01L HLA-DRB1*04:03L HLA-DRB1*13:02L HLA-DRB1*13:03L HLA-DRB1*01:03L HLA-DRB1*04:02L HLA-DRB1*04:05L HLA-DRB1*01:02L HLA-DRB4*03:01NL HLA-DRB1*08:04L HLA-DRB1*08:77L HLA-DRB3*02:01L
  REGION 1..13: note = CONT. FROM ABOVE: HLA-DPA1*01:03-B1*03:01L HLA-DPA1*03:01-B1*04: 02L HLA-DRB1*14:01L HLA-DRB1*11:03L HLA-DRB1*14:02L HLA-DQA1*01: 01-B1*05:01L HLA-DRB1*08:01L HLA-DQA1*01-B1*05L HLA-DQA1*05:05-B 1*03:19L HLA-DQA1*05:01-B1*02:01L HLA-DPA1*01:03-B1*04:01L
  REGION 1..13: note = CONT. FROM ABOVE: HLA-DRB1*04:10L HLA-DRB1*09:01L HLA-DRB1*12:01 L HLA-DRB1*12:02L HLA-DPA1*02:01-B1*13:01L HLA-DPA1*03:01-B1*105 :01L HLA-DRB1*14:54L HLA-DQA1*05:05-B1*03:01L HLA-DRB1*14:17L HL A-DPA1*01:02-B1*04:01L HLA-DRB1*07:01L HLA-DRB1*16:01L
  REGION 1..13: note = CONT. FROM ABOVE: HLA-DRB1*04:08L HLA-DRB1*15:03L
  source 1..13: note = Severe acute respiratory syndrome coronavirus 2
LPGTILRTTNGDF

SEQ ID NO: 8937 - protein, 10 aa, Severe acute respiratory syndrome-related coronavirus
  REGION 1..10: note = Table B: HLA-DQA1*03:02-B1*03:03L HLA-DQA1*05:01-B1*03:01L HLA-DRB1*04:03L HLA-DPA1*03:01-B1*04:02L HLA-DRB1*14:01L HLA-DQA1*01-B1*05L HLA-DQA1*05:01-B1*02:01L HLA-DRB1*12:01L HLA-DQA1*03:01-B1*03:02L HLA-DPA1*01:02-B1*04:01L
  REGION 1..10: note = CONT. FROM ABOVE: HLA-DRB1*16:01L HLA-DQA1*02:01-B1*03:03L HLA-D RB1*15:03L
  source 1..10: note = Severe acute respiratory syndrome coronavirus 2
ILRTTNGDFL

SEQ ID NO: 8938 - protein, 10 aa, Severe acute respiratory syndrome-related coronavirus
  REGION 1..10: note = Table B: HLA-DQA1*03:02-B1*03:03L HLA-DQA1*05:01-B1*03:01L HLA-DRB1*13:02L HLA-DRB1*13:03L HLA-DRB1*01:03M HLA-DRB1*04:05L HLA-DQA1*01:02-B1*06:02M HLA-DRB1*08:77L HLA-DPA1*01:03-B1*03:01L HLA-DPA1*03:01-B1*04:02L
  REGION 1..10: note = CONT. FROM ABOVE: HLA-DRB1*03:01L HLA-DRB1*14:01L HLA-DRB1*14:02 L HLA-DRB1*11:01L HLA-DQA1*01-B1*05L HLA-DQA1*05:05-B1*03:19L HL A-DQA1*05:01-B1*02:01L HLA-DRB4*01:01L HLA-DPA1*01:03-B1*04:01L HLA-DQA1*05:05-B1*03:116L HLA-DPA1*01:03-B1*04:02L
  REGION 1..10: note = CONT. FROM ABOVE: HLA-DPA1*02:01-B1*13:01L HLA-DPA1*03:01-B1*105 :01L HLA-DQA1*03:01-B1*03:02L HLA-DPA1*01:03-B1*104:01L HLA-DPA1 *01:02-B1*04:01L HLA-DRB1*10:01L HLA-DRB1*16:01L HLA-DQA1*01:03- B1*06:01L HLA-DRB1*08:02L HLA-DQA1*02:01-B1*03:03M
  REGION 1..10: note = CONT. FROM ABOVE: HLA-DRB1*15:03L
  source 1..10: note = Severe acute respiratory syndrome coronavirus 2
RTTNGDFLHF

SEQ ID NO: 8939 - protein, 10 aa, Severe acute respiratory syndrome-related coronavirus
  REGION 1..10: note = Table B: HLA-DQA1*03:02-B1*03:03L HLA-DQA1*01:02-B1*06:02L HLA-DPA1*03:01-B1*105:01L HLA-DQA1*01:03-B1*06:01L HLA-DRB1*15:03L
  source 1..10: note = Severe acute respiratory syndrome coronavirus 2
TTNGDFLHFL

SEQ ID NO: 8940 - protein, 16 aa, Severe acute respiratory syndrome-related coronavirus
  REGION 1..16: note = Table B: HLA-DQA1*03:02-B1*03:03L HLA-DRB1*04:01L HLA-DRB1*13:03L HLA-DRB1*04:02L HLA-DRB1*04:04L HLA-DRB1*04:05L HLA-DRB1*08:04L HLA-DRB1*08:77L HLA-DRB3*02:01L HLA-DRB1*03:01L HLA-DRB1*11:02L HLA-DRB1*11:03L HLA-DRB1*11:04L HLA-DRB1*08:01L
  REGION 1..16: note = CONT. FROM ABOVE: HLA-DRB1*11:01L HLA-DQA1*01-B1*05L HLA-DRB1*09 :01L HLA-DPA1*01:03-B1*04:02L HLA-DRB3*01:01L HLA-DQA1*03:01-B1* 03:02L HLA-DRB1*14:54L HLA-DRB1*14:17L HLA-DPA1*01:02-B1*04:01L HLA-DRB1*07:01L HLA-DRB1*08:02L HLA-DRB1*08:03L HLA-DRB1*15:01L
  source 1..16: note = Severe acute respiratory syndrome coronavirus 2
LPRVFSAVGNICYTPS

SEQ ID NO: 8941 - protein, 12 aa, Severe acute respiratory syndrome-related coronavirus
  REGION 1..12: note = Table B: HLA-DQA1*03:02-B1*03:03L HLA-DQA1*05:01-B1*03:01L HLA-DRB1*13:02L HLA-DRB1*13:03L HLA-DRB1*01:02L HLA-DRB4*03:01NL HLA-DRB1*08:77L HLA-DRB3*02:01L HLA-DPA1*01:03-B1*03:01L HLA-DRB1*14:01L HLA-DRB1*11:03L HLA-DPA1*01:03-B1*04:01L
  REGION 1..12: note = CONT. FROM ABOVE: HLA-DRB1*09:01L HLA-DPA1*03:01-B1*105:01L HLA- DQA1*03:01-B1*03:02L HLA-DQA1*05:05-B1*03:01L HLA-DRB1*07:01L HL A-DQA1*01:03-B1*06:01L HLA-DRB1*04:08L
  source 1..12: note = Severe acute respiratory syndrome coronavirus 2
GNICYTPSKLIE

SEQ ID NO: 8942 - protein, 12 aa, Severe acute respiratory syndrome-related coronavirus
  REGION 1..12: note = Table B: HLA-DQA1*03:02-B1*03:03L HLA-DQA1*01:02-B1*06:02L HLA-DQA1*05:01-B1*02:01L HLA-DQA1*03:01-B1*03:02L HLA-DQA1*01:03-B1*06:01L HLA-DQA1*02:01-B1*03:03L
  source 1..12: note = Severe acute respiratory syndrome coronavirus 2
TPSKLIEYTDFA

SEQ ID NO: 8943 - protein, 10 aa, Severe acute respiratory syndrome-related coronavirus
  REGION 1..10: note = Table B: HLA-DQA1*03:02-B1*03:03M HLA-DRB1*13:03L HLA-DPA1*03:01-B1*04:02L HLA-DRB1*11:02L HLA-DRB1*11:01L HLA-DQA1*01-B1*05L HLA-DQA1*05:05-B1*03:19L HLA-DQA1*05:01-B1*02:01L HLA-DPA1*01:03-B1*04:01L
  REGION 1..10: note = CONT. FROM ABOVE: HLA-DRB1*09:01L HLA-DPA1*01:03-B1*04:02L HLA-D PA1*03:01-B1*105:01L HLA-DQA1*03:01-B1*03:02L HLA-DPA1*01:03-B1* 104:01L HLA-DPA1*01:02-B1*04:01L HLA-DRB1*16:01L HLA-DQA1*01:03- B1*06:01L HLA-DQA1*02:01-B1*03:03L HLA-DRB1*15:03L
  source 1..10: note = Severe acute respiratory syndrome coronavirus 2
IEYTDFATSA

SEQ ID NO: 8944 - protein, 13 aa, Severe acute respiratory syndrome-related coronavirus
  REGION 1..13: note = Table B: HLA-DQA1*03:02-B1*03:03L HLA-DRB1*04:03L
  source 1..13: note = Severe acute respiratory syndrome coronavirus 2
TDFATSACVLAAE

SEQ ID NO: 8945 - protein, 11 aa, Severe acute respiratory syndrome-related coronavirus
  REGION 1..11: note = Table B: HLA-DQA1*03:02-B1*03:03L HLA-DQA1*05:01-B1*03:01L HLA-DRB1*13:02L HLA-DRB1*13:03L HLA-DRB1*01:03L HLA-DRB1*04:02L HLA-DRB1*04:05L HLA-DQA1*01:02-B1*06:02L HLA-DRB4*03:01NL HLA-DRB1*08:77L HLA-DRB3*02:01L HLA-DPA1*01:03-B1*03:01L
  REGION 1..11: note = CONT. FROM ABOVE: HLA-DRB1*14:01L HLA-DQA1*01-B1*05L HLA-DQA1*05 :05-B1*03:19L HLA-DQA1*05:01-B1*02:01L HLA-DRB1*12:01L HLA-DPA1* 02:01-B1*13:01L HLA-DPA1*03:01-B1*105:01L HLA-DRB1*14:54L HLA-DQ A1*05:05-B1*03:01L HLA-DRB1*14:17L HLA-DPA1*01:02-B1*04:01L
  REGION 1..11: note = CONT. FROM ABOVE: HLA-DRB1*07:01L HLA-DQA1*01:03-B1*06:01L HLA-D RB1*04:08L
  source 1..11: note = Severe acute respiratory syndrome coronavirus 2
IFKDASGKPVP

SEQ ID NO: 8946 - protein, 10 aa, Severe acute respiratory syndrome-related coronavirus
  REGION 1..10: note = Table B: HLA-DQA1*03:02-B1*03:03L HLA-DQA1*05:01-B1*03:01L HLA-DRB1*13:03L HLA-DRB1*01:03L HLA-DRB1*04:02L HLA-DQA1*01:02-B1*06:02L HLA-DRB4*03:01NL HLA-DRB1*08:77L HLA-DPA1*01:03-B1*03:01L HLA-DPA1*03:01-B1*04:02L
  REGION 1..10: note = CONT. FROM ABOVE: HLA-DRB1*03:01L HLA-DRB1*14:02L HLA-DQA1*01-B1 *05L HLA-DQA1*05:05-B1*03:19L HLA-DQA1*05:01-B1*02:01L HLA-DRB4* 01:01L HLA-DPA1*01:03-B1*04:01L HLA-DPA1*01:03-B1*04:02L HLA-DRB 1*12:01L HLA-DQA1*03:01-B1*03:02L HLA-DPA1*01:03-B1*104:01L
  REGION 1..10: note = CONT. FROM ABOVE: HLA-DPA1*01:02-B1*04:01L HLA-DRB1*10:01L HLA-D RB1*16:01L HLA-DQA1*02:01-B1*03:03L HLA-DRB1*15:03L
  source 1..10: note = Severe acute respiratory syndrome coronavirus 2
KDASGKPVPY

SEQ ID NO: 8947 - protein, 12 aa, Severe acute respiratory syndrome-related coronavirus
  REGION 1..12: note = Table B: HLA-DQA1*03:02-B1*03:03L HLA-DQA1*05:01-B1*03:01L
  source 1..12: note = Severe acute respiratory syndrome coronavirus 2
DASGKPVPYCYD

SEQ ID NO: 8948 - protein, 16 aa, Severe acute respiratory syndrome-related coronavirus
  REGION 1..16: note = Table B: HLA-DQA1*03:02-B1*03:03L HLA-DQA1*05:01-B1*03:01L HLA-DRB1*04:01L HLA-DRB1*13:02L HLA-DPA1*01:03-B1*03:01L HLA-DPA1*03:01-B1*04:02L HLA-DRB1*03:01L HLA-DRB1*14:02L HLA-DQA1*05:05-B1*03:19L HLA-DRB4*01:01L
  REGION 1..16: note = CONT. FROM ABOVE: HLA-DPA1*01:03-B1*04:02L HLA-DRB3*01:01L HLA-D PA1*01:03-B1*104:01L HLA-DQA1*05:05-B1*03:01L HLA-DQA1*01:03-B1* 06:01L HLA-DRB1*08:03L
  source 1..16: note = Severe acute respiratory syndrome coronavirus 2
KPVPYCYDTNVLEGSV

SEQ ID NO: 8949 - protein, 15 aa, Severe acute respiratory syndrome-related coronavirus
  REGION 1..15: note = Table B: HLA-DQA1*03:02-B1*03:03L HLA-DQA1*05:05-B1*03:19L HLA-DQA1*05:01-B1*02:01L
  source 1..15: note = Severe acute respiratory syndrome coronavirus 2
VPYCYDTNVLEGSVA

SEQ ID NO: 8950 - protein, 12 aa, Severe acute respiratory syndrome-related coronavirus
  REGION 1..12: note = Table B: HLA-DQA1*03:02-B1*03:03L HLA-DQA1*03:01-B1*03:02L
  source 1..12: note = Severe acute respiratory syndrome coronavirus 2
DTNVLEGSVAYE

SEQ ID NO: 8951 - protein, 10 aa, Severe acute respiratory syndrome-related coronavirus
  REGION 1..10: note = Table B: HLA-DQA1*03:02-B1*03:03L HLA-DQA1*03:01-B1*03:02L
  source 1..10: note = Severe acute respiratory syndrome coronavirus 2
LEGSVAYESL

SEQ ID NO: 8952 - protein, 10 aa, Severe acute respiratory syndrome-related coronavirus
  REGION 1..10: note = Table B: HLA-DQA1*03:02-B1*03:03L HLA-DRB1*04:03L HLA-DQA1*01-B1*05L HLA-DQA1*05:01-B1*02:01L HLA-DPA1*03:01-B1*105:01L HLA-DQA1*03:01-B1*03:02L HLA-DPA1*01:02-B1*04:01L HLA-DQA1*01:03-B1*06:01L
  REGION 1..10: note = CONT. FROM ABOVE: HLA-DQA1*02:01-B1*03:03L
  source 1..10: note = Severe acute respiratory syndrome coronavirus 2
SVAYESLRPD

SEQ ID NO: 8953 - protein, 10 aa, Severe acute respiratory syndrome-related coronavirus
  REGION 1..10: note = Table B: HLA-DQA1*03:02-B1*03:03L HLA-DQA1*05:01-B1*03:01L HLA-DRB1*04:03L HLA-DRB1*13:03L HLA-DRB1*01:03L HLA-DRB1*04:02L HLA-DRB1*04:05L HLA-DRB4*03:01NL HLA-DQA1*01-B1*05L HLA-DQA1*05:01-B1*02:01L HLA-DPA1*03:01-B1*105:01L
  REGION 1..10: note = CONT. FROM ABOVE: HLA-DQA1*03:01-B1*03:02L HLA-DRB1*14:17L HLA-D PA1*01:02-B1*04:01L HLA-DRB1*16:01L HLA-DQA1*01:03-B1*06:01L HLA -DQA1*02:01-B1*03:03L
  source 1..10: note = Severe acute respiratory syndrome coronavirus 2
VAYESLRPDT

SEQ ID NO: 8954 - protein, 10 aa, Severe acute respiratory syndrome-related coronavirus
  REGION 1..10: note = Table B: HLA-DQA1*03:02-B1*03:03L HLA-DQA1*05:01-B1*03:01L HLA-DRB1*13:03L HLA-DRB1*01:03L HLA-DQA1*01:02-B1*06:02L HLA-DRB4*03:01NL HLA-DRB1*08:77L HLA-DPA1*01:03-B1*03:01L HLA-DPA1*03:01-B1*04:02L HLA-DRB1*03:01L HLA-DRB1*14:02L
  REGION 1..10: note = CONT. FROM ABOVE: HLA-DQA1*01-B1*05L HLA-DQA1*05:05-B1*03:19L HL A-DQA1*05:01-B1*02:01L HLA-DRB4*01:01L HLA-DPA1*01:03-B1*04:01L HLA-DQA1*05:05-B1*03:116L HLA-DPA1*01:03-B1*04:02L HLA-DRB1*12:0 1L HLA-DQA1*03:01-B1*03:02L HLA-DPA1*01:03-B1*104:01L
  REGION 1..10: note = CONT. FROM ABOVE: HLA-DPA1*01:02-B1*04:01L HLA-DRB1*10:01L HLA-D RB1*16:01L HLA-DQA1*01:03-B1*06:01L HLA-DQA1*02:01-B1*03:03L HLA -DRB1*15:03L
  source 1..10: note = Severe acute respiratory syndrome coronavirus 2
YESLRPDTRY

SEQ ID NO: 8955 - protein, 12 aa, Severe acute respiratory syndrome-related coronavirus
  REGION 1..12: note = Table B: HLA-DQA1*03:02-B1*03:03L HLA-DRB1*04:01L HLA-DRB1*04:04L HLA-DQA1*01:02-B1*06:02L HLA-DRB1*08:04L HLA-DPA1*01:03-B1*03:01L HLA-DPA1*03:01-B1*04:02L HLA-DRB1*03:01L HLA-DRB1*11:04L HLA-DRB1*14:02L HLA-DRB1*08:01L
  REGION 1..12: note = CONT. FROM ABOVE: HLA-DRB1*11:01L HLA-DRB5*01:01L HLA-DQA1*01-B1 *05L HLA-DRB4*02:01NL HLA-DPA1*01:03-B1*04:01L HLA-DRB1*04:10L H LA-DRB1*09:01L HLA-DRB3*01:01L HLA-DPA1*02:01-B1*13:01L HLA-DPA1 *01:03-B1*104:01L HLA-DQA1*01:03-B1*06:01L HLA-DRB1*08:03L
  REGION 1..12: note = CONT. FROM ABOVE: HLA-DRB1*15:01L
  source 1..12: note = Severe acute respiratory syndrome coronavirus 2
TRYVLMDGSIIQ

SEQ ID NO: 8956 - protein, 10 aa, Severe acute respiratory syndrome-related coronavirus
  REGION 1..10: note = Table B: HLA-DQA1*03:02-B1*03:03L HLA-DQA1*05:01-B1*03:01L HLA-DRB1*13:03L HLA-DRB1*01:03L HLA-DQA1*01:02-B1*06:02L HLA-DRB1*08:77L HLA-DPA1*03:01-B1*04:02L HLA-DRB1*14:01L HLA-DRB1*14:02M HLA-DQA1*05:05-B1*03:19L
  REGION 1..10: note = CONT. FROM ABOVE: HLA-DQA1*05:01-B1*02:01L HLA-DRB4*01:01L HLA-D PA1*01:03-B1*04:01L HLA-DQA1*05:05-B1*03:116L HLA-DPA1*01:03-B1* 04:02L HLA-DPA1*02:01-B1*13:01L HLA-DPA1*03:01-B1*105:01L HLA-DQ A1*03:01-B1*03:02L HLA-DPA1*01:02-B1*04:01L HLA-DRB1*10:01L
  REGION 1..10: note = CONT. FROM ABOVE: HLA-DRB1*16:01L HLA-DQA1*01:03-B1*06:01L HLA-D RB1*08:03L HLA-DQA1*02:01-B1*03:03L HLA-DRB1*15:03L
  source 1..10: note = Severe acute respiratory syndrome coronavirus 2
VLMDGSIIQF

SEQ ID NO: 8957 - protein, 10 aa, Severe acute respiratory syndrome-related coronavirus
  REGION 1..10: note = Table B: HLA-DQA1*03:02-B1*03:03L HLA-DQA1*05:01-B1*03:01L HLA-DRB1*13:03L HLA-DQA1*01:02-B1*06:02L HLA-DRB1*08:77L HLA-DPA1*01:03-B1*03:01L HLA-DRB1*03:01L HLA-DRB1*14:02L HLA-DQA1*01-B1*05L HLA-DQA1*05:05-B1*03:19L
  REGION 1..10: note = CONT. FROM ABOVE: HLA-DQA1*05:01-B1*02:01L HLA-DRB4*01:01L HLA-D PA1*01:03-B1*04:01L HLA-DPA1*01:03-B1*04:02L HLA-DPA1*03:01-B1*1 05:01L HLA-DQA1*03:01-B1*03:02L HLA-DPA1*01:03-B1*104:01L HLA-DR B1*16:01L HLA-DQA1*01:03-B1*06:01L HLA-DQA1*02:01-B1*03:03L
  REGION 1..10: note = CONT. FROM ABOVE: HLA-DRB1*15:03L
  source 1..10: note = Severe acute respiratory syndrome coronavirus 2
GSIIQFPNTY

SEQ ID NO: 8958 - protein, 10 aa, Severe acute respiratory syndrome-related coronavirus
  REGION 1..10: note = Table B: HLA-DQA1*03:02-B1*03:03L HLA-DQA1*05:01-B1*03:01L HLA-DRB1*04:03L HLA-DRB1*04:02L HLA-DQA1*01:02-B1*06:02L HLA-DRB1*01:02L HLA-DRB3*02:01L HLA-DPA1*03:01-B1*04:02L HLA-DRB1*14:01L HLA-DQA1*01-B1*05L HLA-DQA1*05:05-B1*03:19L
  REGION 1..10: note = CONT. FROM ABOVE: HLA-DQA1*05:01-B1*02:01L HLA-DRB1*09:01L HLA-D RB1*12:01L HLA-DPA1*02:01-B1*13:01L HLA-DPA1*03:01-B1*105:01L HL A-DQA1*03:01-B1*03:02L HLA-DRB1*14:17L HLA-DPA1*01:02-B1*04:01L HLA-DRB1*16:01L HLA-DQA1*01:03-B1*06:01L
  REGION 1..10: note = CONT. FROM ABOVE: HLA-DQA1*02:01-B1*03:03L HLA-DRB1*15:03L
  source 1..10: note = Severe acute respiratory syndrome coronavirus 2
SIIQFPNTYL

SEQ ID NO: 8959 - protein, 10 aa, Severe acute respiratory syndrome-related coronavirus
  REGION 1..10: note = Table B: HLA-DQA1*03:02-B1*03:03L HLA-DQA1*05:01-B1*03:01L HLA-DRB1*04:03L HLA-DRB1*13:03L HLA-DRB1*04:02L HLA-DQA1*01:02-B1*06:02L HLA-DQA1*01-B1*05L HLA-DQA1*05:01-B1*02:01L HLA-DQA1*03:01-B1*03:02L
  REGION 1..10: note = CONT. FROM ABOVE: HLA-DQA1*05:05-B1*03:01L HLA-DRB1*14:17L HLA-D PA1*01:02-B1*04:01L HLA-DRB1*16:01L HLA-DQA1*01:03-B1*06:01L HLA -DQA1*02:01-B1*03:03L
  source 1..10: note = Severe acute respiratory syndrome coronavirus 2
PNTYLEGSVR

SEQ ID NO: 8960 - protein, 10 aa, Severe acute respiratory syndrome-related coronavirus
  REGION 1..10: note = Table B: HLA-DQA1*03:02-B1*03:03L HLA-DQA1*05:01-B1*03:01L HLA-DQA1*01:02-B1*06:02L HLA-DRB1*01:02L HLA-DPA1*03:01-B1*04:02L HLA-DQA1*05:05-B1*03:19L HLA-DQA1*05:01-B1*02:01L HLA-DQA1*05:05-B1*03:116L
  REGION 1..10: note = CONT. FROM ABOVE: HLA-DPA1*02:01-B1*13:01L HLA-DPA1*03:01-B1*105 :01L HLA-DQA1*03:01-B1*03:02L HLA-DPA1*01:02-B1*04:01L HLA-DRB1* 16:01L HLA-DQA1*01:03-B1*06:01L HLA-DRB1*08:03L HLA-DQA1*02:01-B 1*03:03L HLA-DRB1*15:03L
  source 1..10: note = Severe acute respiratory syndrome coronavirus 2
NTYLEGSVRV

SEQ ID NO: 8961 - protein, 10 aa, Severe acute respiratory syndrome-related coronavirus
  REGION 1..10: note = Table B: HLA-DQA1*03:02-B1*03:03L HLA-DQA1*05:01-B1*03:01L HLA-DRB1*04:05L HLA-DQA1*01:02-B1*06:02L HLA-DRB1*01:02L HLA-DPA1*03:01-B1*04:02L HLA-DRB1*14:02L HLA-DQA1*01-B1*05L HLA-DQA1*05:05-B1*03:19L HLA-DQA1*05:01-B1*02:01L
  REGION 1..10: note = CONT. FROM ABOVE: HLA-DQA1*05:05-B1*03:116L HLA-DPA1*02:01-B1*13 :01L HLA-DPA1*03:01-B1*105:01L HLA-DQA1*03:01-B1*03:02L HLA-DPA1 *01:03-B1*104:01L HLA-DPA1*01:02-B1*04:01L HLA-DRB1*16:01L HLA-D QA1*01:03-B1*06:01L HLA-DRB1*08:03L HLA-DQA1*02:01-B1*03:03L
  REGION 1..10: note = CONT. FROM ABOVE: HLA-DRB1*15:03L
  source 1..10: note = Severe acute respiratory syndrome coronavirus 2
TYLEGSVRVV

SEQ ID NO: 8962 - protein, 10 aa, Severe acute respiratory syndrome-related coronavirus
  REGION 1..10: note = Table B: HLA-DQA1*03:02-B1*03:03L HLA-DQA1*03:01-B1*03:02L
  source 1..10: note = Severe acute respiratory syndrome coronavirus 2
LEGSVRVVTT

SEQ ID NO: 8963 - protein, 12 aa, Severe acute respiratory syndrome-related coronavirus
  REGION 1..12: note = Table B: HLA-DQA1*03:02-B1*03:03L HLA-DRB1*04:05L HLA-DRB1*04:10L HLA-DRB1*14:54L HLA-DQA1*05:05-B1*03:01L
  source 1..12: note = Severe acute respiratory syndrome coronavirus 2
EGSVRVVTTFDS

SEQ ID NO: 8964 - protein, 12 aa, Severe acute respiratory syndrome-related coronavirus
  REGION 1..12: note = Table B: HLA-DQA1*03:02-B1*03:03L HLA-DQA1*05:01-B1*03:01L HLA-DRB1*13:02L HLA-DRB1*13:03L HLA-DRB1*01:03L HLA-DRB1*04:04L HLA-DRB1*04:05L HLA-DQA1*01:02-B1*06:02L HLA-DRB1*01:02L HLA-DRB4*03:01NL HLA-DPA1*01:03-B1*03:01L HLA-DRB1*14:01L
  REGION 1..12: note = CONT. FROM ABOVE: HLA-DQA1*01-B1*05L HLA-DQA1*05:01-B1*02:01L HL A-DRB1*04:10L HLA-DRB1*12:01L HLA-DRB1*12:02L HLA-DPA1*02:01-B1* 13:01L HLA-DPA1*03:01-B1*105:01L HLA-DQA1*03:01-B1*03:02L HLA-DR B1*14:54L HLA-DPA1*01:03-B1*104:01L HLA-DQA1*05:05-B1*03:01L
  REGION 1..12: note = CONT. FROM ABOVE: HLA-DRB1*16:01L HLA-DQA1*01:03-B1*06:01L HLA-D RB1*04:08L HLA-DQA1*02:01-B1*03:03L HLA-DRB1*15:03L
  source 1..12: note = Severe acute respiratory syndrome coronavirus 2
GSVRVVTTFDSE

SEQ ID NO: 8965 - protein, 10 aa, Severe acute respiratory syndrome-related coronavirus
  REGION 1..10: note = Table B: HLA-DQA1*03:02-B1*03:03L HLA-DQA1*05:01-B1*03:01L HLA-DRB1*04:01L HLA-DRB1*04:03L HLA-DRB1*13:02L HLA-DRB1*13:03M HLA-DRB1*01:03M HLA-DRB1*04:02L HLA-DQA1*01:02-B1*06:02M HLA-DRB1*01:01L HLA-DRB4*03:01NL HLA-DRB1*08:77L
  REGION 1..10: note = CONT. FROM ABOVE: HLA-DPA1*01:03-B1*03:01L HLA-DPA1*03:01-B1*04: 02L HLA-DRB1*03:01M HLA-DRB1*14:01L HLA-DRB1*11:02L HLA-DRB1*11: 03L HLA-DRB1*11:04L HLA-DRB1*14:02M HLA-DRB1*11:01L HLA-DRB5*01: 01L HLA-DQA1*01-B1*05L HLA-DQA1*05:05-B1*03:19M
  REGION 1..10: note = CONT. FROM ABOVE: HLA-DQA1*05:01-B1*02:01M HLA-DRB4*01:01L HLA-D PA1*01:03-B1*04:01L HLA-DQA1*05:05-B1*03:116L HLA-DPA1*01:03-B1* 04:02M HLA-DRB1*12:01L HLA-DPA1*02:01-B1*13:01L HLA-DPA1*03:01-B 1*105:01L HLA-DQA1*03:01-B1*03:02L HLA-DPA1*01:03-B1*104:01L
  REGION 1..10: note = CONT. FROM ABOVE: HLA-DQA1*05:05-B1*03:01L HLA-DRB1*14:17L HLA-D PA1*01:02-B1*04:01L HLA-DRB1*10:01L HLA-DRB1*16:01L HLA-DQA1*01: 03-B1*06:01L HLA-DRB1*08:02L HLA-DQA1*02:01-B1*03:03M HLA-DRB1*1 5:03L
  source 1..10: note = Severe acute respiratory syndrome coronavirus 2
RVVTTFDSEY

SEQ ID NO: 8966 - protein, 13 aa, Severe acute respiratory syndrome-related coronavirus
  REGION 1..13: note = Table B: HLA-DQA1*03:02-B1*03:03L HLA-DQA1*02:01-B1*03:03L
  source 1..13: note = Severe acute respiratory syndrome coronavirus 2
ERSEAGVCVSTSG

SEQ ID NO: 8967 - protein, 12 aa, Severe acute respiratory syndrome-related coronavirus
  REGION 1..12: note = Table B: HLA-DQA1*03:02-B1*03:03L HLA-DQA1*05:01-B1*03:01L HLA-DQA1*05:05-B1*03:19L HLA-DPA1*03:01-B1*105:01L HLA-DQA1*03:01-B1*03:02L HLA-DQA1*02:01-B1*03:03L
  source 1..12: note = Severe acute respiratory syndrome coronavirus 2
SEAGVCVSTSGR

SEQ ID NO: 8968 - protein, 13 aa, Severe acute respiratory syndrome-related coronavirus
  REGION 1..13: note = Table B: HLA-DQA1*03:02-B1*03:03L HLA-DQA1*05:01-B1*03:01L HLA-DQA1*03:01-B1*03:02L
  source 1..13: note = Severe acute respiratory syndrome coronavirus 2
VSTSGRWVLNNDY

SEQ ID NO: 8969 - protein, 12 aa, Severe acute respiratory syndrome-related coronavirus
  REGION 1..12: note = Table B: HLA-DQA1*03:02-B1*03:03L HLA-DQA1*05:01-B1*03:01L HLA-DPA1*03:01-B1*04:02L HLA-DRB1*14:02L HLA-DQA1*01-B1*05L HLA-DRB1*12:01L HLA-DPA1*03:01-B1*105:01L HLA-DQA1*03:01-B1*03:02L HLA-DPA1*01:03-B1*104:01L
  REGION 1..12: note = CONT. FROM ABOVE: HLA-DQA1*05:05-B1*03:01L HLA-DPA1*01:02-B1*04: 01L HLA-DRB1*15:03L
  source 1..12: note = Severe acute respiratory syndrome coronavirus 2
TSGRWVLNNDYY

SEQ ID NO: 8970 - protein, 13 aa, Severe acute respiratory syndrome-related coronavirus
  REGION 1..13: note = Table B: HLA-DQA1*03:02-B1*03:03L HLA-DRB1*13:02L HLA-DRB1*13:03L HLA-DRB1*04:04L HLA-DRB1*08:04L HLA-DRB1*11:04L HLA-DRB1*11:01L HLA-DRB3*01:01L HLA-DPA1*02:01-B1*13:01L HLA-DRB1*14:54L HLA-DQA1*05:05-B1*03:01L HLA-DRB1*14:17L
  source 1..13: note = Severe acute respiratory syndrome coronavirus 2
WVLNNDYYRSLPG

SEQ ID NO: 8971 - protein, 10 aa, Severe acute respiratory syndrome-related coronavirus
  REGION 1..10: note = Table B: HLA-DQA1*03:02-B1*03:03L HLA-DQA1*05:01-B1*03:01L HLA-DRB1*04:03L HLA-DRB1*13:03L HLA-DRB1*01:03L HLA-DRB1*04:05M HLA-DQA1*01:02-B1*06:02M HLA-DRB1*01:01L HLA-DRB1*01:02L HLA-DRB4*03:01NL HLA-DRB1*08:77L HLA-DPA1*01:03-B1*03:01L
  REGION 1..10: note = CONT. FROM ABOVE: HLA-DPA1*03:01-B1*04:02L HLA-DRB1*14:01L HLA-D RB1*11:03L HLA-DRB1*14:02L HLA-DQA1*01:01-B1*05:01L HLA-DRB1*08: 01L HLA-DRB1*11:01L HLA-DQA1*01-B1*05L HLA-DQA1*05:05-B1*03:19L HLA-DQA1*05:01-B1*02:01L HLA-DRB4*01:01L
  REGION 1..10: note = CONT. FROM ABOVE: HLA-DPA1*01:03-B1*04:01L HLA-DQA1*05:05-B1*03: 116L HLA-DPA1*01:03-B1*04:02L HLA-DRB1*12:01L HLA-DPA1*02:01-B1* 13:01M HLA-DPA1*03:01-B1*105:01L HLA-DQA1*03:01-B1*03:02L HLA-DP A1*01:03-B1*104:01L HLA-DQA1*05:05-B1*03:01L
  REGION 1..10: note = CONT. FROM ABOVE: HLA-DPA1*01:02-B1*04:01L HLA-DRB1*07:01L HLA-D RB1*10:01L HLA-DRB1*16:01L HLA-DQA1*01:03-B1*06:01M HLA-DRB1*08: 02L HLA-DRB1*08:03L HLA-DQA1*02:01-B1*03:03L HLA-DRB1*15:03L
  source 1..10: note = Severe acute respiratory syndrome coronavirus 2
DYYRSLPGVF

SEQ ID NO: 8972 - protein, 13 aa, Severe acute respiratory syndrome-related coronavirus
  REGION 1..13: note = Table B: HLA-DQA1*03:02-B1*03:03L HLA-DQA1*05:01-B1*03:01L HLA-DRB1*04:03L HLA-DRB1*04:05L HLA-DQA1*01:02-B1*06:02L HLA-DRB1*01:02L HLA-DRB3*02:01L HLA-DPA1*01:03-B1*03:01L HLA-DPA1*03:01-B1*04:02L HLA-DQA1*01-B1*05L
  REGION 1..13: note = CONT. FROM ABOVE: HLA-DQA1*05:01-B1*02:01L HLA-DPA1*01:03-B1*04: 01L HLA-DPA1*01:03-B1*04:02L HLA-DRB1*12:01L HLA-DPA1*02:01-B1*1 3:01L HLA-DPA1*03:01-B1*105:01L HLA-DQA1*03:01-B1*03:02L HLA-DQA 1*05:05-B1*03:01L HLA-DPA1*01:02-B1*04:01L HLA-DRB1*16:01L
  REGION 1..13: note = CONT. FROM ABOVE: HLA-DQA1*01:03-B1*06:01L HLA-DQA1*02:01-B1*03: 03L HLA-DRB1*15:03L
  source 1..13: note = Severe acute respiratory syndrome coronavirus 2
LPGVFCGVDAVNL

SEQ ID NO: 8973 - protein, 10 aa, Severe acute respiratory syndrome-related coronavirus
  REGION 1..10: note = Table B: HLA-DQA1*03:02-B1*03:03L HLA-DQA1*05:05-B1*03:19L HLA-DQA1*03:01-B1*03:02L
  source 1..10: note = Severe acute respiratory syndrome coronavirus 2
VDAVNLLTNM

SEQ ID NO: 8974 - protein, 10 aa, Severe acute respiratory syndrome-related coronavirus
  REGION 1..10: note = Table B: HLA-DQA1*03:02-B1*03:03L HLA-DQA1*05:01-B1*03:01L HLA-DRB1*04:05L HLA-DQA1*01:02-B1*06:02L HLA-DPA1*03:01-B1*04:02L HLA-DQA1*01-B1*05L HLA-DQA1*05:05-B1*03:19L HLA-DQA1*05:01-B1*02:01L
  REGION 1..10: note = CONT. FROM ABOVE: HLA-DPA1*03:01-B1*105:01L HLA-DQA1*03:01-B1*03 :02L HLA-DQA1*05:05-B1*03:01L HLA-DPA1*01:02-B1*04:01L HLA-DQA1* 01:03-B1*06:01L HLA-DQA1*02:01-B1*03:03L
  source 1..10: note = Severe acute respiratory syndrome coronavirus 2
MFTPLIQPIG

SEQ ID NO: 8975 - protein, 11 aa, Severe acute respiratory syndrome-related coronavirus
  REGION 1..11: note = Table B: HLA-DQA1*03:02-B1*03:03L
  source 1..11: note = Severe acute respiratory syndrome coronavirus 2
FTPLIQPIGAL

SEQ ID NO: 8976 - protein, 11 aa, Severe acute respiratory syndrome-related coronavirus
  REGION 1..11: note = Table B: HLA-DQA1*03:02-B1*03:03L HLA-DRB1*04:03L HLA-DRB1*04:02L HLA-DRB4*03:01NL HLA-DQA1*05:01-B1*02:01L HLA-DRB1*14:17L HLA-DQA1*02:01-B1*03:03L
  source 1..11: note = Severe acute respiratory syndrome coronavirus 2
TPLIQPIGALD

SEQ ID NO: 8977 - protein, 12 aa, Severe acute respiratory syndrome-related coronavirus
  REGION 1..12: note = Table B: HLA-DQA1*03:02-B1*03:03L HLA-DQA1*05:01-B1*03:01L HLA-DRB1*13:02L HLA-DRB1*13:03L HLA-DRB1*01:03L HLA-DRB1*04:02L HLA-DRB1*04:04L HLA-DRB1*04:05L HLA-DQA1*01:02-B1*06:02L HLA-DRB1*01:02L HLA-DRB4*03:01NL HLA-DRB1*08:77L
  REGION 1..12: note = CONT. FROM ABOVE: HLA-DPA1*01:03-B1*03:01L HLA-DRB1*14:01L HLA-D RB1*11:03L HLA-DQA1*01-B1*05L HLA-DQA1*05:05-B1*03:19L HLA-DQA1* 05:01-B1*02:01L HLA-DRB1*04:10L HLA-DRB1*12:01L HLA-DRB1*12:02L HLA-DPA1*03:01-B1*105:01L HLA-DQA1*03:01-B1*03:02L
  REGION 1..12: note = CONT. FROM ABOVE: HLA-DRB1*14:54L HLA-DQA1*05:05-B1*03:01L HLA-D RB1*07:01L HLA-DRB1*10:01L HLA-DRB1*16:01L HLA-DQA1*01:03-B1*06: 01L HLA-DRB1*04:08L HLA-DQA1*02:01-B1*03:03L HLA-DRB1*15:03L
  source 1..12: note = Severe acute respiratory syndrome coronavirus 2
IQPIGALDISAS

SEQ ID NO: 8978 - protein, 12 aa, Severe acute respiratory syndrome-related coronavirus
  REGION 1..12: note = Table B: HLA-DQA1*03:02-B1*03:03L HLA-DQA1*05:01-B1*03:01L HLA-DRB1*04:03L HLA-DQA1*05:05-B1*03:19L HLA-DPA1*03:01-B1*105:01L HLA-DQA1*03:01-B1*03:02L HLA-DQA1*05:05-B1*03:01L HLA-DQA1*02:01-B1*03:03L
  source 1..12: note = Severe acute respiratory syndrome coronavirus 2
LDISASIVAGGI

SEQ ID NO: 8979 - protein, 12 aa, Severe acute respiratory syndrome-related coronavirus
  REGION 1..12: note = Table B: HLA-DQA1*03:02-B1*03:03L HLA-DRB1*04:03L HLA-DQA1*05:01-B1*02:01L HLA-DPA1*03:01-B1*105:01L HLA-DQA1*03:01-B1*03:02L HLA-DRB1*04:08L
  source 1..12: note = Severe acute respiratory syndrome coronavirus 2
DISASIVAGGIV

SEQ ID NO: 8980 - protein, 12 aa, Severe acute respiratory syndrome-related coronavirus
  REGION 1..12: note = Table B: HLA-DQA1*03:02-B1*03:03L HLA-DRB1*04:03L HLA-DPA1*03:01-B1*105:01L HLA-DQA1*03:01-B1*03:02L
  source 1..12: note = Severe acute respiratory syndrome coronavirus 2
ISASIVAGGIVA

SEQ ID NO: 8981 - protein, 10 aa, Severe acute respiratory syndrome-related coronavirus
  REGION 1..10: note = Table B: HLA-DQA1*03:02-B1*03:03M HLA-DQA1*05:01-B1*03:01L HLA-DQA1*01:02-B1*06:02L HLA-DRB1*01:02L HLA-DPA1*03:01-B1*04:02L HLA-DRB1*14:01L HLA-DRB1*14:02L HLA-DQA1*05:05-B1*03:19L HLA-DQA1*05:01-B1*02:01L
  REGION 1..10: note = CONT. FROM ABOVE: HLA-DQA1*05:05-B1*03:116L HLA-DRB1*09:01L HLA- DPA1*02:01-B1*13:01L HLA-DPA1*03:01-B1*105:01L HLA-DQA1*03:01-B1 *03:02L HLA-DPA1*01:03-B1*104:01L HLA-DPA1*01:02-B1*04:01L HLA-D RB1*10:01L HLA-DRB1*16:01L HLA-DQA1*01:03-B1*06:01L
  REGION 1..10: note = CONT. FROM ABOVE: HLA-DRB1*08:03L HLA-DQA1*02:01-B1*03:03L HLA-D RB1*15:03L
  source 1..10: note = Severe acute respiratory syndrome coronavirus 2
SIVAGGIVAI

SEQ ID NO: 8982 - protein, 11 aa, Severe acute respiratory syndrome-related coronavirus
  REGION 1..11: note = Table B: HLA-DQA1*03:02-B1*03:03L HLA-DQA1*05:01-B1*03:01L HLA-DQA1*01:02-B1*06:02L HLA-DQA1*05:05-B1*03:19L HLA-DQA1*05:05-B1*03:01L HLA-DQA1*01:03-B1*06:01L HLA-DQA1*02:01-B1*03:03L
  source 1..11: note = Severe acute respiratory syndrome coronavirus 2
VAGGIVAIVVT

SEQ ID NO: 8983 - protein, 11 aa, Severe acute respiratory syndrome-related coronavirus
  REGION 1..11: note = Table B: HLA-DQA1*03:02-B1*03:03L HLA-DRB1*04:03L HLA-DRB1*04:02L HLA-DQA1*03:01-B1*03:02L HLA-DRB1*14:17L HLA-DRB1*16:01L HLA-DQA1*02:01-B1*03:03L
  source 1..11: note = Severe acute respiratory syndrome coronavirus 2
GEYSHVVAFNT

SEQ ID NO: 8984 - protein, 10 aa, Severe acute respiratory syndrome-related coronavirus
  REGION 1..10: note = Table B: HLA-DQA1*03:02-B1*03:03L HLA-DQA1*05:01-B1*03:01L HLA-DRB1*04:03L HLA-DRB1*13:03L HLA-DRB1*04:02L HLA-DRB1*04:05L HLA-DQA1*01:02-B1*06:02L HLA-DRB1*01:02L HLA-DRB3*02:01L HLA-DPA1*01:03-B1*03:01L HLA-DPA1*03:01-B1*04:02L
  REGION 1..10: note = CONT. FROM ABOVE: HLA-DRB1*14:01L HLA-DRB1*14:02L HLA-DRB1*08:01 L HLA-DQA1*01-B1*05L HLA-DQA1*05:05-B1*03:19L HLA-DQA1*05:01-B1* 02:01L HLA-DPA1*01:03-B1*04:01L HLA-DQA1*05:05-B1*03:116L HLA-DP A1*01:03-B1*04:02L HLA-DRB1*12:01L HLA-DPA1*02:01-B1*13:01L
  REGION 1..10: note = CONT. FROM ABOVE: HLA-DPA1*03:01-B1*105:01L HLA-DQA1*03:01-B1*03 :02L HLA-DQA1*05:05-B1*03:01L HLA-DPA1*01:02-B1*04:01L HLA-DRB1* 16:01L HLA-DQA1*01:03-B1*06:01L HLA-DQA1*02:01-B1*03:03L HLA-DRB 1*15:03L
  source 1..10: note = Severe acute respiratory syndrome coronavirus 2
YSHVVAFNTL

SEQ ID NO: 8985 - protein, 10 aa, Severe acute respiratory syndrome-related coronavirus
  REGION 1..10: note = Table B: HLA-DQA1*03:02-B1*03:03L HLA-DRB1*04:03L HLA-DQA1*01-B1*05L HLA-DQA1*03:01-B1*03:02L HLA-DPA1*01:02-B1*04:01L HLA-DQA1*01:03-B1*06:01L HLA-DQA1*02:01-B1*03:03L
  source 1..10: note = Severe acute respiratory syndrome coronavirus 2
SHVVAFNTLL

SEQ ID NO: 8986 - protein, 10 aa, Severe acute respiratory syndrome-related coronavirus
  REGION 1..10: note = Table B: HLA-DQA1*03:02-B1*03:03L HLA-DQA1*05:01-B1*03:01L HLA-DRB1*04:03L HLA-DQA1*01:02-B1*06:02L HLA-DPA1*03:01-B1*04:02L HLA-DRB1*14:01L HLA-DRB1*14:02L HLA-DQA1*05:05-B1*03:19L HLA-DQA1*05:01-B1*02:01L
  REGION 1..10: note = CONT. FROM ABOVE: HLA-DPA1*01:03-B1*04:01L HLA-DRB1*12:01L HLA-D PA1*02:01-B1*13:01L HLA-DPA1*03:01-B1*105:01L HLA-DQA1*01:03-B1* 06:01L HLA-DQA1*02:01-B1*03:03L HLA-DRB1*15:03L
  source 1..10: note = Severe acute respiratory syndrome coronavirus 2
HVVAFNTLLF

SEQ ID NO: 8987 - protein, 11 aa, Severe acute respiratory syndrome-related coronavirus
  REGION 1..11: note = Table B: HLA-DQA1*03:02-B1*03:03L HLA-DRB1*13:03L HLA-DPA1*01:03-B1*03:01L HLA-DRB1*14:02L HLA-DQA1*01-B1*05L
  source 1..11: note = Severe acute respiratory syndrome coronavirus 2
TPVYSFLPGVY

SEQ ID NO: 8988 - protein, 11 aa, Severe acute respiratory syndrome-related coronavirus
  REGION 1..11: note = Table B: HLA-DQA1*03:02-B1*03:03L HLA-DRB1*04:03L HLA-DQA1*01-B1*05L HLA-DQA1*03:01-B1*03:02L
  source 1..11: note = Severe acute respiratory syndrome coronavirus 2
PVYSFLPGVYS

SEQ ID NO: 8989 - protein, 10 aa, Severe acute respiratory syndrome-related coronavirus
  REGION 1..10: note = Table B: HLA-DQA1*03:02-B1*03:03M HLA-DQA1*05:01-B1*03:01L HLA-DRB1*04:05L HLA-DQA1*01:02-B1*06:02L HLA-DRB1*01:01L HLA-DRB1*01:02L HLA-DPA1*03:01-B1*04:02L HLA-DRB1*14:01L HLA-DRB1*11:02L HLA-DRB1*14:02L HLA-DQA1*05:05-B1*03:19L
  REGION 1..10: note = CONT. FROM ABOVE: HLA-DQA1*05:01-B1*02:01L HLA-DQA1*05:05-B1*03: 116L HLA-DRB1*09:01L HLA-DPA1*02:01-B1*13:01M HLA-DPA1*03:01-B1* 105:01L HLA-DQA1*03:01-B1*03:02L HLA-DPA1*01:03-B1*104:01L HLA-D PA1*01:02-B1*04:01L HLA-DRB1*10:01L HLA-DRB1*16:01L
  REGION 1..10: note = CONT. FROM ABOVE: HLA-DQA1*01:03-B1*06:01L HLA-DRB1*08:03L HLA-D QA1*02:01-B1*03:03L HLA-DRB1*15:03L
  source 1..10: note = Severe acute respiratory syndrome coronavirus 2
YSFLPGVYSV

SEQ ID NO: 8990 - protein, 10 aa, Severe acute respiratory syndrome-related coronavirus
  REGION 1..10: note = Table B: HLA-DQA1*03:02-B1*03:03L HLA-DQA1*05:01-B1*03:01L HLA-DQA1*01:02-B1*06:02L HLA-DPA1*03:01-B1*04:02L HLA-DRB1*14:02L HLA-DQA1*05:05-B1*03:19L HLA-DQA1*05:05-B1*03:116L HLA-DPA1*02:01-B1*13:01L
  REGION 1..10: note = CONT. FROM ABOVE: HLA-DPA1*03:01-B1*105:01L HLA-DQA1*03:01-B1*03 :02L HLA-DPA1*01:03-B1*104:01L HLA-DRB1*16:01L HLA-DQA1*01:03-B1 *06:01L HLA-DRB1*08:03L HLA-DQA1*02:01-B1*03:03L HLA-DRB1*15:03L
  source 1..10: note = Severe acute respiratory syndrome coronavirus 2
SFLPGVYSVI

SEQ ID NO: 8991 - protein, 10 aa, Severe acute respiratory syndrome-related coronavirus
  REGION 1..10: note = Table B: HLA-DQA1*03:02-B1*03:03L HLA-DQA1*05:01-B1*03:01L HLA-DRB1*04:03L HLA-DRB1*13:03L HLA-DRB1*01:03L HLA-DQA1*01:02-B1*06:02M HLA-DRB1*08:77L HLA-DPA1*01:03-B1*03:01L HLA-DPA1*03:01-B1*04:02L
  REGION 1..10: note = CONT. FROM ABOVE: HLA-DRB1*03:01L HLA-DRB1*14:01L HLA-DRB1*11:02 L HLA-DRB1*14:02L HLA-DQA1*01-B1*05L HLA-DQA1*05:05-B1*03:19M HL A-DQA1*05:01-B1*02:01L HLA-DRB4*01:01L HLA-DPA1*01:03-B1*04:01L HLA-DQA1*05:05-B1*03:116L HLA-DPA1*01:03-B1*04:02L
  REGION 1..10: note = CONT. FROM ABOVE: HLA-DRB1*12:01L HLA-DPA1*02:01-B1*13:01L HLA-D PA1*03:01-B1*105:01L HLA-DPA1*01:03-B1*104:01L HLA-DQA1*05:05-B1 *03:01L HLA-DPA1*01:02-B1*04:01L HLA-DRB1*10:01L HLA-DRB1*16:01L HLA-DQA1*01:03-B1*06:01L HLA-DQA1*02:01-B1*03:03L
  REGION 1..10: note = CONT. FROM ABOVE: HLA-DRB1*15:03L
  source 1..10: note = Severe acute respiratory syndrome coronavirus 2
FLPGVYSVIY

SEQ ID NO: 8992 - protein, 10 aa, Severe acute respiratory syndrome-related coronavirus
  REGION 1..10: note = Table B: HLA-DQA1*03:02-B1*03:03L HLA-DRB1*04:03L HLA-DRB1*04:05L HLA-DQA1*01:02-B1*06:02L HLA-DRB1*01:02L HLA-DPA1*03:01-B1*04:02L HLA-DQA1*01-B1*05L HLA-DQA1*05:05-B1*03:19L HLA-DQA1*05:01-B1*02:01L
  REGION 1..10: note = CONT. FROM ABOVE: HLA-DPA1*02:01-B1*13:01L HLA-DPA1*03:01-B1*105 :01L HLA-DQA1*03:01-B1*03:02L HLA-DRB1*16:01L HLA-DQA1*01:03-B1* 06:01L HLA-DQA1*02:01-B1*03:03L HLA-DRB1*15:03L
  source 1..10: note = Severe acute respiratory syndrome coronavirus 2
FYLTNDVSFL

SEQ ID NO: 8993 - protein, 10 aa, Severe acute respiratory syndrome-related coronavirus
  REGION 1..10: note = Table B: HLA-DQA1*03:02-B1*03:03L HLA-DQA1*05:05-B1*03:19L HLA-DPA1*01:03-B1*104:01L
  source 1..10: note = Severe acute respiratory syndrome coronavirus 2
TNDVSFLAHI

SEQ ID NO: 8994 - protein, 10 aa, Severe acute respiratory syndrome-related coronavirus
  REGION 1..10: note = Table B: HLA-DQA1*03:02-B1*03:03L HLA-DRB1*04:03L HLA-DQA1*01-B1*05L HLA-DQA1*05:01-B1*02:01L HLA-DPA1*03:01-B1*105:01L HLA-DQA1*03:01-B1*03:02L HLA-DPA1*01:02-B1*04:01L HLA-DQA1*01:03-B1*06:01L
  REGION 1..10: note = CONT. FROM ABOVE: HLA-DQA1*02:01-B1*03:03L
  source 1..10: note = Severe acute respiratory syndrome coronavirus 2
NDVSFLAHIQ

SEQ ID NO: 8995 - protein, 10 aa, Severe acute respiratory syndrome-related coronavirus
  REGION 1..10: note = Table B: HLA-DQA1*03:02-B1*03:03L HLA-DQA1*05:01-B1*03:01L HLA-DRB1*13:03L HLA-DQA1*01:02-B1*06:02M HLA-DRB1*08:77L HLA-DPA1*01:03-B1*03:01L HLA-DPA1*03:01-B1*04:02L HLA-DRB1*14:01L HLA-DRB1*14:02L HLA-DQA1*01-B1*05L
  REGION 1..10: note = CONT. FROM ABOVE: HLA-DQA1*05:05-B1*03:19L HLA-DQA1*05:01-B1*02: 01L HLA-DRB4*01:01L HLA-DPA1*01:03-B1*04:01L HLA-DQA1*05:05-B1*0 3:116L HLA-DRB1*12:01L HLA-DPA1*02:01-B1*13:01L HLA-DPA1*03:01-B 1*105:01M HLA-DPA1*01:02-B1*04:01L HLA-DQA1*01:03-B1*06:01L
  REGION 1..10: note = CONT. FROM ABOVE: HLA-DQA1*02:01-B1*03:03L HLA-DRB1*15:03L
  source 1..10: note = Severe acute respiratory syndrome coronavirus 2
DVSFLAHIQW

SEQ ID NO: 8996 - protein, 10 aa, Severe acute respiratory syndrome-related coronavirus
  REGION 1..10: note = Table B: HLA-DQA1*03:02-B1*03:03L HLA-DRB1*04:03L HLA-DRB1*01:03L HLA-DRB1*04:05L HLA-DQA1*01:02-B1*06:02M HLA-DRB1*01:01L HLA-DRB1*08:77L HLA-DPA1*03:01-B1*04:02L HLA-DRB1*14:02L HLA-DQA1*01-B1*05L HLA-DQA1*05:05-B1*03:19L
  REGION 1..10: note = CONT. FROM ABOVE: HLA-DQA1*05:01-B1*02:01L HLA-DRB4*01:01L HLA-D PA1*01:03-B1*04:01L HLA-DQA1*05:05-B1*03:116L HLA-DPA1*01:03-B1* 04:02L HLA-DPA1*02:01-B1*13:01M HLA-DPA1*03:01-B1*105:01L HLA-DP A1*01:03-B1*104:01L HLA-DPA1*01:02-B1*04:01L HLA-DRB1*10:01L
  REGION 1..10: note = CONT. FROM ABOVE: HLA-DRB1*16:01L HLA-DQA1*01:03-B1*06:01M HLA-D QA1*02:01-B1*03:03L HLA-DRB1*15:03L
  source 1..10: note = Severe acute respiratory syndrome coronavirus 2
VMFTPLVPFW

SEQ ID NO: 8997 - protein, 12 aa, Severe acute respiratory syndrome-related coronavirus
  REGION 1..12: note = Table B: HLA-DQA1*03:02-B1*03:03L HLA-DRB1*13:02L HLA-DRB1*01:03L HLA-DRB1*04:05L HLA-DRB1*01:02L HLA-DRB1*08:04L HLA-DRB3*02:01L HLA-DPA1*01:03-B1*03:01L HLA-DPA1*03:01-B1*04:02L HLA-DRB1*14:01L HLA-DRB1*08:01L
  REGION 1..12: note = CONT. FROM ABOVE: HLA-DQA1*05:05-B1*03:19L HLA-DQA1*05:01-B1*02: 01L HLA-DPA1*01:03-B1*04:01L HLA-DPA1*01:03-B1*04:02L HLA-DPA1*0 1:03-B1*104:01L HLA-DQA1*05:05-B1*03:01L HLA-DPA1*01:02-B1*04:01 L HLA-DRB1*16:01L HLA-DRB1*04:08L
  source 1..12: note = Severe acute respiratory syndrome coronavirus 2
IAYIICISTKHF

SEQ ID NO: 8998 - protein, 18 aa, Severe acute respiratory syndrome-related coronavirus
  REGION 1..18: note = Table B: HLA-DQA1*03:02-B1*03:03L HLA-DPA1*01:03-B1*04:01L HLA-DPA1*01:03-B1*104:01L
  source 1..18: note = Severe acute respiratory syndrome coronavirus 2
STKHFYWFFSNYLKRRVV

SEQ ID NO: 8999 - protein, 11 aa, Severe acute respiratory syndrome-related coronavirus
  REGION 1..11: note = Table B: HLA-DQA1*03:02-B1*03:03L HLA-DQA1*05:01-B1*03:01L HLA-DRB1*13:03L HLA-DRB1*01:02L HLA-DPA1*01:03-B1*03:01L HLA-DPA1*03:01-B1*04:02L HLA-DRB1*14:02L HLA-DQA1*01-B1*05L HLA-DQA1*05:05-B1*03:19L HLA-DQA1*05:01-B1*02:01L
  REGION 1..11: note = CONT. FROM ABOVE: HLA-DRB4*01:01L HLA-DPA1*01:03-B1*04:01L HLA-D QA1*05:05-B1*03:116L HLA-DPA1*01:03-B1*04:02L HLA-DRB1*12:01L HL A-DPA1*01:02-B1*04:01L
  source 1..11: note = Severe acute respiratory syndrome coronavirus 2
VVFNGVSFSTF

SEQ ID NO: 9000 - protein, 12 aa, Severe acute respiratory syndrome-related coronavirus
  REGION 1..12: note = Table B: HLA-DQA1*03:02-B1*03:03L HLA-DQA1*05:01-B1*03:01L HLA-DRB1*01:03L HLA-DQA1*01:02-B1*06:02L HLA-DRB1*01:02L HLA-DPA1*01:03-B1*03:01L HLA-DRB1*08:01L HLA-DQA1*05:05-B1*03:19L HLA-DQA1*05:01-B1*02:01L
  REGION 1..12: note = CONT. FROM ABOVE: HLA-DPA1*01:03-B1*04:02L HLA-DRB1*12:01L HLA-D PA1*02:01-B1*13:01L HLA-DQA1*03:01-B1*03:02L HLA-DQA1*05:05-B1*0 3:01L HLA-DRB1*16:01L HLA-DRB1*04:08L HLA-DQA1*02:01-B1*03:03L H LA-DRB1*15:03L
  source 1..12: note = Severe acute respiratory syndrome coronavirus 2
FNGVSFSTFEEA

SEQ ID NO: 9001 - protein, 10 aa, Severe acute respiratory syndrome-related coronavirus
  REGION 1..10: note = Table B: HLA-DQA1*03:02-B1*03:03L HLA-DQA1*01-B1*05L HLA-DQA1*05:01-B1*02:01L HLA-DQA1*01:03-B1*06:01L
  source 1..10: note = Severe acute respiratory syndrome coronavirus 2
SFSTFEEAAL

SEQ ID NO: 9002 - protein, 11 aa, Severe acute respiratory syndrome-related coronavirus
  REGION 1..11: note = Table B: HLA-DQA1*03:02-B1*03:03L HLA-DPA1*03:01-B1*04:02L HLA-DRB1*14:02L HLA-DQA1*05:05-B1*03:19L HLA-DQA1*05:01-B1*02:01L HLA-DRB4*01:01L HLA-DPA1*01:03-B1*04:01L HLA-DPA1*03:01-B1*105:01L
  REGION 1..11: note = CONT. FROM ABOVE: HLA-DQA1*02:01-B1*03:03L
  source 1..11: note = Severe acute respiratory syndrome coronavirus 2
STFEEAALCTF

SEQ ID NO: 9003 - protein, 10 aa, Severe acute respiratory syndrome-related coronavirus
  REGION 1..10: note = Table B: HLA-DQA1*03:02-B1*03:03L HLA-DQA1*05:05-B1*03:19L
  source 1..10: note = Severe acute respiratory syndrome coronavirus 2
FEEAALCTFL

SEQ ID NO: 9004 - protein, 10 aa, Severe acute respiratory syndrome-related coronavirus
  REGION 1..10: note = Table B: HLA-DQA1*03:02-B1*03:03L HLA-DPA1*03:01-B1*04:02L HLA-DQA1*05:05-B1*03:19L HLA-DRB1*12:01L HLA-DPA1*02:01-B1*13:01L HLA-DQA1*03:01-B1*03:02L HLA-DQA1*01:03-B1*06:01L HLA-DQA1*02:01-B1*03:03L
  REGION 1..10: note = CONT. FROM ABOVE: HLA-DRB1*15:03L
  source 1..10: note = Severe acute respiratory syndrome coronavirus 2
TFLLNKEMYL

SEQ ID NO: 9005 - protein, 15 aa, Severe acute respiratory syndrome-related coronavirus
  REGION 1..15: note = Table B: HLA-DQA1*03:02-B1*03:03L HLA-DRB1*04:03L HLA-DRB1*08:04L
  source 1..15: note = Severe acute respiratory syndrome coronavirus 2
LKLRSDVLLPLTQYN

SEQ ID NO: 9006 - protein, 11 aa, Severe acute respiratory syndrome-related coronavirus
  REGION 1..11: note = Table B: HLA-DQA1*03:02-B1*03:03L HLA-DRB1*04:01L HLA-DRB1*04:05L HLA-DRB1*01:01L HLA-DRB1*01:02L HLA-DQA1*01:01-B1*05:01L HLA-DRB1*11:01L HLA-DRB1*08:03L
  source 1..11: note = Severe acute respiratory syndrome coronavirus 2
VLLPLTQYNRY

SEQ ID NO: 9007 - protein, 10 aa, Severe acute respiratory syndrome-related coronavirus
  REGION 1..10: note = Table B: HLA-DQA1*03:02-B1*03:03L HLA-DQA1*05:01-B1*03:01L HLA-DRB1*13:02L HLA-DRB1*13:03L HLA-DRB1*01:03L HLA-DQA1*01:02-B1*06:02L HLA-DRB1*08:77L HLA-DPA1*01:03-B1*03:01L HLA-DPA1*03:01-B1*04:02L
  REGION 1..10: note = CONT. FROM ABOVE: HLA-DRB1*03:01L HLA-DRB1*14:01L HLA-DRB1*11:02 L HLA-DRB1*14:02L HLA-DRB1*11:01L HLA-DQA1*01-B1*05L HLA-DQA1*05 :05-B1*03:19M HLA-DQA1*05:01-B1*02:01M HLA-DRB4*01:01L HLA-DPA1* 01:03-B1*04:01L HLA-DQA1*05:05-B1*03:116L
  REGION 1..10: note = CONT. FROM ABOVE: HLA-DPA1*01:03-B1*04:02L HLA-DRB1*12:01L HLA-D PA1*02:01-B1*13:01L HLA-DPA1*03:01-B1*105:01L HLA-DPA1*01:03-B1* 104:01L HLA-DPA1*01:02-B1*04:01L HLA-DRB1*10:01L HLA-DRB1*16:01M HLA-DQA1*01:03-B1*06:01L HLA-DRB1*08:02L
  REGION 1..10: note = CONT. FROM ABOVE: HLA-DQA1*02:01-B1*03:03L HLA-DRB1*15:03L
  source 1..10: note = Severe acute respiratory syndrome coronavirus 2
TQYNRYLALY

SEQ ID NO: 9008 - protein, 16 aa, Severe acute respiratory syndrome-related coronavirus
  REGION 1..16: note = Table B: HLA-DQA1*03:02-B1*03:03L HLA-DRB1*04:01L HLA-DRB1*09:01L
  source 1..16: note = Severe acute respiratory syndrome coronavirus 2
YNRYLALYNKYKYFSG

SEQ ID NO: 9009 - protein, 13 aa, Severe acute respiratory syndrome-related coronavirus
  REGION 1..13: note = Table B: HLA-DQA1*03:02-B1*03:03L HLA-DQA1*05:01-B1*03:01L HLA-DRB1*13:02L HLA-DRB1*04:04L HLA-DRB1*08:04L HLA-DPA1*01:03-B1*03:01L HLA-DPA1*03:01-B1*04:02L HLA-DRB1*14:01L HLA-DRB1*11:04L HLA-DRB1*11:01L
  REGION 1..13: note = CONT. FROM ABOVE: HLA-DQA1*05:01-B1*02:01L HLA-DRB1*09:01L HLA-D RB1*12:02L HLA-DRB3*01:01L HLA-DPA1*03:01-B1*105:01L HLA-DRB1*14 :54L HLA-DPA1*01:03-B1*104:01L HLA-DQA1*05:05-B1*03:01L HLA-DPA1 *01:02-B1*04:01L HLA-DRB1*07:01L HLA-DRB1*10:01L
  source 1..13: note = Severe acute respiratory syndrome coronavirus 2
YNKYKYFSGAMDT

SEQ ID NO: 9010 - protein, 13 aa, Severe acute respiratory syndrome-related coronavirus
  REGION 1..13: note = Table B: HLA-DQA1*03:02-B1*03:03L HLA-DQA1*05:01-B1*03:01L HLA-DRB1*13:02L HLA-DRB1*04:04L HLA-DRB1*08:04L HLA-DPA1*01:03-B1*03:01L HLA-DPA1*03:01-B1*04:02L HLA-DRB1*14:01L HLA-DQA1*05:05-B1*03:19L
  REGION 1..13: note = CONT. FROM ABOVE: HLA-DPA1*01:03-B1*04:01L HLA-DPA1*01:03-B1*04: 02L HLA-DPA1*01:03-B1*104:01L HLA-DQA1*05:05-B1*03:01L HLA-DPA1* 01:02-B1*04:01L HLA-DRB1*07:01L HLA-DRB1*10:01L HLA-DQA1*01:03-B 1*06:01L
  source 1..13: note = Severe acute respiratory syndrome coronavirus 2
NKYKYFSGAMDTT

SEQ ID NO: 9011 - protein, 12 aa, Severe acute respiratory syndrome-related coronavirus
  REGION 1..12: note = Table B: HLA-DQA1*03:02-B1*03:03L HLA-DQA1*05:01-B1*03:01L HLA-DRB1*13:03L HLA-DRB1*01:03L HLA-DRB1*04:02L HLA-DRB1*04:05L HLA-DQA1*01:02-B1*06:02L HLA-DRB1*01:02L HLA-DRB4*03:01NL HLA-DPA1*01:03-B1*03:01L HLA-DPA1*03:01-B1*04:02L
  REGION 1..12: note = CONT. FROM ABOVE: HLA-DQA1*05:05-B1*03:19L HLA-DRB1*04:10L HLA-D RB1*12:01L HLA-DPA1*03:01-B1*105:01L HLA-DQA1*05:05-B1*03:01L HL A-DRB1*14:17L HLA-DRB1*16:01L HLA-DQA1*01:03-B1*06:01L HLA-DRB1* 04:08L HLA-DRB1*15:03L
  source 1..12: note = Severe acute respiratory syndrome coronavirus 2
YKYFSGAMDTTS

SEQ ID NO: 9012 - protein, 12 aa, Severe acute respiratory syndrome-related coronavirus
  REGION 1..12: note = Table B: HLA-DQA1*03:02-B1*03:03L HLA-DRB1*04:03L HLA-DRB1*13:02L HLA-DRB1*04:05L HLA-DRB1*14:01L HLA-DQA1*05:05-B1*03:116L HLA-DRB1*12:01L HLA-DQA1*03:01-B1*03:02L HLA-DQA1*05:05-B1*03:01L
  REGION 1..12: note = CONT. FROM ABOVE: HLA-DPA1*01:02-B1*04:01L HLA-DRB1*08:02L
  source 1..12: note = Severe acute respiratory syndrome coronavirus 2
KYFSGAMDTTSY

SEQ ID NO: 9013 - protein, 11 aa, Severe acute respiratory syndrome-related coronavirus
  REGION 1..11: note = Table B: HLA-DQA1*03:02-B1*03:03L HLA-DRB1*04:01L HLA-DRB1*13:02L HLA-DRB1*01:03L HLA-DRB1*04:04L HLA-DRB1*04:05L HLA-DRB1*01:02L HLA-DRB1*14:01L HLA-DRB1*11:04L HLA-DRB1*14:02L HLA-DQA1*01:01-B1*05:01L HLA-DRB1*08:01L HLA-DRB5*01:01L
  REGION 1..11: note = CONT. FROM ABOVE: HLA-DRB1*04:10L HLA-DPA1*01:03-B1*04:02L HLA-D PA1*03:01-B1*105:01L HLA-DRB1*14:54L HLA-DRB1*10:01L HLA-DRB1*04 :08L HLA-DRB1*15:03L
  source 1..11: note = Severe acute respiratory syndrome coronavirus 2
FSGAMDTTSYR

SEQ ID NO: 9014 - protein, 10 aa, Severe acute respiratory syndrome-related coronavirus
  REGION 1..10: note = Table B: HLA-DQA1*03:02-B1*03:03L HLA-DRB1*04:03L HLA-DRB1*13:03L HLA-DRB1*01:03L HLA-DRB1*04:02L HLA-DRB4*03:01NL HLA-DRB1*14:01L HLA-DRB1*14:02L HLA-DQA1*01-B1*05L HLA-DQA1*05:01-B1*02:01L HLA-DRB1*12:01L
  REGION 1..10: note = CONT. FROM ABOVE: HLA-DPA1*03:01-B1*105:01L HLA-DQA1*03:01-B1*03 :02L HLA-DRB1*14:54L HLA-DRB1*14:17L HLA-DPA1*01:02-B1*04:01L HL A-DRB1*16:01L HLA-DQA1*02:01-B1*03:03L
  source 1..10: note = Severe acute respiratory syndrome coronavirus 2
AMDTTSYREA

SEQ ID NO: 9015 - protein, 10 aa, Severe acute respiratory syndrome-related coronavirus
  REGION 1..10: note = Table B: HLA-DQA1*03:02-B1*03:03L HLA-DRB1*04:03L HLA-DQA1*01-B1*05L HLA-DQA1*05:01-B1*02:01L HLA-DQA1*03:01-B1*03:02L HLA-DPA1*01:02-B1*04:01L HLA-DRB1*16:01L HLA-DQA1*01:03-B1*06:01L
  REGION 1..10: note = CONT. FROM ABOVE: HLA-DQA1*02:01-B1*03:03L
  source 1..10: note = Severe acute respiratory syndrome coronavirus 2
MDTTSYREAA

SEQ ID NO: 9016 - protein, 13 aa, Severe acute respiratory syndrome-related coronavirus
  REGION 1..13: note = Table B: HLA-DQA1*03:02-B1*03:03L HLA-DRB1*13:03L HLA-DRB1*04:04L HLA-DRB4*03:01NL HLA-DRB1*12:01L HLA-DRB1*14:54L HLA-DRB1*04:08L HLA-DQA1*02:01-B1*03:03L HLA-DRB1*15:03L
  source 1..13: note = Severe acute respiratory syndrome coronavirus 2
AKALNDFSNSGSD

SEQ ID NO: 9017 - protein, 10 aa, Severe acute respiratory syndrome-related coronavirus
  REGION 1..10: note = Table B: HLA-DQA1*03:02-B1*03:03L
  source 1..10: note = Severe acute respiratory syndrome coronavirus 2
DFSNSGSDVL

SEQ ID NO: 9018 - protein, 13 aa, Severe acute respiratory syndrome-related coronavirus
  REGION 1..13: note = Table B: HLA-DQA1*03:02-B1*03:03L HLA-DQA1*03:01-B1*03:02L HLA-DQA1*05:05-B1*03:01L HLA-DQA1*02:01-B1*03:03L
  source 1..13: note = Severe acute respiratory syndrome coronavirus 2
FSNSGSDVLYQPP

SEQ ID NO: 9019 - protein, 13 aa, Severe acute respiratory syndrome-related coronavirus
  REGION 1..13: note = Table B: HLA-DQA1*03:02-B1*03:03L HLA-DQA1*05:05-B1*03:01L
  source 1..13: note = Severe acute respiratory syndrome coronavirus 2
SNSGSDVLYQPPQ

SEQ ID NO: 9020 - protein, 13 aa, Severe acute respiratory syndrome-related coronavirus
  REGION 1..13: note = Table B: HLA-DQA1*03:02-B1*03:03L HLA-DRB1*04:03L HLA-DQA1*01-B1*05L HLA-DQA1*05:01-B1*02:01L HLA-DQA1*03:01-B1*03:02L HLA-DQA1*02:01-B1*03:03L
  source 1..13: note = Severe acute respiratory syndrome coronavirus 2
SGSDVLYQPPQTS

SEQ ID NO: 9021 - protein, 10 aa, Severe acute respiratory syndrome-related coronavirus
  REGION 1..10: note = Table B: HLA-DQA1*03:02-B1*03:03M HLA-DQA1*05:01-B1*03:01M HLA-DRB1*04:01L HLA-DRB1*13:03L HLA-DRB1*01:03L HLA-DRB1*04:04L HLA-DRB1*04:05L HLA-DQA1*01:02-B1*06:02L HLA-DRB1*01:01L HLA-DRB1*01:02L HLA-DRB1*08:77L HLA-DPA1*03:01-B1*04:02L
  REGION 1..10: note = CONT. FROM ABOVE: HLA-DRB1*14:01L HLA-DRB1*11:02L HLA-DRB1*14:02 L HLA-DRB1*08:01L HLA-DQA1*05:05-B1*03:19M HLA-DQA1*05:01-B1*02: 01L HLA-DRB4*01:01L HLA-DPA1*01:03-B1*04:01L HLA-DQA1*05:05-B1*0 3:116M HLA-DRB1*09:01L HLA-DPA1*01:03-B1*04:02L HLA-DRB1*12:01L
  REGION 1..10: note = CONT. FROM ABOVE: HLA-DPA1*02:01-B1*13:01M HLA-DPA1*03:01-B1*105 :01L HLA-DQA1*03:01-B1*03:02L HLA-DPA1*01:03-B1*104:01L HLA-DPA1 *01:02-B1*04:01L HLA-DRB1*07:01L HLA-DRB1*10:01L HLA-DRB1*16:01L HLA-DQA1*01:03-B1*06:01M HLA-DRB1*08:03L
  REGION 1..10: note = CONT. FROM ABOVE: HLA-DQA1*02:01-B1*03:03M HLA-DRB1*15:03M
  source 1..10: note = Severe acute respiratory syndrome coronavirus 2
VLYQPPQTSI

SEQ ID NO: 9022 - protein, 13 aa, Severe acute respiratory syndrome-related coronavirus
  REGION 1..13: note = Table B: HLA-DQA1*03:02-B1*03:03L HLA-DQA1*03:01-B1*03:02L
  source 1..13: note = Severe acute respiratory syndrome coronavirus 2
YQPPQTSITSAVL

SEQ ID NO: 9023 - protein, 13 aa, Severe acute respiratory syndrome-related coronavirus
  REGION 1..13: note = Table B: HLA-DQA1*03:02-B1*03:03L HLA-DQA1*05:01-B1*03:01L HLA-DQA1*05:05-B1*03:19L HLA-DQA1*05:01-B1*02:01L HLA-DQA1*03:01-B1*03:02L HLA-DQA1*05:05-B1*03:01L HLA-DQA1*01:03-B1*06:01L HLA-DQA1*02:01-B1*03:03L
  source 1..13: note = Severe acute respiratory syndrome coronavirus 2
QPPQTSITSAVLQ

SEQ ID NO: 9024 - protein, 14 aa, Severe acute respiratory syndrome-related coronavirus
  REGION 1..14: note = Table B: HLA-DQA1*03:02-B1*03:03L HLA-DQA1*05:01-B1*03:01L HLA-DQA1*05:05-B1*03:19L HLA-DPA1*03:01-B1*105:01L HLA-DQA1*05:05-B1*03:01L
  source 1..14: note = Severe acute respiratory syndrome coronavirus 2
PPQTSITSAVLQSG

SEQ ID NO: 9025 - protein, 10 aa, Severe acute respiratory syndrome-related coronavirus
  REGION 1..10: note = Table B: HLA-DQA1*03:02-B1*03:03L HLA-DQA1*05:01-B1*03:01L HLA-DQA1*01:02-B1*06:02L HLA-DPA1*03:01-B1*04:02L HLA-DQA1*05:05-B1*03:19L HLA-DQA1*05:01-B1*02:01L HLA-DPA1*03:01-B1*105:01L HLA-DQA1*05:05-B1*03:01L
  REGION 1..10: note = CONT. FROM ABOVE: HLA-DQA1*01:03-B1*06:01L HLA-DQA1*02:01-B1*03: 03L HLA-DRB1*15:03L
  source 1..10: note = Severe acute respiratory syndrome coronavirus 2
ITSAVLQSGF

SEQ ID NO: 9026 - protein, 10 aa, Severe acute respiratory syndrome-related coronavirus
  REGION 1..10: note = Table B: HLA-DQA1*03:02-B1*03:03L HLA-DQA1*05:01-B1*03:01L HLA-DQA1*01:02-B1*06:02L HLA-DQA1*05:05-B1*03:19L HLA-DRB1*12:01L HLA-DPA1*03:01-B1*105:01L HLA-DQA1*03:01-B1*03:02L HLA-DQA1*05:05-B1*03:01L
  REGION 1..10: note = CONT. FROM ABOVE: HLA-DQA1*01:03-B1*06:01M HLA-DQA1*02:01-B1*03: 03L
  source 1..10: note = Severe acute respiratory syndrome coronavirus 2
TSAVLQSGFR

SEQ ID NO: 9027 - protein, 10 aa, Severe acute respiratory syndrome-related coronavirus
  REGION 1..10: note = Table B: HLA-DQA1*03:02-B1*03:03L HLA-DQA1*05:01-B1*03:01L HLA-DRB1*04:03L HLA-DRB1*13:02L HLA-DRB1*13:03L HLA-DRB1*01:03L HLA-DRB1*04:02L HLA-DRB1*04:05L HLA-DRB1*01:02L HLA-DRB4*03:01NL HLA-DRB1*14:01L HLA-DQA1*01-B1*05L HLA-DQA1*05:05-B1*03:19L
  REGION 1..10: note = CONT. FROM ABOVE: HLA-DQA1*05:01-B1*02:01L HLA-DRB1*12:01L HLA-D PA1*03:01-B1*105:01L HLA-DQA1*03:01-B1*03:02L HLA-DRB1*14:54L HL A-DQA1*05:05-B1*03:01L HLA-DRB1*14:17L HLA-DPA1*01:02-B1*04:01L HLA-DRB1*16:01L HLA-DQA1*01:03-B1*06:01L
  REGION 1..10: note = CONT. FROM ABOVE: HLA-DQA1*02:01-B1*03:03L HLA-DRB1*15:03L
  source 1..10: note = Severe acute respiratory syndrome coronavirus 2
MAFPSGKVEG

SEQ ID NO: 9028 - protein, 12 aa, Severe acute respiratory syndrome-related coronavirus
  REGION 1..12: note = Table B: HLA-DQA1*03:02-B1*03:03L HLA-DQA1*05:01-B1*03:01L HLA-DQA1*01:02-B1*06:02L HLA-DQA1*05:05-B1*03:19L HLA-DQA1*05:05-B1*03:01L HLA-DQA1*01:03-B1*06:01L HLA-DQA1*02:01-B1*03:03L
  source 1..12: note = Severe acute respiratory syndrome coronavirus 2
FPSGKVEGCMVQ

SEQ ID NO: 9029 - protein, 12 aa, Severe acute respiratory syndrome-related coronavirus
  REGION 1..12: note = Table B: HLA-DQA1*03:02-B1*03:03L HLA-DQA1*03:01-B1*03:02L
  source 1..12: note = Severe acute respiratory syndrome coronavirus 2
TSEDMLNPNYED

SEQ ID NO: 9030 - protein, 10 aa, Severe acute respiratory syndrome-related coronavirus
  REGION 1..10: note = Table B: HLA-DQA1*03:02-B1*03:03L HLA-DQA1*05:01-B1*02:01L HLA-DPA1*03:01-B1*105:01L HLA-DQA1*03:01-B1*03:02L
  source 1..10: note = Severe acute respiratory syndrome coronavirus 2
DMLNPNYEDL

SEQ ID NO: 9031 - protein, 10 aa, Severe acute respiratory syndrome-related coronavirus
  REGION 1..10: note = Table B: HLA-DQA1*03:02-B1*03:03L HLA-DQA1*01-B1*05L HLA-DQA1*05:01-B1*02:01L HLA-DPA1*03:01-B1*105:01L HLA-DQA1*03:01-B1*03:02L HLA-DQA1*01:03-B1*06:01L HLA-DQA1*02:01-B1*03:03L HLA-DRB1*15:03L
  source 1..10: note = Severe acute respiratory syndrome coronavirus 2
MLNPNYEDLL

SEQ ID NO: 9032 - protein, 13 aa, Severe acute respiratory syndrome-related coronavirus
  REGION 1..13: note = Table B: HLA-DQA1*03:02-B1*03:03L HLA-DQA1*05:01-B1*03:01L HLA-DRB1*13:03L HLA-DRB1*01:03L HLA-DRB1*01:02L HLA-DRB1*08:04L HLA-DPA1*01:03-B1*03:01L HLA-DPA1*03:01-B1*04:02L HLA-DRB1*14:01L HLA-DQA1*01:01-B1*05:01L HLA-DRB1*08:01L
  REGION 1..13: note = CONT. FROM ABOVE: HLA-DQA1*05:05-B1*03:19L HLA-DPA1*01:03-B1*04: 02L HLA-DRB1*12:01L HLA-DPA1*02:01-B1*13:01L HLA-DPA1*03:01-B1*1 05:01L HLA-DQA1*05:05-B1*03:01L HLA-DRB1*14:17L HLA-DPA1*01:02-B 1*04:01L HLA-DRB1*15:03L
  source 1..13: note = Severe acute respiratory syndrome coronavirus 2
NPNYEDLLIRKSN

SEQ ID NO: 9033 - protein, 18 aa, Severe acute respiratory syndrome-related coronavirus
  REGION 1..18: note = Table B: HLA-DQA1*03:02-B1*03:03L HLA-DPA1*03:01-B1*04:02L HLA-DPA1*01:03-B1*04:02L
  source 1..18: note = Severe acute respiratory syndrome coronavirus 2
EDLLIRKSNHNFLVQAGN

SEQ ID NO: 9034 - protein, 10 aa, Severe acute respiratory syndrome-related coronavirus
  REGION 1..10: note = Table B: HLA-DQA1*03:02-B1*03:03L HLA-DRB1*04:03L HLA-DQA1*01-B1*05L HLA-DQA1*05:01-B1*02:01L HLA-DQA1*03:01-B1*03:02L HLA-DQA1*02:01-B1*03:03L
  source 1..10: note = Severe acute respiratory syndrome coronavirus 2
NFLVQAGNVQ

SEQ ID NO: 9035 - protein, 10 aa, Severe acute respiratory syndrome-related coronavirus
  REGION 1..10: note = Table B: HLA-DQA1*03:02-B1*03:03M HLA-DQA1*05:01-B1*03:01M HLA-DRB1*04:01L HLA-DRB1*04:03L HLA-DRB1*13:02L HLA-DRB1*13:03L HLA-DRB1*01:03L HLA-DRB1*04:02L HLA-DRB1*04:04L HLA-DRB1*04:05L HLA-DQA1*01:02-B1*06:02L HLA-DRB1*01:02L HLA-DRB1*08:77L
  REGION 1..10: note = CONT. FROM ABOVE: HLA-DRB3*02:01L HLA-DPA1*03:01-B1*04:02L HLA-D RB1*14:01L HLA-DRB1*14:02M HLA-DRB1*08:01L HLA-DQA1*01-B1*05L HL A-DQA1*05:05-B1*03:19L HLA-DQA1*05:01-B1*02:01L HLA-DRB4*01:01L HLA-DPA1*01:03-B1*04:01L HLA-DQA1*05:05-B1*03:116M
  REGION 1..10: note = CONT. FROM ABOVE: HLA-DRB1*09:01L HLA-DPA1*01:03-B1*04:02L HLA-D RB1*12:01L HLA-DPA1*02:01-B1*13:01L HLA-DPA1*03:01-B1*105:01L HL A-DQA1*03:01-B1*03:02M HLA-DPA1*01:03-B1*104:01L HLA-DPA1*01:02- B1*04:01L HLA-DRB1*07:01L HLA-DRB1*10:01L HLA-DRB1*16:01L
  REGION 1..10: note = CONT. FROM ABOVE: HLA-DQA1*01:03-B1*06:01L HLA-DRB1*08:03L HLA-D QA1*02:01-B1*03:03M HLA-DRB1*15:03M
  source 1..10: note = Severe acute respiratory syndrome coronavirus 2
FLVQAGNVQL

SEQ ID NO: 9036 - protein, 10 aa, Severe acute respiratory syndrome-related coronavirus
  REGION 1..10: note = Table B: HLA-DQA1*03:02-B1*03:03L HLA-DQA1*05:01-B1*03:01L HLA-DQA1*05:05-B1*03:19L HLA-DPA1*03:01-B1*105:01L HLA-DPA1*01:03-B1*104:01L HLA-DQA1*01:03-B1*06:01L HLA-DQA1*02:01-B1*03:03L HLA-DRB1*15:03L
  source 1..10: note = Severe acute respiratory syndrome coronavirus 2
VQAGNVQLRV

SEQ ID NO: 9037 - protein, 13 aa, Severe acute respiratory syndrome-related coronavirus
  REGION 1..13: note = Table B: HLA-DQA1*03:02-B1*03:03L HLA-DRB1*14:04L HLA-DPA1*03:01-B1*04:02L HLA-DRB1*11:02L HLA-DQA1*05:05-B1*03:19L HLA-DPA1*01:03-B1*04:02L HLA-DPA1*01:03-B1*02:01L HLA-DRB1*07:01L HLA-DRB1*08:02L
  source 1..13: note = Severe acute respiratory syndrome coronavirus 2
NVQLRVIGHSMQN

SEQ ID NO: 9038 - protein, 10 aa, Severe acute respiratory syndrome-related coronavirus
  REGION 1..10: note = Table B: HLA-DQA1*03:02-B1*03:03L HLA-DRB1*16:01L HLA-DQA1*02:01-B1*03:03L
  source 1..10: note = Severe acute respiratory syndrome coronavirus 2
RVIGHSMQNC

SEQ ID NO: 9039 - protein, 10 aa, Severe acute respiratory syndrome-related coronavirus
  REGION 1..10: note = Table B: HLA-DQA1*03:02-B1*03:03L HLA-DQA1*05:01-B1*03:01L HLA-DRB1*04:01L HLA-DRB1*04:03L HLA-DRB1*13:02L HLA-DRB1*13:03L HLA-DRB1*01:03L HLA-DRB1*04:02L HLA-DRB1*04:04L HLA-DRB1*04:05L HLA-DRB1*01:01L HLA-DRB1*01:02L HLA-DRB4*03:01NL HLA-DRB1*08:04L
  REGION 1..10: note = CONT. FROM ABOVE: HLA-DRB1*08:77L HLA-DRB3*02:01L HLA-DRB1*14:01 L HLA-DRB1*11:03L HLA-DRB1*11:04L HLA-DRB1*14:02L HLA-DQA1*01:01 -B1*05:01L HLA-DRB1*08:01L HLA-DRB1*11:01L HLA-DRB5*01:01L HLA-D QA1*01-B1*05L HLA-DQA1*05:05-B1*03:19L HLA-DQA1*05:01-B1*02:01L
  REGION 1..10: note = CONT. FROM ABOVE: HLA-DRB1*04:10L HLA-DPA1*01:03-B1*04:02L HLA-D RB1*12:01L HLA-DRB1*12:02L HLA-DPA1*03:01-B1*105:01L HLA-DQA1*03 :01-B1*03:02L HLA-DRB1*14:54L HLA-DQA1*05:05-B1*03:01L HLA-DRB1* 14:17L HLA-DPA1*01:02-B1*04:01L HLA-DRB1*10:01L HLA-DRB1*16:01L
  REGION 1..10: note = CONT. FROM ABOVE: HLA-DQA1*01:03-B1*06:01L HLA-DRB1*04:08L HLA-D QA1*02:01-B1*03:03L
  source 1..10: note = Severe acute respiratory syndrome coronavirus 2
VDTANPKTPK

SEQ ID NO: 9040 - protein, 10 aa, Severe acute respiratory syndrome-related coronavirus
  REGION 1..10: note = Table B: HLA-DQA1*03:02-B1*03:03L HLA-DQA1*05:01-B1*03:01L HLA-DRB1*13:02L HLA-DRB1*13:03M HLA-DRB1*01:03L HLA-DQA1*01:02-B1*06:02H HLA-DRB1*01:01L HLA-DRB4*03:01NL HLA-DRB1*08:77L HLA-DPA1*01:03-B1*03:01L
  REGION 1..10: note = CONT. FROM ABOVE: HLA-DPA1*03:01-B1*04:02L HLA-DRB1*03:01L HLA-D RB1*14:01L HLA-DRB1*11:03L HLA-DRB1*11:04L HLA-DRB1*14:02M HLA-D RB1*08:01L HLA-DRB1*11:01L HLA-DRB5*01:01L HLA-DQA1*01-B1*05L HL A-DQA1*05:05-B1*03:19L HLA-DRB4*02:01NL HLA-DQA1*05:01-B1*02:01M
  REGION 1..10: note = CONT. FROM ABOVE: HLA-DRB4*01:01L HLA-DPA1*01:03-B1*04:01M HLA-D QA1*05:05-B1*03:116L HLA-DRB1*09:01L HLA-DPA1*01:03-B1*04:02L HL A-DRB1*12:01L HLA-DPA1*02:01-B1*13:01L HLA-DPA1*03:01-B1*105:01M HLA-DPA1*01:03-B1*104:01L HLA-DQA1*05:05-B1*03:01L
  REGION 1..10: note = CONT. FROM ABOVE: HLA-DRB1*14:17L HLA-DPA1*01:02-B1*04:01L HLA-D RB1*10:01L HLA-DRB1*16:01L HLA-DQA1*01:03-B1*06:01L HLA-DRB1*08: 02L HLA-DQA1*02:01-B1*03:03L HLA-DRB1*15:01L HLA-DRB1*15:03L
  source 1..10: note = Severe acute respiratory syndrome coronavirus 2
DTANPKTPKY

SEQ ID NO: 9041 - protein, 11 aa, Severe acute respiratory syndrome-related coronavirus
  REGION 1..11: note = Table B: HLA-DQA1*03:02-B1*03:03L HLA-DRB1*13:03L HLA-DRB1*01:03L HLA-DRB1*04:02L HLA-DRB1*04:05L HLA-DRB1*01:02L HLA-DRB4*03:01NL HLA-DRB1*08:04L HLA-DRB1*14:01L HLA-DRB1*08:01L HLA-DQA1*05:05-B1*03:19L HLA-DQA1*05:01-B1*02:01L
  REGION 1..11: note = CONT. FROM ABOVE: HLA-DRB1*04:10L HLA-DPA1*01:03-B1*04:02L HLA-D RB1*12:01L HLA-DPA1*03:01-B1*105:01L HLA-DRB1*14:54L HLA-DQA1*05 :05-B1*03:01L HLA-DPA1*01:02-B1*04:01L HLA-DRB1*16:01L HLA-DRB1* 04:08L HLA-DRB1*15:03L
  source 1..11: note = Severe acute respiratory syndrome coronavirus 2
YKFVRIQPGQT

SEQ ID NO: 9042 - protein, 10 aa, Severe acute respiratory syndrome-related coronavirus
  REGION 1..10: note = Table B: HLA-DQA1*03:02-B1*03:03L HLA-DQA1*05:01-B1*03:01L HLA-DRB1*04:03L HLA-DRB1*13:02L HLA-DRB1*13:03L HLA-DRB1*01:03L HLA-DRB1*04:02L HLA-DRB1*04:05L HLA-DQA1*01:02-B1*06:02L HLA-DRB1*01:01L HLA-DRB1*01:02L HLA-DRB4*03:01NL HLA-DRB1*08:77L
  REGION 1..10: note = CONT. FROM ABOVE: HLA-DRB3*02:01L HLA-DPA1*01:03-B1*03:01L HLA-D PA1*03:01-B1*04:02L HLA-DRB1*14:01L HLA-DRB1*11:03L HLA-DRB1*14: 02L HLA-DQA1*01:01-B1*05:01L HLA-DRB1*11:01L HLA-DQA1*01-B1*05L HLA-DQA1*05:05-B1*03:19L HLA-DQA1*05:01-B1*02:01L
  REGION 1..10: note = CONT. FROM ABOVE: HLA-DRB4*01:01L HLA-DPA1*01:03-B1*04:01L HLA-D QA1*05:05-B1*03:116L HLA-DPA1*01:03-B1*04:02L HLA-DRB1*12:01L HL A-DPA1*02:01-B1*13:01L HLA-DPA1*03:01-B1*105:01L HLA-DQA1*03:01- B1*03:02L HLA-DQA1*05:05-B1*03:01L HLA-DPA1*01:02-B1*04:01L
  REGION 1..10: note = CONT. FROM ABOVE: HLA-DRB1*07:01L HLA-DRB1*10:01L HLA-DRB1*16:01 L HLA-DQA1*01:03-B1*06:01L HLA-DRB1*08:02L HLA-DQA1*02:01-B1*03: 03L HLA-DRB1*15:03L
  source 1..10: note = Severe acute respiratory syndrome coronavirus 2
FVRIQPGQTF

SEQ ID NO: 9043 - protein, 10 aa, Severe acute respiratory syndrome-related coronavirus
  REGION 1..10: note = Table B: HLA-DQA1*03:02-B1*03:03M HLA-DQA1*05:01-B1*03:01L HLA-DRB1*13:02L HLA-DRB1*13:03L HLA-DRB1*01:03L HLA-DRB1*04:05L HLA-DQA1*01:02-B1*06:02L HLA-DRB1*01:02L HLA-DPA1*03:01-B1*04:02L HLA-DRB1*14:01L HLA-DRB1*11:02L
  REGION 1..10: note = CONT. FROM ABOVE: HLA-DRB1*14:02L HLA-DRB1*08:01L HLA-DQA1*05:05 -B1*03:19M HLA-DQA1*05:01-B1*02:01L HLA-DQA1*05:05-B1*03:116L HL A-DRB1*09:01L HLA-DPA1*01:03-B1*04:02L HLA-DPA1*02:01-B1*13:01L HLA-DPA1*03:01-B1*105:01L HLA-DQA1*03:01-B1*03:02L
  REGION 1..10: note = CONT. FROM ABOVE: HLA-DPA1*01:03-B1*104:01L HLA-DPA1*01:02-B1*04 :01L HLA-DRB1*07:01L HLA-DRB1*10:01L HLA-DRB1*16:01L HLA-DQA1*01 :03-B1*06:01L HLA-DRB1*08:03L HLA-DQA1*02:01-B1*03:03M HLA-DRB1* 15:03L
  source 1..10: note = Severe acute respiratory syndrome coronavirus 2
RIQPGQTFSV

SEQ ID NO: 9044 - protein, 10 aa, Severe acute respiratory syndrome-related coronavirus
  REGION 1..10: note = Table B: HLA-DQA1*03:02-B1*03:03L HLA-DQA1*05:01-B1*03:01L HLA-DQA1*01:02-B1*06:02L HLA-DQA1*05:05-B1*03:19L HLA-DQA1*03:01-B1*03:02L HLA-DQA1*01:03-B1*06:01L HLA-DQA1*02:01-B1*03:03L
  source 1..10: note = Severe acute respiratory syndrome coronavirus 2
IQPGQTFSVL

SEQ ID NO: 9045 - protein, 17 aa, Severe acute respiratory syndrome-related coronavirus
  REGION 1..17: note = Table B: HLA-DQA1*03:02-B1*03:03L HLA-DQA1*05:01-B1*03:01L HLA-DRB1*04:01L HLA-DRB1*13:02L HLA-DRB1*04:02L HLA-DRB1*04:04L HLA-DRB1*04:05L HLA-DRB1*01:01L HLA-DRB1*14:02L HLA-DRB1*11:01L HLA-DQA1*01-B1*05L HLA-DQA1*05:05-B1*03:19L
  REGION 1..17: note = CONT. FROM ABOVE: HLA-DPA1*01:03-B1*04:02L HLA-DRB1*12:01L HLA-D QA1*03:01-B1*03:02L HLA-DQA1*01:03-B1*06:01L HLA-DQA1*02:01-B1*0 3:03L
  source 1..17: note = Severe acute respiratory syndrome coronavirus 2
QPGQTFSVLACYNGSPS

SEQ ID NO: 9046 - protein, 10 aa, Severe acute respiratory syndrome-related coronavirus
  REGION 1..10: note = Table B: HLA-DQA1*03:02-B1*03:03L
  source 1..10: note = Severe acute respiratory syndrome coronavirus 2
ACYNGSPSGV

SEQ ID NO: 9047 - protein, 10 aa, Severe acute respiratory syndrome-related coronavirus
  REGION 1..10: note = Table B: HLA-DQA1*03:02-B1*03:03L HLA-DQA1*05:01-B1*03:01L HLA-DRB1*04:03L HLA-DRB1*13:02L HLA-DRB1*13:03L HLA-DRB1*01:03L HLA-DRB1*04:02L HLA-DRB4*03:01NL HLA-DRB1*08:77L HLA-DRB1*11:03L HLA-DQA1*05:05-B1*03:19L HLA-DQA1*05:01-B1*02:01L
  REGION 1..10: note = CONT. FROM ABOVE: HLA-DRB1*12:01L HLA-DRB1*12:02L HLA-DQA1*03:01 -B1*03:02L HLA-DRB1*14:54L HLA-DQA1*05:05-B1*03:01L HLA-DRB1*14: 17L HLA-DRB1*16:01L HLA-DQA1*01:03-B1*06:01L HLA-DQA1*02:01-B1*0 3:03L
  source 1..10: note = Severe acute respiratory syndrome coronavirus 2
YNGSPSGVYQ

SEQ ID NO: 9048 - protein, 13 aa, Severe acute respiratory syndrome-related coronavirus
  REGION 1..13: note = Table B: HLA-DQA1*03:02-B1*03:03L HLA-DQA1*05:01-B1*03:01L HLA-DRB1*04:03L HLA-DRB1*13:03L HLA-DRB1*01:03L HLA-DRB1*04:02L HLA-DRB1*04:05L HLA-DRB1*01:02L HLA-DQA1*01:01-B1*05:01L HLA-DRB1*08:01L HLA-DQA1*05:05-B1*03:19L HLA-DRB1*12:01L
  REGION 1..13: note = CONT. FROM ABOVE: HLA-DPA1*03:01-B1*105:01L HLA-DQA1*03:01-B1*03 :02L HLA-DQA1*05:05-B1*03:01L HLA-DPA1*01:02-B1*04:01L HLA-DRB1* 16:01L HLA-DRB1*04:08L HLA-DQA1*02:01-B1*03:03L
  source 1..13: note = Severe acute respiratory syndrome coronavirus 2
SPSGVYQCAMRPN

SEQ ID NO: 9049 - protein, 12 aa, Severe acute respiratory syndrome-related coronavirus
  REGION 1..12: note = Table B: HLA-DQA1*03:02-B1*03:03L HLA-DRB1*04:03L HLA-DRB1*01:03L HLA-DRB1*01:02L HLA-DRB1*08:04L HLA-DRB1*14:01L HLA-DRB1*08:01L HLA-DRB1*11:01L HLA-DQA1*05:05-B1*03:19L HLA-DPA1*01:03-B1*04:02L HLA-DRB1*12:01L HLA-DRB1*16:01L
  REGION 1..12: note = CONT. FROM ABOVE: HLA-DRB1*04:08L HLA-DRB1*15:03L
  source 1..12: note = Severe acute respiratory syndrome coronavirus 2
GVYQCAMRPNFT

SEQ ID NO: 9050 - protein, 14 aa, Severe acute respiratory syndrome-related coronavirus
  REGION 1..14: note = Table B: HLA-DQA1*03:02-B1*03:03L HLA-DRB1*04:03L HLA-DRB1*01:03L HLA-DRB1*04:05L HLA-DRB1*01:02L HLA-DPA1*01:03-B1*03:01L HLA-DPA1*01:03-B1*04:02L HLA-DRB1*12:01L HLA-DPA1*02:01-B1*13:01L
  REGION 1..14: note = CONT. FROM ABOVE: HLA-DPA1*03:01-B1*105:01L HLA-DQA1*03:01-B1*03 :02L HLA-DPA1*01:03-B1*104:01L HLA-DRB1*04:08L HLA-DQA1*02:01-B1 *03:03L HLA-DRB1*15:03L
  source 1..14: note = Severe acute respiratory syndrome coronavirus 2
IKGSFLNGSCGSVG

SEQ ID NO: 9051 - protein, 10 aa, Severe acute respiratory syndrome-related coronavirus
  REGION 1..10: note = Table B: HLA-DQA1*03:02-B1*03:03L HLA-DQA1*03:01-B1*03:02L HLA-DRB1*16:01L HLA-DQA1*02:01-B1*03:03L
  source 1..10: note = Severe acute respiratory syndrome coronavirus 2
HMELPTGVHA

SEQ ID NO: 9052 - protein, 10 aa, Severe acute respiratory syndrome-related coronavirus
  REGION 1..10: note = Table B: HLA-DQA1*03:02-B1*03:03L HLA-DQA1*03:01-B1*03:02L
  source 1..10: note = Severe acute respiratory syndrome coronavirus 2
MELPTGVHAG

SEQ ID NO: 9053 - protein, 10 aa, Severe acute respiratory syndrome-related coronavirus
  REGION 1..10: note = Table B: HLA-DQA1*03:02-B1*03:03L HLA-DRB1*04:03L HLA-DRB1*13:03L HLA-DQA1*01-B1*05L HLA-DQA1*03:01-B1*03:02L HLA-DQA1*02:01-B1*03:03L
  source 1..10: note = Severe acute respiratory syndrome coronavirus 2
LPTGVHAGTD

SEQ ID NO: 9054 - protein, 10 aa, Severe acute respiratory syndrome-related coronavirus
  REGION 1..10: note = Table B: HLA-DQA1*03:02-B1*03:03L HLA-DRB1*04:03L HLA-DQA1*05:01-B1*02:01L HLA-DQA1*03:01-B1*03:02L HLA-DRB1*14:17L HLA-DQA1*01:03-B1*06:01L HLA-DQA1*02:01-B1*03:03L
  source 1..10: note = Severe acute respiratory syndrome coronavirus 2
VHAGTDLEGN

SEQ ID NO: 9055 - protein, 10 aa, Severe acute respiratory syndrome-related coronavirus
  REGION 1..10: note = Table B: HLA-DQA1*03:02-B1*03:03L HLA-DQA1*05:05-B1*03:19L
  source 1..10: note = Severe acute respiratory syndrome coronavirus 2
LEGNFYGPFV

SEQ ID NO: 9056 - protein, 12 aa, Severe acute respiratory syndrome-related coronavirus
  REGION 1..12: note = Table B: HLA-DQA1*03:02-B1*03:03L HLA-DRB1*04:03L HLA-DQA1*05:01-B1*02:01L HLA-DQA1*01:03-B1*06:01L
  source 1..12: note = Severe acute respiratory syndrome coronavirus 2
EGNFYGPFVDRQ

SEQ ID NO: 9057 - protein, 12 aa, Severe acute respiratory syndrome-related coronavirus
  REGION 1..12: note = Table B: HLA-DQA1*03:02-B1*03:03L HLA-DRB1*04:03L HLA-DRB1*04:02L HLA-DRB1*04:05L HLA-DQA1*01:02-B1*06:02L HLA-DQA1*05:01-B1*02:01L HLA-DPA1*02:01-B1*13:01L HLA-DPA1*03:01-B1*105:01L HLA-DPA1*01:02-B1*04:01L
  REGION 1..12: note = CONT. FROM ABOVE: HLA-DRB1*16:01L HLA-DQA1*01:03-B1*06:01L HLA-D RB1*04:08L HLA-DRB1*15:03L
  source 1..12: note = Severe acute respiratory syndrome coronavirus 2
GNFYGPFVDRQT

SEQ ID NO: 9058 - protein, 10 aa, Severe acute respiratory syndrome-related coronavirus
  REGION 1..10: note = Table B: HLA-DQA1*03:02-B1*03:03L HLA-DRB1*04:03L HLA-DRB1*13:03L HLA-DRB1*04:02L HLA-DRB1*04:05L HLA-DQA1*01-B1*05L HLA-DQA1*03:01-B1*03:02L HLA-DRB1*14:17L HLA-DRB1*16:01L HLA-DQA1*02:01-B1*03:03L
  source 1..10: note = Severe acute respiratory syndrome coronavirus 2
YGPFVDRQTA

SEQ ID NO: 9059 - protein, 11 aa, Severe acute respiratory syndrome-related coronavirus
  REGION 1..11: note = Table B: HLA-DQA1*03:02-B1*03:03L HLA-DQA1*05:01-B1*03:01L HLA-DRB1*01:03L HLA-DRB1*04:05L HLA-DRB4*03:01NL HLA-DRB1*14:01L HLA-DRB1*08:01L HLA-DQA1*05:01-B1*02:01L HLA-DRB1*12:01L HLA-DRB1*14:54L HLA-DPA1*01:02-B1*04:01L HLA-DRB1*16:01L
  source 1..11: note = Severe acute respiratory syndrome coronavirus 2
GPFVDRQTAQA

SEQ ID NO: 9060 - protein, 11 aa, Severe acute respiratory syndrome-related coronavirus
  REGION 1..11: note = Table B: HLA-DQA1*03:02-B1*03:03L HLA-DQA1*05:01-B1*03:01L HLA-DQA1*03:01-B1*03:02L HLA-DQA1*02:01-B1*03:03L
  source 1..11: note = Severe acute respiratory syndrome coronavirus 2
DRQTAQAAGTD

SEQ ID NO: 9061 - protein, 12 aa, Severe acute respiratory syndrome-related coronavirus
  REGION 1..12: note = Table B: HLA-DQA1*03:02-B1*03:03L HLA-DQA1*05:01-B1*03:01L HLA-DRB1*04:03L HLA-DRB1*04:02L HLA-DQA1*01:02-B1*06:02L HLA-DQA1*01:01-B1*05:01L HLA-DQA1*05:05-B1*03:19L HLA-DQA1*05:01-B1*02:01L HLA-DQA1*03:01-B1*03:02L
  REGION 1..12: note = CONT. FROM ABOVE: HLA-DQA1*05:05-B1*03:01L HLA-DRB1*14:17L HLA-D QA1*01:03-B1*06:01L HLA-DQA1*02:01-B1*03:03L
  source 1..12: note = Severe acute respiratory syndrome coronavirus 2
RQTAQAAGTDTT

SEQ ID NO: 9062 - protein, 10 aa, Severe acute respiratory syndrome-related coronavirus
  REGION 1..10: note = Table B: HLA-DQA1*03:02-B1*03:03L HLA-DQA1*05:05-B1*03:19L HLA-DPA1*01:03-B1*104:01L
  source 1..10: note = Severe acute respiratory syndrome coronavirus 2
AQAAGTDTTI

SEQ ID NO: 9063 - protein, 10 aa, Severe acute respiratory syndrome-related coronavirus
  REGION 1..10: note = Table B: HLA-DQA1*03:02-B1*03:03L HLA-DQA1*05:05-B1*03:19M HLA-DQA1*05:01-B1*02:01L HLA-DRB1*09:01L HLA-DPA1*03:01-B1*105:01L HLA-DQA1*03:01-B1*03:02L HLA-DPA1*01:03-B1*104:01L HLA-DRB1*16:01L
  REGION 1..10: note = CONT. FROM ABOVE: HLA-DQA1*02:01-B1*03:03L HLA-DRB1*15:03L
  source 1..10: note = Severe acute respiratory syndrome coronavirus 2
GTDTTITVNV

SEQ ID NO: 9064 - protein, 10 aa, Severe acute respiratory syndrome-related coronavirus
  REGION 1..10: note = Table B: HLA-DQA1*03:02-B1*03:03L HLA-DQA1*05:01-B1*02:01L HLA-DQA1*03:01-B1*03:02L
  source 1..10: note = Severe acute respiratory syndrome coronavirus 2
TDTTITVNVL

SEQ ID NO: 9065 - protein, 10 aa, Severe acute respiratory syndrome-related coronavirus
  REGION 1..10: note = Table B: HLA-DQA1*03:02-B1*03:03L HLA-DQA1*05:01-B1*03:01L HLA-DRB1*13:03L HLA-DQA1*01:02-B1*06:02M HLA-DRB1*08:77L HLA-DRB1*14:02L HLA-DQA1*05:05-B1*03:19L HLA-DQA1*05:01-B1*02:01L HLA-DRB4*01:01L
  REGION 1..10: note = CONT. FROM ABOVE: HLA-DPA1*01:03-B1*04:01L HLA-DPA1*02:01-B1*13: 01L HLA-DPA1*03:01-B1*105:01L HLA-DQA1*01:03-B1*06:01L HLA-DQA1* 02:01-B1*03:03L HLA-DRB1*15:03L
  source 1..10: note = Severe acute respiratory syndrome coronavirus 2
TTITVNVLAW

SEQ ID NO: 9066 - protein, 10 aa, Severe acute respiratory syndrome-related coronavirus
  REGION 1..10: note = Table B: HLA-DQA1*03:02-B1*03:03L HLA-DQA1*05:01-B1*03:01L HLA-DRB1*04:03L HLA-DRB1*01:03L HLA-DRB1*04:02L HLA-DRB1*04:05L HLA-DQA1*01:02-B1*06:02L HLA-DRB4*03:01NL HLA-DQA1*01:01-B1*05:01L HLA-DQA1*05:05-B1*03:19L
  REGION 1..10: note = CONT. FROM ABOVE: HLA-DQA1*05:01-B1*02:01L HLA-DPA1*01:03-B1*04: 02L HLA-DPA1*03:01-B1*105:01L HLA-DQA1*03:01-B1*03:02L HLA-DQA1* 05:05-B1*03:01L HLA-DRB1*14:17L HLA-DPA1*01:02-B1*04:01L HLA-DRB 1*16:01L HLA-DQA1*01:03-B1*06:01M HLA-DRB1*04:08L
  REGION 1..10: note = CONT. FROM ABOVE: HLA-DQA1*02:01-B1*03:03L
  source 1..10: note = Severe acute respiratory syndrome coronavirus 2
LYAAVINGDR

SEQ ID NO: 9067 - protein, 10 aa, Severe acute respiratory syndrome-related coronavirus
  REGION 1..10: note = Table B: HLA-DQA1*03:02-B1*03:03L HLA-DQA1*05:01-B1*03:01L HLA-DRB1*04:03L HLA-DRB1*13:03L HLA-DRB1*01:03L HLA-DRB1*04:05L HLA-DQA1*01:02-B1*06:02M HLA-DRB1*08:77L HLA-DPA1*01:03-B1*03:01L HLA-DPA1*03:01-B1*04:02L
  REGION 1..10: note = CONT. FROM ABOVE: HLA-DRB1*03:01L HLA-DRB1*14:01L HLA-DRB1*14:02 L HLA-DQA1*01-B1*05L HLA-DQA1*05:05-B1*03:19L HLA-DQA1*05:01-B1* 02:01L HLA-DRB4*01:01L HLA-DPA1*01:03-B1*04:01L HLA-DQA1*05:05-B 1*03:116L HLA-DPA1*01:03-B1*04:02L HLA-DRB1*12:01L
  REGION 1..10: note = CONT. FROM ABOVE: HLA-DPA1*02:01-B1*13:01L HLA-DPA1*03:01-B1*105 :01L HLA-DQA1*03:01-B1*03:02L HLA-DPA1*01:03-B1*104:01L HLA-DQA1 *05:05-B1*03:01L HLA-DPA1*01:02-B1*04:01L HLA-DRB1*10:01L HLA-DR B1*16:01L HLA-DQA1*01:03-B1*06:01L HLA-DQA1*02:01-B1*03:03L
  REGION 1..10: note = CONT. FROM ABOVE: HLA-DRB1*15:03L
  source 1..10: note = Severe acute respiratory syndrome coronavirus 2
YAAVINGDRW

SEQ ID NO: 9068 - protein, 10 aa, Severe acute respiratory syndrome-related coronavirus
  REGION 1..10: note = Table B: HLA-DQA1*03:02-B1*03:03M HLA-DQA1*05:01-B1*03:01L HLA-DQA1*01:02-B1*06:02L HLA-DRB1*01:02L HLA-DPA1*03:01-B1*04:02L HLA-DRB1*14:01L HLA-DRB1*14:02L HLA-DQA1*05:05-B1*03:19L HLA-DQA1*05:01-B1*02:01L
  REGION 1..10: note = CONT. FROM ABOVE: HLA-DQA1*05:05-B1*03:116L HLA-DRB1*09:01L HLA- DPA1*03:01-B1*105:01L HLA-DQA1*03:01-B1*03:02L HLA-DPA1*01:03-B1 *104:01L HLA-DPA1*01:02-B1*04:01L HLA-DQA1*01:03-B1*06:01L HLA-D RB1*08:03L HLA-DQA1*02:01-B1*03:03L HLA-DRB1*15:03L
  source 1..10: note = Severe acute respiratory syndrome coronavirus 2
AVINGDRWFL

SEQ ID NO: 9069 - protein, 10 aa, Severe acute respiratory syndrome-related coronavirus
  REGION 1..10: note = Table B: HLA-DQA1*03:02-B1*03:03L HLA-DQA1*01:02-B1*06:02L HLA-DPA1*03:01-B1*04:02L HLA-DQA1*05:05-B1*03:19L HLA-DPA1*01:03-B1*04:01L HLA-DPA1*01:03-B1*04:02L HLA-DPA1*02:01-B1*13:01L HLA-DPA1*03:01-B1*105:01L
  REGION 1..10: note = CONT. FROM ABOVE: HLA-DPA1*01:02-B1*04:01L HLA-DRB1*16:01L HLA-D QA1*01:03-B1*06:01L HLA-DQA1*02:01-B1*03:03L HLA-DRB1*15:03L
  source 1..10: note = Severe acute respiratory syndrome coronavirus 2
WFLNRFTTTL

SEQ ID NO: 9070 - protein, 11 aa, Severe acute respiratory syndrome-related coronavirus
  REGION 1..11: note = Table B: HLA-DQA1*03:02-B1*03:03L HLA-DRB1*16:01L
  source 1..11: note = Severe acute respiratory syndrome coronavirus 2
NRFTTTLNDFN

SEQ ID NO: 9071 - protein, 10 aa, Severe acute respiratory syndrome-related coronavirus
  REGION 1..10: note = Table B: HLA-DQA1*03:02-B1*03:03L HLA-DQA1*01-B1*05L HLA-DQA1*05:01-B1*02:01L HLA-DQA1*03:01-B1*03:02L
  source 1..10: note = Severe acute respiratory syndrome coronavirus 2
FTTTLNDFNL

SEQ ID NO: 9072 - protein, 10 aa, Severe acute respiratory syndrome-related coronavirus
  REGION 1..10: note = Table B: HLA-DQA1*03:02-B1*03:03M HLA-DQA1*05:01-B1*03:01L HLA-DQA1*01:02-B1*06:02L HLA-DRB1*01:02L HLA-DPA1*03:01-B1*04:02L HLA-DRB1*14:01L HLA-DRB1*14:02L HLA-DQA1*05:05-B1*03:19L HLA-DQA1*05:01-B1*02:01L
  REGION 1..10: note = CONT. FROM ABOVE: HLA-DPA1*01:03-B1*04:01L HLA-DQA1*05:05-B1*03: 116L HLA-DRB1*09:01L HLA-DPA1*01:03-B1*04:02L HLA-DPA1*02:01-B1* 13:01L HLA-DPA1*03:01-B1*105:01L HLA-DQA1*03:01-B1*03:02L HLA-DP A1*01:03-B1*104:01L HLA-DPA1*01:02-B1*04:01L HLA-DRB1*10:01L
  REGION 1..10: note = CONT. FROM ABOVE: HLA-DRB1*16:01L HLA-DQA1*01:03-B1*06:01L HLA-D RB1*08:03L HLA-DQA1*02:01-B1*03:03L HLA-DRB1*15:03L
  source 1..10: note = Severe acute respiratory syndrome coronavirus 2
TLNDFNLVAM

SEQ ID NO: 9073 - protein, 12 aa, Severe acute respiratory syndrome-related coronavirus
  REGION 1..12: note = Table B: HLA-DQA1*03:02-B1*03:03L HLA-DPA1*03:01-B1*105:01L HLA-DQA1*01:03-B1*06:01L HLA-DQA1*02:01-B1*03:03L
  source 1..12: note = Severe acute respiratory syndrome coronavirus 2
LNDFNLVAMKYN

SEQ ID NO: 9074 - protein, 13 aa, Severe acute respiratory syndrome-related coronavirus
  REGION 1..13: note = Table B: HLA-DQA1*03:02-B1*03:03L HLA-DQA1*05:01-B1*03:01L HLA-DRB1*04:03L HLA-DRB1*01:03L HLA-DRB1*04:05L HLA-DRB1*01:02L HLA-DRB1*08:04L HLA-DPA1*01:03-B1*03:01L HLA-DRB1*14:01L HLA-DRB1*08:01L HLA-DQA1*01-B1*05L HLA-DPA1*01:03-B1*04:01L
  REGION 1..13: note = CONT. FROM ABOVE: HLA-DPA1*01:03-B1*04:02L HLA-DPA1*02:01-B1*13: 01L HLA-DQA1*03:01-B1*03:02L HLA-DPA1*01:03-B1*02:01L HLA-DQA1*0 5:05-B1*03:01L HLA-DRB1*16:01L HLA-DQA1*01:03-B1*06:01L HLA-DRB1 *04:08L HLA-DQA1*02:01-B1*03:03L
  source 1..13: note = Severe acute respiratory syndrome coronavirus 2
DFNLVAMKYNYEP

SEQ ID NO: 9075 - protein, 13 aa, Severe acute respiratory syndrome-related coronavirus
  REGION 1..13: note = Table B: HLA-DQA1*03:02-B1*03:03L HLA-DRB1*01:03L HLA-DRB1*04:05L HLA-DRB1*01:02L HLA-DRB1*08:04L HLA-DRB1*08:01L HLA-DPA1*02:01-B1*13:01L
  source 1..13: note = Severe acute respiratory syndrome coronavirus 2
LVAMKYNYEPLTQ

SEQ ID NO: 9076 - protein, 10 aa, Severe acute respiratory syndrome-related coronavirus
  REGION 1..10: note = Table B: HLA-DQA1*03:02-B1*03:03L HLA-DRB1*04:03L HLA-DRB1*13:03L HLA-DRB1*01:03L HLA-DRB1*04:02L HLA-DRB1*04:05L HLA-DRB4*03:01NL HLA-DQA1*01-B1*05L HLA-DQA1*05:01-B1*02:01L HLA-DRB1*04:10L HLA-DPA1*03:01-B1*105:01L
  REGION 1..10: note = CONT. FROM ABOVE: HLA-DQA1*03:01-B1*03:02L HLA-DRB1*14:17L HLA-D PA1*01:02-B1*04:01L HLA-DRB1*16:01L HLA-DQA1*01:03-B1*06:01L HLA -DRB1*04:08L HLA-DQA1*02:01-B1*03:03L
  source 1..10: note = Severe acute respiratory syndrome coronavirus 2
YNYEPLTQDH

SEQ ID NO: 9077 - protein, 10 aa, Severe acute respiratory syndrome-related coronavirus
  REGION 1..10: note = Table B: HLA-DQA1*03:02-B1*03:03L HLA-DRB1*04:03L HLA-DQA1*01-B1*05L HLA-DQA1*05:01-B1*02:01L HLA-DQA1*03:01-B1*03:02L HLA-DRB1*16:01L HLA-DQA1*01:03-B1*06:01L HLA-DQA1*02:01-B1*03:03L
  source 1..10: note = Severe acute respiratory syndrome coronavirus 2
YEPLTQDHVD

SEQ ID NO: 9078 - protein, 11 aa, Severe acute respiratory syndrome-related coronavirus
  REGION 1..11: note = Table B: HLA-DQA1*03:02-B1*03:03L HLA-DRB1*04:03L HLA-DQA1*01-B1*05L HLA-DQA1*05:01-B1*02:01L HLA-DQA1*03:01-B1*03:02L HLA-DRB1*16:01L HLA-DQA1*02:01-B1*03:03L
  source 1..11: note = Severe acute respiratory syndrome coronavirus 2
EPLTQDHVDIL

SEQ ID NO: 9079 - protein, 10 aa, Severe acute respiratory syndrome-related coronavirus
  REGION 1..10: note = Table B: HLA-DQA1*03:02-B1*03:03L HLA-DQA1*05:05-B1*03:19L HLA-DQA1*03:01-B1*03:02L
  source 1..10: note = Severe acute respiratory syndrome coronavirus 2
HVDILGPLSA

SEQ ID NO: 9080 - protein, 12 aa, Severe acute respiratory syndrome-related coronavirus
  REGION 1..12: note = Table B: HLA-DQA1*03:02-B1*03:03L HLA-DQA1*05:01-B1*03:01L HLA-DRB1*01:03L HLA-DRB1*04:02L HLA-DRB1*04:04L HLA-DRB1*04:05L HLA-DQA1*01:02-B1*06:02L HLA-DRB1*01:02L HLA-DRB4*03:01NL HLA-DPA1*01:03-B1*03:01L HLA-DQA1*05:05-B1*03:19L
  REGION 1..12: note = CONT. FROM ABOVE: HLA-DQA1*05:01-B1*02:01L HLA-DRB1*04:10L HLA-D RB1*12:01L HLA-DPA1*03:01-B1*105:01L HLA-DRB1*14:54L HLA-DQA1*05 :05-B1*03:01L HLA-DRB1*10:01L HLA-DRB1*16:01L HLA-DRB1*04:08L
  source 1..12: note = Severe acute respiratory syndrome coronavirus 2
VDILGPLSAQTG

SEQ ID NO: 9081 - protein, 12 aa, Severe acute respiratory syndrome-related coronavirus
  REGION 1..12: note = Table B: HLA-DQA1*03:02-B1*03:03L HLA-DQA1*05:01-B1*03:01L HLA-DQA1*01:02-B1*06:02L HLA-DRB1*01:02L HLA-DQA1*05:05-B1*03:19L HLA-DQA1*03:01-B1*03:02L HLA-DQA1*05:05-B1*03:01L HLA-DQA1*01:03-B1*06:01L
  REGION 1..12: note = CONT. FROM ABOVE: HLA-DQA1*02:01-B1*03:03L
  source 1..12: note = Severe acute respiratory syndrome coronavirus 2
ILGPLSAQTGIA

SEQ ID NO: 9082 - protein, 12 aa, Severe acute respiratory syndrome-related coronavirus
  REGION 1..12: note = Table B: HLA-DQA1*03:02-B1*03:03L HLA-DQA1*05:01-B1*03:01L HLA-DQA1*05:05-B1*03:19L HLA-DQA1*05:01-B1*02:01L HLA-DQA1*03:01-B1*03:02L HLA-DQA1*05:05-B1*03:01L HLA-DQA1*02:01-B1*03:03L
  source 1..12: note = Severe acute respiratory syndrome coronavirus 2
GPLSAQTGIAVL

SEQ ID NO: 9083 - protein, 10 aa, Severe acute respiratory syndrome-related coronavirus
  REGION 1..10: note = Table B: HLA-DQA1*03:02-B1*03:03L HLA-DQA1*05:01-B1*03:01L HLA-DQA1*01:02-B1*06:02L HLA-DQA1*05:05-B1*03:19L HLA-DQA1*05:01-B1*02:01L HLA-DPA1*03:01-B1*105:01L HLA-DQA1*03:01-B1*03:02L HLA-DQA1*05:05-B1*03:01L
  REGION 1..10: note = CONT. FROM ABOVE: HLA-DQA1*01:03-B1*06:01L HLA-DQA1*02:01-B1*03: 03L
  source 1..10: note = Severe acute respiratory syndrome coronavirus 2
AQTGIAVLDM

SEQ ID NO: 9084 - protein, 10 aa, Severe acute respiratory syndrome-related coronavirus
  REGION 1..10: note = Table B: HLA-DQA1*03:02-B1*03:03L HLA-DQA1*01:02-B1*06:02L HLA-DPA1*03:01-B1*105:01L HLA-DQA1*03:01-B1*03:02L HLA-DQA1*02:01-B1*03:03L HLA-DRB1*15:03L
  source 1..10: note = Severe acute respiratory syndrome coronavirus 2
SLKELLQNGM

SEQ ID NO: 9085 - protein, 10 aa, Severe acute respiratory syndrome-related coronavirus
  REGION 1..10: note = Table B: HLA-DQA1*03:02-B1*03:03L HLA-DQA1*05:05-B1*03:19L
  source 1..10: note = Severe acute respiratory syndrome coronavirus 2
LQNGMNGRTI

SEQ ID NO: 9086 - protein, 10 aa, Severe acute respiratory syndrome-related coronavirus
  REGION 1..10: note = Table B: HLA-DQA1*03:02-B1*03:03L HLA-DQA1*05:01-B1*03:01L HLA-DQA1*03:01-B1*03:02L HLA-DQA1*02:01-B1*03:03L
  source 1..10: note = Severe acute respiratory syndrome coronavirus 2
NGRTILGSAL

SEQ ID NO: 9087 - protein, 12 aa, Severe acute respiratory syndrome-related coronavirus
  REGION 1..12: note = Table B: HLA-DQA1*03:02-B1*03:03L HLA-DQA1*05:01-B1*03:01L HLA-DRB1*04:03L HLA-DRB1*01:03L HLA-DQA1*01:02-B1*06:02L HLA-DRB1*01:02L HLA-DPA1*01:03-B1*03:01L HLA-DPA1*03:01-B1*04:02L HLA-DRB1*08:01L HLA-DQA1*01-B1*05L
  REGION 1..12: note = CONT. FROM ABOVE: HLA-DQA1*05:01-B1*02:01L HLA-DPA1*01:03-B1*04: 01L HLA-DPA1*01:03-B1*04:02L HLA-DRB1*12:01L HLA-DQA1*03:01-B1*0 3:02L HLA-DQA1*05:05-B1*03:01L HLA-DPA1*01:02-B1*04:01L HLA-DRB1 *16:01L HLA-DRB1*04:08L HLA-DQA1*02:01-B1*03:03L HLA-DRB1*15:03L
  source 1..12: note = Severe acute respiratory syndrome coronavirus 2
RTILGSALLEDE

SEQ ID NO: 9088 - protein, 10 aa, Severe acute respiratory syndrome-related coronavirus
  REGION 1..10: note = Table B: HLA-DQA1*03:02-B1*03:03L HLA-DQA1*01:02-B1*06:02L HLA-DQA1*05:05-B1*03:19L HLA-DQA1*05:01-B1*02:01L HLA-DQA1*02:01-B1*03:03L HLA-DRB1*15:03L
  source 1..10: note = Severe acute respiratory syndrome coronavirus 2
ALLEDEFTPF

SEQ ID NO: 9089 - protein, 10 aa, Severe acute respiratory syndrome-related coronavirus
  REGION 1..10: note = Table B: HLA-DQA1*03:02-B1*03:03L HLA-DQA1*05:05-B1*03:19L HLA-DPA1*01:03-B1*104:01L
  source 1..10: note = Severe acute respiratory syndrome coronavirus 2
LEDEFTPFDV

SEQ ID NO: 9090 - protein, 10 aa, Severe acute respiratory syndrome-related coronavirus
  REGION 1..10: note = Table B: HLA-DQA1*03:02-B1*03:03L
  source 1..10: note = Severe acute respiratory syndrome coronavirus 2
EDEFTPFDVV

SEQ ID NO: 9091 - protein, 10 aa, Severe acute respiratory syndrome-related coronavirus
  REGION 1..10: note = Table B: HLA-DQA1*03:02-B1*03:03L HLA-DRB1*13:02L HLA-DRB1*13:03L HLA-DRB1*04:02L HLA-DQA1*01:02-B1*06:02L HLA-DRB4*03:01NL HLA-DRB3*02:01L HLA-DRB1*08:01L HLA-DRB5*01:01L HLA-DQA1*01-B1*05L HLA-DQA1*05:01-B1*02:01L
  REGION 1..10: note = CONT. FROM ABOVE: HLA-DPA1*01:03-B1*04:02L HLA-DRB1*12:01L HLA-D PA1*03:01-B1*105:01L HLA-DQA1*03:01-B1*03:02L HLA-DQA1*05:05-B1* 03:01L HLA-DRB1*14:17L HLA-DPA1*01:02-B1*04:01L HLA-DRB1*16:01L HLA-DQA1*01:03-B1*06:01L HLA-DQA1*02:01-B1*03:03L
  source 1..10: note = Severe acute respiratory syndrome coronavirus 2
DEFTPFDVVR

SEQ ID NO: 9092 - protein, 10 aa, Severe acute respiratory syndrome-related coronavirus
  REGION 1..10: note = Table B: HLA-DQA1*03:02-B1*03:03L HLA-DQA1*05:01-B1*03:01L HLA-DRB1*04:03L HLA-DRB1*13:03L HLA-DRB1*01:03L HLA-DRB1*04:02L HLA-DRB1*04:04L HLA-DRB1*04:05L HLA-DQA1*01:02-B1*06:02L HLA-DRB1*01:02L HLA-DRB4*03:01NL HLA-DRB1*08:04L
  REGION 1..10: note = CONT. FROM ABOVE: HLA-DPA1*01:03-B1*03:01L HLA-DPA1*03:01-B1*04: 02L HLA-DRB1*14:01L HLA-DQA1*01:01-B1*05:01L HLA-DRB1*08:01L HLA -DQA1*01-B1*05L HLA-DQA1*05:05-B1*03:19L HLA-DQA1*05:01-B1*02:01 L HLA-DPA1*01:03-B1*04:01L HLA-DRB1*04:10L
  REGION 1..10: note = CONT. FROM ABOVE: HLA-DPA1*01:03-B1*04:02L HLA-DRB1*12:01L HLA-D PA1*02:01-B1*13:01L HLA-DPA1*03:01-B1*105:01L HLA-DQA1*03:01-B1* 03:02L HLA-DRB1*14:54L HLA-DPA1*01:03-B1*02:01L HLA-DQA1*05:05-B 1*03:01L HLA-DRB1*14:17L HLA-DPA1*01:02-B1*04:01L
  REGION 1..10: note = CONT. FROM ABOVE: HLA-DRB1*10:01L HLA-DRB1*16:01L HLA-DQA1*01:03 -B1*06:01L HLA-DRB1*04:08L HLA-DQA1*02:01-B1*03:03L HLA-DRB1*15: 03L
  source 1..10: note = Severe acute respiratory syndrome coronavirus 2
EFTPFDVVRQ

SEQ ID NO: 9093 - protein, 10 aa, Severe acute respiratory syndrome-related coronavirus
  REGION 1..10: note = Table B: HLA-DQA1*03:02-B1*03:03L HLA-DQA1*05:01-B1*03:01L HLA-DQA1*03:01-B1*03:02L HLA-DQA1*05:05-B1*03:01L HLA-DQA1*01:03-B1*06:01L HLA-DQA1*02:01-B1*03:03L
  source 1..10: note = Severe acute respiratory syndrome coronavirus 2
SGVTFQSAVK

SEQ ID NO: 9094 - protein, 10 aa, Severe acute respiratory syndrome-related coronavirus
  REGION 1..10: note = Table B: HLA-DQA1*03:02-B1*03:03M HLA-DQA1*05:01-B1*03:01L HLA-DRB1*04:03L HLA-DQA1*01:02-B1*06:02L HLA-DRB1*01:02L HLA-DPA1*03:01-B1*04:02L HLA-DRB1*14:01L HLA-DRB1*14:02L HLA-DQA1*05:05-B1*03:19L HLA-DQA1*05:01-B1*02:01L
  REGION 1..10: note = CONT. FROM ABOVE: HLA-DQA1*05:05-B1*03:116L HLA-DRB1*09:01L HLA- DRB1*12:01L HLA-DPA1*03:01-B1*105:01L HLA-DQA1*03:01-B1*03:02L H LA-DPA1*01:02-B1*04:01L HLA-DRB1*07:01L HLA-DRB1*10:01L HLA-DRB1 *16:01L HLA-DQA1*01:03-B1*06:01L HLA-DRB1*08:03L
  REGION 1..10: note = CONT. FROM ABOVE: HLA-DQA1*02:01-B1*03:03L HLA-DRB1*15:03L
  source 1..10: note = Severe acute respiratory syndrome coronavirus 2
VLVQSTQWSL

SEQ ID NO: 9095 - protein, 10 aa, Severe acute respiratory syndrome-related coronavirus
  REGION 1..10: note = Table B: HLA-DQA1*03:02-B1*03:03L HLA-DRB1*04:05L HLA-DQA1*01:02-B1*06:02L HLA-DPA1*03:01-B1*04:02L HLA-DRB1*14:02L HLA-DQA1*05:05-B1*03:19L HLA-DQA1*05:01-B1*02:01L HLA-DPA1*01:03-B1*04:01L
  REGION 1..10: note = CONT. FROM ABOVE: HLA-DPA1*02:01-B1*13:01L HLA-DPA1*03:01-B1*105 :01L HLA-DPA1*01:03-B1*104:01L HLA-DPA1*01:02-B1*04:01L HLA-DRB1 *16:01L HLA-DQA1*01:03-B1*06:01L HLA-DQA1*02:01-B1*03:03L HLA-DR B1*15:03L
  source 1..10: note = Severe acute respiratory syndrome coronavirus 2
FLYENAFLPF

SEQ ID NO: 9096 - protein, 10 aa, Severe acute respiratory syndrome-related coronavirus
  REGION 1..10: note = Table B: HLA-DQA1*03:02-B1*03:03L HLA-DPA1*03:01-B1*04:02L HLA-DQA1*01-B1*05L HLA-DQA1*05:01-B1*02:01L HLA-DPA1*01:03-B1*04:01L HLA-DPA1*03:01-B1*105:01L HLA-DPA1*01:02-B1*04:01L HLA-DQA1*01:03-B1*06:01L
  source 1..10: note = Severe acute respiratory syndrome coronavirus 2
LYENAFLPFA

SEQ ID NO: 9097 - protein, 10 aa, Severe acute respiratory syndrome-related coronavirus
  REGION 1..10: note = Table B: HLA-DQA1*03:02-B1*03:03L HLA-DQA1*05:05-B1*03:19M HLA-DQA1*03:01-B1*03:02L HLA-DPA1*01:03-B1*104:01L
  source 1..10: note = Severe acute respiratory syndrome coronavirus 2
YENAFLPFAM

SEQ ID NO: 9098 - protein, 10 aa, Severe acute respiratory syndrome-related coronavirus
  REGION 1..10: note = Table B: HLA-DQA1*03:02-B1*03:03L HLA-DQA1*01:02-B1*06:02L HLA-DQA1*05:05-B1*03:19L HLA-DPA1*02:01-B1*13:01L HLA-DPA1*03:01-B1*105:01L HLA-DQA1*01:03-B1*06:01L HLA-DRB1*15:03L
  source 1..10: note = Severe acute respiratory syndrome coronavirus 2
NAFLPFAMGI

SEQ ID NO: 9099 - protein, 10 aa, Severe acute respiratory syndrome-related coronavirus
  REGION 1..10: note = Table B: HLA-DQA1*03:02-B1*03:03L HLA-DQA1*05:01-B1*03:01L HLA-DRB1*13:03L HLA-DRB1*04:05L HLA-DQA1*01:02-B1*06:02L HLA-DPA1*03:01-B1*04:02L HLA-DRB1*14:01L HLA-DQA1*01-B1*05L HLA-DQA1*05:05-B1*03:116L HLA-DPA1*02:01-B1*13:01L
  REGION 1..10: note = CONT. FROM ABOVE: HLA-DPA1*03:01-B1*105:01L HLA-DQA1*03:01-B1*03 :02L HLA-DPA1*01:02-B1*04:01L HLA-DQA1*02:01-B1*03:03L HLA-DRB1* 15:03L
  source 1..10: note = Severe acute respiratory syndrome coronavirus 2
LPFAMGIIAM

SEQ ID NO: 9100 - protein, 10 aa, Severe acute respiratory syndrome-related coronavirus
  REGION 1..10: note = Table B: HLA-DQA1*03:02-B1*03:03L HLA-DQA1*05:05-B1*03:19L HLA-DQA1*05:05-B1*03:116L HLA-DPA1*02:01-B1*13:01L HLA-DQA1*03:01-B1*03:02L HLA-DPA1*01:03-B1*104:01L HLA-DQA1*01:03-B1*06:01L HLA-DQA1*02:01-B1*03:03L
  REGION 1..10: note = CONT. FROM ABOVE: HLA-DRB1*15:03L
  source 1..10: note = Severe acute respiratory syndrome coronavirus 2
LFLLPSLATV

SEQ ID NO: 9101 - protein, 10 aa, Severe acute respiratory syndrome-related coronavirus
  REGION 1..10: note = Table B: HLA-DQA1*03:02-B1*03:03L HLA-DQA1*05:01-B1*03:01L HLA-DRB1*04:03L HLA-DRB1*13:03L HLA-DRB1*01:03L HLA-DQA1*01:02-B1*06:02L HLA-DRB4*03:01NL HLA-DRB1*08:77L HLA-DPA1*01:03-B1*03:01L HLA-DPA1*03:01-B1*04:02L
  REGION 1..10: note = CONT. FROM ABOVE: HLA-DRB1*03:01L HLA-DRB1*14:01L HLA-DRB1*11:02 L HLA-DRB1*14:02L HLA-DQA1*01-B1*05L HLA-DQA1*05:05-B1*03:19M HL A-DQA1*05:01-B1*02:01L HLA-DRB4*01:01L HLA-DPA1*01:03-B1*04:01L HLA-DQA1*05:05-B1*03:116L HLA-DPA1*01:03-B1*04:02L
  REGION 1..10: note = CONT. FROM ABOVE: HLA-DRB1*12:01L HLA-DPA1*02:01-B1*13:01L HLA-D PA1*03:01-B1*105:01L HLA-DPA1*01:03-B1*104:01L HLA-DQA1*05:05-B1 *03:01L HLA-DPA1*01:02-B1*04:01L HLA-DRB1*10:01L HLA-DRB1*16:01L HLA-DQA1*01:03-B1*06:01L HLA-DRB1*08:02L
  REGION 1..10: note = CONT. FROM ABOVE: HLA-DQA1*02:01-B1*03:03L HLA-DRB1*15:03L
  source 1..10: note = Severe acute respiratory syndrome coronavirus 2
LLPSLATVAY

SEQ ID NO: 9102 - protein, 10 aa, Severe acute respiratory syndrome-related coronavirus
  REGION 1..10: note = Table B: HLA-DQA1*03:02-B1*03:03L HLA-DQA1*01:02-B1*06:02L HLA-DQA1*05:05-B1*03:19L HLA-DPA1*02:01-B1*13:01L HLA-DPA1*03:01-B1*105:01L HLA-DQA1*03:01-B1*03:02L HLA-DQA1*01:03-B1*06:01L HLA-DQA1*02:01-B1*03:03L
  REGION 1..10: note = CONT. FROM ABOVE: HLA-DRB1*15:03L
  source 1..10: note = Severe acute respiratory syndrome coronavirus 2
MVYMPASWVM

SEQ ID NO: 9103 - protein, 10 aa, Severe acute respiratory syndrome-related coronavirus
  REGION 1..10: note = Table B: HLA-DQA1*03:02-B1*03:03L HLA-DQA1*01:02-B1*06:02L HLA-DRB1*01:02L HLA-DQA1*05:05-B1*03:19L HLA-DQA1*05:05-B1*03:116L HLA-DPA1*02:01-B1*13:01M HLA-DPA1*03:01-B1*105:01L HLA-DQA1*03:01-B1*03:02L
  REGION 1..10: note = CONT. FROM ABOVE: HLA-DPA1*01:03-B1*104:01L HLA-DRB1*16:01L HLA- DQA1*01:03-B1*06:01L HLA-DRB1*08:03L HLA-DQA1*02:01-B1*03:03L HL A-DRB1*15:03L
  source 1..10: note = Severe acute respiratory syndrome coronavirus 2
YMPASWVMRI

SEQ ID NO: 9104 - protein, 10 aa, Severe acute respiratory syndrome-related coronavirus
  REGION 1..10: note = Table B: HLA-DQA1*03:02-B1*03:03L HLA-DPA1*03:01-B1*04:02L HLA-DQA1*01-B1*05L HLA-DQA1*05:05-B1*03:19L HLA-DQA1*05:01-B1*02:01L HLA-DRB1*09:01L HLA-DPA1*02:01-B1*13:01L HLA-DPA1*03:01-B1*105:01L
  REGION 1..10: note = CONT. FROM ABOVE: HLA-DQA1*03:01-B1*03:02L HLA-DQA1*01:03-B1*06: 01L HLA-DQA1*02:01-B1*03:03L HLA-DRB1*15:03L
  source 1..10: note = Severe acute respiratory syndrome coronavirus 2
TWLDMVDTSL

SEQ ID NO: 9105 - protein, 10 aa, Severe acute respiratory syndrome-related coronavirus
  REGION 1..10: note = Table B: HLA-DQA1*03:02-B1*03:03L HLA-DQA1*05:01-B1*03:01L HLA-DRB1*13:03L HLA-DQA1*01:02-B1*06:02M HLA-DRB1*08:77L HLA-DRB1*14:01L HLA-DRB1*14:02L HLA-DQA1*05:05-B1*03:19L HLA-DQA1*05:01-B1*02:01L HLA-DRB4*01:01L
  REGION 1..10: note = CONT. FROM ABOVE: HLA-DPA1*01:03-B1*04:01L HLA-DPA1*02:01-B1*13: 01L HLA-DPA1*03:01-B1*105:01L HLA-DQA1*02:01-B1*03:03L HLA-DRB1* 15:03L
  source 1..10: note = Severe acute respiratory syndrome coronavirus 2
DMVDTSLSGF

SEQ ID NO: 9106 - protein, 10 aa, Severe acute respiratory syndrome-related coronavirus
  REGION 1..10: note = Table B: HLA-DQA1*03:02-B1*03:03L HLA-DQA1*05:01-B1*03:01L HLA-DRB1*04:03L HLA-DRB1*13:02L HLA-DRB1*13:03L HLA-DRB1*01:03L HLA-DRB1*04:02L HLA-DRB4*03:01NL HLA-DQA1*01-B1*05L HLA-DQA1*05:01-B1*02:01L HLA-DRB1*12:01L
  REGION 1..10: note = CONT. FROM ABOVE: HLA-DPA1*03:01-B1*105:01L HLA-DQA1*03:01-B1*03 :02L HLA-DRB1*14:54L HLA-DQA1*05:05-B1*03:01L HLA-DRB1*14:17L HL A-DRB1*16:01L HLA-DQA1*01:03-B1*06:01L HLA-DQA1*02:01-B1*03:03L
  source 1..10: note = Severe acute respiratory syndrome coronavirus 2
MVDTSLSGFK

SEQ ID NO: 9107 - protein, 10 aa, Severe acute respiratory syndrome-related coronavirus
  REGION 1..10: note = Table B: HLA-DQA1*03:02-B1*03:03L HLA-DQA1*05:05-B1*03:19L HLA-DQA1*03:01-B1*03:02L
  source 1..10: note = Severe acute respiratory syndrome coronavirus 2
VDTSLSGFKL

SEQ ID NO: 9108 - protein, 12 aa, Severe acute respiratory syndrome-related coronavirus
  REGION 1..12: note = Table B: HLA-DQA1*03:02-B1*03:03L HLA-DRB1*04:04L HLA-DRB1*01:01L HLA-DRB1*08:04L HLA-DPA1*01:03-B1*03:01L HLA-DRB1*11:04L HLA-DRB1*04:10L HLA-DRB1*09:01L HLA-DRB1*07:01L HLA-DRB1*10:01L
  source 1..12: note = Severe acute respiratory syndrome coronavirus 2
LILMTARTVYDD

SEQ ID NO: 9109 - protein, 11 aa, Severe acute respiratory syndrome-related coronavirus
  REGION 1..11: note = Table B: HLA-DQA1*03:02-B1*03:03L HLA-DQA1*05:01-B1*03:01L HLA-DPA1*03:01-B1*105:01L HLA-DQA1*05:05-B1*03:01L HLA-DRB1*14:17L
  source 1..11: note = Severe acute respiratory syndrome coronavirus 2
LMTARTVYDDG

SEQ ID NO: 9110 - protein, 10 aa, Severe acute respiratory syndrome-related coronavirus
  REGION 1..10: note = Table B: HLA-DQA1*03:02-B1*03:03M HLA-DQA1*05:01-B1*03:01M HLA-DRB1*04:01L HLA-DRB1*04:03L HLA-DRB1*13:02L HLA-DRB1*13:03L HLA-DRB1*01:03L HLA-DRB1*04:02L HLA-DRB1*04:04L HLA-DRB1*04:05L HLA-DQA1*01:02-B1*06:02M HLA-DRB1*01:01L HLA-DRB1*01:02M
  REGION 1..10: note = CONT. FROM ABOVE: HLA-DRB4*03:01NL HLA-DRB1*08:77L HLA-DRB3*02:0 1L HLA-DPA1*01:03-B1*03:01L HLA-DPA1*03:01-B1*04:02L HLA-DRB1*03 :01L HLA-DRB1*14:01L HLA-DRB1*11:02L HLA-DRB1*11:03L HLA-DRB1*11 :04L HLA-DRB1*14:02M HLA-DQA1*01:01-B1*05:01L HLA-DRB1*08:01L
  REGION 1..10: note = CONT. FROM ABOVE: HLA-DRB1*11:01L HLA-DRB5*01:01L HLA-DQA1*01-B1 *05L HLA-DQA1*05:05-B1*03:19M HLA-DQA1*05:01-B1*02:01L HLA-DRB1* 13:01L HLA-DRB4*01:01L HLA-DPA1*01:03-B1*04:01L HLA-DQA1*05:05-B 1*03:116M HLA-DRB1*09:01L HLA-DPA1*01:03-B1*04:02L
  REGION 1..10: note = CONT. FROM ABOVE: HLA-DRB1*12:01L HLA-DPA1*02:01-B1*13:01L HLA-D PA1*03:01-B1*105:01M HLA-DQA1*03:01-B1*03:02M HLA-DPA1*01:03-B1* 104:01L HLA-DQA1*05:05-B1*03:01L HLA-DPA1*01:02-B1*04:01L HLA-DR B1*07:01L HLA-DRB1*10:01L HLA-DRB1*16:01M
  REGION 1..10: note = CONT. FROM ABOVE: HLA-DQA1*01:03-B1*06:01L HLA-DRB1*08:03L HLA -DQA1*02:01-B1*03:03M HLA-DRB1*15:01L HLA-DRB1*15:03M
  source 1..10: note = Severe acute respiratory syndrome coronavirus 2
TVYDDGARRV

SEQ ID NO: 9111 - protein, 10 aa, Severe acute respiratory syndrome-related coronavirus
  REGION 1..10: note = Table B: HLA-DQA1*03:02-B1*03:03L HLA-DQA1*05:01-B1*03:01L HLA-DRB1*04:03L HLA-DRB1*01:03M HLA-DRB1*04:05L HLA-DQA1*01:02-B1*06:02M HLA-DRB1*01:01L HLA-DRB1*01:02L HLA-DRB1*08:77L HLA-DPA1*01:03-B1*03:01L
  REGION 1..10: note = CONT. FROM ABOVE: HLA-DPA1*03:01-B1*04:02L HLA-DRB1*03:01L HLA-D RB1*14:01L HLA-DRB1*14:02L HLA-DQA1*01:01-B1*05:01L HLA-DRB1*11: 01L HLA-DQA1*01-B1*05L HLA-DQA1*05:05-B1*03:19L HLA-DQA1*05:01-B 1*02:01L HLA-DRB4*01:01L HLA-DPA1*01:03-B1*04:01L
  REGION 1..10: note = CONT. FROM ABOVE: HLA-DQA1*05:05-B1*03:116L HLA-DPA1*01:03-B1*04 :02L HLA-DRB1*12:01L HLA-DPA1*02:01-B1*13:01M HLA-DPA1*03:01-B1* 105:01L HLA-DPA1*01:02-B1*04:01L HLA-DRB1*10:01L HLA-DRB1*16:01L HLA-DQA1*01:03-B1*06:01M HLA-DRB1*08:02L
  REGION 1..10: note = CONT. FROM ABOVE: HLA-DQA1*02:01-B1*03:03M HLA-DRB1*15:03L
  source 1..10: note = Severe acute respiratory syndrome coronavirus 2
VYDDGARRVW

SEQ ID NO: 9112 - protein, 10 aa, Severe acute respiratory syndrome-related coronavirus
  REGION 1..10: note = Table B: HLA-DQA1*03:02-B1*03:03L HLA-DQA1*05:01-B1*03:01L HLA-DRB1*13:03L HLA-DRB1*01:03L HLA-DQA1*01:02-B1*06:02L HLA-DRB1*08:77L HLA-DPA1*01:03-B1*03:01L HLA-DPA1*03:01-B1*04:02L HLA-DRB1*03:01L HLA-DRB1*14:01L
  REGION 1..10: note = CONT. FROM ABOVE: HLA-DRB1*14:02L HLA-DQA1*01-B1*05L HLA-DQA1*05 :05-B1*03:19L HLA-DQA1*05:01-B1*02:01L HLA-DRB4*01:01L HLA-DPA1* 01:03-B1*04:01L HLA-DQA1*05:05-B1*03:116L HLA-DPA1*01:03-B1*04:0 2L HLA-DRB1*12:01L HLA-DPA1*02:01-B1*13:01L
  REGION 1..10: note = CONT. FROM ABOVE: HLA-DPA1*03:01-B1*105:01L HLA-DPA1*01:03-B1*10 4:01L HLA-DPA1*01:02-B1*04:01L HLA-DRB1*16:01L HLA-DQA1*01:03-B1 *06:01L HLA-DQA1*02:01-B1*03:03L HLA-DRB1*15:03L
  source 1..10: note = Severe acute respiratory syndrome coronavirus 2
NVLTLVYKVY

SEQ ID NO: 9113 - protein, 11 aa, Severe acute respiratory syndrome-related coronavirus
  REGION 1..11: note = Table B: HLA-DQA1*03:02-B1*03:03L HLA-DQA1*05:01-B1*03:01L HLA-DRB1*04:03L HLA-DRB1*01:02L HLA-DRB1*08:77L HLA-DRB3*02:01L HLA-DPA1*03:01-B1*04:02L HLA-DRB1*14:01L HLA-DQA1*01-B1*05L HLA-DQA1*05:01-B1*02:01L HLA-DRB1*12:01L
  REGION 1..11: note = CONT. FROM ABOVE: HLA-DPA1*03:01-B1*105:01L HLA-DQA1*03:01-B1*03 :02L HLA-DPA1*01:02-B1*04:01L HLA-DRB1*07:01L HLA-DRB1*04:08L
  source 1..11: note = Severe acute respiratory syndrome coronavirus 2
LVYKVYYGNAL

SEQ ID NO: 9114 - protein, 12 aa, Severe acute respiratory syndrome-related coronavirus
  REGION 1..12: note = Table B: HLA-DQA1*03:02-B1*03:03L HLA-DQA1*05:01-B1*03:01L HLA-DRB1*13:02L HLA-DRB1*04:04L HLA-DQA1*01:02-B1*06:02L HLA-DRB1*01:01L HLA-DRB1*08:77L HLA-DRB3*02:01L HLA-DPA1*03:01-B1*04:02L HLA-DRB1*11:03L HLA-DRB1*11:04L
  REGION 1..12: note = CONT. FROM ABOVE: HLA-DRB1*14:02L HLA-DRB1*08:01L HLA-DQA1*05:05 -B1*03:19L HLA-DQA1*05:01-B1*02:01L HLA-DRB1*09:01L HLA-DRB3*01: 01L HLA-DPA1*02:01-B1*13:01L HLA-DPA1*03:01-B1*105:01L HLA-DQA1* 05:05-B1*03:01L HLA-DPA1*01:02-B1*04:01L HLA-DRB1*07:01L
  REGION 1..12: note = CONT. FROM ABOVE: HLA-DRB1*10:01L HLA-DRB1*08:03L
  source 1..12: note = Severe acute respiratory syndrome coronavirus 2
VYKVYYGNALDQ

SEQ ID NO: 9115 - protein, 10 aa, Severe acute respiratory syndrome-related coronavirus
  REGION 1..10: note = Table B: HLA-DQA1*03:02-B1*03:03L HLA-DRB1*04:03L HLA-DQA1*01-B1*05L HLA-DQA1*05:01-B1*02:01L HLA-DQA1*03:01-B1*03:02L HLA-DQA1*02:01-B1*03:03L
  source 1..10: note = Severe acute respiratory syndrome coronavirus 2
VYYGNALDQA

SEQ ID NO: 9116 - protein, 11 aa, Severe acute respiratory syndrome-related coronavirus
  REGION 1..11: note = Table B: HLA-DQA1*03:02-B1*03:03L HLA-DQA1*03:01-B1*03:02L
  source 1..11: note = Severe acute respiratory syndrome coronavirus 2
YGNALDQAISM

SEQ ID NO: 9117 - protein, 10 aa, Severe acute respiratory syndrome-related coronavirus
  REGION 1..10: note = Table B: HLA-DQA1*03:02-B1*03:03L HLA-DQA1*05:01-B1*03:01L HLA-DRB1*13:03L HLA-DRB1*01:03L HLA-DQA1*01:02-B1*06:02M HLA-DRB1*08:77L HLA-DPA1*01:03-B1*03:01L HLA-DPA1*03:01-B1*04:02L HLA-DRB1*03:01L HLA-DRB1*14:01L
  REGION 1..10: note = CONT. FROM ABOVE: HLA-DRB1*14:02L HLA-DQA1*01-B1*05L HLA-DQA1*05 :05-B1*03:19L HLA-DQA1*05:01-B1*02:01L HLA-DRB4*01:01L HLA-DPA1* 01:03-B1*04:01L HLA-DQA1*05:05-B1*03:116L HLA-DPA1*01:03-B1*04:0 2L HLA-DRB1*12:01L HLA-DPA1*02:01-B1*13:01L
  REGION 1..10: note = CONT. FROM ABOVE: HLA-DPA1*03:01-B1*105:01M HLA-DPA1*01:03-B1*10 4:01L HLA-DPA1*01:02-B1*04:01L HLA-DRB1*10:01L HLA-DRB1*16:01L H LA-DQA1*01:03-B1*06:01L HLA-DQA1*02:01-B1*03:03L HLA-DRB1*15:03L
  source 1..10: note = Severe acute respiratory syndrome coronavirus 2
NALDQAISMW

SEQ ID NO: 9118 - protein, 11 aa, Severe acute respiratory syndrome-related coronavirus
  REGION 1..11: note = Table B: HLA-DQA1*03:02-B1*03:03L HLA-DQA1*05:05-B1*03:19L HLA-DQA1*03:01-B1*03:02L HLA-DPA1*01:03-B1*104:01L
  source 1..11: note = Severe acute respiratory syndrome coronavirus 2
ALDQAISMWAL

SEQ ID NO: 9119 - protein, 14 aa, Severe acute respiratory syndrome-related coronavirus
  REGION 1..14: note = Table B: HLA-DQA1*03:02-B1*03:03L HLA-DRB1*04:01L HLA-DRB3*02:01L HLA-DPA1*03:01-B1*04:02L HLA-DRB1*09:01L
  source 1..14: note = Severe acute respiratory syndrome coronavirus 2
ALIISVTSNYSGVV

SEQ ID NO: 9120 - protein, 12 aa, Severe acute respiratory syndrome-related coronavirus
  REGION 1..12: note = Table B: HLA-DQA1*03:02-B1*03:03L HLA-DQA1*05:01-B1*03:01L HLA-DRB1*13:02L HLA-DRB1*04:02L HLA-DRB4*03:01NL HLA-DRB1*14:01L HLA-DQA1*05:01-B1*02:01L HLA-DRB1*12:01L HLA-DRB1*12:02L HLA-DQA1*03:01-B1*03:02L HLA-DRB1*14:54L
  REGION 1..12: note = CONT. FROM ABOVE: HLA-DQA1*05:05-B1*03:01L HLA-DRB1*14:17L HLA-D RB1*16:01L HLA-DQA1*02:01-B1*03:03L HLA-DRB1*15:03L
  source 1..12: note = Severe acute respiratory syndrome coronavirus 2
ISVTSNYSGVVT

SEQ ID NO: 9121 - protein, 10 aa, Severe acute respiratory syndrome-related coronavirus
  REGION 1..10: note = Table B: HLA-DQA1*03:02-B1*03:03M HLA-DQA1*05:01-B1*03:01L HLA-DRB1*04:01L HLA-DRB1*13:03L HLA-DRB1*04:04L HLA-DRB1*04:05L HLA-DQA1*01:02-B1*06:02L HLA-DRB1*01:01L HLA-DRB1*01:02L HLA-DPA1*03:01-B1*04:02L HLA-DRB1*14:01L HLA-DRB1*14:02L
  REGION 1..10: note = CONT. FROM ABOVE: HLA-DRB1*08:01L HLA-DQA1*01-B1*05L HLA-DQA1*05 :05-B1*03:19L HLA-DQA1*05:01-B1*02:01L HLA-DQA1*05:05-B1*03:116L HLA-DRB1*09:01L HLA-DPA1*02:01-B1*13:01L HLA-DPA1*03:01-B1*105:0 1L HLA-DQA1*03:01-B1*03:02L HLA-DPA1*01:03-B1*104:01L
  REGION 1..10: note = CONT. FROM ABOVE: HLA-DPA1*01:02-B1*04:01L HLA-DRB1*10:01L HLA-D RB1*16:01L HLA-DQA1*01:03-B1*06:01L HLA-DRB1*08:03L HLA-DQA1*02: 01-B1*03:03M HLA-DRB1*15:03L
  source 1..10: note = Severe acute respiratory syndrome coronavirus 2
SNYSGVVTTV

SEQ ID NO: 9122 - protein, 10 aa, Severe acute respiratory syndrome-related coronavirus
  REGION 1..10: note = Table B: HLA-DQA1*03:02-B1*03:03L HLA-DQA1*05:01-B1*03:01L HLA-DQA1*01:02-B1*06:02L HLA-DPA1*03:01-B1*04:02L HLA-DQA1*05:05-B1*03:19L HLA-DQA1*05:01-B1*02:01L HLA-DPA1*03:01-B1*105:01L HLA-DQA1*03:01-B1*03:02L
  REGION 1..10: note = CONT. FROM ABOVE: HLA-DQA1*05:05-B1*03:01L HLA-DPA1*01:02-B1*04: 01L HLA-DRB1*16:01L HLA-DQA1*01:03-B1*06:01L HLA-DQA1*02:01-B1*0 3:03L HLA-DRB1*15:03L
  source 1..10: note = Severe acute respiratory syndrome coronavirus 2
NYSGVVTTVM

SEQ ID NO: 9123 - protein, 11 aa, Severe acute respiratory syndrome-related coronavirus
  REGION 1..11: note = Table B: HLA-DQA1*03:02-B1*03:03L HLA-DRB1*04:03L HLA-DQA1*05:05-B1*03:19L HLA-DPA1*01:02-B1*04:01L
  source 1..11: note = Severe acute respiratory syndrome coronavirus 2
VVTTVMFLARG

SEQ ID NO: 9124 - protein, 10 aa, Severe acute respiratory syndrome-related coronavirus
  REGION 1..10: note = Table B: HLA-DQA1*03:02-B1*03:03L HLA-DQA1*05:01-B1*03:01L HLA-DRB1*04:03L HLA-DRB1*13:02L HLA-DRB1*01:03L HLA-DRB1*04:05L HLA-DQA1*01:02-B1*06:02L HLA-DRB1*01:02L HLA-DRB1*08:77L HLA-DRB3*02:01L HLA-DPA1*01:03-B1*03:01L
  REGION 1..10: note = CONT. FROM ABOVE: HLA-DPA1*03:01-B1*04:02L HLA-DRB1*14:01L HLA-D RB1*14:02L HLA-DQA1*05:05-B1*03:19L HLA-DQA1*05:01-B1*02:01L HLA -DRB4*01:01L HLA-DPA1*01:03-B1*04:01L HLA-DPA1*01:03-B1*04:02L H LA-DRB1*12:01L HLA-DPA1*02:01-B1*13:01L
  REGION 1..10: note = CONT. FROM ABOVE: HLA-DPA1*03:01-B1*105:01L HLA-DQA1*05:05-B1*03 :01L HLA-DPA1*01:02-B1*04:01L HLA-DRB1*07:01L HLA-DRB1*16:01L HL A-DQA1*01:03-B1*06:01L HLA-DQA1*02:01-B1*03:03L HLA-DRB1*15:03L
  source 1..10: note = Severe acute respiratory syndrome coronavirus 2
VMFLARGIVF

SEQ ID NO: 9125 - protein, 10 aa, Severe acute respiratory syndrome-related coronavirus
  REGION 1..10: note = Table B: HLA-DQA1*03:02-B1*03:03L HLA-DQA1*01:02-B1*06:02L HLA-DPA1*03:01-B1*04:02L HLA-DPA1*02:01-B1*13:01L HLA-DPA1*03:01-B1*105:01L HLA-DQA1*01:03-B1*06:01L HLA-DQA1*02:01-B1*03:03L HLA-DRB1*15:03L
  source 1..10: note = Severe acute respiratory syndrome coronavirus 2
MFLARGIVFM

SEQ ID NO: 9126 - protein, 10 aa, Severe acute respiratory syndrome-related coronavirus
  REGION 1..10: note = Table B: HLA-DQA1*03:02-B1*03:03L
  source 1..10: note = Severe acute respiratory syndrome coronavirus 2
PIFFITGNTL

SEQ ID NO: 9127 - protein, 11 aa, Severe acute respiratory syndrome-related coronavirus
  REGION 1..11: note = Table B: HLA-DQA1*03:02-B1*03:03L HLA-DRB1*04:03L HLA-DRB1*13:03L HLA-DRB1*04:02L HLA-DRB1*04:05L HLA-DRB4*03:01NL HLA-DQA1*05:01-B1*02:01L HLA-DRB1*04:10L HLA-DQA1*03:01-B1*03:02L HLA-DRB1*14:54L HLA-DRB1*14:17L
  REGION 1..11: note = CONT. FROM ABOVE: HLA-DRB1*16:01L HLA-DQA1*02:01-B1*03:03L
  source 1..11: note = Severe acute respiratory syndrome coronavirus 2
GVYDYLVSTQE

SEQ ID NO: 9128 - protein, 12 aa, Severe acute respiratory syndrome-related coronavirus
  REGION 1..12: note = Table B: HLA-DQA1*03:02-B1*03:03L HLA-DQA1*05:01-B1*03:01L HLA-DRB1*01:02L HLA-DPA1*03:01-B1*04:02L HLA-DRB1*08:01L HLA-DRB1*04:10L HLA-DRB1*12:01L HLA-DQA1*05:05-B1*03:01L HLA-DPA1*01:02-B1*04:01L HLA-DRB1*10:01L HLA-DRB1*04:08L
  source 1..12: note = Severe acute respiratory syndrome coronavirus 2
VYDYLVSTQEFR

SEQ ID NO: 9129 - protein, 10 aa, Severe acute respiratory syndrome-related coronavirus
  REGION 1..10: note = Table B: HLA-DQA1*03:02-B1*03:03L HLA-DQA1*05:01-B1*03:01L HLA-DRB1*04:03L HLA-DRB1*13:02L HLA-DRB1*13:03L HLA-DRB1*01:03L HLA-DRB1*04:05L HLA-DQA1*01:02-B1*06:02L HLA-DRB4*03:01NL HLA-DRB1*08:77L HLA-DPA1*01:03-B1*03:01M
  REGION 1..10: note = CONT. FROM ABOVE: HLA-DPA1*03:01-B1*04:02L HLA-DRB1*03:01L HLA-D RB1*14:01L HLA-DRB1*11:02L HLA-DRB1*14:02L HLA-DQA1*01-B1*05M HL A-DQA1*05:05-B1*03:19M HLA-DQA1*05:01-B1*02:01M HLA-DRB4*01:01L HLA-DPA1*01:03-B1*04:01L HLA-DQA1*05:05-B1*03:116L
  REGION 1..10: note = CONT. FROM ABOVE: HLA-DPA1*01:03-B1*04:02L HLA-DRB1*12:01L HLA-D PA1*02:01-B1*13:01L HLA-DPA1*03:01-B1*105:01L HLA-DPA1*01:03-B1* 104:01M HLA-DQA1*05:05-B1*03:01L HLA-DPA1*01:02-B1*04:01L HLA-DR B1*10:01L HLA-DRB1*16:01M HLA-DQA1*01:03-B1*06:01L
  REGION 1..10: note = CONT. FROM ABOVE: HLA-DRB1*08:02L HLA-DQA1*02:01-B1*03:03L HLA-D RB1*15:03L
  source 1..10: note = Severe acute respiratory syndrome coronavirus 2
YLVSTQEFRY

SEQ ID NO: 9130 - protein, 11 aa, Severe acute respiratory syndrome-related coronavirus
  REGION 1..11: note = Table B: HLA-DQA1*03:02-B1*03:03L HLA-DQA1*05:01-B1*03:01L HLA-DRB1*08:77L HLA-DPA1*03:01-B1*04:02L HLA-DQA1*05:05-B1*03:19L HLA-DQA1*05:01-B1*02:01L HLA-DRB1*09:01L HLA-DQA1*03:01-B1*03:02L
  REGION 1..11: note = CONT. FROM ABOVE: HLA-DPA1*01:02-B1*04:01L HLA-DRB1*07:01L HLA-D RB1*15:03L
  source 1..11: note = Severe acute respiratory syndrome coronavirus 2
QEFRYMNSQGL

SEQ ID NO: 9131 - protein, 12 aa, Severe acute respiratory syndrome-related coronavirus
  REGION 1..12: note = Table B: HLA-DQA1*03:02-B1*03:03L HLA-DQA1*01:02-B1*06:02L HLA-DRB1*01:02L HLA-DQA1*05:05-B1*03:19L HLA-DQA1*05:01-B1*02:01L
  source 1..12: note = Severe acute respiratory syndrome coronavirus 2
YMNSQGLLPPKN

SEQ ID NO: 9132 - protein, 13 aa, Severe acute respiratory syndrome-related coronavirus
  REGION 1..13: note = Table B: HLA-DQA1*03:02-B1*03:03L HLA-DRB1*04:05L HLA-DRB1*04:10L
  source 1..13: note = Severe acute respiratory syndrome coronavirus 2
SQGLLPPKNSIDA

SEQ ID NO: 9133 - protein, 13 aa, Severe acute respiratory syndrome-related coronavirus
  REGION 1..13: note = Table B: HLA-DQA1*03:02-B1*03:03L HLA-DRB1*04:03L HLA-DRB1*13:02L HLA-DRB1*04:05L HLA-DRB1*01:02L HLA-DPA1*01:03-B1*03:01L HLA-DQA1*01:01-B1*05:01L HLA-DQA1*01-B1*05L HLA-DQA1*05:01-B1*02:01L HLA-DRB1*12:01L
  REGION 1..13: note = CONT. FROM ABOVE: HLA-DPA1*01:03-B1*104:01L HLA-DQA1*05:05-B1*03 :01L HLA-DRB1*16:01L HLA-DQA1*01:03-B1*06:01L HLA-DQA1*02:01-B1* 03:03L
  source 1..13: note = Severe acute respiratory syndrome coronavirus 2
LPPKNSIDAFKLN

SEQ ID NO: 9134 - protein, 10 aa, Severe acute respiratory syndrome-related coronavirus
  REGION 1..10: note = Table B: HLA-DQA1*03:02-B1*03:03L HLA-DQA1*01:02-B1*06:02L HLA-DRB1*01:02L HLA-DQA1*05:05-B1*03:19L HLA-DPA1*03:01-B1*105:01L HLA-DPA1*01:03-B1*104:01L HLA-DRB1*15:03L
  source 1..10: note = Severe acute respiratory syndrome coronavirus 2
NSIDAFKLNI

SEQ ID NO: 9135 - protein, 17 aa, Severe acute respiratory syndrome-related coronavirus
  REGION 1..17: note = Table B: HLA-DQA1*03:02-B1*03:03L HLA-DQA1*05:01-B1*02:01L HLA-DRB1*07:01L
  source 1..17: note = Severe acute respiratory syndrome coronavirus 2
IDAFKLNIKLLGVGGKP

SEQ ID NO: 9136 - protein, 10 aa, Severe acute respiratory syndrome-related coronavirus
  REGION 1..10: note = Table B: HLA-DQA1*03:02-B1*03:03L HLA-DQA1*05:01-B1*03:01L HLA-DRB1*04:03L HLA-DRB1*13:03L HLA-DRB1*01:03L HLA-DRB1*04:02L HLA-DQA1*01:02-B1*06:02L HLA-DRB4*03:01NL HLA-DQA1*05:05-B1*03:19L HLA-DQA1*05:01-B1*02:01L
  REGION 1..10: note = CONT. FROM ABOVE: HLA-DRB1*12:01L HLA-DPA1*03:01-B1*105:01L HLA- DQA1*03:01-B1*03:02L HLA-DQA1*05:05-B1*03:01L HLA-DRB1*14:17L HL A-DRB1*16:01L HLA-DQA1*01:03-B1*06:01L HLA-DQA1*02:01-B1*03:03L
  source 1..10: note = Severe acute respiratory syndrome coronavirus 2
VATVQSKMSD

SEQ ID NO: 9137 - protein, 10 aa, Severe acute respiratory syndrome-related coronavirus
  REGION 1..10: note = Table B: HLA-DQA1*03:02-B1*03:03L HLA-DPA1*03:01-B1*04:02L HLA-DQA1*02:01-B1*03:03L HLA-DRB1*15:03L
  source 1..10: note = Severe acute respiratory syndrome coronavirus 2
VVLLSVLQQL

SEQ ID NO: 9138 - protein, 14 aa, Severe acute respiratory syndrome-related coronavirus
  REGION 1..14: note = Table B: HLA-DQA1*03:02-B1*03:03L HLA-DRB1*13:02L HLA-DRB1*13:03L HLA-DRB1*11:03L HLA-DRB1*14:02L HLA-DQA1*01:01-B1*05:01L HLA-DPA1*01:03-B1*04:02L HLA-DRB3*01:01L HLA-DPA1*02:01-B1*13:01L
  REGION 1..14: note = CONT. FROM ABOVE: HLA-DPA1*01:03-B1*02:01L HLA-DPA1*01:02-B1*04: 01L HLA-DRB1*07:01L HLA-DRB1*08:02L HLA-DRB1*08:03L
  source 1..14: note = Severe acute respiratory syndrome coronavirus 2
LSVLQQLRVESSSK

SEQ ID NO: 9139 - protein, 12 aa, Severe acute respiratory syndrome-related coronavirus
  REGION 1..12: note = Table B: HLA-DQA1*03:02-B1*03:03L HLA-DRB1*13:02L HLA-DRB1*13:03L HLA-DRB1*01:03L HLA-DRB1*04:02L HLA-DRB1*04:05L HLA-DQA1*01:02-B1*06:02L HLA-DRB4*03:01NL HLA-DRB1*08:77L HLA-DRB3*02:01L HLA-DPA1*01:03-B1*03:01L
  REGION 1..12: note = CONT. FROM ABOVE: HLA-DPA1*03:01-B1*04:02L HLA-DRB1*11:03L HLA-D QA1*05:01-B1*02:01L HLA-DRB1*04:10L HLA-DRB1*12:02L HLA-DPA1*02: 01-B1*13:01L HLA-DPA1*03:01-B1*105:01L HLA-DRB1*14:54L HLA-DPA1* 01:02-B1*04:01L HLA-DRB1*07:01L HLA-DQA1*01:03-B1*06:01L
  REGION 1..12: note = CONT. FROM ABOVE: HLA-DRB1*04:08L
  source 1..12: note = Severe acute respiratory syndrome coronavirus 2
LQQLRVESSSKL

SEQ ID NO: 9140 - protein, 10 aa, Severe acute respiratory syndrome-related coronavirus
  REGION 1..10: note = Table B: HLA-DQA1*03:02-B1*03:03L HLA-DQA1*05:01-B1*03:01L HLA-DRB1*04:03L HLA-DRB1*13:03L HLA-DRB1*04:02L HLA-DRB1*14:01L HLA-DQA1*05:05-B1*03:19L HLA-DQA1*05:01-B1*02:01L HLA-DQA1*03:01-B1*03:02L HLA-DRB1*14:17L
  REGION 1..10: note = CONT. FROM ABOVE: HLA-DPA1*01:02-B1*04:01L HLA-DRB1*16:01L HLA-D QA1*01:03-B1*06:01L HLA-DQA1*02:01-B1*03:03L
  source 1..10: note = Severe acute respiratory syndrome coronavirus 2
VESSSKLWAQ

SEQ ID NO: 9141 - protein, 16 aa, Severe acute respiratory syndrome-related coronavirus
  REGION 1..16: note = Table B: HLA-DQA1*03:02-B1*03:03L HLA-DQA1*05:01-B1*03:01L HLA-DRB1*11:02L HLA-DRB1*14:02L
  source 1..16: note = Severe acute respiratory syndrome coronavirus 2
SSKLWAQCVQLHNDIL

SEQ ID NO: 9142 - protein, 14 aa, Severe acute respiratory syndrome-related coronavirus
  REGION 1..14: note = Table B: HLA-DQA1*03:02-B1*03:03L HLA-DQA1*05:01-B1*03:01L HLA-DRB1*13:02L HLA-DRB1*01:03L HLA-DRB1*04:05L HLA-DPA1*01:03-B1*03:01L HLA-DRB1*14:01L HLA-DQA1*05:01-B1*02:01L HLA-DRB1*12:01L
  REGION 1..14: note = CONT. FROM ABOVE: HLA-DPA1*02:01-B1*13:01L HLA-DPA1*01:03-B1*104 :01L HLA-DQA1*05:05-B1*03:01L HLA-DPA1*01:02-B1*04:01L HLA-DRB1* 16:01L HLA-DRB1*04:08L
  source 1..14: note = Severe acute respiratory syndrome coronavirus 2
VQLHNDILLAKDTT

SEQ ID NO: 9143 - protein, 10 aa, Severe acute respiratory syndrome-related coronavirus
  REGION 1..10: note = Table B: HLA-DQA1*03:02-B1*03:03L HLA-DRB1*04:03L HLA-DRB1*04:02L HLA-DQA1*01-B1*05L HLA-DQA1*05:01-B1*02:01L HLA-DQA1*03:01-B1*03:02L HLA-DRB1*14:17L HLA-DQA1*02:01-B1*03:03L
  source 1..10: note = Severe acute respiratory syndrome coronavirus 2
DILLAKDTTE

SEQ ID NO: 9144 - protein, 10 aa, Severe acute respiratory syndrome-related coronavirus
  REGION 1..10: note = Table B: HLA-DQA1*03:02-B1*03:03L HLA-DRB1*04:03L HLA-DRB1*13:03L HLA-DRB1*01:03L HLA-DRB1*04:02L HLA-DRB1*04:05L HLA-DRB4*03:01NL HLA-DQA1*01-B1*05L HLA-DRB1*04:10L HLA-DQA1*03:01-B1*03:02L HLA-DRB1*14:54L HLA-DRB1*14:17L
  REGION 1..10: note = CONT. FROM ABOVE: HLA-DRB1*16:01L HLA-DQA1*02:01-B1*03:03L
  source 1..10: note = Severe acute respiratory syndrome coronavirus 2
ILLAKDTTEA

SEQ ID NO: 9145 - protein, 11 aa, Severe acute respiratory syndrome-related coronavirus
  REGION 1..11: note = Table B: HLA-DQA1*03:02-B1*03:03L HLA-DRB1*13:02L HLA-DRB1*13:03L HLA-DRB1*01:03L HLA-DRB1*04:02L HLA-DRB1*04:05L HLA-DRB1*01:02L HLA-DRB4*03:01NL HLA-DRB1*14:01L HLA-DQA1*01:01-B1*05:01L HLA-DRB1*12:01L HLA-DRB3*01:01L
  REGION 1..11: note = CONT. FROM ABOVE: HLA-DRB1*14:54L HLA-DRB1*14:17L HLA-DPA1*01:02 -B1*04:01L HLA-DRB1*16:01L HLA-DRB1*04:08L HLA-DQA1*02:01-B1*03: 03L
  source 1..11: note = Severe acute respiratory syndrome coronavirus 2
LAKDTTEAFEK

SEQ ID NO: 9146 - protein, 10 aa, Severe acute respiratory syndrome-related coronavirus
  REGION 1..10: note = Table B: HLA-DQA1*03:02-B1*03:03L HLA-DQA1*01-B1*05L HLA-DQA1*03:01-B1*03:02L
  source 1..10: note = Severe acute respiratory syndrome coronavirus 2
KDTTEAFEKM

SEQ ID NO: 9147 - protein, 10 aa, Severe acute respiratory syndrome-related coronavirus
  REGION 1..10: note = Table B: HLA-DQA1*03:02-B1*03:03L HLA-DQA1*01:02-B1*06:02L HLA-DRB1*01:02L HLA-DQA1*05:05-B1*03:19L HLA-DQA1*05:01-B1*02:01L HLA-DPA1*03:01-B1*105:01L HLA-DQA1*03:01-B1*03:02L HLA-DQA1*01:03-B1*06:01L
  REGION 1..10: note = CONT. FROM ABOVE: HLA-DQA1*02:01-B1*03:03L HLA-DRB1*15:03L
  source 1..10: note = Severe acute respiratory syndrome coronavirus 2
DTTEAFEKMV

SEQ ID NO: 9148 - protein, 10 aa, Severe acute respiratory syndrome-related coronavirus
  REGION 1..10: note = Table B: HLA-DQA1*03:02-B1*03:03H HLA-DQA1*05:01-B1*03:01L HLA-DRB1*13:02L HLA-DRB1*13:03L HLA-DQA1*01:02-B1*06:02L HLA-DRB1*08:77L HLA-DPA1*03:01-B1*04:02L HLA-DRB1*03:01L HLA-DRB1*14:01L HLA-DRB1*11:02M HLA-DRB1*14:02L HLA-DRB1*11:01L
  REGION 1..10: note = CONT. FROM ABOVE: HLA-DQA1*01-B1*05L HLA-DQA1*05:05-B1*03:19H HL A-DQA1*05:01-B1*02:01L HLA-DRB4*01:01L HLA-DPA1*01:03-B1*04:01L HLA-DQA1*05:05-B1*03:116M HLA-DRB1*09:01M HLA-DPA1*01:03-B1*04:0 2M HLA-DRB1*12:01L HLA-DQA1*03:01-B1*03:02M
  REGION 1..10: note = CONT. FROM ABOVE: HLA-DPA1*01:03-B1*104:01M HLA-DPA1*01:02-B1*04 :01L HLA-DRB1*10:01L HLA-DRB1*16:01L HLA-DQA1*01:03-B1*06:01L HL A-DQA1*02:01-B1*03:03L HLA-DRB1*15:03L
  source 1..10: note = Severe acute respiratory syndrome coronavirus 2
TEAFEKMVSL

SEQ ID NO: 9149 - protein, 10 aa, Severe acute respiratory syndrome-related coronavirus
  REGION 1..10: note = Table B: HLA-DQA1*03:02-B1*03:03L HLA-DQA1*05:01-B1*03:01L HLA-DQA1*01:02-B1*06:02L HLA-DRB1*01:02L HLA-DPA1*03:01-B1*04:02L HLA-DQA1*05:05-B1*03:19L HLA-DQA1*05:01-B1*02:01L HLA-DPA1*01:03-B1*04:01L
  REGION 1..10: note = CONT. FROM ABOVE: HLA-DRB1*12:01L HLA-DPA1*02:01-B1*13:01L HLA-D PA1*03:01-B1*105:01L HLA-DQA1*03:01-B1*03:02L HLA-DPA1*01:02-B1* 04:01L HLA-DQA1*01:03-B1*06:01L HLA-DQA1*02:01-B1*03:03L HLA-DRB 1*15:03L
  source 1..10: note = Severe acute respiratory syndrome coronavirus 2
EAFEKMVSLL

SEQ ID NO: 9150 - protein, 10 aa, Severe acute respiratory syndrome-related coronavirus
  REGION 1..10: note = Table B: HLA-DQA1*03:02-B1*03:03L HLA-DRB1*11:02L HLA-DQA1*05:05-B1*03:19M HLA-DQA1*03:01-B1*03:02L HLA-DPA1*01:03-B1*104:01M HLA-DRB1*16:01L HLA-DQA1*01:03-B1*06:01L
  source 1..10: note = Severe acute respiratory syndrome coronavirus 2
FEKMVSLLSV

SEQ ID NO: 9151 - protein, 14 aa, Severe acute respiratory syndrome-related coronavirus
  REGION 1..14: note = Table B: HLA-DQA1*03:02-B1*03:03L HLA-DRB1*04:04L HLA-DRB1*08:04L HLA-DPA1*01:03-B1*03:01L HLA-DQA1*01-B1*05L HLA-DPA1*02:01-B1*13:01L HLA-DRB1*14:54L HLA-DRB1*10:01L HLA-DRB1*08:03L
  source 1..14: note = Severe acute respiratory syndrome coronavirus 2
SVLLSMQGAVDINK

SEQ ID NO: 9152 - protein, 10 aa, Severe acute respiratory syndrome-related coronavirus
  REGION 1..10: note = Table B: HLA-DQA1*03:02-B1*03:03M HLA-DQA1*05:01-B1*03:01L HLA-DRB1*04:03L HLA-DRB1*13:02L HLA-DRB1*13:03L HLA-DRB1*01:03L HLA-DRB1*04:02L HLA-DRB1*04:05L HLA-DQA1*01:02-B1*06:02L HLA-DRB1*01:02L HLA-DRB1*08:77L HLA-DRB3*02:01L
  REGION 1..10: note = CONT. FROM ABOVE: HLA-DPA1*01:03-B1*03:01L HLA-DPA1*03:01-B1*04: 02L HLA-DRB1*14:01L HLA-DRB1*14:02L HLA-DRB1*08:01L HLA-DQA1*01- B1*05L HLA-DQA1*05:05-B1*03:19L HLA-DQA1*05:01-B1*02:01L HLA-DRB 4*01:01L HLA-DPA1*01:03-B1*04:01L HLA-DQA1*05:05-B1*03:116L
  REGION 1..10: note = CONT. FROM ABOVE: HLA-DRB1*09:01L HLA-DPA1*01:03-B1*04:02L HLA-D RB1*12:01L HLA-DPA1*02:01-B1*13:01L HLA-DPA1*03:01-B1*105:01L HL A-DQA1*03:01-B1*03:02M HLA-DPA1*01:03-B1*104:01L HLA-DQA1*05:05- B1*03:01L HLA-DPA1*01:02-B1*04:01L HLA-DRB1*07:01L
  REGION 1..10: note = CONT. FROM ABOVE: HLA-DRB1*10:01L HLA-DRB1*16:01L HLA-DQA1*01:03 -B1*06:01L HLA-DRB1*08:03L HLA-DQA1*02:01-B1*03:03L HLA-DRB1*15: 03L
  source 1..10: note = Severe acute respiratory syndrome coronavirus 2
MQGAVDINKL

SEQ ID NO: 9153 - protein, 14 aa, Severe acute respiratory syndrome-related coronavirus
  REGION 1..14: note = Table B: HLA-DQA1*03:02-B1*03:03L HLA-DQA1*05:01-B1*03:01L HLA-DRB1*13:02L HLA-DRB1*13:03L HLA-DRB1*01:03L HLA-DRB1*04:04L HLA-DPA1*03:01-B1*04:02L HLA-DQA1*01:01-B1*05:01L HLA-DRB1*08:01L HLA-DQA1*01-B1*05L HLA-DQA1*05:01-B1*02:01L
  REGION 1..14: note = CONT. FROM ABOVE: HLA-DRB1*04:10L HLA-DRB3*01:01L HLA-DPA1*03:01 -B1*105:01L HLA-DPA1*01:03-B1*104:01L HLA-DQA1*05:05-B1*03:01L H LA-DPA1*01:02-B1*04:01L HLA-DRB1*07:01L HLA-DRB1*16:01L
  source 1..14: note = Severe acute respiratory syndrome coronavirus 2
INKLCEEMLDNRAT

SEQ ID NO: 9154 - protein, 10 aa, Severe acute respiratory syndrome-related coronavirus
  REGION 1..10: note = Table B: HLA-DQA1*03:02-B1*03:03H HLA-DQA1*05:01-B1*03:01L HLA-DRB1*13:03L HLA-DRB1*04:02L HLA-DRB1*08:77L HLA-DPA1*03:01-B1*04:02L HLA-DRB1*14:01L HLA-DRB1*11:02L HLA-DQA1*01-B1*05L HLA-DQA1*05:05-B1*03:19M
  REGION 1..10: note = CONT. FROM ABOVE: HLA-DQA1*05:01-B1*02:01L HLA-DRB4*01:01L HLA-D PA1*01:03-B1*04:01L HLA-DQA1*05:05-B1*03:116L HLA-DRB1*09:01M HL A-DPA1*01:03-B1*04:02L HLA-DRB1*12:01L HLA-DQA1*03:01-B1*03:02M HLA-DPA1*01:03-B1*104:01L HLA-DPA1*01:02-B1*04:01L
  REGION 1..10: note = CONT. FROM ABOVE: HLA-DRB1*10:01L HLA-DRB1*16:01L HLA-DQA1*02:01 -B1*03:03L HLA-DRB1*15:03L
  source 1..10: note = Severe acute respiratory syndrome coronavirus 2
EEMLDNRATL

SEQ ID NO: 9155 - protein, 10 aa, Severe acute respiratory syndrome-related coronavirus
  REGION 1..10: note = Table B: HLA-DQA1*03:02-B1*03:03L HLA-DRB1*04:03L HLA-DRB1*13:03L HLA-DRB1*04:02L HLA-DRB1*14:01L HLA-DQA1*03:01-B1*03:02L HLA-DRB1*16:01L
  source 1..10: note = Severe acute respiratory syndrome coronavirus 2
MLDNRATLQA

SEQ ID NO: 9156 - protein, 12 aa, Severe acute respiratory syndrome-related coronavirus
  REGION 1..12: note = Table B: HLA-DQA1*03:02-B1*03:03L HLA-DQA1*05:01-B1*03:01L HLA-DRB1*04:03L HLA-DRB1*13:02L HLA-DRB1*13:03L HLA-DRB1*01:03L HLA-DRB1*04:02L HLA-DRB1*04:04L HLA-DRB1*04:05L HLA-DQA1*01:02-B1*06:02L HLA-DRB1*01:02L HLA-DRB4*03:01NL
  REGION 1..12: note = CONT. FROM ABOVE: HLA-DPA1*01:03-B1*03:01L HLA-DRB1*04:10L HLA-D RB1*12:01L HLA-DPA1*02:01-B1*13:01L HLA-DPA1*03:01-B1*105:01L HL A-DRB1*14:54L HLA-DPA1*01:03-B1*104:01L HLA-DQA1*05:05-B1*03:01L HLA-DRB1*14:17L HLA-DRB1*16:01L HLA-DRB1*04:08L
  source 1..12: note = Severe acute respiratory syndrome coronavirus 2
LDNRATLQAIAS

SEQ ID NO: 9157 - protein, 12 aa, Severe acute respiratory syndrome-related coronavirus
  REGION 1..12: note = Table B: HLA-DQA1*03:02-B1*03:03L HLA-DQA1*05:01-B1*03:01L HLA-DRB1*04:03L HLA-DRB1*04:02L HLA-DRB1*04:05L HLA-DQA1*01:02-B1*06:02L HLA-DRB1*01:02L HLA-DPA1*01:03-B1*03:01L HLA-DQA1*01:01-B1*05:01L
  REGION 1..12: note = CONT. FROM ABOVE: HLA-DQA1*05:05-B1*03:19L HLA-DQA1*05:01-B1*02: 01L HLA-DRB1*12:01L HLA-DPA1*02:01-B1*13:01L HLA-DPA1*03:01-B1*1 05:01L HLA-DPA1*01:03-B1*104:01L HLA-DQA1*05:05-B1*03:01L HLA-DR B1*14:17L HLA-DRB1*16:01L
  source 1..12: note = Severe acute respiratory syndrome coronavirus 2
DNRATLQAIASE

SEQ ID NO: 9158 - protein, 10 aa, Severe acute respiratory syndrome-related coronavirus
  REGION 1..10: note = Table B: HLA-DQA1*03:02-B1*03:03L HLA-DQA1*05:01-B1*03:01L HLA-DRB1*13:03L HLA-DRB1*01:03L HLA-DQA1*01:02-B1*06:02M HLA-DRB1*08:77L HLA-DPA1*01:03-B1*03:01L HLA-DPA1*03:01-B1*04:02L HLA-DRB1*03:01L HLA-DRB1*14:01L
  REGION 1..10: note = CONT. FROM ABOVE: HLA-DRB1*14:02L HLA-DQA1*01-B1*05L HLA-DQA1*05 :05-B1*03:19L HLA-DQA1*05:01-B1*02:01L HLA-DRB4*01:01L HLA-DPA1* 01:03-B1*04:01L HLA-DQA1*05:05-B1*03:116L HLA-DPA1*01:03-B1*04:0 2L HLA-DPA1*02:01-B1*13:01L HLA-DPA1*03:01-B1*105:01L
  REGION 1..10: note = CONT. FROM ABOVE: HLA-DQA1*03:01-B1*03:02L HLA-DPA1*01:03-B1*104 :01L HLA-DPA1*01:02-B1*04:01L HLA-DRB1*10:01L HLA-DRB1*16:01L HL A-DQA1*01:03-B1*06:01L HLA-DQA1*02:01-B1*03:03L HLA-DRB1*15:03L
  source 1..10: note = Severe acute respiratory syndrome coronavirus 2
ATLQAIASEF

SEQ ID NO: 9159 - protein, 13 aa, Severe acute respiratory syndrome-related coronavirus
  REGION 1..13: note = Table B: HLA-DQA1*03:02-B1*03:03L HLA-DRB1*04:03L HLA-DRB1*04:02L HLA-DRB1*04:05L HLA-DQA1*01:02-B1*06:02L HLA-DQA1*01-B1*05L HLA-DQA1*05:01-B1*02:01L HLA-DRB1*04:10L HLA-DRB1*12:01L HLA-DQA1*03:01-B1*03:02L HLA-DRB1*14:17L
  REGION 1..13: note = CONT. FROM ABOVE: HLA-DRB1*16:01L HLA-DQA1*01:03-B1*06:01L HLA-D QA1*02:01-B1*03:03L
  source 1..13: note = Severe acute respiratory syndrome coronavirus 2
LQAIASEFSSLPS

SEQ ID NO: 9160 - protein, 10 aa, Severe acute respiratory syndrome-related coronavirus
  REGION 1..10: note = Table B: HLA-DQA1*03:02-B1*03:03L HLA-DQA1*05:05-B1*03:19L HLA-DQA1*03:01-B1*03:02L
  source 1..10: note = Severe acute respiratory syndrome coronavirus 2
SEFSSLPSYA

SEQ ID NO: 9161 - protein, 10 aa, Severe acute respiratory syndrome-related coronavirus
  REGION 1..10: note = Table B: HLA-DQA1*03:02-B1*03:03L HLA-DQA1*05:01-B1*03:01L HLA-DRB1*04:03L HLA-DQA1*01:02-B1*06:02L HLA-DRB1*14:02L HLA-DQA1*05:05-B1*03:19L HLA-DQA1*05:01-B1*02:01L HLA-DRB1*12:01L HLA-DPA1*02:01-B1*13:01L
  REGION 1..10: note = CONT. FROM ABOVE: HLA-DPA1*03:01-B1*105:01L HLA-DRB1*16:01L HLA- DQA1*01:03-B1*06:01L HLA-DQA1*02:01-B1*03:03L HLA-DRB1*15:03L
  source 1..10: note = Severe acute respiratory syndrome coronavirus 2
FSSLPSYAAF

SEQ ID NO: 9162 - protein, 12 aa, Severe acute respiratory syndrome-related coronavirus
  REGION 1..12: note = Table B: HLA-DQA1*03:02-B1*03:03L HLA-DQA1*05:01-B1*03:01L HLA-DRB1*04:01L HLA-DRB1*13:02L HLA-DRB1*13:03L HLA-DRB1*01:03L HLA-DRB1*04:02L HLA-DRB1*04:04L HLA-DRB1*04:05L HLA-DQA1*01:02-B1*06:02L HLA-DRB1*01:02L HLA-DRB4*03:01NL
  REGION 1..12: note = CONT. FROM ABOVE: HLA-DRB1*08:04L HLA-DRB1*08:77L HLA-DPA1*01:03 -B1*03:01L HLA-DRB1*14:01L HLA-DRB1*11:03L HLA-DRB1*11:04L HLA-D RB1*08:01L HLA-DRB5*01:01L HLA-DQA1*01-B1*05L HLA-DQA1*05:05-B1* 03:19L HLA-DQA1*05:01-B1*02:01L HLA-DRB1*04:10M HLA-DRB1*09:01L
  REGION 1..12: note = CONT. FROM ABOVE: HLA-DRB1*12:01L HLA-DRB1*12:02L HLA-DPA1*03:01 -B1*105:01L HLA-DQA1*03:01-B1*03:02L HLA-DRB1*14:54L HLA-DQA1*05 :05-B1*03:01L HLA-DRB1*14:17M HLA-DRB1*10:01L HLA-DRB1*16:01L HL A-DRB1*04:08L HLA-DRB1*08:03L HLA-DQA1*02:01-B1*03:03L
  REGION 1..12: note = CONT. FROM ABOVE: HLA-DRB1*15:03L
  source 1..12: note = Severe acute respiratory syndrome coronavirus 2
LPSYAAFATAQE

SEQ ID NO: 9163 - protein, 12 aa, Severe acute respiratory syndrome-related coronavirus
  REGION 1..12: note = Table B: HLA-DQA1*03:02-B1*03:03L HLA-DRB1*04:02L HLA-DRB1*04:05L HLA-DRB4*03:01NL HLA-DQA1*01-B1*05L HLA-DQA1*05:01-B1*02:01L HLA-DRB1*04:10L HLA-DPA1*03:01-B1*105:01L HLA-DQA1*03:01-B1*03:02L
  REGION 1..12: note = CONT. FROM ABOVE: HLA-DRB1*14:17L HLA-DRB1*16:01L HLA-DRB1*04:08 L HLA-DQA1*02:01-B1*03:03L
  source 1..12: note = Severe acute respiratory syndrome coronavirus 2
PSYAAFATAQEA

SEQ ID NO: 9164 - protein, 10 aa, Severe acute respiratory syndrome-related coronavirus
  REGION 1..10: note = Table B: HLA-DQA1*03:02-B1*03:03L HLA-DQA1*05:01-B1*03:01L HLA-DRB1*13:03L HLA-DRB1*01:03L HLA-DQA1*01:02-B1*06:02L HLA-DRB1*08:77L HLA-DPA1*01:03-B1*03:01L HLA-DRB1*03:01L HLA-DRB1*14:02L HLA-DQA1*05:05-B1*03:19L
  REGION 1..10: note = CONT. FROM ABOVE: HLA-DQA1*05:01-B1*02:01L HLA-DRB4*01:01L HLA-D PA1*01:03-B1*04:01L HLA-DPA1*01:03-B1*04:02L HLA-DPA1*02:01-B1*1 3:01L HLA-DPA1*03:01-B1*105:01L HLA-DRB1*16:01L HLA-DQA1*01:03-B 1*06:01L HLA-DRB1*08:02L HLA-DQA1*02:01-B1*03:03L
  REGION 1..10: note = CONT. FROM ABOVE: HLA-DRB1*15:03L
  source 1..10: note = Severe acute respiratory syndrome coronavirus 2
AAFATAQEAY

SEQ ID NO: 9165 - protein, 10 aa, Severe acute respiratory syndrome-related coronavirus
  REGION 1..10: note = Table B: HLA-DQA1*03:02-B1*03:03L HLA-DQA1*05:01-B1*03:01L HLA-DQA1*01:02-B1*06:02L HLA-DQA1*05:05-B1*03:19L HLA-DQA1*05:01-B1*02:01L HLA-DQA1*03:01-B1*03:02L HLA-DQA1*05:05-B1*03:01L HLA-DQA1*01:03-B1*06:01L
  REGION 1..10: note = CONT. FROM ABOVE: HLA-DQA1*02:01-B1*03:03L
  source 1..10: note = Severe acute respiratory syndrome coronavirus 2
AFATAQEAYE

SEQ ID NO: 9166 - protein, 10 aa, Severe acute respiratory syndrome-related coronavirus
  REGION 1..10: note = Table B: HLA-DQA1*03:02-B1*03:03L HLA-DQA1*05:01-B1*03:01L HLA-DRB1*04:03L HLA-DQA1*01:02-B1*06:02L HLA-DQA1*05:05-B1*03:19L HLA-DQA1*05:01-B1*02:01L HLA-DQA1*03:01-B1*03:02L HLA-DQA1*05:05-B1*03:01L
  REGION 1..10: note = CONT. FROM ABOVE: HLA-DQA1*01:03-B1*06:01L HLA-DQA1*02:01-B1*03: 03L
  source 1..10: note = Severe acute respiratory syndrome coronavirus 2
FATAQEAYEQ

SEQ ID NO: 9167 - protein, 12 aa, Severe acute respiratory syndrome-related coronavirus
  REGION 1..12: note = Table B: HLA-DQA1*03:02-B1*03:03L HLA-DQA1*01-B1*05L HLA-DQA1*05:01-B1*02:01L
  source 1..12: note = Severe acute respiratory syndrome coronavirus 2
ATAQEAYEQAVA

SEQ ID NO: 9168 - protein, 12 aa, Severe acute respiratory syndrome-related coronavirus
  REGION 1..12: note = Table B: HLA-DQA1*03:02-B1*03:03L HLA-DRB1*04:03L HLA-DQA1*01-B1*05L HLA-DQA1*05:01-B1*02:01L HLA-DQA1*03:01-B1*03:02L HLA-DQA1*02:01-B1*03:03L
  source 1..12: note = Severe acute respiratory syndrome coronavirus 2
TAQEAYEQAVAN

SEQ ID NO: 9169 - protein, 13 aa, Severe acute respiratory syndrome-related coronavirus
  REGION 1..13: note = Table B: HLA-DQA1*03:02-B1*03:03L HLA-DRB1*04:02L HLA-DRB1*04:05L HLA-DRB4*03:01NL HLA-DRB1*14:17L HLA-DRB1*16:01L HLA-DQA1*02:01-B1*03:03L
  source 1..13: note = Severe acute respiratory syndrome coronavirus 2
AQEAYEQAVANGD

SEQ ID NO: 9170 - protein, 11 aa, Severe acute respiratory syndrome-related coronavirus
  REGION 1..11: note = Table B: HLA-DQA1*03:02-B1*03:03L HLA-DRB1*13:03L HLA-DRB1*01:03L HLA-DRB1*04:02L HLA-DRB4*03:01NL HLA-DQA1*01-B1*05L HLA-DQA1*05:01-B1*02:01L HLA-DRB1*04:10L HLA-DRB1*12:01L HLA-DRB1*14:54L HLA-DRB1*10:01L HLA-DRB1*16:01L
  REGION 1..11: note = CONT. FROM ABOVE: HLA-DRB1*04:08L HLA-DQA1*02:01-B1*03:03L
  source 1..11: note = Severe acute respiratory syndrome coronavirus 2
AYEQAVANGDS

SEQ ID NO: 9171 - protein, 11 aa, Severe acute respiratory syndrome-related coronavirus
  REGION 1..11: note = Table B: HLA-DQA1*03:02-B1*03:03L HLA-DQA1*05:01-B1*03:01L HLA-DRB1*13:03L HLA-DRB1*04:02L HLA-DRB4*03:01NL HLA-DQA1*01-B1*05L HLA-DQA1*05:01-B1*02:01L HLA-DRB1*04:10L HLA-DRB1*14:54L HLA-DQA1*05:05-B1*03:01L HLA-DRB1*16:01L
  REGION 1..11: note = CONT. FROM ABOVE: HLA-DQA1*02:01-B1*03:03L
  source 1..11: note = Severe acute respiratory syndrome coronavirus 2
YEQAVANGDSE

SEQ ID NO: 9172 - protein, 10 aa, Severe acute respiratory syndrome-related coronavirus
  REGION 1..10: note = Table B: HLA-DQA1*03:02-B1*03:03L
  source 1..10: note = Severe acute respiratory syndrome coronavirus 2
AVANGDSEVV

SEQ ID NO: 9173 - protein, 10 aa, Severe acute respiratory syndrome-related coronavirus
  REGION 1..10: note = Table B: HLA-DQA1*03:02-B1*03:03L HLA-DQA1*03:01-B1*03:02L
  source 1..10: note = Severe acute respiratory syndrome coronavirus 2
VANGDSEVVL

SEQ ID NO: 9174 - protein, 10 aa, Severe acute respiratory syndrome-related coronavirus
  REGION 1..10: note = Table B: HLA-DQA1*03:02-B1*03:03L HLA-DQA1*05:01-B1*03:01L HLA-DQA1*01-B1*05L HLA-DQA1*05:05-B1*03:19L HLA-DQA1*05:01-B1*02:01L HLA-DQA1*03:01-B1*03:02L HLA-DPA1*01:02-B1*04:01L
  source 1..10: note = Severe acute respiratory syndrome coronavirus 2
GDSEVVLKKL

SEQ ID NO: 9175 - protein, 12 aa, Severe acute respiratory syndrome-related coronavirus
  REGION 1..12: note = Table B: HLA-DQA1*03:02-B1*03:03L HLA-DQA1*05:01-B1*03:01L HLA-DQA1*01:02-B1*06:02L HLA-DRB1*08:01L HLA-DQA1*05:01-B1*02:01L HLA-DRB1*16:01L HLA-DRB1*04:08L
  source 1..12: note = Severe acute respiratory syndrome coronavirus 2
SLNVAKSEFDRD

SEQ ID NO: 9176 - protein, 12 aa, Severe acute respiratory syndrome-related coronavirus
  REGION 1..12: note = Table B: HLA-DQA1*03:02-B1*03:03L HLA-DQA1*05:01-B1*03:01L HLA-DRB1*04:02L HLA-DQA1*01:02-B1*06:02L HLA-DQA1*01:01-B1*05:01L HLA-DQA1*05:01-B1*02:01L HLA-DRB1*04:10L HLA-DPA1*03:01-B1*105:01L
  REGION 1..12: note = CONT. FROM ABOVE: HLA-DQA1*05:05-B1*03:01L HLA-DRB1*16:01L HLA-D RB1*04:08L
  source 1..12: note = Severe acute respiratory syndrome coronavirus 2
LNVAKSEFDRDA

SEQ ID NO: 9177 - protein, 12 aa, Severe acute respiratory syndrome-related coronavirus
  REGION 1..12: note = Table B: HLA-DQA1*03:02-B1*03:03L HLA-DRB1*01:03L HLA-DRB1*04:02L HLA-DRB1*04:05L HLA-DQA1*01:02-B1*06:02L HLA-DQA1*05:01-B1*02:01L HLA-DRB1*14:17L HLA-DRB1*16:01L
  source 1..12: note = Severe acute respiratory syndrome coronavirus 2
NVAKSEFDRDAA

SEQ ID NO: 9178 - protein, 10 aa, Severe acute respiratory syndrome-related coronavirus
  REGION 1..10: note = Table B: HLA-DQA1*03:02-B1*03:03L HLA-DQA1*01-B1*05L HLA-DQA1*03:01-B1*03:02L
  source 1..10: note = Severe acute respiratory syndrome coronavirus 2
SEFDRDAAMQ

SEQ ID NO: 9179 - protein, 11 aa, Severe acute respiratory syndrome-related coronavirus
  REGION 1..11: note = Table B: HLA-DQA1*03:02-B1*03:03L HLA-DRB1*04:02L HLA-DRB1*04:05L HLA-DRB4*03:01NL HLA-DQA1*05:01-B1*02:01L HLA-DRB1*04:10L HLA-DRB1*12:01L HLA-DQA1*03:01-B1*03:02L HLA-DRB1*14:54L HLA-DRB1*14:17L HLA-DRB1*16:01L
  REGION 1..11: note = CONT. FROM ABOVE: HLA-DQA1*02:01-B1*03:03L
  source 1..11: note = Severe acute respiratory syndrome coronavirus 2
LEKMADQAMTQ

SEQ ID NO: 9180 - protein, 10 aa, Severe acute respiratory syndrome-related coronavirus
  REGION 1..10: note = Table B: HLA-DQA1*03:02-B1*03:03M HLA-DQA1*05:01-B1*03:01L HLA-DRB1*13:02L HLA-DRB1*13:03L HLA-DRB1*01:03L HLA-DQA1*01:02-B1*06:02L HLA-DRB3*02:01L HLA-DPA1*03:01-B1*04:02L HLA-DRB1*14:01L HLA-DRB1*14:02L
  REGION 1..10: note = CONT. FROM ABOVE: HLA-DRB1*08:01L HLA-DQA1*05:05-B1*03:19L HLA-D QA1*05:01-B1*02:01L HLA-DPA1*01:03-B1*04:01L HLA-DQA1*05:05-B1*0 3:116M HLA-DRB1*09:01L HLA-DPA1*01:03-B1*04:02L HLA-DPA1*02:01-B 1*13:01L HLA-DPA1*03:01-B1*105:01L HLA-DQA1*03:01-B1*03:02M
  REGION 1..10: note = CONT. FROM ABOVE: HLA-DPA1*01:03-B1*104:01L HLA-DPA1*01:02-B1*04 :01L HLA-DRB1*10:01L HLA-DRB1*16:01L HLA-DQA1*01:03-B1*06:01L HL A-DRB1*08:03L HLA-DQA1*02:01-B1*03:03M HLA-DRB1*15:03L
  source 1..10: note = Severe acute respiratory syndrome coronavirus 2
KMADQAMTQM

SEQ ID NO: 9181 - protein, 11 aa, Severe acute respiratory syndrome-related coronavirus
  REGION 1..11: note = Table B: HLA-DQA1*03:02-B1*03:03L
  source 1..11: note = Severe acute respiratory syndrome coronavirus 2
SEDKRAKVTSA

SEQ ID NO: 9182 - protein, 10 aa, Severe acute respiratory syndrome-related coronavirus
  REGION 1..10: note = Table B: HLA-DQA1*03:02-B1*03:03L HLA-DQA1*03:01-B1*03:02L HLA-DQA1*02:01-B1*03:03L
  source 1..10: note = Severe acute respiratory syndrome coronavirus 2
AKVTSAMQTM

SEQ ID NO: 9183 - protein, 10 aa, Severe acute respiratory syndrome-related coronavirus
  REGION 1..10: note = Table B: HLA-DQA1*03:02-B1*03:03L HLA-DQA1*05:01-B1*03:01L HLA-DQA1*01:02-B1*06:02L HLA-DQA1*05:05-B1*03:19L HLA-DQA1*05:01-B1*02:01L HLA-DPA1*03:01-B1*105:01L HLA-DQA1*03:01-B1*03:02L HLA-DRB1*16:01L
  REGION 1..10: note = CONT. FROM ABOVE: HLA-DQA1*01:03-B1*06:01L HLA-DQA1*02:01-B1*03: 03L HLA-DRB1*15:03L
  source 1..10: note = Severe acute respiratory syndrome coronavirus 2
KVTSAMQTML

SEQ ID NO: 9184 - protein, 10 aa, Severe acute respiratory syndrome-related coronavirus
  REGION 1..10: note = Table B: HLA-DQA1*03:02-B1*03:03L HLA-DQA1*01:02-B1*06:02L HLA-DPA1*03:01-B1*105:01L HLA-DRB1*15:03L
  source 1..10: note = Severe acute respiratory syndrome coronavirus 2
SAMQTMLFTM

SEQ ID NO: 9185 - protein, 10 aa, Severe acute respiratory syndrome-related coronavirus
  REGION 1..10: note = Table B: HLA-DQA1*03:02-B1*03:03M HLA-DQA1*05:01-B1*03:01L HLA-DQA1*01:02-B1*06:02L HLA-DRB1*11:02L HLA-DRB1*14:02L HLA-DQA1*05:05-B1*03:19M HLA-DQA1*05:01-B1*02:01L HLA-DQA1*05:05-B1*03:116L HLA-DRB1*09:01L
  REGION 1..10: note = CONT. FROM ABOVE: HLA-DPA1*03:01-B1*105:01L HLA-DQA1*03:01-B1*03 :02L HLA-DPA1*01:03-B1*104:01L HLA-DRB1*10:01L HLA-DRB1*16:01L H LA-DQA1*01:03-B1*06:01L HLA-DQA1*02:01-B1*03:03L HLA-DRB1*15:03L
  source 1..10: note = Severe acute respiratory syndrome coronavirus 2
KLDNDALNNI

SEQ ID NO: 9186 - protein, 11 aa, Severe acute respiratory syndrome-related coronavirus
  REGION 1..11: note = Table B: HLA-DQA1*03:02-B1*03:03L HLA-DQA1*05:01-B1*02:01L HLA-DQA1*03:01-B1*03:02L
  source 1..11: note = Severe acute respiratory syndrome coronavirus 2
LDNDALNNIIN

SEQ ID NO: 9187 - protein, 11 aa, Severe acute respiratory syndrome-related coronavirus
  REGION 1..11: note = Table B: HLA-DQA1*03:02-B1*03:03L HLA-DQA1*05:01-B1*02:01L HLA-DQA1*02:01-B1*03:03L
  source 1..11: note = Severe acute respiratory syndrome coronavirus 2
DNDALNNIINN

SEQ ID NO: 9188 - protein, 10 aa, Severe acute respiratory syndrome-related coronavirus
  REGION 1..10: note = Table B: HLA-DQA1*03:02-B1*03:03L HLA-DQA1*05:01-B1*03:01L HLA-DRB1*13:03L HLA-DQA1*01-B1*05L HLA-DPA1*03:01-B1*105:01L HLA-DQA1*03:01-B1*03:02L HLA-DRB1*15:03L
  source 1..10: note = Severe acute respiratory syndrome coronavirus 2
DALNNIINNA

SEQ ID NO: 9189 - protein, 10 aa, Severe acute respiratory syndrome-related coronavirus
  REGION 1..10: note = Table B: HLA-DQA1*03:02-B1*03:03L HLA-DQA1*05:01-B1*03:01L HLA-DRB1*04:03L HLA-DRB1*13:03L HLA-DRB1*01:03L HLA-DRB1*04:02L HLA-DRB1*04:05L HLA-DQA1*01:02-B1*06:02L HLA-DRB4*03:01NL HLA-DQA1*01:01-B1*05:01L HLA-DQA1*01-B1*05L
  REGION 1..10: note = CONT. FROM ABOVE: HLA-DQA1*05:01-B1*02:01L HLA-DRB1*04:10L HLA-D RB1*12:01L HLA-DQA1*03:01-B1*03:02L HLA-DRB1*14:54L HLA-DQA1*05: 05-B1*03:01L HLA-DRB1*14:17L HLA-DRB1*16:01L HLA-DQA1*01:03-B1*0 6:01L HLA-DRB1*04:08L HLA-DQA1*02:01-B1*03:03L
  source 1..10: note = Severe acute respiratory syndrome coronavirus 2
NNIINNARDG

SEQ ID NO: 9190 - protein, 11 aa, Severe acute respiratory syndrome-related coronavirus
  REGION 1..11: note = Table B: HLA-DQA1*03:02-B1*03:03L HLA-DRB1*04:03L HLA-DRB1*13:03L HLA-DQA1*01-B1*05L HLA-DPA1*03:01-B1*105:01L HLA-DQA1*03:01-B1*03:02L HLA-DPA1*01:02-B1*04:01L HLA-DRB1*16:01L
  source 1..11: note = Severe acute respiratory syndrome coronavirus 2
VPLNIIPLTTA

SEQ ID NO: 9191 - protein, 10 aa, Severe acute respiratory syndrome-related coronavirus
  REGION 1..10: note = Table B: HLA-DQA1*03:02-B1*03:03L HLA-DQA1*05:01-B1*03:01L HLA-DRB1*04:03L HLA-DRB1*13:03L HLA-DRB1*01:03L HLA-DRB1*04:02L HLA-DRB1*04:05L HLA-DQA1*01:02-B1*06:02L HLA-DRB1*01:02L HLA-DRB4*03:01NL HLA-DRB1*08:77L HLA-DRB3*02:01L
  REGION 1..10: note = CONT. FROM ABOVE: HLA-DPA1*01:03-B1*03:01L HLA-DPA1*03:01-B1*04: 02L HLA-DRB1*14:01L HLA-DQA1*01-B1*05L HLA-DQA1*05:05-B1*03:19L HLA-DQA1*05:01-B1*02:01L HLA-DRB1*12:01L HLA-DPA1*02:01-B1*13:01 L HLA-DPA1*03:01-B1*105:01L HLA-DQA1*03:01-B1*03:02L
  REGION 1..10: note = CONT. FROM ABOVE: HLA-DQA1*05:05-B1*03:01L HLA-DRB1*14:17L HLA-D PA1*01:02-B1*04:01L HLA-DRB1*07:01L HLA-DRB1*16:01L HLA-DQA1*01: 03-B1*06:01L HLA-DQA1*02:01-B1*03:03L HLA-DRB1*15:03L
  source 1..10: note = Severe acute respiratory syndrome coronavirus 2
IIPLTTAAKL

SEQ ID NO: 9192 - protein, 10 aa, Severe acute respiratory syndrome-related coronavirus
  REGION 1..10: note = Table B: HLA-DQA1*03:02-B1*03:03L HLA-DQA1*05:01-B1*03:01L HLA-DQA1*05:01-B1*02:01L HLA-DQA1*03:01-B1*03:02L HLA-DQA1*01:03-B1*06:01L HLA-DQA1*02:01-B1*03:03L
  source 1..10: note = Severe acute respiratory syndrome coronavirus 2
IPLTTAAKLM

SEQ ID NO: 9193 - protein, 12 aa, Severe acute respiratory syndrome-related coronavirus
  REGION 1..12: note = Table B: HLA-DQA1*03:02-B1*03:03L HLA-DQA1*05:01-B1*03:01L HLA-DRB1*04:03L HLA-DQA1*01:02-B1*06:02M HLA-DQA1*05:05-B1*03:19L HLA-DPA1*03:01-B1*105:01L HLA-DQA1*03:01-B1*03:02L HLA-DQA1*05:05-B1*03:01L
  REGION 1..12: note = CONT. FROM ABOVE: HLA-DQA1*02:01-B1*03:03L
  source 1..12: note = Severe acute respiratory syndrome coronavirus 2
TTAAKLMVVIPD

SEQ ID NO: 9194 - protein, 12 aa, Severe acute respiratory syndrome-related coronavirus
  REGION 1..12: note = Table B: HLA-DQA1*03:02-B1*03:03L HLA-DQA1*05:01-B1*03:01L HLA-DRB1*04:05L HLA-DPA1*01:03-B1*03:01L HLA-DRB1*12:01L HLA-DPA1*02:01-B1*13:01L HLA-DPA1*03:01-B1*105:01L HLA-DQA1*05:05-B1*03:01L HLA-DRB1*16:01L HLA-DRB1*15:03L
  source 1..12: note = Severe acute respiratory syndrome coronavirus 2
AAKLMVVIPDYN

SEQ ID NO: 9195 - protein, 10 aa, Severe acute respiratory syndrome-related coronavirus
  REGION 1..10: note = Table B: HLA-DQA1*03:02-B1*03:03L HLA-DQA1*05:01-B1*03:01L HLA-DRB1*04:03L HLA-DRB1*13:02L HLA-DRB1*13:03L HLA-DRB1*01:03L HLA-DRB1*04:05L HLA-DQA1*01:02-B1*06:02M HLA-DRB4*03:01NL HLA-DRB1*08:77L HLA-DPA1*01:03-B1*03:01L
  REGION 1..10: note = CONT. FROM ABOVE: HLA-DPA1*03:01-B1*04:02L HLA-DRB1*03:01L HLA-D RB1*14:01L HLA-DRB1*11:02L HLA-DRB1*14:02L HLA-DQA1*01-B1*05L HL A-DQA1*05:05-B1*03:19M HLA-DQA1*05:01-B1*02:01M HLA-DRB4*01:01L HLA-DPA1*01:03-B1*04:01M HLA-DQA1*05:05-B1*03:116L
  REGION 1..10: note = CONT. FROM ABOVE: HLA-DPA1*01:03-B1*04:02L HLA-DRB1*12:01L HLA-D PA1*02:01-B1*13:01L HLA-DPA1*03:01-B1*105:01L HLA-DQA1*03:01-B1* 03:02L HLA-DPA1*01:03-B1*104:01L HLA-DQA1*05:05-B1*03:01L HLA-DP A1*01:02-B1*04:01L HLA-DRB1*10:01L HLA-DRB1*16:01L
  REGION 1..10: note = CONT. FROM ABOVE: HLA-DQA1*01:03-B1*06:01L HLA-DRB1*08:02L HLA-D QA1*02:01-B1*03:03L HLA-DRB1*15:03L
  source 1..10: note = Severe acute respiratory syndrome coronavirus 2
MVVIPDYNTY

SEQ ID NO: 9196 - protein, 12 aa, Severe acute respiratory syndrome-related coronavirus
  REGION 1..12: note = Table B: HLA-DQA1*03:02-B1*03:03L HLA-DQA1*05:01-B1*03:01L HLA-DRB1*04:04L HLA-DRB1*04:05L HLA-DQA1*01:02-B1*06:02L HLA-DRB1*01:02L HLA-DRB1*08:04L HLA-DPA1*01:03-B1*03:01L HLA-DPA1*03:01-B1*04:02L HLA-DRB1*03:01L HLA-DRB1*14:02L
  REGION 1..12: note = CONT. FROM ABOVE: HLA-DRB1*04:10L HLA-DPA1*01:03-B1*04:02L HLA-D RB3*01:01L HLA-DPA1*03:01-B1*105:01L HLA-DQA1*01:03-B1*06:01L HL A-DRB1*04:08L HLA-DRB1*15:03L
  source 1..12: note = Severe acute respiratory syndrome coronavirus 2
VVIPDYNTYKNT

SEQ ID NO: 9197 - protein, 13 aa, Severe acute respiratory syndrome-related coronavirus
  REGION 1..13: note = Table B: HLA-DQA1*03:02-B1*03:03L HLA-DQA1*05:01-B1*03:01L HLA-DRB1*04:03L HLA-DRB1*13:03L HLA-DRB1*01:03L HLA-DRB1*04:02L HLA-DRB1*04:04L HLA-DRB1*04:05L HLA-DQA1*01:02-B1*06:02L HLA-DRB1*01:02L HLA-DRB4*03:01NL HLA-DRB1*08:04L HLA-DRB1*14:01L
  REGION 1..13: note = CONT. FROM ABOVE: HLA-DRB1*11:04L HLA-DRB1*08:01L HLA-DQA1*05:01 -B1*02:01L HLA-DRB1*04:10L HLA-DRB1*12:01L HLA-DPA1*02:01-B1*13: 01L HLA-DPA1*03:01-B1*105:01L HLA-DQA1*03:01-B1*03:02L HLA-DRB1* 14:54L HLA-DRB1*14:17L HLA-DRB1*10:01L HLA-DRB1*16:01L
  REGION 1..13: note = CONT. FROM ABOVE: HLA-DQA1*01:03-B1*06:01L HLA-DRB1*04:08L HLA-D RB1*08:03L HLA-DQA1*02:01-B1*03:03L HLA-DRB1*15:03L
  source 1..13: note = Severe acute respiratory syndrome coronavirus 2
IPDYNTYKNTCDG

SEQ ID NO: 9198 - protein, 13 aa, Severe acute respiratory syndrome-related coronavirus
  REGION 1..13: note = Table B: HLA-DQA1*03:02-B1*03:03L HLA-DQA1*05:01-B1*03:01L HLA-DRB1*04:02L HLA-DRB1*04:05L HLA-DPA1*03:01-B1*04:02L HLA-DQA1*05:05-B1*03:19L HLA-DRB1*04:10L HLA-DPA1*03:01-B1*105:01L HLA-DQA1*03:01-B1*03:02L
  REGION 1..13: note = CONT. FROM ABOVE: HLA-DQA1*05:05-B1*03:01L HLA-DRB1*16:01L HLA-D QA1*01:03-B1*06:01L HLA-DQA1*02:01-B1*03:03L
  source 1..13: note = Severe acute respiratory syndrome coronavirus 2
DGTTFTYASALWE

SEQ ID NO: 9199 - protein, 14 aa, Severe acute respiratory syndrome-related coronavirus
  REGION 1..14: note = Table B: HLA-DQA1*03:02-B1*03:03L HLA-DQA1*05:01-B1*03:01L HLA-DRB1*13:02L HLA-DRB1*13:03L HLA-DRB1*01:03L HLA-DRB1*04:05L HLA-DRB1*01:02L HLA-DRB1*08:04L HLA-DRB3*02:01L HLA-DPA1*01:03-B1*03:01L HLA-DRB1*14:02L HLA-DRB1*08:01L
  REGION 1..14: note = CONT. FROM ABOVE: HLA-DRB4*01:01L HLA-DRB1*04:10L HLA-DRB1*09:01 L HLA-DPA1*02:01-B1*13:01L HLA-DQA1*03:01-B1*03:02L HLA-DPA1*01: 03-B1*104:01L HLA-DPA1*01:02-B1*04:01L HLA-DRB1*10:01L HLA-DRB1* 16:01L HLA-DRB1*04:08L HLA-DRB1*08:03L HLA-DQA1*02:01-B1*03:03L
  source 1..14: note = Severe acute respiratory syndrome coronavirus 2
GTTFTYASALWEIQ

SEQ ID NO: 9200 - protein, 12 aa, Severe acute respiratory syndrome-related coronavirus
  REGION 1..12: note = Table B: HLA-DQA1*03:02-B1*03:03L HLA-DQA1*05:01-B1*03:01L HLA-DQA1*01-B1*05L HLA-DQA1*05:05-B1*03:19L HLA-DQA1*05:01-B1*02:01L HLA-DQA1*05:05-B1*03:01L HLA-DRB1*16:01L HLA-DRB1*04:08L HLA-DQA1*02:01-B1*03:03L
  REGION 1..12: note = CONT. FROM ABOVE: HLA-DRB1*15:03L
  source 1..12: note = Severe acute respiratory syndrome coronavirus 2
FTYASALWEIQQ

SEQ ID NO: 9201 - protein, 10 aa, Severe acute respiratory syndrome-related coronavirus
  REGION 1..10: note = Table B: HLA-DQA1*03:02-B1*03:03L HLA-DQA1*05:05-B1*03:19L
  source 1..10: note = Severe acute respiratory syndrome coronavirus 2
ASALWEIQQV

SEQ ID NO: 9202 - protein, 10 aa, Severe acute respiratory syndrome-related coronavirus
  REGION 1..10: note = Table B: HLA-DQA1*03:02-B1*03:03L HLA-DQA1*01-B1*05L HLA-DQA1*03:01-B1*03:02L
  source 1..10: note = Severe acute respiratory syndrome coronavirus 2
WEIQQVVDAD

SEQ ID NO: 9203 - protein, 10 aa, Severe acute respiratory syndrome-related coronavirus
  REGION 1..10: note = Table B: HLA-DQA1*03:02-B1*03:03L HLA-DRB1*04:01L HLA-DRB1*04:03M HLA-DRB1*13:03L HLA-DRB1*01:03L HLA-DRB1*04:02L HLA-DRB1*04:04L HLA-DRB1*04:05L HLA-DRB4*03:01NL HLA-DRB1*11:04L HLA-DQA1*01-B1*05L HLA-DQA1*05:01-B1*02:01L HLA-DRB1*04:10L
  REGION 1..10: note = CONT. FROM ABOVE: HLA-DRB1*12:01L HLA-DQA1*03:01-B1*03:02L HLA-D RB1*14:54L HLA-DRB1*14:17M HLA-DRB1*10:01L HLA-DRB1*16:01L HLA-D RB1*04:08L HLA-DRB1*08:03L HLA-DQA1*02:01-B1*03:03L
  source 1..10: note = Severe acute respiratory syndrome coronavirus 2
IQQVVDADSK

SEQ ID NO: 9204 - protein, 10 aa, Severe acute respiratory syndrome-related coronavirus
  REGION 1..10: note = Table B: HLA-DQA1*03:02-B1*03:03L HLA-DQA1*03:01-B1*03:02L
  source 1..10: note = Severe acute respiratory syndrome coronavirus 2
QVVDADSKIV

SEQ ID NO: 9205 - protein, 10 aa, Severe acute respiratory syndrome-related coronavirus
  REGION 1..10: note = Table B: HLA-DQA1*03:02-B1*03:03L HLA-DQA1*05:01-B1*03:01L HLA-DRB1*04:01L HLA-DRB1*04:03L HLA-DRB1*13:02L HLA-DRB1*13:03L HLA-DRB1*01:03L HLA-DRB1*04:02L HLA-DRB1*04:04L HLA-DRB1*04:05L HLA-DRB1*01:02L HLA-DRB4*03:01NL HLA-DRB1*08:04L HLA-DRB1*08:77L
  REGION 1..10: note = CONT. FROM ABOVE: HLA-DRB3*02:01L HLA-DPA1*01:03-B1*03:01L HLA-D RB1*14:01L HLA-DRB1*11:03L HLA-DRB1*11:04L HLA-DRB1*14:02L HLA-D QA1*01:01-B1*05:01L HLA-DRB5*01:01L HLA-DQA1*01-B1*05L HLA-DQA1* 05:05-B1*03:19L HLA-DQA1*05:01-B1*02:01L HLA-DRB1*04:10L
  REGION 1..10: note = CONT. FROM ABOVE: HLA-DRB1*12:01L HLA-DRB1*12:02L HLA-DRB3*01:01 L HLA-DPA1*03:01-B1*105:01L HLA-DQA1*03:01-B1*03:02L HLA-DRB1*14 :54L HLA-DQA1*05:05-B1*03:01L HLA-DRB1*14:17L HLA-DRB1*10:01L HL A-DRB1*16:01L HLA-DRB1*04:08L HLA-DQA1*02:01-B1*03:03L
  REGION 1..10: note = CONT. FROM ABOVE: HLA-DRB1*15:03L
  source 1..10: note = Severe acute respiratory syndrome coronavirus 2
VVDADSKIVQ

SEQ ID NO: 9206 - protein, 10 aa, Severe acute respiratory syndrome-related coronavirus
  REGION 1..10: note = Table B: HLA-DQA1*03:02-B1*03:03M HLA-DQA1*05:01-B1*03:01L HLA-DRB1*13:02L HLA-DRB1*13:03L HLA-DRB1*01:03L HLA-DRB1*04:02L HLA-DQA1*01:02-B1*06:02L HLA-DRB3*02:01L HLA-DPA1*01:03-B1*03:01L HLA-DPA1*03:01-B1*04:02L
  REGION 1..10: note = CONT. FROM ABOVE: HLA-DRB1*14:01L HLA-DRB1*14:02L HLA-DRB1*08:01 L HLA-DQA1*01-B1*05L HLA-DQA1*05:05-B1*03:19L HLA-DQA1*05:01-B1* 02:01L HLA-DPA1*01:03-B1*04:01L HLA-DQA1*05:05-B1*03:116L HLA-DR B1*09:01L HLA-DPA1*01:03-B1*04:02L HLA-DPA1*03:01-B1*105:01L
  REGION 1..10: note = CONT. FROM ABOVE: HLA-DQA1*03:01-B1*03:02M HLA-DPA1*01:03-B1*104 :01L HLA-DPA1*01:02-B1*04:01L HLA-DRB1*10:01L HLA-DRB1*16:01L HL A-DQA1*02:01-B1*03:03L HLA-DRB1*15:03L
  source 1..10: note = Severe acute respiratory syndrome coronavirus 2
VDADSKIVQL

SEQ ID NO: 9207 - protein, 12 aa, Severe acute respiratory syndrome-related coronavirus
  REGION 1..12: note = Table B: HLA-DQA1*03:02-B1*03:03L HLA-DQA1*01:02-B1*06:02L HLA-DQA1*05:01-B1*02:01L HLA-DQA1*03:01-B1*03:02L HLA-DQA1*01:03-B1*06:01L HLA-DQA1*02:01-B1*03:03L
  source 1..12: note = Severe acute respiratory syndrome coronavirus 2
ADSKIVQLSEIS

SEQ ID NO: 9208 - protein, 10 aa, Severe acute respiratory syndrome-related coronavirus
  REGION 1..10: note = Table B: HLA-DQA1*03:02-B1*03:03L HLA-DQA1*05:01-B1*03:01L HLA-DRB1*08:77L HLA-DRB3*02:01L HLA-DPA1*03:01-B1*04:02L HLA-DRB1*14:01L HLA-DQA1*05:01-B1*02:01L HLA-DRB1*12:01L HLA-DRB1*12:02L HLA-DQA1*03:01-B1*03:02L HLA-DRB1*16:01L
  REGION 1..10: note = CONT. FROM ABOVE: HLA-DQA1*02:01-B1*03:03L HLA-DRB1*15:03L
  source 1..10: note = Severe acute respiratory syndrome coronavirus 2
KIVQLSEISM

SEQ ID NO: 9209 - protein, 11 aa, Severe acute respiratory syndrome-related coronavirus
  REGION 1..11: note = Table B: HLA-DQA1*03:02-B1*03:03L HLA-DQA1*05:01-B1*03:01L HLA-DRB1*04:03L HLA-DRB1*13:02L HLA-DRB1*13:03L HLA-DRB1*01:03L HLA-DRB1*04:02L HLA-DRB1*04:04L HLA-DRB1*04:05L HLA-DQA1*01:02-B1*06:02L HLA-DRB1*01:02L HLA-DRB4*03:01NL
  REGION 1..11: note = CONT. FROM ABOVE: HLA-DRB1*08:77L HLA-DRB3*02:01L HLA-DRB1*14:01 L HLA-DRB1*11:03L HLA-DQA1*01-B1*05L HLA-DRB1*04:10L HLA-DRB1*12 :02L HLA-DPA1*03:01-B1*105:01L HLA-DQA1*03:01-B1*03:02L HLA-DRB1 *14:54L HLA-DQA1*05:05-B1*03:01L HLA-DRB1*14:17L HLA-DRB1*10:01L
  REGION 1..11: note = CONT. FROM ABOVE: HLA-DRB1*16:01L HLA-DQA1*01:03-B1*06:01L HLA-D QA1*02:01-B1*03:03L
  source 1..11: note = Severe acute respiratory syndrome coronavirus 2
IVQLSEISMDN

SEQ ID NO: 9210 - protein, 11 aa, Severe acute respiratory syndrome-related coronavirus
  REGION 1..11: note = Table B: HLA-DQA1*03:02-B1*03:03L HLA-DRB1*04:03L HLA-DQA1*01-B1*05L HLA-DQA1*05:01-B1*02:01L HLA-DQA1*03:01-B1*03:02L HLA-DRB1*14:17L HLA-DQA1*02:01-B1*03:03L
  source 1..11: note = Severe acute respiratory syndrome coronavirus 2
LSEISMDNSPN

SEQ ID NO: 9211 - protein, 10 aa, Severe acute respiratory syndrome-related coronavirus
  REGION 1..10: note = Table B: HLA-DQA1*03:02-B1*03:03L HLA-DQA1*03:01-B1*03:02L
  source 1..10: note = Severe acute respiratory syndrome coronavirus 2
EISMDNSPNL

SEQ ID NO: 9212 - protein, 11 aa, Severe acute respiratory syndrome-related coronavirus
  REGION 1..11: note = Table B: HLA-DQA1*03:02-B1*03:03L HLA-DQA1*05:05-B1*03:19L HLA-DQA1*03:01-B1*03:02L HLA-DQA1*05:05-B1*03:01L HLA-DQA1*02:01-B1*03:03L
  source 1..11: note = Severe acute respiratory syndrome coronavirus 2
SPNLAWPLIVT

SEQ ID NO: 9213 - protein, 10 aa, Severe acute respiratory syndrome-related coronavirus
  REGION 1..10: note = Table B: HLA-DQA1*03:02-B1*03:03L HLA-DQA1*01:02-B1*06:02L HLA-DQA1*05:05-B1*03:19L HLA-DPA1*03:01-B1*105:01L HLA-DQA1*02:01-B1*03:03L HLA-DRB1*15:03L
  source 1..10: note = Severe acute respiratory syndrome coronavirus 2
NLAWPLIVTA

SEQ ID NO: 9214 - protein, 10 aa, Severe acute respiratory syndrome-related coronavirus
  REGION 1..10: note = Table B: HLA-DQA1*03:02-B1*03:03L HLA-DQA1*01:02-B1*06:02L HLA-DPA1*03:01-B1*105:01L HLA-DRB1*15:03L
  source 1..10: note = Severe acute respiratory syndrome coronavirus 2
LAWPLIVTAL

SEQ ID NO: 9215 - protein, 10 aa, Severe acute respiratory syndrome-related coronavirus
  REGION 1..10: note = Table B: HLA-DQA1*03:02-B1*03:03L HLA-DRB1*04:03L HLA-DRB1*13:03L HLA-DRB1*04:02L HLA-DRB4*03:01NL HLA-DRB1*14:01L HLA-DRB1*12:01L HLA-DQA1*03:01-B1*03:02L HLA-DRB1*14:54L HLA-DRB1*14:17L HLA-DRB1*16:01L HLA-DQA1*02:01-B1*03:03L
  source 1..10: note = Severe acute respiratory syndrome coronavirus 2
IVTALRANSA

SEQ ID NO: 9216 - protein, 10 aa, Severe acute respiratory syndrome-related coronavirus
  REGION 1..10: note = Table B: HLA-DQA1*03:02-B1*03:03L HLA-DRB1*13:02L HLA-DRB3*02:01L HLA-DRB1*14:01L HLA-DRB1*12:01L HLA-DQA1*03:01-B1*03:02L HLA-DRB1*07:01L HLA-DRB1*16:01L HLA-DQA1*02:01-B1*03:03L
  source 1..10: note = Severe acute respiratory syndrome coronavirus 2
ALRANSAVKL

SEQ ID NO: 9217 - protein, 10 aa, Severe acute respiratory syndrome-related coronavirus
  REGION 1..10: note = Table B: HLA-DQA1*03:02-B1*03:03L HLA-DQA1*05:01-B1*03:01L HLA-DRB1*04:03L HLA-DRB1*01:03L HLA-DRB1*04:02L HLA-DQA1*01:02-B1*06:02L HLA-DRB4*03:01NL HLA-DRB1*12:01L HLA-DQA1*03:01-B1*03:02L HLA-DQA1*05:05-B1*03:01L
  REGION 1..10: note = CONT. FROM ABOVE: HLA-DRB1*14:17L HLA-DRB1*16:01L HLA-DQA1*01:03 -B1*06:01L HLA-DQA1*02:01-B1*03:03L
  source 1..10: note = Severe acute respiratory syndrome coronavirus 2
ANSAVKLQNN

SEQ ID NO: 9218 - protein, 10 aa, Severe acute respiratory syndrome-related coronavirus
  REGION 1..10: note = Table B: HLA-DQA1*03:02-B1*03:03L HLA-DQA1*05:01-B1*03:01L HLA-DQA1*01:02-B1*06:02L HLA-DRB1*14:01L HLA-DQA1*05:01-B1*02:01L HLA-DPA1*03:01-B1*105:01L HLA-DQA1*03:01-B1*03:02L HLA-DPA1*01:02-B1*04:01L
  REGION 1..10: note = CONT. FROM ABOVE: HLA-DQA1*01:03-B1*06:01L HLA-DQA1*02:01-B1*03: 03L
  source 1..10: note = Severe acute respiratory syndrome coronavirus 2
SAVKLQNNEL

SEQ ID NO: 9219 - protein, 11 aa, Severe acute respiratory syndrome-related coronavirus
  REGION 1..11: note = Table B: HLA-DQA1*03:02-B1*03:03L HLA-DQA1*05:01-B1*03:01L HLA-DRB1*04:01L HLA-DRB1*13:02L HLA-DRB1*13:03L HLA-DRB1*01:03L HLA-DRB1*04:04L HLA-DRB1*04:05L HLA-DQA1*01:02-B1*06:02L HLA-DRB1*01:02L HLA-DRB4*03:01NL HLA-DRB1*08:04L HLA-DRB1*08:77L
  REGION 1..11: note = CONT. FROM ABOVE: HLA-DRB1*14:01L HLA-DRB1*11:03L HLA-DRB1*11:04 L HLA-DRB1*14:02L HLA-DQA1*01-B1*05L HLA-DQA1*05:05-B1*03:19L HL A-DQA1*05:01-B1*02:01L HLA-DRB4*01:01L HLA-DRB1*04:10L HLA-DRB1* 09:01L HLA-DRB1*12:01L HLA-DPA1*03:01-B1*105:01L
  REGION 1..11: note = CONT. FROM ABOVE: HLA-DQA1*03:01-B1*03:02L HLA-DRB1*14:54L HLA-D QA1*05:05-B1*03:01L HLA-DRB1*10:01L HLA-DRB1*16:01L HLA-DRB1*04: 08L HLA-DRB1*08:03L HLA-DQA1*02:01-B1*03:03L HLA-DRB1*15:03L
  source 1..11: note = Severe acute respiratory syndrome coronavirus 2
VKLQNNELSPV

SEQ ID NO: 9220 - protein, 10 aa, Severe acute respiratory syndrome-related coronavirus
  REGION 1..10: note = Table B: HLA-DQA1*03:02-B1*03:03L HLA-DQA1*03:01-B1*03:02L
  source 1..10: note = Severe acute respiratory syndrome coronavirus 2
QNNELSPVAL

SEQ ID NO: 9221 - protein, 10 aa, Severe acute respiratory syndrome-related coronavirus
  REGION 1..10: note = Table B: HLA-DQA1*03:02-B1*03:03L HLA-DQA1*05:01-B1*03:01L HLA-DRB1*04:03L HLA-DRB1*13:02L HLA-DRB1*13:03L HLA-DRB1*01:03L HLA-DQA1*01:02-B1*06:02M HLA-DRB1*01:02L HLA-DRB4*03:01NL HLA-DRB1*08:77L HLA-DRB3*02:01L HLA-DPA1*01:03-B1*03:01L
  REGION 1..10: note = CONT. FROM ABOVE: HLA-DPA1*03:01-B1*04:02L HLA-DRB1*14:01L HLA-D RB1*14:02L HLA-DRB1*08:01L HLA-DRB5*01:01L HLA-DQA1*05:05-B1*03: 19L HLA-DQA1*05:01-B1*02:01L HLA-DPA1*01:03-B1*04:01L HLA-DQA1*0 5:05-B1*03:116L HLA-DRB1*09:01L HLA-DPA1*01:03-B1*04:02L
  REGION 1..10: note = CONT. FROM ABOVE: HLA-DRB1*12:01L HLA-DPA1*02:01-B1*13:01L HLA-D PA1*03:01-B1*105:01M HLA-DQA1*03:01-B1*03:02L HLA-DPA1*01:03-B1* 104:01L HLA-DQA1*05:05-B1*03:01L HLA-DPA1*01:02-B1*04:01L HLA-DR B1*16:01L HLA-DQA1*01:03-B1*06:01L HLA-DQA1*02:01-B1*03:03L
  REGION 1..10: note = CONT. FROM ABOVE: HLA-DRB1*15:03L
  source 1..10: note = Severe acute respiratory syndrome coronavirus 2
ELSPVALRQM

SEQ ID NO: 9222 - protein, 15 aa, Severe acute respiratory syndrome-related coronavirus
  REGION 1..15: note = Table B: HLA-DQA1*03:02-B1*03:03L HLA-DQA1*05:01-B1*03:01L HLA-DRB1*04:01L HLA-DRB1*13:02L HLA-DRB1*01:03L HLA-DRB1*04:02L HLA-DRB1*04:04L HLA-DRB1*04:05L HLA-DRB1*01:01L HLA-DRB1*08:04L HLA-DPA1*01:03-B1*03:01L HLA-DRB1*14:01L HLA-DRB1*11:04L
  REGION 1..15: note = CONT. FROM ABOVE: HLA-DRB1*08:01L HLA-DRB1*11:01L HLA-DQA1*05:05 -B1*03:19L HLA-DRB1*04:10L HLA-DPA1*01:03-B1*04:02L HLA-DRB1*12: 01L HLA-DPA1*02:01-B1*13:01L HLA-DPA1*03:01-B1*105:01L HLA-DQA1* 03:01-B1*03:02L HLA-DPA1*01:03-B1*104:01L
  REGION 1..15: note = CONT. FROM ABOVE: HLA-DQA1*05:05-B1*03:01L HLA-DRB1*14:17L HLA-D RB1*10:01L HLA-DRB1*16:01L HLA-DQA1*01:03-B1*06:01L HLA-DRB1*04: 08M HLA-DQA1*02:01-B1*03:03L HLA-DRB1*15:03L
  source 1..15: note = Severe acute respiratory syndrome coronavirus 2
SPVALRQMSCAAGTT

SEQ ID NO: 9223 - protein, 12 aa, Severe acute respiratory syndrome-related coronavirus
  REGION 1..12: note = Table B: HLA-DQA1*03:02-B1*03:03L HLA-DQA1*05:05-B1*03:19L HLA-DQA1*03:01-B1*03:02L HLA-DQA1*05:05-B1*03:01L HLA-DQA1*01:03-B1*06:01L HLA-DQA1*02:01-B1*03:03L
  source 1..12: note = Severe acute respiratory syndrome coronavirus 2
AGTTQTACTDDN

SEQ ID NO: 9224 - protein, 12 aa, Severe acute respiratory syndrome-related coronavirus
  REGION 1..12: note = Table B: HLA-DQA1*03:02-B1*03:03L HLA-DQA1*01:02-B1*06:02L HLA-DQA1*03:01-B1*03:02L HLA-DQA1*01:03-B1*06:01L HLA-DQA1*02:01-B1*03:03L
  source 1..12: note = Severe acute respiratory syndrome coronavirus 2
DDNALAYYNTTK

SEQ ID NO: 9225 - protein, 12 aa, Severe acute respiratory syndrome-related coronavirus
  REGION 1..12: note = Table B: HLA-DQA1*03:02-B1*03:03L HLA-DQA1*05:01-B1*03:01L HLA-DRB1*13:03L HLA-DRB1*01:03L HLA-DRB1*04:04L HLA-DRB1*04:05L HLA-DQA1*01:02-B1*06:02L HLA-DRB1*01:02L HLA-DRB4*03:01NL HLA-DRB1*14:01L HLA-DRB1*11:04L HLA-DRB1*08:01L
  REGION 1..12: note = CONT. FROM ABOVE: HLA-DQA1*05:01-B1*02:01L HLA-DRB1*04:10L HLA-D RB1*12:01L HLA-DRB1*12:02L HLA-DPA1*03:01-B1*105:01L HLA-DRB1*14 :54L HLA-DQA1*05:05-B1*03:01L HLA-DRB1*16:01L HLA-DQA1*01:03-B1* 06:01L HLA-DRB1*04:08L HLA-DRB1*08:03L HLA-DRB1*15:03L
  source 1..12: note = Severe acute respiratory syndrome coronavirus 2
DNALAYYNTTKG

SEQ ID NO: 9226 - protein, 10 aa, Severe acute respiratory syndrome-related coronavirus
  REGION 1..10: note = Table B: HLA-DQA1*03:02-B1*03:03L HLA-DQA1*05:01-B1*03:01L HLA-DRB1*04:01L HLA-DRB1*04:03L HLA-DRB1*13:02L HLA-DRB1*13:03L HLA-DRB1*01:03M HLA-DRB1*04:05L HLA-DQA1*01:02-B1*06:02L HLA-DRB1*01:01L HLA-DRB1*01:02L HLA-DRB4*03:01NL HLA-DRB1*08:77L
  REGION 1..10: note = CONT. FROM ABOVE: HLA-DRB3*02:01L HLA-DPA1*01:03-B1*03:01L HLA-D PA1*03:01-B1*04:02L HLA-DRB1*03:01L HLA-DRB1*14:01L HLA-DRB1*11: 03L HLA-DRB1*14:02L HLA-DQA1*01:01-B1*05:01L HLA-DRB1*08:01L HLA -DRB1*11:01L HLA-DQA1*01-B1*05L HLA-DQA1*05:05-B1*03:19L
  REGION 1..10: note = CONT. FROM ABOVE: HLA-DQA1*05:01-B1*02:01L HLA-DRB4*01:01L HLA-D PA1*01:03-B1*04:01L HLA-DQA1*05:05-B1*03:116L HLA-DPA1*01:03-B1* 04:02L HLA-DRB1*12:01L HLA-DPA1*02:01-B1*13:01M HLA-DPA1*03:01-B 1*105:01L HLA-DQA1*03:01-B1*03:02L HLA-DQA1*05:05-B1*03:01L
  REGION 1..10: note = CONT. FROM ABOVE: HLA-DPA1*01:02-B1*04:01L HLA-DRB1*07:01L HLA-D RB1*10:01L HLA-DRB1*16:01L HLA-DQA1*01:03-B1*06:01M HLA-DRB1*04: 08L HLA-DRB1*08:02L HLA-DRB1*08:03L HLA-DQA1*02:01-B1*03:03L HLA -DRB1*15:03L
  source 1..10: note = Severe acute respiratory syndrome coronavirus 2
YYNTTKGGRF

SEQ ID NO: 9227 - protein, 10 aa, Severe acute respiratory syndrome-related coronavirus
  REGION 1..10: note = Table B: HLA-DQA1*03:02-B1*03:03L HLA-DQA1*05:01-B1*03:01L HLA-DRB1*04:03L HLA-DRB1*13:02L HLA-DRB1*13:03L HLA-DRB1*01:03L HLA-DRB1*04:02L HLA-DRB1*04:05L HLA-DQA1*01:02-B1*06:02L HLA-DRB1*01:02L HLA-DRB4*03:01NL HLA-DRB1*08:77L HLA-DRB3*02:01L
  REGION 1..10: note = CONT. FROM ABOVE: HLA-DPA1*01:03-B1*03:01L HLA-DPA1*03:01-B1*04: 02L HLA-DRB1*14:01L HLA-DQA1*01-B1*05L HLA-DQA1*05:05-B1*03:19L HLA-DQA1*05:01-B1*02:01L HLA-DPA1*01:03-B1*04:01L HLA-DRB1*12:01 L HLA-DPA1*03:01-B1*105:01L HLA-DQA1*03:01-B1*03:02L
  REGION 1..10: note = CONT. FROM ABOVE: HLA-DQA1*05:05-B1*03:01L HLA-DRB1*14:17L HLA-D PA1*01:02-B1*04:01L HLA-DRB1*07:01L HLA-DRB1*16:01L HLA-DQA1*01: 03-B1*06:01L HLA-DRB1*04:08L HLA-DQA1*02:01-B1*03:03L HLA-DRB1*1 5:03L
  source 1..10: note = Severe acute respiratory syndrome coronavirus 2
YNTTKGGRFV

SEQ ID NO: 9228 - protein, 13 aa, Severe acute respiratory syndrome-related coronavirus
  REGION 1..13: note = Table B: HLA-DQA1*03:02-B1*03:03L HLA-DQA1*05:01-B1*03:01L HLA-DRB1*13:02L HLA-DRB1*01:03L HLA-DRB1*04:05L HLA-DRB1*01:02L HLA-DRB1*08:01L HLA-DQA1*05:01-B1*02:01L HLA-DQA1*03:01-B1*03:02L HLA-DPA1*01:03-B1*02:01L
  REGION 1..13: note = CONT. FROM ABOVE: HLA-DQA1*05:05-B1*03:01L HLA-DQA1*02:01-B1*03: 03L
  source 1..13: note = Severe acute respiratory syndrome coronavirus 2
GGRFVLALLSDLQ

SEQ ID NO: 9229 - protein, 10 aa, Severe acute respiratory syndrome-related coronavirus
  REGION 1..10: note = Table B: HLA-DQA1*03:02-B1*03:03L HLA-DQA1*05:01-B1*03:01L HLA-DRB1*13:03L HLA-DRB1*01:03L HLA-DQA1*01:02-B1*06:02L HLA-DRB1*08:77L HLA-DPA1*01:03-B1*03:01L HLA-DPA1*03:01-B1*04:02L HLA-DRB1*03:01L HLA-DRB1*11:02L
  REGION 1..10: note = CONT. FROM ABOVE: HLA-DRB1*14:02L HLA-DQA1*01-B1*05L HLA-DQA1*05 :05-B1*03:19M HLA-DQA1*05:01-B1*02:01L HLA-DRB4*01:01L HLA-DPA1* 01:03-B1*04:01L HLA-DQA1*05:05-B1*03:116L HLA-DPA1*01:03-B1*04:0 2L HLA-DRB1*12:01L HLA-DPA1*02:01-B1*13:01L
  REGION 1..10: note = CONT. FROM ABOVE: HLA-DPA1*03:01-B1*105:01L HLA-DPA1*01:03-B1*10 4:01L HLA-DPA1*01:02-B1*04:01L HLA-DRB1*10:01L HLA-DRB1*16:01L H LA-DQA1*01:03-B1*06:01L HLA-DQA1*02:01-B1*03:03L HLA-DRB1*15:03L
  source 1..10: note = Severe acute respiratory syndrome coronavirus 2
LLSDLQDLKW

SEQ ID NO: 9230 - protein, 14 aa, Severe acute respiratory syndrome-related coronavirus
  REGION 1..14: note = Table B: HLA-DQA1*03:02-B1*03:03L HLA-DRB1*04:03L HLA-DRB1*13:03L HLA-DRB1*04:02L HLA-DRB1*04:04L HLA-DRB1*08:04L HLA-DPA1*01:03-B1*03:01L HLA-DQA1*01:01-B1*05:01L HLA-DQA1*01-B1*05L HLA-DQA1*05:05-B1*03:19L HLA-DRB3*01:01L
  REGION 1..14: note = CONT. FROM ABOVE: HLA-DPA1*01:03-B1*104:01L HLA-DQA1*05:05-B1*03 :01L HLA-DRB1*07:01L HLA-DRB1*08:03L
  source 1..14: note = Severe acute respiratory syndrome coronavirus 2
LQDLKWARFPKSDG

SEQ ID NO: 9231 - protein, 14 aa, Severe acute respiratory syndrome-related coronavirus
  REGION 1..14: note = Table B: HLA-DQA1*03:02-B1*03:03L HLA-DRB1*13:02L HLA-DRB1*04:02L HLA-DRB1*04:04L HLA-DRB1*11:03L HLA-DRB1*14:02L HLA-DQA1*05:05-B1*03:19L HLA-DPA1*01:03-B1*04:01L HLA-DQA1*05:05-B1*03:116L HLA-DRB3*01:01L
  REGION 1..14: note = CONT. FROM ABOVE: HLA-DPA1*02:01-B1*13:01L HLA-DPA1*01:03-B1*02: 01L HLA-DQA1*05:05-B1*03:01L HLA-DRB1*10:01L HLA-DRB1*08:02L HLA -DRB1*08:03L HLA-DRB1*15:03L
  source 1..14: note = Severe acute respiratory syndrome coronavirus 2
DLKWARFPKSDGTG

SEQ ID NO: 9232 - protein, 12 aa, Severe acute respiratory syndrome-related coronavirus
  REGION 1..12: note = Table B: HLA-DQA1*03:02-B1*03:03L HLA-DQA1*03:01-B1*03:02L
  source 1..12: note = Severe acute respiratory syndrome coronavirus 2
RFPKSDGTGTIY

SEQ ID NO: 9233 - protein, 13 aa, Severe acute respiratory syndrome-related coronavirus
  REGION 1..13: note = Table B: HLA-DQA1*03:02-B1*03:03L
  source 1..13: note = Severe acute respiratory syndrome coronavirus 2
FPKSDGTGTIYTE

SEQ ID NO: 9234 - protein, 12 aa, Severe acute respiratory syndrome-related coronavirus
  REGION 1..12: note = Table B: HLA-DQA1*03:02-B1*03:03L HLA-DQA1*01:02-B1*06:02L HLA-DQA1*05:01-B1*02:01L HLA-DQA1*03:01-B1*03:02L HLA-DQA1*01:03-B1*06:01L HLA-DQA1*02:01-B1*03:03L
  source 1..12: note = Severe acute respiratory syndrome coronavirus 2
GTGTIYTELEPP

SEQ ID NO: 9235 - protein, 12 aa, Severe acute respiratory syndrome-related coronavirus
  REGION 1..12: note = Table B: HLA-DQA1*03:02-B1*03:03L HLA-DRB1*13:02L HLA-DRB1*13:03L HLA-DRB1*04:02L HLA-DRB1*04:04L HLA-DRB1*04:05L HLA-DRB4*03:01NL HLA-DPA1*01:03-B1*03:01L HLA-DRB1*14:01L HLA-DRB1*08:01L HLA-DQA1*05:05-B1*03:19L
  REGION 1..12: note = CONT. FROM ABOVE: HLA-DPA1*01:03-B1*04:01L HLA-DRB1*04:10L HLA-D PA1*01:03-B1*04:02L HLA-DPA1*02:01-B1*13:01L HLA-DRB1*14:54L HLA -DRB1*14:17L HLA-DRB1*10:01L
  source 1..12: note = Severe acute respiratory syndrome coronavirus 2
GTIYTELEPPCR

SEQ ID NO: 9236 - protein, 10 aa, Severe acute respiratory syndrome-related coronavirus
  REGION 1..10: note = Table B: HLA-DQA1*03:02-B1*03:03L HLA-DQA1*05:05-B1*03:19M HLA-DPA1*01:03-B1*104:01L
  source 1..10: note = Severe acute respiratory syndrome coronavirus 2
TELEPPCRFV

SEQ ID NO: 9237 - protein, 10 aa, Severe acute respiratory syndrome-related coronavirus
  REGION 1..10: note = Table B: HLA-DQA1*03:02-B1*03:03L HLA-DQA1*05:01-B1*03:01L HLA-DRB1*04:01L HLA-DRB1*04:03M HLA-DRB1*13:02L HLA-DRB1*13:03M HLA-DRB1*01:03L HLA-DRB1*04:02M HLA-DRB1*04:04L HLA-DRB1*04:05L HLA-DQA1*01:02-B1*06:02L HLA-DRB1*01:01L HLA-DRB1*01:02L
  REGION 1..10: note = CONT. FROM ABOVE: HLA-DRB4*03:01NM HLA-DRB1*08:04L HLA-DRB1*08:7 7L HLA-DRB3*02:01L HLA-DPA1*01:03-B1*03:01L HLA-DRB1*14:01L HLA- DRB1*11:03L HLA-DRB1*11:04L HLA-DRB1*14:02L HLA-DQA1*01:01-B1*05 :01L HLA-DRB1*08:01L HLA-DRB1*11:01L HLA-DRB5*01:01L
  REGION 1..10: note = CONT. FROM ABOVE: HLA-DQA1*01-B1*05L HLA-DQA1*05:05-B1*03:19L HL A-DQA1*05:01-B1*02:01L HLA-DRB1*04:10L HLA-DPA1*01:03-B1*04:02L HLA-DRB1*12:01L HLA-DRB1*12:02L HLA-DRB3*01:01L HLA-DPA1*03:01-B 1*105:01L HLA-DQA1*03:01-B1*03:02L HLA-DRB1*14:54L
  REGION 1..10: note = CONT. FROM ABOVE: HLA-DQA1*05:05-B1*03:01L HLA-DRB1*14:17M HLA-D PA1*01:02-B1*04:01L HLA-DRB1*07:01L HLA-DRB1*10:01L HLA-DRB1*16: 01L HLA-DQA1*01:03-B1*06:01L HLA-DRB1*04:08L HLA-DRB1*08:02L HLA -DRB1*08:03L HLA-DQA1*02:01-B1*03:03L HLA-DRB1*15:03L
  source 1..10: note = Severe acute respiratory syndrome coronavirus 2
FVTDTPKGPK

SEQ ID NO: 9238 - protein, 10 aa, Severe acute respiratory syndrome-related coronavirus
  REGION 1..10: note = Table B: HLA-DQA1*03:02-B1*03:03L HLA-DQA1*05:01-B1*03:01L HLA-DRB1*13:02L HLA-DRB1*13:03L HLA-DRB1*01:03L HLA-DRB1*08:77L HLA-DPA1*01:03-B1*03:01L HLA-DPA1*03:01-B1*04:02L HLA-DRB1*14:01L HLA-DRB1*11:02L HLA-DRB1*14:02L
  REGION 1..10: note = CONT. FROM ABOVE: HLA-DQA1*01-B1*05L HLA-DQA1*05:05-B1*03:19L HL A-DQA1*05:01-B1*02:01L HLA-DPA1*01:03-B1*04:01L HLA-DQA1*05:05-B 1*03:116L HLA-DRB1*09:01L HLA-DPA1*01:03-B1*04:02L HLA-DQA1*03:0 1-B1*03:02L HLA-DPA1*01:03-B1*104:01L HLA-DPA1*01:02-B1*04:01L
  REGION 1..10: note = CONT. FROM ABOVE: HLA-DRB1*10:01L HLA-DRB1*16:01L HLA-DQA1*02:01 -B1*03:03L HLA-DRB1*15:03L
  source 1..10: note = Severe acute respiratory syndrome coronavirus 2
VTDTPKGPKV

SEQ ID NO: 9239 - protein, 18 aa, Severe acute respiratory syndrome-related coronavirus
  REGION 1..18: note = Table B: HLA-DQA1*03:02-B1*03:03L HLA-DRB1*01:01L HLA-DRB1*03:01L HLA-DRB1*10:01L
  source 1..18: note = Severe acute respiratory syndrome coronavirus 2
TPKGPKVKYLYFIKGLNN

SEQ ID NO: 9240 - protein, 10 aa, Severe acute respiratory syndrome-related coronavirus
  REGION 1..10: note = Table B: HLA-DQA1*03:02-B1*03:03L HLA-DPA1*02:01-B1*13:01L HLA-DQA1*01:03-B1*06:01L HLA-DQA1*02:01-B1*03:03L
  source 1..10: note = Severe acute respiratory syndrome coronavirus 2
LYFIKGLNNL

SEQ ID NO: 9241 - protein, 11 aa, Severe acute respiratory syndrome-related coronavirus
  REGION 1..11: note = Table B: HLA-DQA1*03:02-B1*03:03L HLA-DQA1*05:01-B1*03:01L HLA-DQA1*05:05-B1*03:19L HLA-DPA1*03:01-B1*105:01L HLA-DQA1*03:01-B1*03:02L HLA-DQA1*05:05-B1*03:01L
  source 1..11: note = Severe acute respiratory syndrome coronavirus 2
NLNRGMVLGSL

SEQ ID NO: 9242 - protein, 10 aa, Severe acute respiratory syndrome-related coronavirus
  REGION 1..10: note = Table B: HLA-DQA1*03:02-B1*03:03L HLA-DRB1*15:03L
  source 1..10: note = Severe acute respiratory syndrome coronavirus 2
MVLGSLAATV

SEQ ID NO: 9243 - protein, 10 aa, Severe acute respiratory syndrome-related coronavirus
  REGION 1..10: note = Table B: HLA-DQA1*03:02-B1*03:03L HLA-DQA1*05:01-B1*03:01L HLA-DRB1*04:03L HLA-DRB1*13:03L HLA-DRB1*01:03L HLA-DRB1*04:02L HLA-DQA1*01:02-B1*06:02L HLA-DRB1*01:02L HLA-DRB4*03:01NL HLA-DQA1*01:01-B1*05:01L HLA-DRB1*08:01L
  REGION 1..10: note = CONT. FROM ABOVE: HLA-DQA1*05:05-B1*03:19L HLA-DQA1*05:01-B1*02: 01L HLA-DPA1*01:03-B1*04:02L HLA-DRB1*12:01L HLA-DPA1*03:01-B1*1 05:01L HLA-DQA1*03:01-B1*03:02L HLA-DQA1*05:05-B1*03:01L HLA-DRB 1*14:17L HLA-DPA1*01:02-B1*04:01L HLA-DRB1*16:01L
  REGION 1..10: note = CONT. FROM ABOVE: HLA-DQA1*01:03-B1*06:01L HLA-DRB1*04:08L HLA-D QA1*02:01-B1*03:03L
  source 1..10: note = Severe acute respiratory syndrome coronavirus 2
VLGSLAATVR

SEQ ID NO: 9244 - protein, 12 aa, Severe acute respiratory syndrome-related coronavirus
  REGION 1..12: note = Table B: HLA-DQA1*03:02-B1*03:03L HLA-DRB1*01:02L HLA-DRB1*08:01L HLA-DRB1*11:01L
  source 1..12: note = Severe acute respiratory syndrome coronavirus 2
SLAATVRLQAGN

SEQ ID NO: 9245 - protein, 12 aa, Severe acute respiratory syndrome-related coronavirus
  REGION 1..12: note = Table B: HLA-DQA1*03:02-B1*03:03L HLA-DRB1*08:04L
  source 1..12: note = Severe acute respiratory syndrome coronavirus 2
LAATVRLQAGNA

SEQ ID NO: 9246 - protein, 12 aa, Severe acute respiratory syndrome-related coronavirus
  REGION 1..12: note = Table B: HLA-DQA1*03:02-B1*03:03L HLA-DRB4*03:01NL HLA-DRB1*14:01L HLA-DQA1*05:05-B1*03:19L HLA-DRB1*04:10L HLA-DRB1*12:01L HLA-DPA1*03:01-B1*105:01L HLA-DRB1*14:54L
  source 1..12: note = Severe acute respiratory syndrome coronavirus 2
AATVRLQAGNAT

SEQ ID NO: 9247 - protein, 10 aa, Severe acute respiratory syndrome-related coronavirus
  REGION 1..10: note = Table B: HLA-DQA1*03:02-B1*03:03L HLA-DQA1*02:01-B1*03:03L
  source 1..10: note = Severe acute respiratory syndrome coronavirus 2
RLQAGNATEV

SEQ ID NO: 9248 - protein, 12 aa, Severe acute respiratory syndrome-related coronavirus
  REGION 1..12: note = Table B: HLA-DQA1*03:02-B1*03:03L HLA-DQA1*05:01-B1*03:01L HLA-DQA1*01:02-B1*06:02L HLA-DQA1*01:01-B1*05:01L HLA-DQA1*05:05-B1*03:19L HLA-DQA1*05:01-B1*02:01L HLA-DQA1*05:05-B1*03:01L HLA-DQA1*01:03-B1*06:01L
  REGION 1..12: note = CONT. FROM ABOVE: HLA-DRB1*04:08L HLA-DQA1*02:01-B1*03:03L
  source 1..12: note = Severe acute respiratory syndrome coronavirus 2
LQAGNATEVPAN

SEQ ID NO: 9249 - protein, 12 aa, Severe acute respiratory syndrome-related coronavirus
  REGION 1..12: note = Table B: HLA-DQA1*03:02-B1*03:03L HLA-DQA1*05:01-B1*03:01L HLA-DRB1*04:03L HLA-DQA1*05:05-B1*03:19L HLA-DQA1*05:01-B1*02:01L HLA-DQA1*05:05-B1*03:01L HLA-DRB1*14:17L HLA-DQA1*01:03-B1*06:01L
  REGION 1..12: note = CONT. FROM ABOVE: HLA-DQA1*02:01-B1*03:03L
  source 1..12: note = Severe acute respiratory syndrome coronavirus 2
AGNATEVPANST

SEQ ID NO: 9250 - protein, 10 aa, Severe acute respiratory syndrome-related coronavirus
  REGION 1..10: note = Table B: HLA-DQA1*03:02-B1*03:03M HLA-DQA1*05:01-B1*03:01L HLA-DRB1*13:03L HLA-DRB1*01:02L HLA-DRB1*08:77L HLA-DRB1*11:02L HLA-DQA1*01-B1*05L HLA-DQA1*05:05-B1*03:19M HLA-DQA1*05:01-B1*02:01L HLA-DQA1*05:05-B1*03:116L
  REGION 1..10: note = CONT. FROM ABOVE: HLA-DRB1*09:01L HLA-DPA1*03:01-B1*105:01L HLA- DQA1*03:01-B1*03:02L HLA-DPA1*01:03-B1*104:01L HLA-DRB1*10:01L H LA-DRB1*16:01L HLA-DQA1*02:01-B1*03:03L HLA-DRB1*15:03L
  source 1..10: note = Severe acute respiratory syndrome coronavirus 2
ATEVPANSTV

SEQ ID NO: 9251 - protein, 10 aa, Severe acute respiratory syndrome-related coronavirus
  REGION 1..10: note = Table B: HLA-DQA1*03:02-B1*03:03H HLA-DQA1*05:01-B1*03:01L HLA-DRB1*13:03L HLA-DRB1*08:77L HLA-DPA1*03:01-B1*04:02L HLA-DRB1*11:02L HLA-DRB1*14:02L HLA-DRB1*11:01L HLA-DQA1*05:05-B1*03:19M HLA-DQA1*05:01-B1*02:01L
  REGION 1..10: note = CONT. FROM ABOVE: HLA-DRB4*01:01L HLA-DPA1*01:03-B1*04:01L HLA-D QA1*05:05-B1*03:116L HLA-DRB1*09:01M HLA-DPA1*01:03-B1*04:02L HL A-DQA1*03:01-B1*03:02M HLA-DPA1*01:03-B1*104:01L HLA-DPA1*01:02- B1*04:01L HLA-DRB1*07:01L HLA-DRB1*10:01L HLA-DRB1*16:01L
  REGION 1..10: note = CONT. FROM ABOVE: HLA-DQA1*02:01-B1*03:03L HLA-DRB1*15:03L
  source 1..10: note = Severe acute respiratory syndrome coronavirus 2
TEVPANSTVL

SEQ ID NO: 9252 - protein, 11 aa, Severe acute respiratory syndrome-related coronavirus
  REGION 1..11: note = Table B: HLA-DQA1*03:02-B1*03:03L HLA-DRB1*01:03L HLA-DRB1*08:77L HLA-DQA1*05:05-B1*03:19L HLA-DPA1*01:03-B1*04:01L HLA-DQA1*02:01-B1*03:03L
  source 1..11: note = Severe acute respiratory syndrome coronavirus 2
EVPANSTVLSF

SEQ ID NO: 9253 - protein, 15 aa, Severe acute respiratory syndrome-related coronavirus
  REGION 1..15: note = Table B: HLA-DQA1*03:02-B1*03:03L HLA-DRB1*13:02L HLA-DRB1*13:03L HLA-DRB1*04:04L HLA-DRB1*08:04L HLA-DRB1*14:01L HLA-DRB1*11:04L HLA-DRB1*14:02L HLA-DRB1*11:01L HLA-DQA1*05:05-B1*03:19L HLA-DQA1*05:01-B1*02:01L
  REGION 1..15: note = CONT. FROM ABOVE: HLA-DRB3*01:01L HLA-DPA1*01:03-B1*104:01L HLA- DRB1*10:01L HLA-DRB1*08:03L
  source 1..15: note = Severe acute respiratory syndrome coronavirus 2
STVLSFCAFAVDAAK

SEQ ID NO: 9254 - protein, 10 aa, Severe acute respiratory syndrome-related coronavirus
  REGION 1..10: note = Table B: HLA-DQA1*03:02-B1*03:03L HLA-DQA1*05:01-B1*03:01L HLA-DRB1*04:03L HLA-DRB1*13:02L HLA-DRB1*13:03L HLA-DRB1*01:03L HLA-DRB1*04:05L HLA-DQA1*01:02-B1*06:02L HLA-DRB4*03:01NL HLA-DRB1*08:77L HLA-DPA1*01:03-B1*03:01L
  REGION 1..10: note = CONT. FROM ABOVE: HLA-DPA1*03:01-B1*04:02L HLA-DRB1*03:01L HLA-D RB1*14:01L HLA-DRB1*14:02L HLA-DQA1*01-B1*05L HLA-DQA1*05:05-B1* 03:19L HLA-DQA1*05:01-B1*02:01L HLA-DRB4*01:01L HLA-DPA1*01:03-B 1*04:01L HLA-DQA1*05:05-B1*03:116L HLA-DPA1*01:03-B1*04:02L
  REGION 1..10: note = CONT. FROM ABOVE: HLA-DRB1*12:01L HLA-DPA1*02:01-B1*13:01L HLA-D PA1*03:01-B1*105:01L HLA-DQA1*03:01-B1*03:02L HLA-DPA1*01:03-B1* 104:01L HLA-DQA1*05:05-B1*03:01L HLA-DPA1*01:02-B1*04:01L HLA-DR B1*10:01L HLA-DRB1*16:01L HLA-DQA1*01:03-B1*06:01L
  REGION 1..10: note = CONT. FROM ABOVE: HLA-DRB1*08:02L HLA-DQA1*02:01-B1*03:03L HLA-D RB1*15:03L
  source 1..10: note = Severe acute respiratory syndrome coronavirus 2
AFAVDAAKAY

SEQ ID NO: 9255 - protein, 10 aa, Severe acute respiratory syndrome-related coronavirus
  REGION 1..10: note = Table B: HLA-DQA1*03:02-B1*03:03L HLA-DQA1*05:01-B1*03:01L HLA-DRB1*04:03L HLA-DRB1*13:02L HLA-DRB1*13:03L HLA-DRB1*01:03L HLA-DRB1*04:02L HLA-DRB1*04:05L HLA-DRB1*01:02L HLA-DRB4*03:01NL HLA-DRB1*08:77L HLA-DPA1*01:03-B1*03:01L HLA-DRB1*14:01L
  REGION 1..10: note = CONT. FROM ABOVE: HLA-DRB1*11:04L HLA-DQA1*01-B1*05L HLA-DQA1*05 :05-B1*03:19L HLA-DQA1*05:01-B1*02:01L HLA-DRB1*12:01L HLA-DPA1* 03:01-B1*105:01L HLA-DQA1*03:01-B1*03:02L HLA-DRB1*14:54L HLA-DQ A1*05:05-B1*03:01L HLA-DRB1*14:17L HLA-DPA1*01:02-B1*04:01L
  REGION 1..10: note = CONT. FROM ABOVE: HLA-DRB1*16:01L HLA-DQA1*01:03-B1*06:01L HLA-D RB1*04:08L HLA-DQA1*02:01-B1*03:03L HLA-DRB1*15:03L
  source 1..10: note = Severe acute respiratory syndrome coronavirus 2
AVDAAKAYKD

SEQ ID NO: 9256 - protein, 10 aa, Severe acute respiratory syndrome-related coronavirus
  REGION 1..10: note = Table B: HLA-DQA1*03:02-B1*03:03L HLA-DQA1*05:01-B1*03:01L HLA-DRB1*04:03L HLA-DRB1*13:02L HLA-DRB1*13:03L HLA-DRB1*01:03L HLA-DRB1*04:02L HLA-DQA1*01:02-B1*06:02L HLA-DRB4*03:01NL HLA-DRB1*08:77L HLA-DPA1*01:03-B1*03:01L
  REGION 1..10: note = CONT. FROM ABOVE: HLA-DPA1*03:01-B1*04:02L HLA-DRB1*03:01L HLA-D RB1*14:01L HLA-DRB1*11:02L HLA-DRB1*14:02L HLA-DQA1*01-B1*05L HL A-DQA1*05:05-B1*03:19M HLA-DQA1*05:01-B1*02:01L HLA-DRB4*01:01L HLA-DPA1*01:03-B1*04:01L HLA-DQA1*05:05-B1*03:116L
  REGION 1..10: note = CONT. FROM ABOVE: HLA-DPA1*01:03-B1*04:02L HLA-DRB1*12:01L HLA-D PA1*02:01-B1*13:01L HLA-DPA1*03:01-B1*105:01L HLA-DQA1*03:01-B1* 03:02L HLA-DPA1*01:03-B1*104:01L HLA-DQA1*05:05-B1*03:01L HLA-DR B1*14:17L HLA-DPA1*01:02-B1*04:01L HLA-DRB1*10:01L
  REGION 1..10: note = CONT. FROM ABOVE: HLA-DRB1*16:01L HLA-DQA1*01:03-B1*06:01L HLA-D QA1*02:01-B1*03:03L HLA-DRB1*15:03L
  source 1..10: note = Severe acute respiratory syndrome coronavirus 2
VDAAKAYKDY

SEQ ID NO: 9257 - protein, 14 aa, Severe acute respiratory syndrome-related coronavirus
  REGION 1..14: note = Table B: HLA-DQA1*03:02-B1*03:03L HLA-DRB1*01:03L HLA-DRB1*04:04L HLA-DRB3*02:01L HLA-DRB1*14:01L HLA-DRB1*08:01L HLA-DQA1*05:01-B1*02:01L HLA-DRB1*04:10L HLA-DPA1*01:03-B1*104:01L HLA-DPA1*01:02-B1*04:01L
  REGION 1..14: note = CONT. FROM ABOVE: HLA-DRB1*07:01L
  source 1..14: note = Severe acute respiratory syndrome coronavirus 2
DAAKAYKDYLASGG

SEQ ID NO: 9258 - protein, 14 aa, Severe acute respiratory syndrome-related coronavirus
  REGION 1..14: note = Table B: HLA-DQA1*03:02-B1*03:03L HLA-DQA1*05:01-B1*03:01L HLA-DRB1*13:02L HLA-DRB1*13:03L HLA-DRB1*04:04L HLA-DQA1*01:02-B1*06:02L HLA-DPA1*01:03-B1*03:01L HLA-DPA1*03:01-B1*04:02L HLA-DRB1*14:01L HLA-DRB1*08:01L
  REGION 1..14: note = CONT. FROM ABOVE: HLA-DQA1*05:01-B1*02:01L HLA-DRB1*04:10L HLA-D PA1*01:03-B1*04:02L HLA-DPA1*01:03-B1*104:01L HLA-DQA1*05:05-B1* 03:01L HLA-DRB1*14:17L HLA-DRB1*07:01L HLA-DQA1*01:03-B1*06:01L
  source 1..14: note = Severe acute respiratory syndrome coronavirus 2
AKAYKDYLASGGQP

SEQ ID NO: 9259 - protein, 11 aa, Severe acute respiratory syndrome-related coronavirus
  REGION 1..11: note = Table B: HLA-DQA1*03:02-B1*03:03L HLA-DRB1*04:03L HLA-DRB1*13:02L HLA-DRB1*13:03L HLA-DRB1*04:02L HLA-DRB4*03:01NL HLA-DRB1*08:77L HLA-DRB3*02:01L HLA-DRB1*11:03L HLA-DQA1*05:01-B1*02:01L HLA-DRB1*09:01L HLA-DRB1*12:01L
  REGION 1..11: note = CONT. FROM ABOVE: HLA-DRB1*12:02L HLA-DQA1*03:01-B1*03:02L HLA-D RB1*07:01L HLA-DRB1*16:01L HLA-DQA1*02:01-B1*03:03L HLA-DRB1*15: 03L
  source 1..11: note = Severe acute respiratory syndrome coronavirus 2
KDYLASGGQPI

SEQ ID NO: 9260 - protein, 10 aa, Severe acute respiratory syndrome-related coronavirus
  REGION 1..10: note = Table B: HLA-DQA1*03:02-B1*03:03L HLA-DQA1*05:01-B1*03:01L HLA-DRB1*04:03L HLA-DRB1*13:02L HLA-DRB1*13:03L HLA-DRB1*01:03L HLA-DRB1*04:02L HLA-DRB1*01:02L HLA-DRB4*03:01NL HLA-DRB1*08:77L HLA-DRB3*02:01L HLA-DRB1*11:03L HLA-DRB1*11:04L
  REGION 1..10: note = CONT. FROM ABOVE: HLA-DQA1*05:05-B1*03:19L HLA-DQA1*05:01-B1*02: 01L HLA-DRB1*09:01L HLA-DRB1*12:01L HLA-DRB1*12:02L HLA-DRB1*07: 01L HLA-DRB1*16:01L HLA-DQA1*02:01-B1*03:03L HLA-DRB1*15:03L
  source 1..10: note = Severe acute respiratory syndrome coronavirus 2
YLASGGQPIT

SEQ ID NO: 9261 - protein, 10 aa, Severe acute respiratory syndrome-related coronavirus
  REGION 1..10: note = Table B: HLA-DQA1*03:02-B1*03:03L HLA-DQA1*05:01-B1*03:01L HLA-DRB1*04:03L HLA-DRB1*13:03L HLA-DQA1*01:02-B1*06:02L HLA-DRB4*03:01NL HLA-DQA1*05:05-B1*03:19L HLA-DQA1*05:01-B1*02:01L HLA-DRB1*12:01L
  REGION 1..10: note = CONT. FROM ABOVE: HLA-DQA1*03:01-B1*03:02L HLA-DQA1*05:05-B1*03: 01L HLA-DRB1*14:17L HLA-DRB1*16:01L HLA-DQA1*01:03-B1*06:01L HLA -DQA1*02:01-B1*03:03L
  source 1..10: note = Severe acute respiratory syndrome coronavirus 2
LASGGQPITN

SEQ ID NO: 9262 - protein, 12 aa, Severe acute respiratory syndrome-related coronavirus
  REGION 1..12: note = Table B: HLA-DQA1*03:02-B1*03:03L HLA-DQA1*01:02-B1*06:02L
  source 1..12: note = Severe acute respiratory syndrome coronavirus 2
ASGGQPITNCVK

SEQ ID NO: 9263 - protein, 10 aa, Severe acute respiratory syndrome-related coronavirus
  REGION 1..10: note = Table B: HLA-DQA1*03:02-B1*03:03L HLA-DQA1*05:01-B1*03:01L HLA-DRB1*13:03L HLA-DQA1*01:02-B1*06:02L HLA-DRB1*01:02L HLA-DQA1*05:05-B1*03:19L HLA-DQA1*05:05-B1*03:116L HLA-DPA1*03:01-B1*105:01L HLA-DQA1*03:01-B1*03:02L
  REGION 1..10: note = CONT. FROM ABOVE: HLA-DRB1*16:01L HLA-DQA1*02:01-B1*03:03L HLA-D RB1*15:03L
  source 1..10: note = Severe acute respiratory syndrome coronavirus 2
HTGTGQAITV

SEQ ID NO: 9264 - protein, 11 aa, Severe acute respiratory syndrome-related coronavirus
  REGION 1..11: note = Table B: HLA-DQA1*03:02-B1*03:03L HLA-DQA1*03:01-B1*03:02L HLA-DQA1*01:03-B1*06:01L HLA-DQA1*02:01-B1*03:03L
  source 1..11: note = Severe acute respiratory syndrome coronavirus 2
GTGQAITVTPE

SEQ ID NO: 9265 - protein, 10 aa, Severe acute respiratory syndrome-related coronavirus
  REGION 1..10: note = Table B: HLA-DQA1*03:02-B1*03:03L HLA-DRB1*04:03L HLA-DQA1*05:01-B1*02:01L HLA-DQA1*03:01-B1*03:02L HLA-DQA1*01:03-B1*06:01L HLA-DQA1*02:01-B1*03:03L
  source 1..10: note = Severe acute respiratory syndrome coronavirus 2
QAITVTPEAN

SEQ ID NO: 9266 - protein, 11 aa, Severe acute respiratory syndrome-related coronavirus
  REGION 1..11: note = Table B: HLA-DQA1*03:02-B1*03:03L HLA-DRB1*04:02L HLA-DQA1*01-B1*05L HLA-DRB1*12:01L HLA-DQA1*01:03-B1*06:01L
  source 1..11: note = Severe acute respiratory syndrome coronavirus 2
AITVTPEANMD

SEQ ID NO: 9267 - protein, 11 aa, Severe acute respiratory syndrome-related coronavirus
  REGION 1..11: note = Table B: HLA-DQA1*03:02-B1*03:03L HLA-DRB1*04:02L HLA-DRB1*04:05L HLA-DRB4*03:01NL HLA-DRB1*04:10L HLA-DRB1*14:54L HLA-DRB1*16:01L HLA-DQA1*01:03-B1*06:01L
  source 1..11: note = Severe acute respiratory syndrome coronavirus 2
ITVTPEANMDQ

SEQ ID NO: 9268 - protein, 12 aa, Severe acute respiratory syndrome-related coronavirus
  REGION 1..12: note = Table B: HLA-DQA1*03:02-B1*03:03L HLA-DQA1*01-B1*05L
  source 1..12: note = Severe acute respiratory syndrome coronavirus 2
VTPEANMDQESF

SEQ ID NO: 9269 - protein, 12 aa, Severe acute respiratory syndrome-related coronavirus
  REGION 1..12: note = Table B: HLA-DQA1*03:02-B1*03:03L HLA-DRB1*04:03L HLA-DQA1*01:01-B1*05:01L HLA-DQA1*01-B1*05L HLA-DRB1*12:01L HLA-DQA1*03:01-B1*03:02L HLA-DRB1*16:01L HLA-DQA1*01:03-B1*06:01L HLA-DQA1*02:01-B1*03:03L
  source 1..12: note = Severe acute respiratory syndrome coronavirus 2
TPEANMDQESFG

SEQ ID NO: 9270 - protein, 12 aa, Severe acute respiratory syndrome-related coronavirus
  REGION 1..12: note = Table B: HLA-DQA1*03:02-B1*03:03L HLA-DRB1*04:03L HLA-DQA1*01-B1*05L HLA-DQA1*05:01-B1*02:01L HLA-DQA1*03:01-B1*03:02L
  source 1..12: note = Severe acute respiratory syndrome coronavirus 2
ANMDQESFGGAS

SEQ ID NO: 9271 - protein, 14 aa, Severe acute respiratory syndrome-related coronavirus
  REGION 1..14: note = Table B: HLA-DQA1*03:02-B1*03:03L HLA-DQA1*05:01-B1*03:01L
  source 1..14: note = Severe acute respiratory syndrome coronavirus 2
MDQESFGGASCCLY

SEQ ID NO: 9272 - protein, 10 aa, Severe acute respiratory syndrome-related coronavirus
  REGION 1..10: note = Table B: HLA-DQA1*03:02-B1*03:03L HLA-DQA1*05:01-B1*03:01L HLA-DRB1*04:03L HLA-DRB1*13:02L HLA-DRB1*13:03L HLA-DRB1*01:03M HLA-DRB1*04:02L HLA-DRB1*04:05L HLA-DQA1*01:02-B1*06:02M HLA-DRB1*01:01L HLA-DRB1*01:02L HLA-DRB4*03:01NL HLA-DRB1*08:77L
  REGION 1..10: note = CONT. FROM ABOVE: HLA-DPA1*01:03-B1*03:01L HLA-DPA1*03:01-B1*04: 02L HLA-DRB1*03:01L HLA-DRB1*14:01L HLA-DRB1*11:02L HLA-DRB1*11: 03L HLA-DRB1*14:02L HLA-DQA1*01:01-B1*05:01L HLA-DRB1*08:01L HLA -DRB1*11:01L HLA-DQA1*01-B1*05L HLA-DQA1*05:05-B1*03:19M
  REGION 1..10: note = CONT. FROM ABOVE: HLA-DQA1*05:01-B1*02:01M HLA-DRB4*01:01L HLA-D PA1*01:03-B1*04:01L HLA-DQA1*05:05-B1*03:116L HLA-DPA1*01:03-B1* 04:02L HLA-DRB1*12:01L HLA-DPA1*02:01-B1*13:01L HLA-DPA1*03:01-B 1*105:01L HLA-DQA1*03:01-B1*03:02L HLA-DPA1*01:03-B1*104:01L
  REGION 1..10: note = CONT. FROM ABOVE: HLA-DQA1*05:05-B1*03:01L HLA-DPA1*01:02-B1*04: 01L HLA-DRB1*10:01L HLA-DRB1*16:01M HLA-DQA1*01:03-B1*06:01L HLA -DRB1*08:02L HLA-DQA1*02:01-B1*03:03M HLA-DRB1*15:03L
  source 1..10: note = Severe acute respiratory syndrome coronavirus 2
HIDHPNPKGF

SEQ ID NO: 9273 - protein, 16 aa, Severe acute respiratory syndrome-related coronavirus
  REGION 1..16: note = Table B: HLA-DQA1*03:02-B1*03:03L HLA-DPA1*03:01-B1*04:02L HLA-DRB1*03:01L HLA-DRB1*11:02L HLA-DRB1*09:01L HLA-DQA1*01:03-B1*06:01L
  source 1..16: note = Severe acute respiratory syndrome coronavirus 2
LKGKYVQIPTTCANDP

SEQ ID NO: 9274 - protein, 16 aa, Severe acute respiratory syndrome-related coronavirus
  REGION 1..16: note = Table B: HLA-DQA1*03:02-B1*03:03L HLA-DRB1*09:01L HLA-DQA1*01:03-B1*06:01L
  source 1..16: note = Severe acute respiratory syndrome coronavirus 2
KGKYVQIPTTCANDPV

SEQ ID NO: 9275 - protein, 11 aa, Severe acute respiratory syndrome-related coronavirus
  REGION 1..11: note = Table B: HLA-DQA1*03:02-B1*03:03L HLA-DQA1*01-B1*05L HLA-DQA1*05:01-B1*02:01L HLA-DQA1*03:01-B1*03:02L HLA-DQA1*02:01-B1*03:03L
  source 1..11: note = Severe acute respiratory syndrome coronavirus 2
IPTTCANDPVG

SEQ ID NO: 9276 - protein, 11 aa, Severe acute respiratory syndrome-related coronavirus
  REGION 1..11: note = Table B: HLA-DQA1*03:02-B1*03:03L HLA-DQA1*05:01-B1*03:01L HLA-DRB1*13:03L HLA-DRB1*04:05L HLA-DQA1*01:02-B1*06:02L HLA-DPA1*03:01-B1*04:02L HLA-DRB1*14:01L HLA-DQA1*01-B1*05L HLA-DQA1*05:05-B1*03:19L HLA-DQA1*05:01-B1*02:01L
  REGION 1..11: note = CONT. FROM ABOVE: HLA-DQA1*05:05-B1*03:116L HLA-DPA1*02:01-B1*13 :01L HLA-DPA1*03:01-B1*105:01L HLA-DQA1*03:01-B1*03:02L HLA-DPA1 *01:02-B1*04:01L HLA-DRB1*16:01L HLA-DQA1*01:03-B1*06:01L HLA-DQ A1*02:01-B1*03:03L HLA-DRB1*15:03L
  source 1..11: note = Severe acute respiratory syndrome coronavirus 2
DPVGFTLKNTV

SEQ ID NO: 9277 - protein, 10 aa, Severe acute respiratory syndrome-related coronavirus
  REGION 1..10: note = Table B: HLA-DQA1*03:02-B1*03:03L
  source 1..10: note = Severe acute respiratory syndrome coronavirus 2
REPMLQSADA

SEQ ID NO: 9278 - protein, 12 aa, Severe acute respiratory syndrome-related coronavirus
  REGION 1..12: note = Table B: HLA-DQA1*03:02-B1*03:03L HLA-DQA1*05:01-B1*03:01L HLA-DRB1*04:03L HLA-DRB1*13:02L HLA-DRB1*01:03L HLA-DRB1*04:02L HLA-DRB1*04:05L HLA-DRB4*03:01NL HLA-DRB1*08:77L HLA-DRB3*02:01L HLA-DPA1*01:03-B1*03:01L HLA-DPA1*03:01-B1*04:02L
  REGION 1..12: note = CONT. FROM ABOVE: HLA-DRB1*14:01L HLA-DQA1*01-B1*05L HLA-DQA1*05 :05-B1*03:19L HLA-DQA1*05:01-B1*02:01L HLA-DPA1*01:03-B1*04:01L HLA-DRB1*04:10L HLA-DRB1*12:01L HLA-DRB1*12:02L HLA-DQA1*03:01-B 1*03:02L HLA-DRB1*14:54L HLA-DQA1*05:05-B1*03:01L
  REGION 1..12: note = CONT. FROM ABOVE: HLA-DRB1*14:17L HLA-DPA1*01:02-B1*04:01L HLA-D RB1*07:01L HLA-DRB1*16:01L
  source 1..12: note = Severe acute respiratory syndrome coronavirus 2
EPMLQSADAQSF

SEQ ID NO: 9279 - protein, 13 aa, Severe acute respiratory syndrome-related coronavirus
  REGION 1..13: note = Table B: HLA-DQA1*03:02-B1*03:03L HLA-DRB1*04:02L HLA-DRB1*01:02L HLA-DPA1*01:03-B1*03:01L HLA-DRB1*12:01L HLA-DRB1*14:17L HLA-DRB1*16:01L
  source 1..13: note = Severe acute respiratory syndrome coronavirus 2
PMLQSADAQSFLN

SEQ ID NO: 9280 - protein, 12 aa, Severe acute respiratory syndrome-related coronavirus
  REGION 1..12: note = Table B: HLA-DQA1*03:02-B1*03:03L HLA-DRB1*04:03L HLA-DRB1*04:05L HLA-DRB1*01:02L HLA-DPA1*01:03-B1*03:01L HLA-DQA1*01:01-B1*05:01L HLA-DQA1*05:01-B1*02:01L HLA-DPA1*01:02-B1*04:01L HLA-DRB1*04:08L HLA-DRB1*15:03L
  source 1..12: note = Severe acute respiratory syndrome coronavirus 2
LQSADAQSFLNR

SEQ ID NO: 9281 - protein, 10 aa, Severe acute respiratory syndrome-related coronavirus
  REGION 1..10: note = Table B: HLA-DQA1*03:02-B1*03:03L HLA-DQA1*05:01-B1*03:01L HLA-DRB1*11:02L HLA-DQA1*05:05-B1*03:19M HLA-DQA1*05:01-B1*02:01L HLA-DQA1*03:01-B1*03:02L HLA-DPA1*01:03-B1*104:01M HLA-DRB1*16:01L
  REGION 1..10: note = CONT. FROM ABOVE: HLA-DQA1*02:01-B1*03:03L
  source 1..10: note = Severe acute respiratory syndrome coronavirus 2
ADAQSFLNRV

SEQ ID NO: 9282 - protein, 12 aa, Severe acute respiratory syndrome-related coronavirus
  REGION 1..12: note = Table B: HLA-DQA1*03:02-B1*03:03L HLA-DPA1*03:01-B1*105:01L
  source 1..12: note = Severe acute respiratory syndrome coronavirus 2
VSAARLTPCGTG

SEQ ID NO: 9283 - protein, 10 aa, Severe acute respiratory syndrome-related coronavirus
  REGION 1..10: note = Table B: HLA-DQA1*03:02-B1*03:03L HLA-DQA1*05:01-B1*03:01L HLA-DRB1*04:01L HLA-DRB1*04:03L HLA-DRB1*13:02M HLA-DRB1*13:03M HLA-DRB1*01:03L HLA-DRB1*04:02L HLA-DRB1*04:04L HLA-DRB1*04:05L HLA-DQA1*01:02-B1*06:02L HLA-DRB1*01:01L HLA-DRB4*03:01NL
  REGION 1..10: note = CONT. FROM ABOVE: HLA-DRB1*08:77L HLA-DRB3*02:01L HLA-DRB1*14:01 L HLA-DRB1*11:03L HLA-DRB1*11:04L HLA-DRB1*14:02L HLA-DQA1*01:01 -B1*05:01L HLA-DRB1*08:01L HLA-DRB1*11:01L HLA-DRB5*01:01L HLA-D QA1*01-B1*05L HLA-DQA1*05:05-B1*03:19L HLA-DQA1*05:01-B1*02:01L
  REGION 1..10: note = CONT. FROM ABOVE: HLA-DPA1*01:03-B1*04:01L HLA-DPA1*01:03-B1*04: 02L HLA-DRB1*12:01M HLA-DRB1*12:02L HLA-DPA1*03:01-B1*105:01L HL A-DQA1*03:01-B1*03:02M HLA-DRB1*14:54L HLA-DQA1*05:05-B1*03:01M HLA-DRB1*14:17L HLA-DPA1*01:02-B1*04:01L HLA-DRB1*10:01L
  REGION 1..10: note = CONT. FROM ABOVE: HLA-DRB1*16:01L HLA-DQA1*01:03-B1*06:01L HLA-D RB1*08:02L HLA-DRB1*08:03L HLA-DQA1*02:01-B1*03:03L
  source 1..10: note = Severe acute respiratory syndrome coronavirus 2
TGTSTDVVYR

SEQ ID NO: 9284 - protein, 10 aa, Severe acute respiratory syndrome-related coronavirus
  REGION 1..10: note = Table B: HLA-DQA1*03:02-B1*03:03L HLA-DQA1*03:01-B1*03:02L HLA-DQA1*01:03-B1*06:01L HLA-DQA1*02:01-B1*03:03L
  source 1..10: note = Severe acute respiratory syndrome coronavirus 2
GTSTDVVYRA

SEQ ID NO: 9285 - protein, 10 aa, Severe acute respiratory syndrome-related coronavirus
  REGION 1..10: note = Table B: HLA-DQA1*03:02-B1*03:03L HLA-DQA1*05:01-B1*03:01L HLA-DRB1*13:02L HLA-DRB1*13:03L HLA-DRB1*01:03L HLA-DQA1*01:02-B1*06:02M HLA-DRB4*03:01NL HLA-DRB1*08:77L HLA-DPA1*01:03-B1*03:01L HLA-DPA1*03:01-B1*04:02L
  REGION 1..10: note = CONT. FROM ABOVE: HLA-DRB1*03:01L HLA-DRB1*14:01L HLA-DRB1*14:02 L HLA-DRB5*01:01L HLA-DQA1*01-B1*05L HLA-DQA1*05:05-B1*03:19L HL A-DQA1*05:01-B1*02:01L HLA-DRB4*01:01L HLA-DPA1*01:03-B1*04:01M HLA-DQA1*05:05-B1*03:116L HLA-DPA1*01:03-B1*04:02L
  REGION 1..10: note = CONT. FROM ABOVE: HLA-DRB1*12:01L HLA-DPA1*02:01-B1*13:01L HLA-D PA1*03:01-B1*105:01M HLA-DQA1*03:01-B1*03:02L HLA-DPA1*01:03-B1* 104:01L HLA-DQA1*05:05-B1*03:01L HLA-DPA1*01:02-B1*04:01L HLA-DR B1*10:01L HLA-DRB1*16:01L HLA-DQA1*01:03-B1*06:01L
  REGION 1..10: note = CONT. FROM ABOVE: HLA-DRB1*08:02L HLA-DQA1*02:01-B1*03:03L HLA-D RB1*15:03L
  source 1..10: note = Severe acute respiratory syndrome coronavirus 2
TSTDVVYRAF

SEQ ID NO: 9286 - protein, 12 aa, Severe acute respiratory syndrome-related coronavirus
  REGION 1..12: note = Table B: HLA-DQA1*03:02-B1*03:03L HLA-DRB1*04:02L HLA-DRB1*04:05L HLA-DPA1*03:01-B1*04:02L HLA-DRB1*12:01L HLA-DQA1*03:01-B1*03:02L HLA-DRB1*14:17L HLA-DQA1*01:03-B1*06:01L HLA-DRB1*04:08L
  REGION 1..12: note = CONT. FROM ABOVE: HLA-DQA1*02:01-B1*03:03L
  source 1..12: note = Severe acute respiratory syndrome coronavirus 2
DVVYRAFDIYND

SEQ ID NO: 9287 - protein, 12 aa, Severe acute respiratory syndrome-related coronavirus
  REGION 1..12: note = Table B: HLA-DQA1*03:02-B1*03:03L HLA-DQA1*05:01-B1*03:01L HLA-DRB1*13:02L HLA-DRB1*04:02L HLA-DRB1*04:04L HLA-DQA1*01:02-B1*06:02L HLA-DRB1*08:04L HLA-DPA1*03:01-B1*04:02L HLA-DRB1*14:01L HLA-DRB1*11:04L
  REGION 1..12: note = CONT. FROM ABOVE: HLA-DQA1*01:01-B1*05:01L HLA-DRB1*11:01L HLA-D QA1*05:01-B1*02:01L HLA-DPA1*01:03-B1*04:01L HLA-DRB1*04:10L HLA -DPA1*01:03-B1*04:02L HLA-DRB1*12:01L HLA-DRB3*01:01L HLA-DPA1*0 2:01-B1*13:01L HLA-DPA1*03:01-B1*105:01L HLA-DRB1*14:17L
  REGION 1..12: note = CONT. FROM ABOVE: HLA-DRB1*10:01L HLA-DQA1*01:03-B1*06:01L HLA-D RB1*08:03L
  source 1..12: note = Severe acute respiratory syndrome coronavirus 2
VVYRAFDIYNDK

SEQ ID NO: 9288 - protein, 10 aa, Severe acute respiratory syndrome-related coronavirus
  REGION 1..10: note = Table B: HLA-DQA1*03:02-B1*03:03L HLA-DQA1*05:01-B1*03:01L HLA-DQA1*01:02-B1*06:02L HLA-DRB1*01:02L HLA-DQA1*05:05-B1*03:19L HLA-DQA1*05:05-B1*03:116L HLA-DPA1*02:01-B1*13:01L HLA-DPA1*03:01-B1*105:01L
  REGION 1..10: note = CONT. FROM ABOVE: HLA-DQA1*03:01-B1*03:02L HLA-DPA1*01:02-B1*04: 01L HLA-DRB1*16:01L HLA-DQA1*01:03-B1*06:01L HLA-DQA1*02:01-B1*0 3:03L HLA-DRB1*15:03L
  source 1..10: note = Severe acute respiratory syndrome coronavirus 2
RAFDIYNDKV

SEQ ID NO: 9289 - protein, 10 aa, Severe acute respiratory syndrome-related coronavirus
  REGION 1..10: note = Table B: HLA-DQA1*03:02-B1*03:03L HLA-DRB1*04:03L HLA-DRB1*13:03L HLA-DRB1*01:03L HLA-DRB1*04:02L HLA-DRB1*04:05L HLA-DRB1*01:02L HLA-DRB4*03:01NL HLA-DQA1*01-B1*05M HLA-DQA1*05:01-B1*02:01L HLA-DRB1*04:10L HLA-DRB1*12:01L
  REGION 1..10: note = CONT. FROM ABOVE: HLA-DQA1*03:01-B1*03:02L HLA-DRB1*14:54L HLA-D RB1*14:17L HLA-DRB1*16:01L HLA-DQA1*01:03-B1*06:01L HLA-DRB1*04: 08L HLA-DQA1*02:01-B1*03:03L HLA-DRB1*15:03L
  source 1..10: note = Severe acute respiratory syndrome coronavirus 2
FDIYNDKVAG

SEQ ID NO: 9290 - protein, 10 aa, Severe acute respiratory syndrome-related coronavirus
  REGION 1..10: note = Table B: HLA-DQA1*03:02-B1*03:03L HLA-DQA1*05:01-B1*03:01L HLA-DRB1*04:01L HLA-DRB1*04:03L HLA-DRB1*13:02L HLA-DRB1*13:03M HLA-DRB1*01:03L HLA-DRB1*04:05L HLA-DQA1*01:02-B1*06:02H HLA-DRB1*01:01L HLA-DRB1*01:02L HLA-DRB4*03:01NL HLA-DRB1*08:77L
  REGION 1..10: note = CONT. FROM ABOVE: HLA-DPA1*01:03-B1*03:01L HLA-DPA1*03:01-B1*04: 02L HLA-DRB1*03:01L HLA-DRB1*14:01L HLA-DRB1*11:03L HLA-DRB1*11: 04L HLA-DRB1*14:02M HLA-DQA1*01:01-B1*05:01L HLA-DRB1*08:01L HLA -DRB1*11:01L HLA-DRB5*01:01L HLA-DQA1*01-B1*05L
  REGION 1..10: note = CONT. FROM ABOVE: HLA-DQA1*05:05-B1*03:19L HLA-DQA1*05:01-B1*02: 01M HLA-DRB4*01:01L HLA-DPA1*01:03-B1*04:01M HLA-DQA1*05:05-B1*0 3:116L HLA-DRB1*09:01L HLA-DPA1*01:03-B1*04:02L HLA-DRB1*12:01L HLA-DPA1*02:01-B1*13:01M HLA-DPA1*03:01-B1*105:01M
  REGION 1..10: note = CONT. FROM ABOVE: HLA-DQA1*03:01-B1*03:02L HLA-DPA1*01:03-B1*104 :01L HLA-DQA1*05:05-B1*03:01L HLA-DPA1*01:02-B1*04:01L HLA-DRB1* 07:01L HLA-DRB1*10:01L HLA-DRB1*16:01L HLA-DQA1*01:03-B1*06:01M HLA-DRB1*08:02L HLA-DRB1*08:03L HLA-DQA1*02:01-B1*03:03M
  REGION 1..10: note = CONT. FROM ABOVE: HLA-DRB1*15:01L HLA-DRB1*15:03M
  source 1..10: note = Severe acute respiratory syndrome coronavirus 2
DIYNDKVAGF

SEQ ID NO: 9291 - protein, 14 aa, Severe acute respiratory syndrome-related coronavirus
  REGION 1..14: note = Table B: HLA-DQA1*03:02-B1*03:03L HLA-DRB3*02:01L HLA-DRB1*11:02L HLA-DRB1*11:03L HLA-DRB1*14:02L HLA-DRB1*13:01L HLA-DPA1*01:03-B1*104:01L HLA-DRB1*07:01L HLA-DRB1*08:03L
  source 1..14: note = Severe acute respiratory syndrome coronavirus 2
NDKVAGFAKFLKTN

SEQ ID NO: 9292 - protein, 10 aa, Severe acute respiratory syndrome-related coronavirus
  REGION 1..10: note = Table B: HLA-DQA1*03:02-B1*03:03L HLA-DQA1*01-B1*05L HLA-DQA1*05:01-B1*02:01L HLA-DQA1*03:01-B1*03:02L
  source 1..10: note = Severe acute respiratory syndrome coronavirus 2
FQEKDEDDNL

SEQ ID NO: 9293 - protein, 10 aa, Severe acute respiratory syndrome-related coronavirus
  REGION 1..10: note = Table B: HLA-DQA1*03:02-B1*03:03L HLA-DRB1*11:02L HLA-DQA1*05:05-B1*03:19M HLA-DPA1*01:03-B1*104:01L
  source 1..10: note = Severe acute respiratory syndrome coronavirus 2
QEKDEDDNLI

SEQ ID NO: 9294 - protein, 12 aa, Severe acute respiratory syndrome-related coronavirus
  REGION 1..12: note = Table B: HLA-DQA1*03:02-B1*03:03L HLA-DQA1*05:01-B1*02:01L
  source 1..12: note = Severe acute respiratory syndrome coronavirus 2
DDNLIDSYFVVK

SEQ ID NO: 9295 - protein, 15 aa, Severe acute respiratory syndrome-related coronavirus
  REGION 1..15: note = Table B: HLA-DQA1*03:02-B1*03:03L HLA-DRB1*04:04L HLA-DPA1*01:03-B1*03:01L HLA-DRB3*01:01L HLA-DPA1*03:01-B1*105:01L HLA-DPA1*01:03-B1*104:01L HLA-DRB1*07:01L
  source 1..15: note = Severe acute respiratory syndrome coronavirus 2
VVKRHTFSNYQHEET

SEQ ID NO: 9296 - protein, 10 aa, Severe acute respiratory syndrome-related coronavirus
  REGION 1..10: note = Table B: HLA-DQA1*03:02-B1*03:03L HLA-DQA1*05:01-B1*03:01L HLA-DRB1*13:03L HLA-DRB1*01:03L HLA-DQA1*01:02-B1*06:02L HLA-DRB1*08:77L HLA-DPA1*01:03-B1*03:01L HLA-DRB1*03:01L HLA-DRB1*14:02L HLA-DQA1*01-B1*05L HLA-DQA1*05:05-B1*03:19L
  REGION 1..10: note = CONT. FROM ABOVE: HLA-DQA1*05:01-B1*02:01L HLA-DRB4*01:01L HLA-D PA1*01:03-B1*04:01L HLA-DQA1*05:05-B1*03:116L HLA-DPA1*01:03-B1* 04:02L HLA-DPA1*02:01-B1*13:01L HLA-DPA1*03:01-B1*105:01L HLA-DP A1*01:03-B1*104:01L HLA-DPA1*01:02-B1*04:01L HLA-DRB1*10:01L
  REGION 1..10: note = CONT. FROM ABOVE: HLA-DRB1*16:01L HLA-DQA1*01:03-B1*06:01L HLA-D RB1*08:02L HLA-DQA1*02:01-B1*03:03L HLA-DRB1*15:03L
  source 1..10: note = Severe acute respiratory syndrome coronavirus 2
SNYQHEETIY

SEQ ID NO: 9297 - protein, 10 aa, Severe acute respiratory syndrome-related coronavirus
  REGION 1..10: note = Table B: HLA-DQA1*03:02-B1*03:03L HLA-DRB1*04:03L HLA-DRB1*13:03L HLA-DRB1*04:02L HLA-DQA1*01-B1*05L HLA-DQA1*05:01-B1*02:01L HLA-DQA1*03:01-B1*03:02L HLA-DRB1*14:17L HLA-DRB1*16:01L HLA-DQA1*02:01-B1*03:03L
  source 1..10: note = Severe acute respiratory syndrome coronavirus 2
NYQHEETIYN

SEQ ID NO: 9298 - protein, 10 aa, Severe acute respiratory syndrome-related coronavirus
  REGION 1..10: note = Table B: HLA-DQA1*03:02-B1*03:03M HLA-DQA1*05:01-B1*03:01M HLA-DRB1*04:01L HLA-DRB1*04:03L HLA-DRB1*13:02L HLA-DRB1*13:03L HLA-DRB1*01:03L HLA-DRB1*04:02L HLA-DRB1*04:04L HLA-DRB1*04:05L HLA-DQA1*01:02-B1*06:02L HLA-DRB1*01:01L HLA-DRB1*01:02L
  REGION 1..10: note = CONT. FROM ABOVE: HLA-DRB1*08:77L HLA-DRB3*02:01L HLA-DPA1*01:03 -B1*03:01L HLA-DPA1*03:01-B1*04:02M HLA-DRB1*14:01L HLA-DRB1*11: 02L HLA-DRB1*14:02M HLA-DQA1*01:01-B1*05:01L HLA-DRB1*08:01L HLA -DRB1*11:01L HLA-DQA1*01-B1*05L HLA-DQA1*05:05-B1*03:19M
  REGION 1..10: note = CONT. FROM ABOVE: HLA-DQA1*05:01-B1*02:01L HLA-DRB4*01:01L HLA-D PA1*01:03-B1*04:01L HLA-DQA1*05:05-B1*03:116M HLA-DRB1*09:01L HL A-DPA1*01:03-B1*04:02L HLA-DRB1*12:01L HLA-DPA1*02:01-B1*13:01L HLA-DPA1*03:01-B1*105:01L HLA-DQA1*03:01-B1*03:02M
  REGION 1..10: note = CONT. FROM ABOVE: HLA-DPA1*01:03-B1*104:01L HLA-DPA1*01:02-B1*04 :01L HLA-DRB1*07:01L HLA-DRB1*10:01L HLA-DRB1*16:01L HLA-DQA1*01 :03-B1*06:01L HLA-DRB1*08:03L HLA-DQA1*02:01-B1*03:03M HLA-DRB1* 15:03M
  source 1..10: note = Severe acute respiratory syndrome coronavirus 2
YQHEETIYNL

SEQ ID NO: 9299 - protein, 10 aa, Severe acute respiratory syndrome-related coronavirus
  REGION 1..10: note = Table B: HLA-DQA1*03:02-B1*03:03L HLA-DQA1*03:01-B1*03:02L
  source 1..10: note = Severe acute respiratory syndrome coronavirus 2
QHEETIYNLL

SEQ ID NO: 9300 - protein, 13 aa, Severe acute respiratory syndrome-related coronavirus
  REGION 1..13: note = Table B: HLA-DQA1*03:02-B1*03:03L HLA-DRB1*01:02L
  source 1..13: note = Severe acute respiratory syndrome coronavirus 2
EETIYNLLKDCPA

SEQ ID NO: 9301 - protein, 14 aa, Severe acute respiratory syndrome-related coronavirus
  REGION 1..14: note = Table B: HLA-DQA1*03:02-B1*03:03L HLA-DRB1*08:77L HLA-DRB3*02:01L HLA-DRB1*03:01L HLA-DRB1*11:02L HLA-DQA1*05:01-B1*02:01L HLA-DRB1*09:01L HLA-DPA1*01:03-B1*02:01L HLA-DPA1*01:03-B1*104:01L
  REGION 1..14: note = CONT. FROM ABOVE: HLA-DRB1*07:01L HLA-DQA1*01:03-B1*06:01L
  source 1..14: note = Severe acute respiratory syndrome coronavirus 2
ETIYNLLKDCPAVA

SEQ ID NO: 9302 - protein, 10 aa, Severe acute respiratory syndrome-related coronavirus
  REGION 1..10: note = Table B: HLA-DQA1*03:02-B1*03:03L HLA-DQA1*05:01-B1*03:01L HLA-DRB1*14:01L HLA-DQA1*05:05-B1*03:19L HLA-DQA1*05:05-B1*03:116L HLA-DRB1*09:01L HLA-DQA1*03:01-B1*03:02L HLA-DPA1*01:03-B1*104:01L
  REGION 1..10: note = CONT. FROM ABOVE: HLA-DRB1*16:01L HLA-DQA1*02:01-B1*03:03L HLA-D RB1*15:03L
  source 1..10: note = Severe acute respiratory syndrome coronavirus 2
RIDGDMVPHI

SEQ ID NO: 9303 - protein, 10 aa, Severe acute respiratory syndrome-related coronavirus
  REGION 1..10: note = Table B: HLA-DQA1*03:02-B1*03:03L HLA-DQA1*01-B1*05L HLA-DQA1*05:01-B1*02:01L HLA-DQA1*03:01-B1*03:02L
  source 1..10: note = Severe acute respiratory syndrome coronavirus 2
IDGDMVPHIS

SEQ ID NO: 9304 - protein, 10 aa, Severe acute respiratory syndrome-related coronavirus
  REGION 1..10: note = Table B: HLA-DQA1*03:02-B1*03:03L HLA-DQA1*01-B1*05L HLA-DQA1*03:01-B1*03:02L
  source 1..10: note = Severe acute respiratory syndrome coronavirus 2
KYTMADLVYA

SEQ ID NO: 9305 - protein, 10 aa, Severe acute respiratory syndrome-related coronavirus
  REGION 1..10: note = Table B: HLA-DQA1*03:02-B1*03:03L HLA-DQA1*05:01-B1*03:01L HLA-DQA1*01:02-B1*06:02L HLA-DPA1*03:01-B1*04:02L HLA-DRB1*14:02L HLA-DQA1*05:05-B1*03:19L HLA-DQA1*05:05-B1*03:116L HLA-DPA1*03:01-B1*105:01L
  REGION 1..10: note = CONT. FROM ABOVE: HLA-DQA1*03:01-B1*03:02L HLA-DQA1*02:01-B1*03: 03L HLA-DRB1*15:03L
  source 1..10: note = Severe acute respiratory syndrome coronavirus 2
YTMADLVYAL

SEQ ID NO: 9306 - protein, 10 aa, Severe acute respiratory syndrome-related coronavirus
  REGION 1..10: note = Table B: HLA-DQA1*03:02-B1*03:03L HLA-DQA1*03:01-B1*03:02L
  source 1..10: note = Severe acute respiratory syndrome coronavirus 2
HFDEGNCDTL

SEQ ID NO: 9307 - protein, 10 aa, Severe acute respiratory syndrome-related coronavirus
  REGION 1..10: note = Table B: HLA-DQA1*03:02-B1*03:03L HLA-DQA1*05:01-B1*03:01L HLA-DRB1*04:01L HLA-DRB1*04:03L HLA-DRB1*13:02L HLA-DRB1*13:03M HLA-DRB1*01:03M HLA-DQA1*01:02-B1*06:02H HLA-DRB1*01:01L HLA-DRB4*03:01NL HLA-DRB1*08:77M HLA-DPA1*01:03-B1*03:01M
  REGION 1..10: note = CONT. FROM ABOVE: HLA-DPA1*03:01-B1*04:02L HLA-DRB1*03:01M HLA-D RB1*14:01L HLA-DRB1*11:03L HLA-DRB1*11:04L HLA-DRB1*14:02M HLA-D RB1*08:01L HLA-DRB1*11:01L HLA-DRB5*01:01L HLA-DQA1*01-B1*05L HL A-DQA1*05:05-B1*03:19M HLA-DQA1*05:01-B1*02:01M HLA-DRB4*01:01L
  REGION 1..10: note = CONT. FROM ABOVE: HLA-DPA1*01:03-B1*04:01M HLA-DQA1*05:05-B1*03: 116L HLA-DRB1*09:01L HLA-DPA1*01:03-B1*04:02M HLA-DRB1*12:01L HL A-DPA1*02:01-B1*13:01L HLA-DPA1*03:01-B1*105:01M HLA-DQA1*03:01- B1*03:02L HLA-DPA1*01:03-B1*104:01L HLA-DQA1*05:05-B1*03:01L
  REGION 1..10: note = CONT. FROM ABOVE: HLA-DPA1*01:02-B1*04:01L HLA-DRB1*10:01L HLA-D RB1*16:01L HLA-DQA1*01:03-B1*06:01L HLA-DRB1*08:02L HLA-DQA1*02: 01-B1*03:03M HLA-DRB1*15:01L HLA-DRB1*15:03M
  source 1..10: note = Severe acute respiratory syndrome coronavirus 2
DTLKEILVTY

SEQ ID NO: 9308 - protein, 13 aa, Severe acute respiratory syndrome-related coronavirus
  REGION 1..13: note = Table B: HLA-DQA1*03:02-B1*03:03L HLA-DRB1*13:03L HLA-DRB1*01:03L HLA-DRB1*01:02L HLA-DPA1*03:01-B1*04:02L HLA-DRB1*14:01L HLA-DRB1*11:01L HLA-DPA1*01:03-B1*04:02L HLA-DRB1*12:01L HLA-DPA1*01:02-B1*04:01L HLA-DRB1*04:08L
  REGION 1..13: note = CONT. FROM ABOVE: HLA-DQA1*02:01-B1*03:03L HLA-DRB1*15:03L
  source 1..13: note = Severe acute respiratory syndrome coronavirus 2
DDDYFNKKDWYDF

SEQ ID NO: 9309 - protein, 12 aa, Severe acute respiratory syndrome-related coronavirus
  REGION 1..12: note = Table B: HLA-DQA1*03:02-B1*03:03L HLA-DRB1*04:03L HLA-DRB1*04:05L HLA-DPA1*02:01-B1*13:01L HLA-DRB1*16:01L
  source 1..12: note = Severe acute respiratory syndrome coronavirus 2
KKDWYDFVENPD

SEQ ID NO: 9310 - protein, 12 aa, Severe acute respiratory syndrome-related coronavirus
  REGION 1..12: note = Table B: HLA-DQA1*03:02-B1*03:03L HLA-DRB1*04:03L HLA-DRB1*04:05L HLA-DPA1*03:01-B1*04:02L HLA-DRB1*04:10L HLA-DPA1*02:01-B1*13:01L HLA-DPA1*03:01-B1*105:01L HLA-DRB1*16:01L HLA-DRB1*04:08L HLA-DRB1*15:03L
  source 1..12: note = Severe acute respiratory syndrome coronavirus 2
KDWYDFVENPDI

SEQ ID NO: 9311 - protein, 10 aa, Severe acute respiratory syndrome-related coronavirus
  REGION 1..10: note = Table B: HLA-DQA1*03:02-B1*03:03L HLA-DQA1*01-B1*05L HLA-DQA1*05:01-B1*02:01L HLA-DQA1*03:01-B1*03:02L
  source 1..10: note = Severe acute respiratory syndrome coronavirus 2
YDFVENPDIL

SEQ ID NO: 9312 - protein, 10 aa, Severe acute respiratory syndrome-related coronavirus
  REGION 1..10: note = Table B: HLA-DQA1*03:02-B1*03:03L HLA-DQA1*05:01-B1*03:01L HLA-DRB1*04:03L HLA-DRB1*13:02L HLA-DRB1*13:03M HLA-DRB1*01:03L HLA-DRB1*04:02L HLA-DRB1*04:04L HLA-DRB1*04:05L HLA-DQA1*01:02-B1*06:02L HLA-DRB1*01:01L HLA-DRB4*03:01NL
  REGION 1..10: note = CONT. FROM ABOVE: HLA-DRB3*02:01L HLA-DRB1*14:01L HLA-DRB1*11:04 L HLA-DRB1*14:02L HLA-DQA1*01:01-B1*05:01L HLA-DRB1*08:01L HLA-D RB5*01:01L HLA-DQA1*01-B1*05L HLA-DQA1*05:01-B1*02:01L HLA-DPA1* 01:03-B1*04:02L HLA-DRB1*12:01L HLA-DRB1*12:02L HLA-DRB3*01:01L
  REGION 1..10: note = CONT. FROM ABOVE: HLA-DPA1*03:01-B1*105:01L HLA-DQA1*03:01-B1*03 :02M HLA-DRB1*14:54L HLA-DQA1*05:05-B1*03:01L HLA-DRB1*14:17L HL A-DPA1*01:02-B1*04:01L HLA-DRB1*16:01L HLA-DQA1*01:03-B1*06:01L HLA-DRB1*08:02L HLA-DRB1*08:03L HLA-DQA1*02:01-B1*03:03L
  source 1..10: note = Severe acute respiratory syndrome coronavirus 2
DFVENPDILR

SEQ ID NO: 9313 - protein, 10 aa, Severe acute respiratory syndrome-related coronavirus
  REGION 1..10: note = Table B: HLA-DQA1*03:02-B1*03:03M HLA-DQA1*05:01-B1*03:01L HLA-DRB1*04:01L HLA-DQA1*01:02-B1*06:02L HLA-DRB1*01:02L HLA-DRB1*08:77L HLA-DPA1*03:01-B1*04:02L HLA-DRB1*14:01L HLA-DRB1*11:02L HLA-DRB1*14:02L HLA-DQA1*05:05-B1*03:19M
  REGION 1..10: note = CONT. FROM ABOVE: HLA-DQA1*05:01-B1*02:01L HLA-DPA1*01:03-B1*04: 01L HLA-DQA1*05:05-B1*03:116L HLA-DRB1*09:01L HLA-DPA1*01:03-B1* 04:02L HLA-DPA1*02:01-B1*13:01L HLA-DPA1*03:01-B1*105:01L HLA-DQ A1*03:01-B1*03:02M HLA-DPA1*01:03-B1*104:01M
  REGION 1..10: note = CONT. FROM ABOVE: HLA-DPA1*01:02-B1*04:01L HLA-DRB1*10:01L HLA-D RB1*16:01L HLA-DQA1*01:03-B1*06:01L HLA-DRB1*08:03L HLA-DQA1*02: 01-B1*03:03M HLA-DRB1*15:03L
  source 1..10: note = Severe acute respiratory syndrome coronavirus 2
FVENPDILRV

SEQ ID NO: 9314 - protein, 10 aa, Severe acute respiratory syndrome-related coronavirus
  REGION 1..10: note = Table B: HLA-DQA1*03:02-B1*03:03L HLA-DQA1*05:01-B1*03:01H HLA-DRB1*04:01L HLA-DRB1*13:02L HLA-DRB1*13:03L HLA-DRB1*01:03L HLA-DRB1*04:02L HLA-DRB1*04:05L HLA-DQA1*01:02-B1*06:02L HLA-DRB4*03:01NM HLA-DRB1*08:77H HLA-DPA1*01:03-B1*03:01M
  REGION 1..10: note = CONT. FROM ABOVE: HLA-DPA1*03:01-B1*04:02M HLA-DRB1*03:01M HLA-D RB1*14:01L HLA-DRB1*11:02L HLA-DRB1*11:03L HLA-DRB1*11:04L HLA-D RB1*14:02L HLA-DRB5*01:01L HLA-DQA1*01-B1*05M HLA-DQA1*05:05-B1* 03:19M HLA-DQA1*05:01-B1*02:01M HLA-DRB4*01:01H
  REGION 1..10: note = CONT. FROM ABOVE: HLA-DPA1*01:03-B1*04:01H HLA-DQA1*05:05-B1*03: 116M HLA-DRB1*09:01L HLA-DPA1*01:03-B1*04:02M HLA-DRB1*12:01M HL A-DPA1*02:01-B1*13:01L HLA-DQA1*03:01-B1*03:02L HLA-DRB1*14:54L HLA-DPA1*01:03-B1*104:01M HLA-DPA1*01:02-B1*04:01M
  REGION 1..10: note = CONT. FROM ABOVE: HLA-DRB1*10:01M HLA-DRB1*16:01M HLA-DQA1*01:03 -B1*06:01L HLA-DRB1*08:02L HLA-DQA1*02:01-B1*03:03L HLA-DRB1*15: 03M
  source 1..10: note = Severe acute respiratory syndrome coronavirus 2
VENPDILRVY

SEQ ID NO: 9315 - protein, 12 aa, Severe acute respiratory syndrome-related coronavirus
  REGION 1..12: note = Table B: HLA-DQA1*03:02-B1*03:03L HLA-DQA1*05:01-B1*03:01L HLA-DRB1*04:03L HLA-DRB1*04:02L HLA-DRB1*04:04L HLA-DRB1*04:05L HLA-DQA1*01:02-B1*06:02L HLA-DRB1*01:02L HLA-DRB4*03:01NL HLA-DRB1*08:04L HLA-DPA1*03:01-B1*04:02L HLA-DRB1*14:01L
  REGION 1..12: note = CONT. FROM ABOVE: HLA-DQA1*01-B1*05L HLA-DQA1*05:01-B1*02:01L HL A-DRB1*04:10L HLA-DRB1*12:01L HLA-DPA1*03:01-B1*105:01L HLA-DQA1 *03:01-B1*03:02L HLA-DRB1*14:54L HLA-DRB1*14:17L HLA-DRB1*16:01L HLA-DQA1*01:03-B1*06:01L HLA-DRB1*04:08L
  REGION 1..12: note = CONT. FROM ABOVE: HLA-DQA1*02:01-B1*03:03L HLA-DRB1*15:03L
  source 1..12: note = Severe acute respiratory syndrome coronavirus 2
NPDILRVYANLG

SEQ ID NO: 9316 - protein, 10 aa, Severe acute respiratory syndrome-related coronavirus
  REGION 1..10: note = Table B: HLA-DQA1*03:02-B1*03:03L HLA-DQA1*05:01-B1*03:01L HLA-DRB1*13:02L HLA-DRB1*13:03L HLA-DRB1*01:03L HLA-DRB1*04:05L HLA-DQA1*01:02-B1*06:02L HLA-DRB1*01:02L HLA-DPA1*01:03-B1*03:01L HLA-DPA1*03:01-B1*04:02L
  REGION 1..10: note = CONT. FROM ABOVE: HLA-DRB1*14:01L HLA-DRB1*14:02L HLA-DRB1*08:01 L HLA-DQA1*05:05-B1*03:19L HLA-DQA1*05:01-B1*02:01L HLA-DQA1*05: 05-B1*03:116L HLA-DPA1*01:03-B1*04:02L HLA-DRB1*12:01L HLA-DPA1* 02:01-B1*13:01L HLA-DPA1*03:01-B1*105:01L
  REGION 1..10: note = CONT. FROM ABOVE: HLA-DQA1*03:01-B1*03:02L HLA-DPA1*01:03-B1*104 :01L HLA-DPA1*01:02-B1*04:01L HLA-DRB1*16:01L HLA-DQA1*01:03-B1* 06:01L HLA-DRB1*08:03L HLA-DQA1*02:01-B1*03:03L HLA-DRB1*15:03L
  source 1..10: note = Severe acute respiratory syndrome coronavirus 2
RVYANLGERV

SEQ ID NO: 9317 - protein, 14 aa, Severe acute respiratory syndrome-related coronavirus
  REGION 1..14: note = Table B: HLA-DQA1*03:02-B1*03:03L HLA-DRB1*04:01L HLA-DRB1*13:02L HLA-DRB1*01:01L HLA-DRB1*08:04L HLA-DPA1*01:03-B1*03:01L HLA-DRB1*14:01L HLA-DRB1*11:03L HLA-DRB1*11:04L HLA-DRB1*14:02L HLA-DRB1*11:01L
  REGION 1..14: note = CONT. FROM ABOVE: HLA-DQA1*01-B1*05L HLA-DQA1*05:01-B1*02:01L HL A-DRB3*01:01L HLA-DPA1*02:01-B1*13:01L HLA-DPA1*01:03-B1*02:01L HLA-DPA1*01:03-B1*104:01L HLA-DRB1*14:17L HLA-DRB1*07:01L HLA-DR B1*08:02L HLA-DRB1*08:03L
  source 1..14: note = Severe acute respiratory syndrome coronavirus 2
LKTVQFCDAMRNAG

SEQ ID NO: 9318 - protein, 10 aa, Severe acute respiratory syndrome-related coronavirus
  REGION 1..10: note = Table B: HLA-DQA1*03:02-B1*03:03L HLA-DQA1*05:01-B1*03:01L HLA-DRB1*04:03L HLA-DRB1*13:03L HLA-DRB1*01:03L HLA-DRB1*04:02L HLA-DRB4*03:01NL HLA-DQA1*01-B1*05L HLA-DQA1*05:01-B1*02:01L HLA-DRB1*12:01L HLA-DQA1*03:01-B1*03:02L
  REGION 1..10: note = CONT. FROM ABOVE: HLA-DQA1*05:05-B1*03:01L HLA-DRB1*14:17L HLA-D RB1*16:01L HLA-DQA1*01:03-B1*06:01L HLA-DQA1*02:01-B1*03:03L
  source 1..10: note = Severe acute respiratory syndrome coronavirus 2
DAMRNAGIVG

SEQ ID NO: 9319 - protein, 10 aa, Severe acute respiratory syndrome-related coronavirus
  REGION 1..10: note = Table B: HLA-DQA1*03:02-B1*03:03M HLA-DQA1*05:01-B1*03:01M HLA-DRB1*04:01L HLA-DRB1*01:03L HLA-DRB1*04:04L HLA-DQA1*01:02-B1*06:02L HLA-DRB1*01:02L HLA-DPA1*03:01-B1*04:02L HLA-DRB1*14:01L HLA-DRB1*14:02L
  REGION 1..10: note = CONT. FROM ABOVE: HLA-DRB1*08:01L HLA-DQA1*05:05-B1*03:19M HLA-D QA1*05:01-B1*02:01L HLA-DQA1*05:05-B1*03:116M HLA-DRB1*09:01L HL A-DPA1*01:03-B1*04:02L HLA-DPA1*02:01-B1*13:01L HLA-DPA1*03:01-B 1*105:01L HLA-DQA1*03:01-B1*03:02M HLA-DPA1*01:03-B1*104:01L
  REGION 1..10: note = CONT. FROM ABOVE: HLA-DPA1*01:02-B1*04:01L HLA-DRB1*07:01L HLA-D RB1*10:01L HLA-DRB1*16:01L HLA-DQA1*01:03-B1*06:01L HLA-DRB1*08: 03L HLA-DQA1*02:01-B1*03:03M HLA-DRB1*15:03L
  source 1..10: note = Severe acute respiratory syndrome coronavirus 2
AMRNAGIVGV

SEQ ID NO: 9320 - protein, 11 aa, Severe acute respiratory syndrome-related coronavirus
  REGION 1..11: note = Table B: HLA-DQA1*03:02-B1*03:03L HLA-DRB1*04:03L HLA-DRB1*04:02L HLA-DRB1*04:05L HLA-DQA1*01:02-B1*06:02L HLA-DQA1*01-B1*05L HLA-DQA1*05:01-B1*02:01L HLA-DQA1*03:01-B1*03:02L HLA-DRB1*14:17L
  REGION 1..11: note = CONT. FROM ABOVE: HLA-DQA1*01:03-B1*06:01L HLA-DQA1*02:01-B1*03: 03L
  source 1..11: note = Severe acute respiratory syndrome coronavirus 2
IVGVLTLDNQD

SEQ ID NO: 9321 - protein, 12 aa, Severe acute respiratory syndrome-related coronavirus
  REGION 1..12: note = Table B: HLA-DQA1*03:02-B1*03:03L HLA-DQA1*01:02-B1*06:02L HLA-DRB4*03:01NL HLA-DRB1*12:01L HLA-DRB1*14:54L HLA-DRB1*16:01L HLA-DQA1*01:03-B1*06:01L HLA-DQA1*02:01-B1*03:03L
  source 1..12: note = Severe acute respiratory syndrome coronavirus 2
VGVLTLDNQDLN

SEQ ID NO: 9322 - protein, 13 aa, Severe acute respiratory syndrome-related coronavirus
  REGION 1..13: note = Table B: HLA-DQA1*03:02-B1*03:03L HLA-DRB1*11:02L HLA-DRB1*14:02L HLA-DPA1*01:03-B1*04:02L HLA-DQA1*05:05-B1*03:01L HLA-DQA1*01:03-B1*06:01L
  source 1..13: note = Severe acute respiratory syndrome coronavirus 2
VLTLDNQDLNGNW

SEQ ID NO: 9323 - protein, 12 aa, Severe acute respiratory syndrome-related coronavirus
  REGION 1..12: note = Table B: HLA-DQA1*03:02-B1*03:03L HLA-DQA1*05:01-B1*03:01L HLA-DRB1*01:03L HLA-DQA1*01:02-B1*06:02L HLA-DPA1*03:01-B1*04:02L HLA-DQA1*01-B1*05L HLA-DQA1*05:01-B1*02:01L HLA-DPA1*01:03-B1*04:01L
  REGION 1..12: note = CONT. FROM ABOVE: HLA-DPA1*01:03-B1*04:02L HLA-DPA1*03:01-B1*105 :01L HLA-DQA1*03:01-B1*03:02L HLA-DPA1*01:03-B1*02:01L HLA-DQA1* 05:05-B1*03:01L HLA-DPA1*01:02-B1*04:01L HLA-DRB1*16:01L HLA-DQA 1*01:03-B1*06:01L HLA-DRB1*04:08L HLA-DQA1*02:01-B1*03:03L
  source 1..12: note = Severe acute respiratory syndrome coronavirus 2
YDFGDFIQTTPG

SEQ ID NO: 9324 - protein, 11 aa, Severe acute respiratory syndrome-related coronavirus
  REGION 1..11: note = Table B: HLA-DQA1*03:02-B1*03:03L HLA-DRB1*13:02L HLA-DRB1*01:03L HLA-DQA1*05:01-B1*02:01L HLA-DRB1*04:10L HLA-DRB1*12:01L HLA-DRB1*14:54L HLA-DRB1*16:01L HLA-DQA1*02:01-B1*03:03L
  source 1..11: note = Severe acute respiratory syndrome coronavirus 2
GDFIQTTPGSG

SEQ ID NO: 9325 - protein, 12 aa, Severe acute respiratory syndrome-related coronavirus
  REGION 1..12: note = Table B: HLA-DQA1*03:02-B1*03:03L HLA-DQA1*05:01-B1*03:01L HLA-DRB1*13:02L HLA-DRB1*01:03L HLA-DQA1*01:02-B1*06:02L HLA-DRB1*01:02L HLA-DRB1*08:77L HLA-DRB3*02:01L HLA-DPA1*03:01-B1*04:02L HLA-DRB1*14:01L HLA-DRB1*11:03L
  REGION 1..12: note = CONT. FROM ABOVE: HLA-DQA1*05:05-B1*03:19L HLA-DQA1*05:01-B1*02: 01L HLA-DRB1*12:01L HLA-DPA1*03:01-B1*105:01L HLA-DQA1*05:05-B1* 03:01L HLA-DRB1*07:01L HLA-DRB1*16:01L HLA-DQA1*01:03-B1*06:01L HLA-DQA1*02:01-B1*03:03L HLA-DRB1*15:03L
  source 1..12: note = Severe acute respiratory syndrome coronavirus 2
DFIQTTPGSGVP

SEQ ID NO: 9326 - protein, 12 aa, Severe acute respiratory syndrome-related coronavirus
  REGION 1..12: note = Table B: HLA-DQA1*03:02-B1*03:03L HLA-DQA1*05:01-B1*03:01L HLA-DRB1*04:03L HLA-DRB1*13:02L HLA-DRB1*04:02L HLA-DRB1*01:02L HLA-DRB4*03:01NL HLA-DQA1*05:05-B1*03:19L HLA-DQA1*05:01-B1*02:01L HLA-DRB1*12:01L
  REGION 1..12: note = CONT. FROM ABOVE: HLA-DQA1*03:01-B1*03:02L HLA-DRB1*14:54L HLA-D QA1*05:05-B1*03:01L HLA-DRB1*14:17L HLA-DRB1*16:01L HLA-DQA1*02: 01-B1*03:03L
  source 1..12: note = Severe acute respiratory syndrome coronavirus 2
FIQTTPGSGVPV

SEQ ID NO: 9327 - protein, 10 aa, Severe acute respiratory syndrome-related coronavirus
  REGION 1..10: note = Table B: HLA-DQA1*03:02-B1*03:03L HLA-DQA1*05:01-B1*03:01L HLA-DQA1*05:05-B1*03:19L HLA-DQA1*03:01-B1*03:02L HLA-DQA1*05:05-B1*03:01L HLA-DQA1*01:03-B1*06:01L HLA-DQA1*02:01-B1*03:03L
  source 1..10: note = Severe acute respiratory syndrome coronavirus 2
TPGSGVPVVD

SEQ ID NO: 9328 - protein, 10 aa, Severe acute respiratory syndrome-related coronavirus
  REGION 1..10: note = Table B: HLA-DQA1*03:02-B1*03:03L HLA-DQA1*05:01-B1*03:01L HLA-DQA1*05:05-B1*03:19L HLA-DQA1*03:01-B1*03:02L HLA-DQA1*05:05-B1*03:01L
  source 1..10: note = Severe acute respiratory syndrome coronavirus 2
PGSGVPVVDS

SEQ ID NO: 9329 - protein, 12 aa, Severe acute respiratory syndrome-related coronavirus
  REGION 1..12: note = Table B: HLA-DQA1*03:02-B1*03:03L HLA-DQA1*05:01-B1*03:01L HLA-DQA1*01:02-B1*06:02L HLA-DPA1*03:01-B1*04:02L HLA-DQA1*05:05-B1*03:19L HLA-DQA1*05:01-B1*02:01L HLA-DPA1*01:03-B1*04:02L HLA-DRB1*12:01L
  REGION 1..12: note = CONT. FROM ABOVE: HLA-DQA1*05:05-B1*03:01L HLA-DQA1*02:01-B1*03: 03L HLA-DRB1*15:03L
  source 1..12: note = Severe acute respiratory syndrome coronavirus 2
DSYYSLLMPILT

SEQ ID NO: 9330 - protein, 10 aa, Severe acute respiratory syndrome-related coronavirus
  REGION 1..10: note = Table B: HLA-DQA1*03:02-B1*03:03L HLA-DQA1*05:05-B1*03:19L HLA-DRB1*15:03L
  source 1..10: note = Severe acute respiratory syndrome coronavirus 2
YSLLMPILTL

SEQ ID NO: 9331 - protein, 13 aa, Severe acute respiratory syndrome-related coronavirus
  REGION 1..13: note = Table B: HLA-DQA1*03:02-B1*03:03L HLA-DRB1*14:04L HLA-DRB1*13:02L HLA-DRB1*04:04L HLA-DRB1*04:05L HLA-DRB4*03:01NL HLA-DRB3*02:01L HLA-DPA1*01:03-B1*03:01L HLA-DPA1*03:01-B1*04:02L HLA-DRB1*11:02L HLA-DRB1*11:03L
  REGION 1..13: note = CONT. FROM ABOVE: HLA-DRB1*14:02L HLA-DRB1*11:01L HLA-DQA1*05:05 -B1*03:19L HLA-DQA1*05:05-B1*03:116L HLA-DPA1*01:03-B1*04:02L HL A-DRB1*12:02L HLA-DRB3*01:01L HLA-DPA1*02:01-B1*13:01L HLA-DPA1* 03:01-B1*105:01L HLA-DQA1*03:01-B1*03:02L
  REGION 1..13: note = CONT. FROM ABOVE: HLA-DPA1*01:03-B1*02:01L HLA-DPA1*01:03-B1*104 :01L HLA-DQA1*05:05-B1*03:01L HLA-DRB1*07:01L HLA-DRB1*10:01L HL A-DQA1*01:03-B1*06:01L HLA-DRB1*08:02L HLA-DRB1*08:03L HLA-DQA1* 02:01-B1*03:03L
  source 1..13: note = Severe acute respiratory syndrome coronavirus 2
MPILTLTRALTAE

SEQ ID NO: 9332 - protein, 12 aa, Severe acute respiratory syndrome-related coronavirus
  REGION 1..12: note = Table B: HLA-DQA1*03:02-B1*03:03L HLA-DQA1*05:01-B1*03:01L HLA-DRB1*01:03L HLA-DRB1*04:02L HLA-DRB1*04:05L HLA-DQA1*01:02-B1*06:02L HLA-DRB1*01:02L HLA-DQA1*05:05-B1*03:19L HLA-DRB1*04:10L
  REGION 1..12: note = CONT. FROM ABOVE: HLA-DPA1*03:01-B1*105:01L HLA-DQA1*05:05-B1*03 :01L HLA-DRB1*16:01L HLA-DRB1*04:08L
  source 1..12: note = Severe acute respiratory syndrome coronavirus 2
LTRALTAESHVD

SEQ ID NO: 9333 - protein, 10 aa, Severe acute respiratory syndrome-related coronavirus
  REGION 1..10: note = Table B: HLA-DQA1*03:02-B1*03:03L HLA-DRB1*04:03L HLA-DRB1*04:02L HLA-DQA1*03:01-B1*03:02L HLA-DRB1*14:17L HLA-DQA1*01:03-B1*06:01L HLA-DQA1*02:01-B1*03:03L
  source 1..10: note = Severe acute respiratory syndrome coronavirus 2
ALTAESHVDT

SEQ ID NO: 9334 - protein, 10 aa, Severe acute respiratory syndrome-related coronavirus
  REGION 1..10: note = Table B: HLA-DQA1*03:02-B1*03:03L HLA-DQA1*01-B1*05L HLA-DQA1*03:01-B1*03:02L
  source 1..10: note = Severe acute respiratory syndrome coronavirus 2
TAESHVDTDL

SEQ ID NO: 9335 - protein, 12 aa, Severe acute respiratory syndrome-related coronavirus
  REGION 1..12: note = Table B: HLA-DQA1*03:02-B1*03:03L HLA-DQA1*05:01-B1*02:01L HLA-DQA1*02:01-B1*03:03L
  source 1..12: note = Severe acute respiratory syndrome coronavirus 2
AESHVDTDLTKP

SEQ ID NO: 9336 - protein, 10 aa, Severe acute respiratory syndrome-related coronavirus
  REGION 1..10: note = Table B: HLA-DQA1*03:02-B1*03:03L HLA-DQA1*05:01-B1*03:01L HLA-DRB1*04:01L HLA-DRB1*04:03L HLA-DRB1*13:02L HLA-DRB1*13:03L HLA-DRB1*01:03L HLA-DRB1*04:02L HLA-DRB1*04:05L HLA-DQA1*01:02-B1*06:02L HLA-DRB4*03:01NL HLA-DRB1*08:77M
  REGION 1..10: note = CONT. FROM ABOVE: HLA-DPA1*01:03-B1*03:01M HLA-DPA1*03:01-B1*04: 02L HLA-DRB1*03:01M HLA-DRB1*14:01L HLA-DRB1*11:02L HLA-DRB1*11: 03L HLA-DRB1*11:04L HLA-DRB1*14:02L HLA-DRB1*11:01L HLA-DRB5*01: 01L HLA-DQA1*01-B1*05M HLA-DQA1*05:05-B1*03:19M
  REGION 1..10: note = CONT. FROM ABOVE: HLA-DQA1*05:01-B1*02:01M HLA-DRB4*01:01L HLA-D PA1*01:03-B1*04:01L HLA-DQA1*05:05-B1*03:116L HLA-DPA1*01:03-B1* 04:02L HLA-DRB1*12:01L HLA-DPA1*02:01-B1*13:01L HLA-DPA1*03:01-B 1*105:01L HLA-DQA1*03:01-B1*03:02L HLA-DRB1*14:54L
  REGION 1..10: note = CONT. FROM ABOVE: HLA-DPA1*01:03-B1*104:01M HLA-DQA1*05:05-B1*03 :01L HLA-DRB1*14:17L HLA-DPA1*01:02-B1*04:01L HLA-DRB1*10:01L HL A-DRB1*16:01M HLA-DQA1*01:03-B1*06:01L HLA-DRB1*08:02L HLA-DQA1* 02:01-B1*03:03L HLA-DRB1*15:03L
  source 1..10: note = Severe acute respiratory syndrome coronavirus 2
HVDTDLTKPY

SEQ ID NO: 9337 - protein, 10 aa, Severe acute respiratory syndrome-related coronavirus
  REGION 1..10: note = Table B: HLA-DQA1*03:02-B1*03:03L HLA-DQA1*01-B1*05L HLA-DQA1*05:05-B1*03:19M HLA-DQA1*05:01-B1*02:01L HLA-DQA1*03:01-B1*03:02L HLA-DPA1*01:03-B1*104:01L HLA-DRB1*16:01L
  source 1..10: note = Severe acute respiratory syndrome coronavirus 2
VDTDLTKPYI

SEQ ID NO: 9338 - protein, 10 aa, Severe acute respiratory syndrome-related coronavirus
  REGION 1..10: note = Table B: HLA-DQA1*03:02-B1*03:03L HLA-DQA1*01-B1*05L HLA-DQA1*05:05-B1*03:19L HLA-DQA1*03:01-B1*03:02L
  source 1..10: note = Severe acute respiratory syndrome coronavirus 2
YDFTEERLKL

SEQ ID NO: 9339 - protein, 14 aa, Severe acute respiratory syndrome-related coronavirus
  REGION 1..14: note = Table B: HLA-DQA1*03:02-B1*03:03L HLA-DQA1*05:01-B1*03:01L HLA-DRB1*04:01L HLA-DRB1*04:04L HLA-DRB1*01:01L HLA-DRB3*02:01L HLA-DPA1*01:03-B1*03:01L HLA-DRB1*11:02L HLA-DRB1*11:03L HLA-DRB1*11:04L HLA-DQA1*01:01-B1*05:01L HLA-DRB1*04:10L
  REGION 1..14: note = CONT. FROM ABOVE: HLA-DPA1*01:03-B1*02:01L HLA-DPA1*01:03-B1*104 :01L HLA-DQA1*05:05-B1*03:01L HLA-DRB1*14:17L HLA-DRB1*07:01L HL A-DRB1*10:01L HLA-DRB1*15:01L
  source 1..14: note = Severe acute respiratory syndrome coronavirus 2
DRYFKYWDQTYHPN

SEQ ID NO: 9340 - protein, 16 aa, Severe acute respiratory syndrome-related coronavirus
  REGION 1..16: note = Table B: HLA-DQA1*03:02-B1*03:03L HLA-DRB1*11:02L HLA-DRB1*14:02L HLA-DPA1*01:03-B1*04:02L HLA-DPA1*01:03-B1*104:01L
  source 1..16: note = Severe acute respiratory syndrome coronavirus 2
WDQTYHPNCVNCLDDR

SEQ ID NO: 9341 - protein, 10 aa, Severe acute respiratory syndrome-related coronavirus
  REGION 1..10: note = Table B: HLA-DQA1*03:02-B1*03:03L HLA-DQA1*05:05-B1*03:19L
  source 1..10: note = Severe acute respiratory syndrome coronavirus 2
ANFNVLFSTV

SEQ ID NO: 9342 - protein, 10 aa, Severe acute respiratory syndrome-related coronavirus
  REGION 1..10: note = Table B: HLA-DQA1*03:02-B1*03:03L HLA-DRB1*04:03L HLA-DQA1*01-B1*05L HLA-DQA1*03:01-B1*03:02L HLA-DQA1*02:01-B1*03:03L
  source 1..10: note = Severe acute respiratory syndrome coronavirus 2
VFPPTSFGPL

SEQ ID NO: 9343 - protein, 10 aa, Severe acute respiratory syndrome-related coronavirus
  REGION 1..10: note = Table B: HLA-DQA1*03:02-B1*03:03M HLA-DQA1*05:01-B1*03:01L HLA-DQA1*01:02-B1*06:02L HLA-DPA1*03:01-B1*04:02L HLA-DRB1*14:01L HLA-DRB1*14:02L HLA-DQA1*05:05-B1*03:19L HLA-DQA1*05:01-B1*02:01L HLA-DQA1*05:05-B1*03:116L
  REGION 1..10: note = CONT. FROM ABOVE: HLA-DRB1*09:01L HLA-DPA1*02:01-B1*13:01L HLA-D PA1*03:01-B1*105:01L HLA-DQA1*03:01-B1*03:02L HLA-DPA1*01:03-B1* 104:01L HLA-DPA1*01:02-B1*04:01L HLA-DRB1*10:01L HLA-DRB1*16:01L HLA-DQA1*01:03-B1*06:01L HLA-DRB1*08:03L
  REGION 1..10: note = CONT. FROM ABOVE: HLA-DQA1*02:01-B1*03:03L HLA-DRB1*15:03L
  source 1..10: note = Severe acute respiratory syndrome coronavirus 2
KIFVDGVPFV

SEQ ID NO: 9344 - protein, 10 aa, Severe acute respiratory syndrome-related coronavirus
  REGION 1..10: note = Table B: HLA-DQA1*03:02-B1*03:03L HLA-DQA1*05:01-B1*03:01L HLA-DRB1*04:03L HLA-DRB1*04:05L HLA-DQA1*01:02-B1*06:02L HLA-DRB1*01:02L HLA-DPA1*03:01-B1*04:02L HLA-DRB1*14:01L HLA-DRB1*14:02L HLA-DQA1*05:05-B1*03:19L
  REGION 1..10: note = CONT. FROM ABOVE: HLA-DQA1*05:01-B1*02:01L HLA-DQA1*05:05-B1*03: 116L HLA-DRB1*09:01L HLA-DPA1*01:03-B1*04:02L HLA-DPA1*02:01-B1* 13:01L HLA-DPA1*03:01-B1*105:01L HLA-DQA1*03:01-B1*03:02L HLA-DP A1*01:03-B1*104:01L HLA-DPA1*01:02-B1*04:01L HLA-DRB1*10:01L
  REGION 1..10: note = CONT. FROM ABOVE: HLA-DRB1*16:01L HLA-DQA1*01:03-B1*06:01L HLA-D RB1*08:03L HLA-DQA1*02:01-B1*03:03L HLA-DRB1*15:03L
  source 1..10: note = Severe acute respiratory syndrome coronavirus 2
IFVDGVPFVV

SEQ ID NO: 9345 - protein, 12 aa, Severe acute respiratory syndrome-related coronavirus
  REGION 1..12: note = Table B: HLA-DQA1*03:02-B1*03:03L HLA-DQA1*05:01-B1*03:01L HLA-DQA1*01:02-B1*06:02L HLA-DQA1*05:05-B1*03:19L HLA-DPA1*03:01-B1*105:01L HLA-DQA1*03:01-B1*03:02L HLA-DQA1*05:05-B1*03:01L HLA-DQA1*01:03-B1*06:01L
  REGION 1..12: note = CONT. FROM ABOVE: HLA-DQA1*02:01-B1*03:03L
  source 1..12: note = Severe acute respiratory syndrome coronavirus 2
FVDGVPFVVSTG

SEQ ID NO: 9346 - protein, 12 aa, Severe acute respiratory syndrome-related coronavirus
  REGION 1..12: note = Table B: HLA-DQA1*03:02-B1*03:03L HLA-DQA1*05:01-B1*03:01L HLA-DQA1*01:03-B1*06:01L
  source 1..12: note = Severe acute respiratory syndrome coronavirus 2
DGVPFVVSTGYH

SEQ ID NO: 9347 - protein, 11 aa, Severe acute respiratory syndrome-related coronavirus
  REGION 1..11: note = Table B: HLA-DQA1*03:02-B1*03:03L HLA-DQA1*05:01-B1*03:01L HLA-DRB1*13:02L HLA-DRB1*13:03L HLA-DRB4*03:01NL HLA-DRB1*08:04L HLA-DRB3*02:01L HLA-DPA1*01:03-B1*03:01L HLA-DRB1*03:01L HLA-DRB1*14:01L HLA-DRB1*11:04L HLA-DRB1*14:02M HLA-DRB1*08:01L
  REGION 1..11: note = CONT. FROM ABOVE: HLA-DRB5*01:01L HLA-DQA1*05:01-B1*02:01L HLA-D RB4*01:01L HLA-DPA1*01:03-B1*04:01L HLA-DQA1*05:05-B1*03:116L HL A-DRB1*09:01L HLA-DPA1*01:03-B1*04:02L HLA-DRB1*12:02L HLA-DRB3* 01:01L HLA-DRB1*14:54L HLA-DPA1*01:03-B1*104:01L
  REGION 1..11: note = CONT. FROM ABOVE: HLA-DQA1*05:05-B1*03:01L HLA-DRB1*14:17L HLA-D PA1*01:02-B1*04:01L HLA-DRB1*07:01L HLA-DRB1*10:01L HLA-DRB1*04: 08L HLA-DRB1*08:02L HLA-DRB1*08:03L
  source 1..11: note = Severe acute respiratory syndrome coronavirus 2
VPFVVSTGYHF

SEQ ID NO: 9348 - protein, 10 aa, Severe acute respiratory syndrome-related coronavirus
  REGION 1..10: note = Table B: HLA-DQA1*03:02-B1*03:03L HLA-DQA1*03:01-B1*03:02L
  source 1..10: note = Severe acute respiratory syndrome coronavirus 2
RELGVVHNQD

SEQ ID NO: 9349 - protein, 10 aa, Severe acute respiratory syndrome-related coronavirus
  REGION 1..10: note = Table B: HLA-DQA1*03:02-B1*03:03L HLA-DQA1*05:01-B1*03:01L HLA-DRB1*04:03L HLA-DRB1*13:03L HLA-DRB1*04:02L HLA-DRB1*04:05L HLA-DQA1*01:02-B1*06:02L HLA-DRB4*03:01NL HLA-DQA1*01:01-B1*05:01L HLA-DQA1*01-B1*05L
  REGION 1..10: note = CONT. FROM ABOVE: HLA-DQA1*05:05-B1*03:19L HLA-DQA1*05:01-B1*02: 01L HLA-DRB1*12:01L HLA-DQA1*03:01-B1*03:02L HLA-DRB1*14:54L HLA -DQA1*05:05-B1*03:01L HLA-DRB1*14:17L HLA-DRB1*16:01L HLA-DQA1*0 1:03-B1*06:01L HLA-DQA1*02:01-B1*03:03L
  source 1..10: note = Severe acute respiratory syndrome coronavirus 2
LGVVHNQDVN

SEQ ID NO: 9350 - protein, 10 aa, Severe acute respiratory syndrome-related coronavirus
  REGION 1..10: note = Table B: HLA-DQA1*03:02-B1*03:03L HLA-DQA1*05:01-B1*03:01L HLA-DRB1*13:03L HLA-DRB1*04:02L HLA-DQA1*01:02-B1*06:02L HLA-DRB1*14:01L HLA-DRB1*14:02L HLA-DRB1*08:01L HLA-DQA1*01-B1*05L HLA-DQA1*05:01-B1*02:01L
  REGION 1..10: note = CONT. FROM ABOVE: HLA-DQA1*05:05-B1*03:116L HLA-DRB1*09:01L HLA- DPA1*03:01-B1*105:01L HLA-DQA1*03:01-B1*03:02L HLA-DPA1*01:02-B1 *04:01L HLA-DQA1*02:01-B1*03:03L HLA-DRB1*15:03L
  source 1..10: note = Severe acute respiratory syndrome coronavirus 2
GVVHNQDVNL

SEQ ID NO: 9351 - protein, 11 aa, Severe acute respiratory syndrome-related coronavirus
  REGION 1..11: note = Table B: HLA-DQA1*03:02-B1*03:03L
  source 1..11: note = Severe acute respiratory syndrome coronavirus 2
NQDVNLHSSRL

SEQ ID NO: 9352 - protein, 12 aa, Severe acute respiratory syndrome-related coronavirus
  REGION 1..12: note = Table B: HLA-DQA1*03:02-B1*03:03L HLA-DRB1*04:02L HLA-DRB1*04:05L HLA-DQA1*01:02-B1*06:02L HLA-DPA1*03:01-B1*105:01L HLA-DQA1*03:01-B1*03:02L HLA-DRB1*14:17L HLA-DRB1*16:01L HLA-DQA1*02:01-B1*03:03L
  source 1..12: note = Severe acute respiratory syndrome coronavirus 2
FKELLVYAADPA

SEQ ID NO: 9353 - protein, 12 aa, Severe acute respiratory syndrome-related coronavirus
  REGION 1..12: note = Table B: HLA-DQA1*03:02-B1*03:03L HLA-DRB1*04:02L HLA-DRB1*04:05L HLA-DQA1*01:02-B1*06:02L HLA-DRB1*01:02L HLA-DPA1*03:01-B1*04:02L HLA-DRB1*14:01L HLA-DQA1*05:01-B1*02:01L HLA-DRB1*04:10L HLA-DRB1*12:01L
  REGION 1..12: note = CONT. FROM ABOVE: HLA-DPA1*02:01-B1*13:01L HLA-DPA1*03:01-B1*105 :01L HLA-DQA1*03:01-B1*03:02L HLA-DRB1*14:54L HLA-DRB1*14:17L HL A-DRB1*16:01L HLA-DQA1*01:03-B1*06:01L HLA-DRB1*04:08L HLA-DQA1* 02:01-B1*03:03L HLA-DRB1*15:03L
  source 1..12: note = Severe acute respiratory syndrome coronavirus 2
KELLVYAADPAM

SEQ ID NO: 9354 - protein, 10 aa, Severe acute respiratory syndrome-related coronavirus
  REGION 1..10: note = Table B: HLA-DQA1*03:02-B1*03:03L HLA-DQA1*05:01-B1*03:01L HLA-DRB1*04:03L HLA-DRB1*13:03L HLA-DRB1*01:03L HLA-DRB1*04:02L HLA-DRB1*04:05L HLA-DQA1*01:02-B1*06:02L HLA-DRB1*01:02L HLA-DRB4*03:01NL HLA-DRB1*14:01L HLA-DQA1*01-B1*05L
  REGION 1..10: note = CONT. FROM ABOVE: HLA-DQA1*05:05-B1*03:19L HLA-DQA1*05:01-B1*02: 01L HLA-DRB1*04:10L HLA-DRB1*12:01L HLA-DPA1*03:01-B1*105:01L HL A-DQA1*03:01-B1*03:02L HLA-DRB1*14:54L HLA-DQA1*05:05-B1*03:01L HLA-DRB1*14:17L HLA-DPA1*01:02-B1*04:01L HLA-DRB1*16:01L
  REGION 1..10: note = CONT. FROM ABOVE: HLA-DQA1*01:03-B1*06:01L HLA-DRB1*04:08L HLA-D QA1*02:01-B1*03:03L HLA-DRB1*15:03L
  source 1..10: note = Severe acute respiratory syndrome coronavirus 2
LVYAADPAMH

SEQ ID NO: 9355 - protein, 10 aa, Severe acute respiratory syndrome-related coronavirus
  REGION 1..10: note = Table B: HLA-DQA1*03:02-B1*03:03L HLA-DQA1*05:01-B1*03:01L HLA-DRB1*04:03L HLA-DRB1*13:02L HLA-DRB1*13:03L HLA-DRB1*01:03L HLA-DRB1*04:02L HLA-DRB1*04:05L HLA-DRB1*01:02L HLA-DRB4*03:01NL HLA-DRB1*08:77L HLA-DRB3*02:01L HLA-DPA1*03:01-B1*04:02L
  REGION 1..10: note = CONT. FROM ABOVE: HLA-DRB1*14:01L HLA-DRB1*11:03L HLA-DRB1*14:02 L HLA-DQA1*01-B1*05L HLA-DQA1*05:05-B1*03:19L HLA-DQA1*05:01-B1* 02:01L HLA-DRB1*12:01L HLA-DPA1*03:01-B1*105:01L HLA-DQA1*03:01- B1*03:02L HLA-DRB1*14:54L HLA-DRB1*14:17L
  REGION 1..10: note = CONT. FROM ABOVE: HLA-DPA1*01:02-B1*04:01L HLA-DRB1*16:01L HLA-D QA1*01:03-B1*06:01L HLA-DRB1*04:08L HLA-DQA1*02:01-B1*03:03L HLA -DRB1*15:03L
  source 1..10: note = Severe acute respiratory syndrome coronavirus 2
VYAADPAMHA

SEQ ID NO: 9356 - protein, 10 aa, Severe acute respiratory syndrome-related coronavirus
  REGION 1..10: note = Table B: HLA-DQA1*03:02-B1*03:03L HLA-DQA1*05:01-B1*03:01L HLA-DRB1*04:01L HLA-DRB1*04:03L HLA-DRB1*13:02L HLA-DRB1*13:03L HLA-DRB1*01:03L HLA-DRB1*04:02L HLA-DRB1*04:05L HLA-DQA1*01:02-B1*06:02L HLA-DRB1*01:02L HLA-DRB4*03:01NL
  REGION 1..10: note = CONT. FROM ABOVE: HLA-DRB1*08:04L HLA-DRB1*08:77L HLA-DRB3*02:01 L HLA-DPA1*01:03-B1*03:01L HLA-DPA1*03:01-B1*04:02L HLA-DRB1*14: 01L HLA-DRB1*11:03L HLA-DRB1*11:04L HLA-DRB1*14:02L HLA-DRB1*08: 01L HLA-DRB1*11:01L HLA-DQA1*01-B1*05L HLA-DQA1*05:05-B1*03:19L
  REGION 1..10: note = CONT. FROM ABOVE: HLA-DQA1*05:01-B1*02:01L HLA-DQA1*05:05-B1*03: 116L HLA-DRB1*04:10L HLA-DRB1*09:01L HLA-DPA1*01:03-B1*04:02L HL A-DRB1*12:01L HLA-DRB1*12:02L HLA-DRB3*01:01L HLA-DPA1*03:01-B1* 105:01L HLA-DQA1*03:01-B1*03:02L HLA-DRB1*14:54L
  REGION 1..10: note = CONT. FROM ABOVE: HLA-DQA1*05:05-B1*03:01L HLA-DRB1*14:17L HLA-D PA1*01:02-B1*04:01L HLA-DRB1*10:01L HLA-DRB1*16:01L HLA-DRB1*04: 08L HLA-DRB1*08:03L HLA-DQA1*02:01-B1*03:03L HLA-DRB1*15:03L
  source 1..10: note = Severe acute respiratory syndrome coronavirus 2
YAADPAMHAA

SEQ ID NO: 9357 - protein, 12 aa, Severe acute respiratory syndrome-related coronavirus
  REGION 1..12: note = Table B: HLA-DQA1*03:02-B1*03:03L HLA-DQA1*05:01-B1*03:01L HLA-DRB1*01:03L HLA-DQA1*01:02-B1*06:02L HLA-DQA1*05:05-B1*03:19L HLA-DQA1*05:01-B1*02:01L HLA-DPA1*03:01-B1*105:01L HLA-DQA1*05:05-B1*03:01L
  REGION 1..12: note = CONT. FROM ABOVE: HLA-DQA1*01:03-B1*06:01L HLA-DQA1*02:01-B1*03: 03L
  source 1..12: note = Severe acute respiratory syndrome coronavirus 2
AADPAMHAASGN

SEQ ID NO: 9358 - protein, 11 aa, Severe acute respiratory syndrome-related coronavirus
  REGION 1..11: note = Table B: HLA-DQA1*03:02-B1*03:03L HLA-DQA1*05:01-B1*03:01L HLA-DRB1*04:03L HLA-DRB1*13:03L HLA-DRB1*04:02L HLA-DQA1*01-B1*05L HLA-DQA1*05:01-B1*02:01L HLA-DQA1*03:01-B1*03:02L HLA-DRB1*16:01L
  REGION 1..11: note = CONT. FROM ABOVE: HLA-DQA1*02:01-B1*03:03L
  source 1..11: note = Severe acute respiratory syndrome coronavirus 2
DPAMHAASGNL

SEQ ID NO: 9359 - protein, 10 aa, Severe acute respiratory syndrome-related coronavirus
  REGION 1..10: note = Table B: HLA-DQA1*03:02-B1*03:03L HLA-DQA1*05:01-B1*03:01L HLA-DRB1*13:02L HLA-DRB1*08:77L HLA-DRB3*02:01L HLA-DPA1*03:01-B1*04:02L HLA-DQA1*05:01-B1*02:01L HLA-DRB1*09:01L HLA-DRB1*12:01L HLA-DQA1*03:01-B1*03:02L
  REGION 1..10: note = CONT. FROM ABOVE: HLA-DPA1*01:02-B1*04:01L HLA-DRB1*07:01L HLA-D RB1*16:01L HLA-DQA1*02:01-B1*03:03L HLA-DRB1*15:03L
  source 1..10: note = Severe acute respiratory syndrome coronavirus 2
AMHAASGNLL

SEQ ID NO: 9360 - protein, 10 aa, Severe acute respiratory syndrome-related coronavirus
  REGION 1..10: note = Table B: HLA-DQA1*03:02-B1*03:03L HLA-DQA1*03:01-B1*03:02L
  source 1..10: note = Severe acute respiratory syndrome coronavirus 2
MHAASGNLLL

SEQ ID NO: 9361 - protein, 10 aa, Severe acute respiratory syndrome-related coronavirus
  REGION 1..10: note = Table B: HLA-DQA1*03:02-B1*03:03L HLA-DQA1*05:05-B1*03:19L
  source 1..10: note = Severe acute respiratory syndrome coronavirus 2
FSVAALTNNV

SEQ ID NO: 9362 - protein, 10 aa, Severe acute respiratory syndrome-related coronavirus
  REGION 1..10: note = Table B: HLA-DQA1*03:02-B1*03:03L HLA-DRB1*04:03L HLA-DQA1*03:01-B1*03:02L HLA-DRB1*14:17L HLA-DQA1*02:01-B1*03:03L
  source 1..10: note = Severe acute respiratory syndrome coronavirus 2
SVAALTNNVA

SEQ ID NO: 9363 - protein, 10 aa, Severe acute respiratory syndrome-related coronavirus
  REGION 1..10: note = Table B: HLA-DQA1*03:02-B1*03:03L HLA-DQA1*05:01-B1*03:01L HLA-DRB1*04:03L HLA-DRB1*13:03L HLA-DRB1*01:03L HLA-DRB1*04:02L HLA-DRB1*04:05L HLA-DQA1*01:02-B1*06:02L HLA-DRB1*08:77L HLA-DRB1*14:01L HLA-DRB1*14:02L HLA-DQA1*05:05-B1*03:19L
  REGION 1..10: note = CONT. FROM ABOVE: HLA-DQA1*05:01-B1*02:01L HLA-DRB1*12:01L HLA-D PA1*02:01-B1*13:01L HLA-DPA1*03:01-B1*105:01L HLA-DQA1*03:01-B1* 03:02L HLA-DRB1*14:17L HLA-DRB1*16:01L HLA-DQA1*01:03-B1*06:01L HLA-DQA1*02:01-B1*03:03L HLA-DRB1*15:03L
  source 1..10: note = Severe acute respiratory syndrome coronavirus 2
VAALTNNVAF

SEQ ID NO: 9364 - protein, 11 aa, Severe acute respiratory syndrome-related coronavirus
  REGION 1..11: note = Table B: HLA-DQA1*03:02-B1*03:03L HLA-DQA1*05:01-B1*03:01L HLA-DRB1*01:03L HLA-DRB4*03:01NL HLA-DQA1*01-B1*05L HLA-DPA1*03:01-B1*105:01L HLA-DRB1*16:01L
  source 1..11: note = Severe acute respiratory syndrome coronavirus 2
NNVAFQTVKPG

SEQ ID NO: 9365 - protein, 10 aa, Severe acute respiratory syndrome-related coronavirus
  REGION 1..10: note = Table B: HLA-DQA1*03:02-B1*03:03L HLA-DQA1*05:01-B1*03:01L HLA-DRB1*04:03L HLA-DRB1*13:02L HLA-DRB1*13:03L HLA-DRB1*01:03L HLA-DRB1*04:02L HLA-DRB1*04:05L HLA-DQA1*01:02-B1*06:02L HLA-DRB1*01:02L HLA-DRB4*03:01NL HLA-DRB1*08:77L
  REGION 1..10: note = CONT. FROM ABOVE: HLA-DPA1*01:03-B1*03:01L HLA-DPA1*03:01-B1*04: 02L HLA-DRB1*14:01L HLA-DRB1*11:04L HLA-DRB1*14:02L HLA-DQA1*01: 01-B1*05:01L HLA-DRB1*08:01L HLA-DQA1*01-B1*05L HLA-DQA1*05:05-B 1*03:19L HLA-DQA1*05:01-B1*02:01L HLA-DRB1*04:10L
  REGION 1..10: note = CONT. FROM ABOVE: HLA-DPA1*01:03-B1*04:02L HLA-DRB1*12:01L HLA-D PA1*03:01-B1*105:01L HLA-DQA1*03:01-B1*03:02L HLA-DRB1*14:54L HL A-DQA1*05:05-B1*03:01L HLA-DRB1*14:17L HLA-DPA1*01:02-B1*04:01L HLA-DRB1*10:01L HLA-DRB1*16:01L HLA-DQA1*01:03-B1*06:01L
  REGION 1..10: note = CONT. FROM ABOVE: HLA-DRB1*04:08L HLA-DQA1*02:01-B1*03:03L HLA-D RB1*15:03L
  source 1..10: note = Severe acute respiratory syndrome coronavirus 2
VAFQTVKPGN

SEQ ID NO: 9366 - protein, 10 aa, Severe acute respiratory syndrome-related coronavirus
  REGION 1..10: note = Table B: HLA-DQA1*03:02-B1*03:03L HLA-DQA1*05:01-B1*03:01L HLA-DRB1*04:03L HLA-DRB1*01:03L HLA-DRB1*04:05L HLA-DQA1*01:02-B1*06:02L HLA-DRB1*01:01L HLA-DRB1*01:02L HLA-DRB1*08:77L HLA-DPA1*03:01-B1*04:02L HLA-DRB1*11:03L
  REGION 1..10: note = CONT. FROM ABOVE: HLA-DRB1*14:02L HLA-DQA1*01:01-B1*05:01L HLA-D QA1*05:05-B1*03:19L HLA-DQA1*05:01-B1*02:01L HLA-DRB4*01:01L HLA -DPA1*01:03-B1*04:01L HLA-DRB1*12:01L HLA-DPA1*02:01-B1*13:01M H LA-DPA1*03:01-B1*105:01L HLA-DPA1*01:02-B1*04:01L
  REGION 1..10: note = CONT. FROM ABOVE: HLA-DRB1*16:01L HLA-DQA1*01:03-B1*06:01M HLA-D QA1*02:01-B1*03:03L HLA-DRB1*15:03L
  source 1..10: note = Severe acute respiratory syndrome coronavirus 2
AFQTVKPGNF

SEQ ID NO: 9367 - protein, 10 aa, Severe acute respiratory syndrome-related coronavirus
  REGION 1..10: note = Table B: HLA-DQA1*03:02-B1*03:03L HLA-DQA1*05:01-B1*03:01L HLA-DRB1*04:03L HLA-DRB1*13:02L HLA-DRB1*13:03L HLA-DRB1*01:03L HLA-DRB1*04:02L HLA-DQA1*01:02-B1*06:02L HLA-DRB1*01:02L HLA-DRB4*03:01NL HLA-DRB1*08:77L HLA-DRB3*02:01L
  REGION 1..10: note = CONT. FROM ABOVE: HLA-DPA1*03:01-B1*04:02L HLA-DRB1*14:01L HLA-D QA1*05:05-B1*03:19L HLA-DQA1*05:01-B1*02:01L HLA-DRB1*12:01L HLA -DRB1*12:02L HLA-DPA1*03:01-B1*105:01L HLA-DQA1*03:01-B1*03:02L HLA-DRB1*14:54L HLA-DQA1*05:05-B1*03:01L HLA-DRB1*14:17L
  REGION 1..10: note = CONT. FROM ABOVE: HLA-DPA1*01:02-B1*04:01L HLA-DRB1*07:01L HLA-D RB1*16:01L HLA-DQA1*01:03-B1*06:01L HLA-DQA1*02:01-B1*03:03L HLA -DRB1*15:03L
  source 1..10: note = Severe acute respiratory syndrome coronavirus 2
FQTVKPGNFN

SEQ ID NO: 9368 - protein, 14 aa, Severe acute respiratory syndrome-related coronavirus
  REGION 1..14: note = Table B: HLA-DQA1*03:02-B1*03:03L HLA-DRB1*04:05L HLA-DRB1*01:02L HLA-DQA1*01:03-B1*06:01L
  source 1..14: note = Severe acute respiratory syndrome coronavirus 2
VKPGNFNKDFYDFA

SEQ ID NO: 9369 - protein, 15 aa, Severe acute respiratory syndrome-related coronavirus
  REGION 1..15: note = Table B: HLA-DQA1*03:02-B1*03:03L HLA-DRB1*04:03L HLA-DRB1*13:02L HLA-DRB1*01:03L HLA-DRB1*04:02L HLA-DRB1*04:04L HLA-DRB1*04:05L HLA-DRB1*01:02L HLA-DRB1*08:04L HLA-DPA1*01:03-B1*03:01L HLA-DRB1*14:01L HLA-DRB1*14:02L
  REGION 1..15: note = CONT. FROM ABOVE: HLA-DPA1*01:03-B1*04:02L HLA-DRB1*12:01L HLA-D RB3*01:01L HLA-DPA1*01:03-B1*02:01L HLA-DQA1*01:03-B1*06:01L HLA -DRB1*08:03L HLA-DQA1*02:01-B1*03:03L
  source 1..15: note = Severe acute respiratory syndrome coronavirus 2
KPGNFNKDFYDFAVS

SEQ ID NO: 9370 - protein, 12 aa, Severe acute respiratory syndrome-related coronavirus
  REGION 1..12: note = Table B: HLA-DQA1*03:02-B1*03:03L HLA-DRB1*04:03L HLA-DRB1*04:02L HLA-DRB1*04:05L HLA-DQA1*01:02-B1*06:02L HLA-DQA1*05:01-B1*02:01L HLA-DPA1*02:01-B1*13:01L HLA-DPA1*03:01-B1*105:01L HLA-DPA1*01:02-B1*04:01L
  REGION 1..12: note = CONT. FROM ABOVE: HLA-DRB1*16:01L HLA-DRB1*04:08L
  source 1..12: note = Severe acute respiratory syndrome coronavirus 2
NKDFYDFAVSKG

SEQ ID NO: 9371 - protein, 10 aa, Severe acute respiratory syndrome-related coronavirus
  REGION 1..10: note = Table B: HLA-DQA1*03:02-B1*03:03L HLA-DQA1*05:01-B1*03:01L HLA-DRB1*04:03L HLA-DRB1*01:03L HLA-DRB1*04:05L HLA-DQA1*01:02-B1*06:02L HLA-DRB1*01:01L HLA-DRB1*01:02L HLA-DRB1*08:77L HLA-DPA1*03:01-B1*04:02L HLA-DRB1*14:02L
  REGION 1..10: note = CONT. FROM ABOVE: HLA-DQA1*01:01-B1*05:01L HLA-DRB1*11:01L HLA-D QA1*01-B1*05L HLA-DQA1*05:05-B1*03:19L HLA-DQA1*05:01-B1*02:01L HLA-DRB4*01:01L HLA-DPA1*01:03-B1*04:01L HLA-DQA1*05:05-B1*03:11 6L HLA-DPA1*01:03-B1*04:02L HLA-DRB1*12:01L
  REGION 1..10: note = CONT. FROM ABOVE: HLA-DPA1*02:01-B1*13:01M HLA-DPA1*03:01-B1*105 :01L HLA-DPA1*01:03-B1*104:01L HLA-DPA1*01:02-B1*04:01L HLA-DRB1 *10:01L HLA-DRB1*16:01L HLA-DQA1*01:03-B1*06:01M HLA-DQA1*02:01- B1*03:03L HLA-DRB1*15:03L
  source 1..10: note = Severe acute respiratory syndrome coronavirus 2
FYDFAVSKGF

SEQ ID NO: 9372 - protein, 10 aa, Severe acute respiratory syndrome-related coronavirus
  REGION 1..10: note = Table B: HLA-DQA1*03:02-B1*03:03L HLA-DQA1*05:01-B1*03:01L HLA-DRB1*04:05L HLA-DQA1*01:02-B1*06:02L HLA-DRB1*08:77L HLA-DPA1*03:01-B1*04:02L HLA-DQA1*01-B1*05L HLA-DQA1*05:05-B1*03:19L HLA-DQA1*05:01-B1*02:01L
  REGION 1..10: note = CONT. FROM ABOVE: HLA-DRB4*01:01L HLA-DPA1*01:03-B1*04:01L HLA-D PA1*02:01-B1*13:01L HLA-DPA1*03:01-B1*105:01L HLA-DPA1*01:02-B1* 04:01L HLA-DRB1*16:01L HLA-DQA1*01:03-B1*06:01L HLA-DQA1*02:01-B 1*03:03L HLA-DRB1*15:03L
  source 1..10: note = Severe acute respiratory syndrome coronavirus 2
YDFAVSKGFF

SEQ ID NO: 9373 - protein, 14 aa, Severe acute respiratory syndrome-related coronavirus
  REGION 1..14: note = Table B: HLA-DQA1*03:02-B1*03:03L HLA-DRB1*13:03L HLA-DRB1*08:04L HLA-DPA1*01:03-B1*03:01L HLA-DPA1*03:01-B1*04:02L HLA-DQA1*01:01-B1*05:01L HLA-DQA1*05:05-B1*03:19L HLA-DQA1*05:01-B1*02:01L
  REGION 1..14: note = CONT. FROM ABOVE: HLA-DPA1*01:03-B1*04:02L HLA-DRB3*01:01L HLA-D PA1*02:01-B1*13:01L
  source 1..14: note = Severe acute respiratory syndrome coronavirus 2
DFAVSKGFFKEGSS

SEQ ID NO: 9374 - protein, 13 aa, Severe acute respiratory syndrome-related coronavirus
  REGION 1..13: note = Table B: HLA-DQA1*03:02-B1*03:03L HLA-DRB1*13:03L HLA-DRB1*01:03L HLA-DRB1*04:02L HLA-DRB1*04:05L HLA-DRB1*01:02L HLA-DQA1*01:01-B1*05:01L HLA-DRB1*08:01L HLA-DQA1*05:01-B1*02:01L HLA-DPA1*02:01-B1*13:01L
  REGION 1..13: note = CONT. FROM ABOVE: HLA-DRB1*14:17L HLA-DRB1*16:01L HLA-DQA1*01:03 -B1*06:01L HLA-DRB1*04:08L HLA-DQA1*02:01-B1*03:03L
  source 1..13: note = Severe acute respiratory syndrome coronavirus 2
VSKGFFKEGSSVE

SEQ ID NO: 9375 - protein, 10 aa, Severe acute respiratory syndrome-related coronavirus
  REGION 1..10: note = Table B: HLA-DQA1*03:02-B1*03:03L HLA-DQA1*05:01-B1*03:01L HLA-DRB1*04:03L HLA-DRB1*04:05L HLA-DPA1*03:01-B1*04:02L HLA-DRB1*14:01L HLA-DRB1*14:02L HLA-DQA1*01-B1*05L HLA-DQA1*05:05-B1*03:116L HLA-DPA1*02:01-B1*13:01L
  REGION 1..10: note = CONT. FROM ABOVE: HLA-DQA1*03:01-B1*03:02L HLA-DPA1*01:02-B1*04: 01L HLA-DRB1*16:01L HLA-DQA1*01:03-B1*06:01L HLA-DQA1*02:01-B1*0 3:03L HLA-DRB1*15:03L
  source 1..10: note = Severe acute respiratory syndrome coronavirus 2
FFKEGSSVEL

SEQ ID NO: 9376 - protein, 10 aa, Severe acute respiratory syndrome-related coronavirus
  REGION 1..10: note = Table B: HLA-DQA1*03:02-B1*03:03L HLA-DQA1*05:01-B1*03:01L HLA-DRB1*13:03L HLA-DQA1*01:02-B1*06:02L HLA-DQA1*05:05-B1*03:19L HLA-DQA1*05:01-B1*02:01L HLA-DPA1*01:03-B1*04:01L HLA-DPA1*03:01-B1*105:01L
  REGION 1..10: note = CONT. FROM ABOVE: HLA-DQA1*01:03-B1*06:01L HLA-DQA1*02:01-B1*03: 03L HLA-DRB1*15:03L
  source 1..10: note = Severe acute respiratory syndrome coronavirus 2
EGSSVELKHF

SEQ ID NO: 9377 - protein, 13 aa, Severe acute respiratory syndrome-related coronavirus
  REGION 1..13: note = Table B: HLA-DQA1*03:02-B1*03:03L HLA-DRB1*04:01L HLA-DRB1*04:04L HLA-DQA1*01:02-B1*06:02L HLA-DRB1*08:04L HLA-DPA1*03:01-B1*04:02L HLA-DRB1*14:01L HLA-DRB1*11:04L HLA-DQA1*05:01-B1*02:01L HLA-DRB3*01:01L
  REGION 1..13: note = CONT. FROM ABOVE: HLA-DPA1*02:01-B1*13:01L HLA-DPA1*03:01-B1*105 :01L HLA-DPA1*01:02-B1*04:01L HLA-DRB1*10:01L HLA-DRB1*08:03L HL A-DRB1*15:03L
  source 1..13: note = Severe acute respiratory syndrome coronavirus 2
LKHFFFAQDGNAA

SEQ ID NO: 9378 - protein, 10 aa, Severe acute respiratory syndrome-related coronavirus
  REGION 1..10: note = Table B: HLA-DQA1*03:02-B1*03:03L HLA-DQA1*05:05-B1*03:19L
  source 1..10: note = Severe acute respiratory syndrome coronavirus 2
FFAQDGNAAI

SEQ ID NO: 9379 - protein, 12 aa, Severe acute respiratory syndrome-related coronavirus
  REGION 1..12: note = Table B: HLA-DQA1*03:02-B1*03:03L HLA-DRB1*04:01L HLA-DRB1*04:05L HLA-DRB1*01:02L HLA-DRB1*08:04L HLA-DRB3*02:01L HLA-DRB1*11:03L HLA-DRB1*11:04L HLA-DRB1*11:01L HLA-DRB5*01:01L HLA-DQA1*05:05-B1*03:116L HLA-DRB1*09:01L HLA-DRB1*12:02L
  REGION 1..12: note = CONT. FROM ABOVE: HLA-DPA1*02:01-B1*13:01L HLA-DPA1*03:01-B1*105 :01L HLA-DQA1*03:01-B1*03:02L HLA-DQA1*05:05-B1*03:01L HLA-DPA1* 01:02-B1*04:01L HLA-DQA1*01:03-B1*06:01L HLA-DRB1*04:08L HLA-DRB 1*08:03L
  source 1..12: note = Severe acute respiratory syndrome coronavirus 2
FAQDGNAAISDY

SEQ ID NO: 9380 - protein, 12 aa, Severe acute respiratory syndrome-related coronavirus
  REGION 1..12: note = Table B: HLA-DQA1*03:02-B1*03:03L HLA-DQA1*01:01-B1*05:01L HLA-DQA1*03:01-B1*03:02L HLA-DQA1*05:05-B1*03:01L HLA-DQA1*01:03-B1*06:01L
  source 1..12: note = Severe acute respiratory syndrome coronavirus 2
AQDGNAAISDYD

SEQ ID NO: 9381 - protein, 12 aa, Severe acute respiratory syndrome-related coronavirus
  REGION 1..12: note = Table B: HLA-DQA1*03:02-B1*03:03L
  source 1..12: note = Severe acute respiratory syndrome coronavirus 2
GNAAISDYDYYR

SEQ ID NO: 9382 - protein, 13 aa, Severe acute respiratory syndrome-related coronavirus
  REGION 1..13: note = Table B: HLA-DQA1*03:02-B1*03:03L HLA-DRB1*04:03L HLA-DQA1*01:02-B1*06:02L HLA-DPA1*03:01-B1*04:02L HLA-DRB1*08:01L HLA-DPA1*01:03-B1*04:02L HLA-DPA1*03:01-B1*105:01L HLA-DQA1*03:01-B1*03:02L
  REGION 1..13: note = CONT. FROM ABOVE: HLA-DRB1*16:01L HLA-DQA1*01:03-B1*06:01L HLA-D RB1*04:08L HLA-DQA1*02:01-B1*03:03L
  source 1..13: note = Severe acute respiratory syndrome coronavirus 2
ISDYDYYRYNLPT

SEQ ID NO: 9383 - protein, 10 aa, Severe acute respiratory syndrome-related coronavirus
  REGION 1..10: note = Table B: HLA-DQA1*03:02-B1*03:03L HLA-DQA1*01-B1*05L HLA-DQA1*03:01-B1*03:02L HLA-DRB1*16:01L HLA-DQA1*01:03-B1*06:01L HLA-DQA1*02:01-B1*03:03L
  source 1..10: note = Severe acute respiratory syndrome coronavirus 2
DYYRYNLPTM

SEQ ID NO: 9384 - protein, 14 aa, Severe acute respiratory syndrome-related coronavirus
  REGION 1..14: note = Table B: HLA-DQA1*03:02-B1*03:03L HLA-DRB1*04:01L HLA-DRB1*04:03L HLA-DRB1*04:04L HLA-DRB1*01:01L HLA-DRB1*08:04L HLA-DRB3*02:01L HLA-DRB1*03:01L HLA-DRB1*11:02L HLA-DQA1*05:05-B1*03:19L HLA-DQA1*05:01-B1*02:01L
  REGION 1..14: note = CONT. FROM ABOVE: HLA-DRB1*10:01L
  source 1..14: note = Severe acute respiratory syndrome coronavirus 2
YYRYNLPTMCDIRQ

SEQ ID NO: 9385 - protein, 10 aa, Severe acute respiratory syndrome-related coronavirus
  REGION 1..10: note = Table B: HLA-DQA1*03:02-B1*03:03L HLA-DQA1*05:01-B1*03:01L HLA-DRB1*04:03L HLA-DRB1*13:03L HLA-DRB1*01:03L HLA-DRB1*04:05L HLA-DQA1*01:02-B1*06:02L HLA-DRB1*08:77L HLA-DPA1*01:03-B1*03:01L HLA-DPA1*03:01-B1*04:02L
  REGION 1..10: note = CONT. FROM ABOVE: HLA-DRB1*03:01L HLA-DRB1*11:02L HLA-DRB1*14:02 L HLA-DQA1*01-B1*05L HLA-DQA1*05:05-B1*03:19M HLA-DQA1*05:01-B1* 02:01L HLA-DRB4*01:01L HLA-DPA1*01:03-B1*04:01L HLA-DQA1*05:05-B 1*03:116L HLA-DPA1*01:03-B1*04:02L HLA-DRB1*12:01L
  REGION 1..10: note = CONT. FROM ABOVE: HLA-DPA1*02:01-B1*13:01L HLA-DPA1*03:01-B1*105 :01L HLA-DPA1*01:03-B1*104:01L HLA-DQA1*05:05-B1*03:01L HLA-DPA1 *01:02-B1*04:01L HLA-DRB1*10:01L HLA-DRB1*16:01L HLA-DQA1*01:03- B1*06:01L HLA-DQA1*02:01-B1*03:03L HLA-DRB1*15:03L
  source 1..10: note = Severe acute respiratory syndrome coronavirus 2
LFVVEVVDKY

SEQ ID NO: 9386 - protein, 10 aa, Severe acute respiratory syndrome-related coronavirus
  REGION 1..10: note = Table B: HLA-DQA1*03:02-B1*03:03L HLA-DQA1*05:01-B1*03:01L HLA-DQA1*01:02-B1*06:02L HLA-DPA1*01:03-B1*03:01L HLA-DPA1*03:01-B1*04:02L HLA-DRB1*14:01L HLA-DRB1*14:02L HLA-DQA1*01-B1*05L HLA-DQA1*05:05-B1*03:19L
  REGION 1..10: note = CONT. FROM ABOVE: HLA-DQA1*05:01-B1*02:01L HLA-DRB4*01:01L HLA-D PA1*01:03-B1*04:01L HLA-DPA1*01:03-B1*04:02L HLA-DRB1*12:01L HLA -DPA1*02:01-B1*13:01L HLA-DPA1*03:01-B1*105:01L HLA-DQA1*03:01-B 1*03:02L HLA-DQA1*05:05-B1*03:01L HLA-DPA1*01:02-B1*04:01L
  REGION 1..10: note = CONT. FROM ABOVE: HLA-DRB1*16:01L HLA-DQA1*01:03-B1*06:01L HLA-D QA1*02:01-B1*03:03L HLA-DRB1*15:03L
  source 1..10: note = Severe acute respiratory syndrome coronavirus 2
FVVEVVDKYF

SEQ ID NO: 9387 - protein, 10 aa, Severe acute respiratory syndrome-related coronavirus
  REGION 1..10: note = Table B: HLA-DQA1*03:02-B1*03:03L HLA-DRB1*04:03L HLA-DRB1*04:02L HLA-DQA1*01-B1*05L HLA-DQA1*05:01-B1*02:01L HLA-DPA1*03:01-B1*105:01L HLA-DQA1*03:01-B1*03:02L HLA-DRB1*14:17L HLA-DPA1*01:02-B1*04:01L
  REGION 1..10: note = CONT. FROM ABOVE: HLA-DQA1*01:03-B1*06:01L HLA-DQA1*02:01-B1*03: 03L HLA-DRB1*15:03L
  source 1..10: note = Severe acute respiratory syndrome coronavirus 2
VVEVVDKYFD

SEQ ID NO: 9388 - protein, 13 aa, Severe acute respiratory syndrome-related coronavirus
  REGION 1..13: note = Table B: HLA-DQA1*03:02-B1*03:03L HLA-DQA1*05:01-B1*03:01L HLA-DQA1*01:02-B1*06:02L HLA-DQA1*05:05-B1*03:19L HLA-DQA1*03:01-B1*03:02L HLA-DQA1*05:05-B1*03:01L HLA-DQA1*01:03-B1*06:01L HLA-DQA1*02:01-B1*03:03L
  source 1..13: note = Severe acute respiratory syndrome coronavirus 2
DGGCINANQVIVN

SEQ ID NO: 9389 - protein, 10 aa, Severe acute respiratory syndrome-related coronavirus
  REGION 1..10: note = Table B: HLA-DQA1*03:02-B1*03:03L HLA-DQA1*05:01-B1*03:01L HLA-DRB1*04:03L HLA-DRB1*13:02L HLA-DRB1*13:03L HLA-DRB1*01:03L HLA-DRB1*04:02L HLA-DRB4*03:01NL HLA-DRB1*08:77L HLA-DRB1*14:01L HLA-DQA1*05:01-B1*02:01L HLA-DRB1*12:01L
  REGION 1..10: note = CONT. FROM ABOVE: HLA-DQA1*03:01-B1*03:02L HLA-DRB1*14:54L HLA-D QA1*05:05-B1*03:01L HLA-DRB1*14:17L HLA-DRB1*16:01L HLA-DQA1*01: 03-B1*06:01L HLA-DQA1*02:01-B1*03:03L
  source 1..10: note = Severe acute respiratory syndrome coronavirus 2
INANQVIVNN

SEQ ID NO: 9390 - protein, 10 aa, Severe acute respiratory syndrome-related coronavirus
  REGION 1..10: note = Table B: HLA-DQA1*03:02-B1*03:03L HLA-DQA1*05:01-B1*03:01L HLA-DRB1*13:03L HLA-DQA1*01:02-B1*06:02L HLA-DRB1*01:02L HLA-DPA1*03:01-B1*04:02L HLA-DRB1*14:01L HLA-DRB1*14:02L HLA-DPA1*03:01-B1*105:01L HLA-DQA1*03:01-B1*03:02L
  REGION 1..10: note = CONT. FROM ABOVE: HLA-DPA1*01:02-B1*04:01L HLA-DQA1*02:01-B1*03: 03L HLA-DRB1*15:03L
  source 1..10: note = Severe acute respiratory syndrome coronavirus 2
NANQVIVNNL

SEQ ID NO: 9391 - protein, 10 aa, Severe acute respiratory syndrome-related coronavirus
  REGION 1..10: note = Table B: HLA-DQA1*03:02-B1*03:03L HLA-DQA1*05:01-B1*03:01L HLA-DRB1*04:03L HLA-DRB1*13:03L HLA-DRB1*01:03L HLA-DRB1*04:02L HLA-DRB1*04:05L HLA-DQA1*01:02-B1*06:02L HLA-DRB4*03:01NL HLA-DQA1*01-B1*05L HLA-DQA1*05:01-B1*02:01L HLA-DRB1*04:10L
  REGION 1..10: note = CONT. FROM ABOVE: HLA-DRB1*12:01L HLA-DQA1*03:01-B1*03:02L HLA-D RB1*14:54L HLA-DRB1*14:17L HLA-DRB1*16:01L HLA-DQA1*01:03-B1*06: 01L HLA-DQA1*02:01-B1*03:03L
  source 1..10: note = Severe acute respiratory syndrome coronavirus 2
QVIVNNLDKS

SEQ ID NO: 9392 - protein, 10 aa, Severe acute respiratory syndrome-related coronavirus
  REGION 1..10: note = Table B: HLA-DQA1*03:02-B1*03:03L HLA-DQA1*05:01-B1*03:01L HLA-DRB1*04:03L HLA-DRB1*13:02L HLA-DRB1*13:03L HLA-DRB1*01:03L HLA-DRB1*04:02L HLA-DRB1*04:04L HLA-DRB1*04:05L HLA-DRB1*01:02L HLA-DRB4*03:01NL HLA-DRB1*08:04L HLA-DRB1*08:77L HLA-DRB1*14:01L
  REGION 1..10: note = CONT. FROM ABOVE: HLA-DRB1*11:03L HLA-DRB1*11:04L HLA-DRB1*14:02 L HLA-DQA1*01-B1*05L HLA-DQA1*05:01-B1*02:01L HLA-DRB1*04:10L HL A-DRB1*12:01L HLA-DRB1*12:02L HLA-DQA1*03:01-B1*03:02L HLA-DRB1* 14:54L HLA-DRB1*14:17L HLA-DRB1*10:01L HLA-DRB1*16:01L
  REGION 1..10: note = CONT. FROM ABOVE: HLA-DRB1*04:08L HLA-DRB1*08:03L HLA-DQA1*02:01 -B1*03:03L HLA-DRB1*15:03L
  source 1..10: note = Severe acute respiratory syndrome coronavirus 2
IVNNLDKSAG

SEQ ID NO: 9393 - protein, 10 aa, Severe acute respiratory syndrome-related coronavirus
  REGION 1..10: note = Table B: HLA-DQA1*03:02-B1*03:03L HLA-DQA1*05:01-B1*03:01L HLA-DRB1*04:03L HLA-DRB1*13:03L HLA-DRB1*08:77L HLA-DPA1*01:03-B1*03:01L HLA-DQA1*01-B1*05L HLA-DQA1*05:05-B1*03:19L HLA-DQA1*05:01-B1*02:01L
  REGION 1..10: note = CONT. FROM ABOVE: HLA-DRB1*12:01L HLA-DQA1*03:01-B1*03:02L HLA-D RB1*16:01L HLA-DQA1*02:01-B1*03:03L HLA-DRB1*15:03L
  source 1..10: note = Severe acute respiratory syndrome coronavirus 2
NLDKSAGFPF

SEQ ID NO: 9394 - protein, 10 aa, Severe acute respiratory syndrome-related coronavirus
  REGION 1..10: note = Table B: HLA-DQA1*03:02-B1*03:03L HLA-DQA1*05:01-B1*03:01L HLA-DRB1*04:03L HLA-DRB1*13:02L HLA-DRB1*01:03L HLA-DRB4*03:01NL HLA-DRB1*08:77L HLA-DQA1*05:01-B1*02:01L HLA-DRB1*12:01L HLA-DQA1*03:01-B1*03:02L HLA-DPA1*01:02-B1*04:01L
  REGION 1..10: note = CONT. FROM ABOVE: HLA-DRB1*16:01L HLA-DQA1*02:01-B1*03:03L
  source 1..10: note = Severe acute respiratory syndrome coronavirus 2
LDKSAGFPFN

SEQ ID NO: 9395 - protein, 17 aa, Severe acute respiratory syndrome-related coronavirus
  REGION 1..17: note = Table B: HLA-DQA1*03:02-B1*03:03L HLA-DPA1*03:01-B1*04:02L HLA-DQA1*05:01-B1*02:01L
  source 1..17: note = Severe acute respiratory syndrome coronavirus 2
FPFNKWGKARLYYDSMS

SEQ ID NO: 9396 - protein, 13 aa, Severe acute respiratory syndrome-related coronavirus
  REGION 1..13: note = Table B: HLA-DQA1*03:02-B1*03:03L HLA-DRB1*13:03L HLA-DRB1*01:03L HLA-DRB1*04:02L HLA-DQA1*01:02-B1*06:02L HLA-DRB4*03:01NL HLA-DPA1*03:01-B1*04:02L HLA-DRB1*08:01L HLA-DRB1*12:01L HLA-DPA1*02:01-B1*13:01L HLA-DRB1*14:17L
  REGION 1..13: note = CONT. FROM ABOVE: HLA-DRB1*16:01L HLA-DRB1*04:08L HLA-DQA1*02:01 -B1*03:03L HLA-DRB1*15:03L
  source 1..13: note = Severe acute respiratory syndrome coronavirus 2
ARLYYDSMSYEDQ

SEQ ID NO: 9397 - protein, 10 aa, Severe acute respiratory syndrome-related coronavirus
  REGION 1..10: note = Table B: HLA-DQA1*03:02-B1*03:03L HLA-DQA1*01-B1*05L HLA-DQA1*05:01-B1*02:01L HLA-DQA1*03:01-B1*03:02L
  source 1..10: note = Severe acute respiratory syndrome coronavirus 2
SMSYEDQDAL

SEQ ID NO: 9398 - protein, 10 aa, Severe acute respiratory syndrome-related coronavirus
  REGION 1..10: note = Table B: HLA-DQA1*03:02-B1*03:03L HLA-DRB1*04:03L HLA-DRB1*13:03L HLA-DRB1*04:05L HLA-DQA1*01:02-B1*06:02L HLA-DRB1*14:02L HLA-DQA1*01-B1*05L HLA-DQA1*05:05-B1*03:19L HLA-DQA1*05:01-B1*02:01L HLA-DPA1*02:01-B1*13:01L
  REGION 1..10: note = CONT. FROM ABOVE: HLA-DPA1*03:01-B1*105:01L HLA-DQA1*01:03-B1*06 :01L HLA-DQA1*02:01-B1*03:03L HLA-DRB1*15:03L
  source 1..10: note = Severe acute respiratory syndrome coronavirus 2
MSYEDQDALF

SEQ ID NO: 9399 - protein, 10 aa, Severe acute respiratory syndrome-related coronavirus
  REGION 1..10: note = Table B: HLA-DQA1*03:02-B1*03:03L HLA-DQA1*05:01-B1*03:01L HLA-DRB1*13:03L HLA-DQA1*01:02-B1*06:02L HLA-DRB4*03:01NL HLA-DRB1*08:77M HLA-DPA1*01:03-B1*03:01M HLA-DPA1*03:01-B1*04:02L HLA-DRB1*03:01M HLA-DRB1*11:02M
  REGION 1..10: note = CONT. FROM ABOVE: HLA-DQA1*01-B1*05M HLA-DQA1*05:05-B1*03:19H HL A-DQA1*05:01-B1*02:01M HLA-DRB4*01:01M HLA-DPA1*01:03-B1*04:01M HLA-DQA1*05:05-B1*03:116L HLA-DPA1*01:03-B1*04:02L HLA-DRB1*12:0 1L HLA-DPA1*01:03-B1*104:01M HLA-DPA1*01:02-B1*04:01L
  REGION 1..10: note = CONT. FROM ABOVE: HLA-DRB1*10:01M HLA-DRB1*16:01M HLA-DRB1*15:03 L
  source 1..10: note = Severe acute respiratory syndrome coronavirus 2
YEDQDALFAY

SEQ ID NO: 9400 - protein, 11 aa, Severe acute respiratory syndrome-related coronavirus
  REGION 1..11: note = Table B: HLA-DQA1*03:02-B1*03:03L HLA-DQA1*05:01-B1*03:01L HLA-DRB1*04:01L HLA-DRB1*13:02L HLA-DRB1*04:04L HLA-DRB1*04:05L HLA-DQA1*01:02-B1*06:02L HLA-DRB1*01:01L HLA-DRB1*08:04L HLA-DRB1*08:77L HLA-DRB3*02:01L HLA-DPA1*01:03-B1*03:01L
  REGION 1..11: note = CONT. FROM ABOVE: HLA-DRB1*03:01L HLA-DRB1*11:03L HLA-DRB1*11:04 L HLA-DRB1*14:02L HLA-DRB1*11:01L HLA-DQA1*05:05-B1*03:19L HLA-D QA1*05:01-B1*02:01L HLA-DPA1*01:03-B1*04:01L HLA-DRB1*04:10L HLA -DPA1*01:03-B1*04:02L HLA-DRB1*12:02L HLA-DRB3*01:01L
  REGION 1..11: note = CONT. FROM ABOVE: HLA-DPA1*02:01-B1*13:01L HLA-DPA1*03:01-B1*105 :01L HLA-DPA1*01:03-B1*02:01L HLA-DQA1*05:05-B1*03:01L HLA-DRB1* 07:01L HLA-DRB1*10:01L HLA-DQA1*01:03-B1*06:01L HLA-DRB1*08:02L HLA-DRB1*08:03L HLA-DRB1*15:03L
  source 1..11: note = Severe acute respiratory syndrome coronavirus 2
FAYTKRNVIPT

SEQ ID NO: 9401 - protein, 13 aa, Severe acute respiratory syndrome-related coronavirus
  REGION 1..13: note = Table B: HLA-DQA1*03:02-B1*03:03L HLA-DRB1*13:02L HLA-DRB1*08:04L HLA-DPA1*01:03-B1*03:01L HLA-DQA1*05:05-B1*03:19L HLA-DPA1*03:01-B1*105:01L HLA-DQA1*05:05-B1*03:01L HLA-DQA1*01:03-B1*06:01L
  REGION 1..13: note = CONT. FROM ABOVE: HLA-DRB1*15:03L
  source 1..13: note = Severe acute respiratory syndrome coronavirus 2
AYTKRNVIPTITQ

SEQ ID NO: 9402 - protein, 10 aa, Severe acute respiratory syndrome-related coronavirus
  REGION 1..10: note = Table B: HLA-DQA1*03:02-B1*03:03L HLA-DQA1*05:01-B1*03:01L HLA-DQA1*03:01-B1*03:02L HLA-DQA1*02:01-B1*03:03L
  source 1..10: note = Severe acute respiratory syndrome coronavirus 2
RNVIPTITQM

SEQ ID NO: 9403 - protein, 10 aa, Severe acute respiratory syndrome-related coronavirus
  REGION 1..10: note = Table B: HLA-DQA1*03:02-B1*03:03L HLA-DQA1*05:01-B1*03:01L HLA-DQA1*03:01-B1*03:02L HLA-DQA1*02:01-B1*03:03L HLA-DRB1*15:03L
  source 1..10: note = Severe acute respiratory syndrome coronavirus 2
VIPTITQMNL

SEQ ID NO: 9404 - protein, 13 aa, Severe acute respiratory syndrome-related coronavirus
  REGION 1..13: note = Table B: HLA-DQA1*03:02-B1*03:03L HLA-DRB1*11:03L HLA-DPA1*03:01-B1*105:01L HLA-DQA1*05:05-B1*03:01L HLA-DRB1*10:01L
  source 1..13: note = Severe acute respiratory syndrome coronavirus 2
MNLKYAISAKNRA

SEQ ID NO: 9405 - protein, 10 aa, Severe acute respiratory syndrome-related coronavirus
  REGION 1..10: note = Table B: HLA-DQA1*03:02-B1*03:03L HLA-DQA1*05:01-B1*03:01L HLA-DRB1*01:03L HLA-DQA1*05:05-B1*03:19L HLA-DQA1*03:01-B1*03:02L HLA-DRB1*16:01L HLA-DQA1*01:03-B1*06:01L HLA-DQA1*02:01-B1*03:03L
  source 1..10: note = Severe acute respiratory syndrome coronavirus 2
RARTVAGVSI

SEQ ID NO: 9406 - protein, 10 aa, Severe acute respiratory syndrome-related coronavirus
  REGION 1..10: note = Table B: HLA-DQA1*03:02-B1*03:03L HLA-DQA1*05:01-B1*03:01L HLA-DRB1*04:03L HLA-DRB1*13:02L HLA-DRB1*13:03L HLA-DRB1*01:03L HLA-DRB1*04:02L HLA-DRB1*04:05L HLA-DQA1*01:02-B1*06:02L HLA-DRB1*01:02L HLA-DRB4*03:01NL HLA-DRB1*08:77L HLA-DRB3*02:01L
  REGION 1..10: note = CONT. FROM ABOVE: HLA-DPA1*01:03-B1*03:01L HLA-DPA1*03:01-B1*04: 02L HLA-DRB1*14:01L HLA-DRB1*14:02L HLA-DQA1*01-B1*05L HLA-DQA1* 05:05-B1*03:19L HLA-DQA1*05:01-B1*02:01L HLA-DPA1*01:03-B1*04:01 L HLA-DQA1*05:05-B1*03:116L HLA-DRB1*09:01L HLA-DRB1*12:01L
  REGION 1..10: note = CONT. FROM ABOVE: HLA-DPA1*02:01-B1*13:01L HLA-DPA1*03:01-B1*105 :01L HLA-DQA1*03:01-B1*03:02L HLA-DPA1*01:03-B1*104:01L HLA-DPA1 *01:02-B1*04:01L HLA-DRB1*07:01L HLA-DRB1*10:01L HLA-DRB1*16:01L HLA-DQA1*01:03-B1*06:01L HLA-DQA1*02:01-B1*03:03L
  REGION 1..10: note = CONT. FROM ABOVE: HLA-DRB1*15:03L
  source 1..10: note = Severe acute respiratory syndrome coronavirus 2
SIAATRGATV

SEQ ID NO: 9407 - protein, 12 aa, Severe acute respiratory syndrome-related coronavirus
  REGION 1..12: note = Table B: HLA-DQA1*03:02-B1*03:03L HLA-DRB1*04:03L HLA-DRB1*13:02L HLA-DRB1*13:03L HLA-DRB1*01:03L HLA-DRB1*04:02L HLA-DRB1*04:05L HLA-DQA1*01:02-B1*06:02L HLA-DRB1*01:01L HLA-DRB1*01:02L HLA-DRB4*03:01NL HLA-DRB1*08:04L HLA-DRB1*08:77L
  REGION 1..12: note = CONT. FROM ABOVE: HLA-DRB3*02:01L HLA-DPA1*01:03-B1*03:01L HLA-D RB1*14:01L HLA-DRB1*11:03L HLA-DRB1*11:04L HLA-DRB1*14:02L HLA-D QA1*05:01-B1*02:01L HLA-DRB1*09:01L HLA-DRB1*12:01L HLA-DRB1*12: 02L HLA-DPA1*03:01-B1*105:01L HLA-DRB1*14:54L
  REGION 1..12: note = CONT. FROM ABOVE: HLA-DQA1*05:05-B1*03:01L HLA-DRB1*14:17L HLA-D RB1*07:01L HLA-DRB1*10:01L HLA-DQA1*01:03-B1*06:01L HLA-DRB1*04: 08L HLA-DRB1*15:03L
  source 1..12: note = Severe acute respiratory syndrome coronavirus 2
IAATRGATVVIG

SEQ ID NO: 9408 - protein, 11 aa, Severe acute respiratory syndrome-related coronavirus
  REGION 1..11: note = Table B: HLA-DQA1*03:02-B1*03:03L HLA-DQA1*05:01-B1*03:01L HLA-DRB1*04:03L HLA-DQA1*01:02-B1*06:02L HLA-DQA1*05:05-B1*03:19L HLA-DQA1*03:01-B1*03:02L HLA-DQA1*05:05-B1*03:01L HLA-DRB1*14:17L
  source 1..11: note = Severe acute respiratory syndrome coronavirus 2
TRGATVVIGTS

SEQ ID NO: 9409 - protein, 10 aa, Severe acute respiratory syndrome-related coronavirus
  REGION 1..10: note = Table B: HLA-DQA1*03:02-B1*03:03L HLA-DQA1*05:01-B1*03:01L HLA-DRB1*04:03L HLA-DRB1*13:02L HLA-DRB1*13:03L HLA-DRB1*01:03L HLA-DRB1*04:02L HLA-DQA1*01:02-B1*06:02L HLA-DRB4*03:01NL HLA-DQA1*01:01-B1*05:01L HLA-DRB1*08:01L HLA-DRB5*01:01L
  REGION 1..10: note = CONT. FROM ABOVE: HLA-DQA1*05:05-B1*03:19L HLA-DPA1*01:03-B1*04: 02L HLA-DRB1*12:01L HLA-DQA1*03:01-B1*03:02M HLA-DQA1*05:05-B1*0 3:01L HLA-DRB1*14:17L HLA-DRB1*16:01L HLA-DQA1*01:03-B1*06:01L H LA-DQA1*02:01-B1*03:03L
  source 1..10: note = Severe acute respiratory syndrome coronavirus 2
GATVVIGTSK

SEQ ID NO: 9410 - protein, 10 aa, Severe acute respiratory syndrome-related coronavirus
  REGION 1..10: note = Table B: HLA-DQA1*03:02-B1*03:03L HLA-DQA1*05:01-B1*03:01L HLA-DRB1*04:03L HLA-DRB1*13:02L HLA-DRB1*13:03L HLA-DRB1*01:03L HLA-DRB1*04:05L HLA-DQA1*01:02-B1*06:02M HLA-DRB1*01:01L HLA-DRB4*03:01NL HLA-DRB1*08:77L HLA-DPA1*01:03-B1*03:01L
  REGION 1..10: note = CONT. FROM ABOVE: HLA-DPA1*03:01-B1*04:02L HLA-DRB1*03:01L HLA-D RB1*14:01L HLA-DRB1*14:02L HLA-DRB5*01:01L HLA-DQA1*01-B1*05L HL A-DQA1*05:05-B1*03:19L HLA-DQA1*05:01-B1*02:01L HLA-DRB4*01:01L HLA-DPA1*01:03-B1*04:01L HLA-DQA1*05:05-B1*03:116L
  REGION 1..10: note = CONT. FROM ABOVE: HLA-DPA1*01:03-B1*04:02L HLA-DRB1*12:01L HLA-D PA1*02:01-B1*13:01L HLA-DPA1*03:01-B1*105:01M HLA-DQA1*03:01-B1* 03:02L HLA-DPA1*01:03-B1*104:01L HLA-DQA1*05:05-B1*03:01L HLA-DP A1*01:02-B1*04:01L HLA-DRB1*07:01L HLA-DRB1*10:01L
  REGION 1..10: note = CONT. FROM ABOVE: HLA-DRB1*16:01L HLA-DQA1*01:03-B1*06:01L HLA-D RB1*08:02L HLA-DQA1*02:01-B1*03:03M HLA-DRB1*15:03L
  source 1..10: note = Severe acute respiratory syndrome coronavirus 2
ATVVIGTSKF

SEQ ID NO: 9411 - protein, 10 aa, Severe acute respiratory syndrome-related coronavirus
  REGION 1..10: note = Table B: HLA-DQA1*03:02-B1*03:03L HLA-DQA1*05:01-B1*03:01L HLA-DRB1*04:03L HLA-DRB1*13:02L HLA-DRB1*13:03L HLA-DRB1*01:03L HLA-DQA1*01:02-B1*06:02M HLA-DRB4*03:01NL HLA-DRB1*08:77L HLA-DPA1*01:03-B1*03:01L HLA-DPA1*03:01-B1*04:02L
  REGION 1..10: note = CONT. FROM ABOVE: HLA-DRB1*03:01L HLA-DRB1*14:01L HLA-DRB1*14:02 L HLA-DQA1*01-B1*05L HLA-DQA1*05:05-B1*03:19L HLA-DQA1*05:01-B1* 02:01L HLA-DRB4*01:01L HLA-DPA1*01:03-B1*04:01L HLA-DQA1*05:05-B 1*03:116L HLA-DPA1*01:03-B1*04:02L HLA-DRB1*12:01L
  REGION 1..10: note = CONT. FROM ABOVE: HLA-DPA1*02:01-B1*13:01L HLA-DPA1*03:01-B1*105 :01L HLA-DPA1*01:03-B1*104:01L HLA-DQA1*05:05-B1*03:01L HLA-DPA1 *01:02-B1*04:01L HLA-DRB1*10:01L HLA-DRB1*16:01L HLA-DQA1*01:03- B1*06:01L HLA-DRB1*08:02L HLA-DQA1*02:01-B1*03:03L
  REGION 1..10: note = CONT. FROM ABOVE: HLA-DRB1*15:03L
  source 1..10: note = Severe acute respiratory syndrome coronavirus 2
TVVIGTSKFY

SEQ ID NO: 9412 - protein, 12 aa, Severe acute respiratory syndrome-related coronavirus
  REGION 1..12: note = Table B: HLA-DQA1*03:02-B1*03:03L HLA-DRB1*04:03L HLA-DRB1*01:02L HLA-DQA1*05:05-B1*03:19L HLA-DQA1*03:01-B1*03:02L HLA-DRB1*04:08L
  source 1..12: note = Severe acute respiratory syndrome coronavirus 2
VIGTSKFYGGWH

SEQ ID NO: 9413 - protein, 12 aa, Severe acute respiratory syndrome-related coronavirus
  REGION 1..12: note = Table B: HLA-DQA1*03:02-B1*03:03L HLA-DQA1*05:05-B1*03:19L HLA-DQA1*03:01-B1*03:02L
  source 1..12: note = Severe acute respiratory syndrome coronavirus 2
IGTSKFYGGWHN

SEQ ID NO: 9414 - protein, 15 aa, Severe acute respiratory syndrome-related coronavirus
  REGION 1..15: note = Table B: HLA-DQA1*03:02-B1*03:03L HLA-DQA1*05:01-B1*03:01L HLA-DRB1*01:03L HLA-DRB1*04:05L HLA-DRB3*02:01L HLA-DPA1*01:03-B1*03:01L HLA-DRB1*11:02L HLA-DRB1*14:02L HLA-DPA1*01:03-B1*04:01L HLA-DPA1*01:03-B1*04:02L
  REGION 1..15: note = CONT. FROM ABOVE: HLA-DQA1*03:01-B1*03:02L HLA-DPA1*01:03-B1*104 :01L HLA-DQA1*05:05-B1*03:01L HLA-DRB1*08:02L HLA-DRB1*08:03L
  source 1..15: note = Severe acute respiratory syndrome coronavirus 2
GGWHNMLKTVYSDVE

SEQ ID NO: 9415 - protein, 10 aa, Severe acute respiratory syndrome-related coronavirus
  REGION 1..10: note = Table B: HLA-DQA1*03:02-B1*03:03L HLA-DQA1*05:01-B1*03:01L HLA-DRB1*04:03L HLA-DRB1*13:02L HLA-DRB1*13:03L HLA-DRB1*01:03L HLA-DRB1*04:02L HLA-DRB1*04:04L HLA-DRB1*04:05L HLA-DQA1*01:02-B1*06:02L HLA-DRB1*01:02L HLA-DRB4*03:01NL
  REGION 1..10: note = CONT. FROM ABOVE: HLA-DRB1*08:77L HLA-DRB3*02:01L HLA-DPA1*01:03 -B1*03:01L HLA-DRB1*14:01L HLA-DRB1*11:04L HLA-DRB1*14:02L HLA-D QA1*01:01-B1*05:01L HLA-DRB1*08:01L HLA-DRB5*01:01L HLA-DQA1*01- B1*05M HLA-DQA1*05:05-B1*03:19L HLA-DQA1*05:01-B1*02:01L
  REGION 1..10: note = CONT. FROM ABOVE: HLA-DRB1*04:10L HLA-DPA1*01:03-B1*04:02L HLA-D RB1*12:01L HLA-DRB1*12:02L HLA-DPA1*03:01-B1*105:01L HLA-DQA1*03 :01-B1*03:02L HLA-DRB1*14:54L HLA-DQA1*05:05-B1*03:01L HLA-DRB1* 14:17L HLA-DPA1*01:02-B1*04:01L HLA-DRB1*10:01L HLA-DRB1*16:01L
  REGION 1..10: note = CONT. FROM ABOVE: HLA-DQA1*01:03-B1*06:01L HLA-DRB1*04:08L HLA-D RB1*08:03L HLA-DQA1*02:01-B1*03:03L HLA-DRB1*15:03L
  source 1..10: note = Severe acute respiratory syndrome coronavirus 2
TVYSDVENPH

SEQ ID NO: 9416 - protein, 10 aa, Severe acute respiratory syndrome-related coronavirus
  REGION 1..10: note = Table B: HLA-DQA1*03:02-B1*03:03M HLA-DQA1*05:01-B1*03:01M HLA-DRB1*04:01L HLA-DRB1*04:03L HLA-DRB1*13:02L HLA-DRB1*13:03L HLA-DRB1*01:03M HLA-DRB1*04:02L HLA-DRB1*04:04L HLA-DRB1*04:05M HLA-DQA1*01:02-B1*06:02L HLA-DRB1*01:01L HLA-DRB1*01:02L
  REGION 1..10: note = CONT. FROM ABOVE: HLA-DRB4*03:01NL HLA-DRB1*08:77L HLA-DRB3*02:0 1L HLA-DPA1*01:03-B1*03:01L HLA-DPA1*03:01-B1*04:02M HLA-DRB1*03 :01L HLA-DRB1*14:01L HLA-DRB1*11:02L HLA-DRB1*11:03L HLA-DRB1*11 :04L HLA-DRB1*14:02M HLA-DQA1*01:01-B1*05:01L HLA-DRB1*08:01L
  REGION 1..10: note = CONT. FROM ABOVE: HLA-DRB1*11:01L HLA-DRB5*01:01L HLA-DQA1*01-B1 *05L HLA-DQA1*05:05-B1*03:19L HLA-DQA1*05:01-B1*02:01L HLA-DRB4* 01:01L HLA-DPA1*01:03-B1*04:01L HLA-DQA1*05:05-B1*03:116M HLA-DR B1*09:01M HLA-DPA1*01:03-B1*04:02L HLA-DRB1*12:01L
  REGION 1..10: note = CONT. FROM ABOVE: HLA-DPA1*02:01-B1*13:01M HLA-DPA1*03:01-B1*105 :01M HLA-DQA1*03:01-B1*03:02M HLA-DPA1*01:03-B1*104:01L HLA-DQA1 *05:05-B1*03:01L HLA-DPA1*01:02-B1*04:01L HLA-DRB1*07:01L HLA-DR B1*10:01L HLA-DRB1*16:01M HLA-DQA1*01:03-B1*06:01M
  REGION 1..10: note = CONT. FROM ABOVE: HLA-DRB1*08:02L HLA-DRB1*08:03M HLA-DQA1*02:01 -B1*03:03M HLA-DRB1*15:03M
  source 1..10: note = Severe acute respiratory syndrome coronavirus 2
VYSDVENPHL

SEQ ID NO: 9417 - protein, 10 aa, Severe acute respiratory syndrome-related coronavirus
  REGION 1..10: note = Table B: HLA-DQA1*03:02-B1*03:03L HLA-DQA1*05:01-B1*03:01L HLA-DRB1*13:03L HLA-DRB1*08:77L HLA-DPA1*01:03-B1*03:01L HLA-DPA1*03:01-B1*04:02L HLA-DRB1*14:02L HLA-DQA1*01-B1*05L HLA-DQA1*05:05-B1*03:19L HLA-DQA1*05:01-B1*02:01L
  REGION 1..10: note = CONT. FROM ABOVE: HLA-DRB1*09:01L HLA-DQA1*03:01-B1*03:02L HLA-D PA1*01:03-B1*104:01L HLA-DRB1*10:01L HLA-DRB1*16:01L HLA-DQA1*02 :01-B1*03:03L HLA-DRB1*15:03L
  source 1..10: note = Severe acute respiratory syndrome coronavirus 2
YSDVENPHLM

SEQ ID NO: 9418 - protein, 14 aa, Severe acute respiratory syndrome-related coronavirus
  REGION 1..14: note = Table B: HLA-DQA1*03:02-B1*03:03L HLA-DRB1*01:03L HLA-DRB1*04:05L HLA-DRB1*01:02L HLA-DRB1*12:01L HLA-DQA1*05:05-B1*03:01L HLA-DRB1*04:08L
  source 1..14: note = Severe acute respiratory syndrome coronavirus 2
DVENPHLMGWDYPK

SEQ ID NO: 9419 - protein, 14 aa, Severe acute respiratory syndrome-related coronavirus
  REGION 1..14: note = Table B: HLA-DQA1*03:02-B1*03:03L HLA-DQA1*05:01-B1*03:01L HLA-DRB1*01:03L HLA-DRB1*04:04L HLA-DQA1*05:05-B1*03:19L HLA-DPA1*01:03-B1*04:02L HLA-DQA1*03:01-B1*03:02L HLA-DRB1*07:01L HLA-DRB1*16:01L HLA-DRB1*04:08L
  source 1..14: note = Severe acute respiratory syndrome coronavirus 2
FYRLANECAQVLSE

SEQ ID NO: 9420 - protein, 11 aa, Severe acute respiratory syndrome-related coronavirus
  REGION 1..11: note = Table B: HLA-DQA1*03:02-B1*03:03L HLA-DQA1*05:01-B1*03:01L HLA-DRB1*13:03L HLA-DRB4*03:01NL
  source 1..11: note = Severe acute respiratory syndrome coronavirus 2
GSLYVKPGGTS

SEQ ID NO: 9421 - protein, 14 aa, Severe acute respiratory syndrome-related coronavirus
  REGION 1..14: note = Table B: HLA-DQA1*03:02-B1*03:03L HLA-DRB1*01:03L HLA-DQA1*01:02-B1*06:02L HLA-DRB1*01:02L HLA-DRB1*04:08L
  source 1..14: note = Severe acute respiratory syndrome coronavirus 2
SLYVKPGGTSSGDA

SEQ ID NO: 9422 - protein, 12 aa, Severe acute respiratory syndrome-related coronavirus
  REGION 1..12: note = Table B: HLA-DQA1*03:02-B1*03:03L HLA-DQA1*05:01-B1*03:01L HLA-DQA1*05:05-B1*03:19L HLA-DQA1*03:01-B1*03:02L HLA-DQA1*05:05-B1*03:01L HLA-DQA1*02:01-B1*03:03L
  source 1..12: note = Severe acute respiratory syndrome coronavirus 2
VKPGGTSSGDAT

SEQ ID NO: 9423 - protein, 11 aa, Severe acute respiratory syndrome-related coronavirus
  REGION 1..11: note = Table B: HLA-DQA1*03:02-B1*03:03L HLA-DRB4*03:01NL HLA-DPA1*03:01-B1*04:02L HLA-DRB4*01:01L HLA-DRB1*12:01L HLA-DPA1*01:03-B1*104:01L HLA-DRB1*08:02L
  source 1..11: note = Severe acute respiratory syndrome coronavirus 2
GTSSGDATTAY

SEQ ID NO: 9424 - protein, 12 aa, Severe acute respiratory syndrome-related coronavirus
  REGION 1..12: note = Table B: HLA-DQA1*03:02-B1*03:03L HLA-DQA1*03:01-B1*03:02L HLA-DQA1*05:05-B1*03:01L HLA-DQA1*01:03-B1*06:01L
  source 1..12: note = Severe acute respiratory syndrome coronavirus 2
TSSGDATTAYAN

SEQ ID NO: 9425 - protein, 13 aa, Severe acute respiratory syndrome-related coronavirus
  REGION 1..13: note = Table B: HLA-DQA1*03:02-B1*03:03L HLA-DQA1*05:01-B1*02:01L HLA-DQA1*01:03-B1*06:01L HLA-DQA1*02:01-B1*03:03L
  source 1..13: note = Severe acute respiratory syndrome coronavirus 2
SSGDATTAYANSV

SEQ ID NO: 9426 - protein, 10 aa, Severe acute respiratory syndrome-related coronavirus
  REGION 1..10: note = Table B: HLA-DQA1*03:02-B1*03:03L HLA-DQA1*05:01-B1*03:01L HLA-DRB1*13:03L HLA-DQA1*01:02-B1*06:02L HLA-DQA1*05:05-B1*03:19L HLA-DQA1*05:01-B1*02:01L HLA-DPA1*03:01-B1*105:01L HLA-DQA1*03:01-B1*03:02L
  REGION 1..10: note = CONT. FROM ABOVE: HLA-DQA1*05:05-B1*03:01L HLA-DQA1*01:03-B1*06: 01L HLA-DQA1*02:01-B1*03:03L HLA-DRB1*15:03L
  source 1..10: note = Severe acute respiratory syndrome coronavirus 2
ATTAYANSVF

SEQ ID NO: 9427 - protein, 10 aa, Severe acute respiratory syndrome-related coronavirus
  REGION 1..10: note = Table B: HLA-DQA1*03:02-B1*03:03L HLA-DQA1*05:01-B1*03:01L HLA-DQA1*01:02-B1*06:02L HLA-DQA1*05:05-B1*03:19L HLA-DQA1*05:01-B1*02:01L HLA-DPA1*03:01-B1*105:01L HLA-DQA1*03:01-B1*03:02L HLA-DQA1*05:05-B1*03:01L
  REGION 1..10: note = CONT. FROM ABOVE: HLA-DQA1*01:03-B1*06:01L HLA-DQA1*02:01-B1*03: 03L
  source 1..10: note = Severe acute respiratory syndrome coronavirus 2
TTAYANSVFN

SEQ ID NO: 9428 - protein, 10 aa, Severe acute respiratory syndrome-related coronavirus
  REGION 1..10: note = Table B: HLA-DQA1*03:02-B1*03:03L HLA-DQA1*01:02-B1*06:02L HLA-DQA1*05:05-B1*03:19L HLA-DPA1*02:01-B1*13:01L HLA-DQA1*01:03-B1*06:01L HLA-DRB1*15:03L
  source 1..10: note = Severe acute respiratory syndrome coronavirus 2
TAYANSVFNI

SEQ ID NO: 9429 - protein, 13 aa, Severe acute respiratory syndrome-related coronavirus
  REGION 1..13: note = Table B: HLA-DQA1*03:02-B1*03:03L HLA-DRB1*01:03L HLA-DRB1*04:02L HLA-DRB1*04:04L HLA-DRB1*04:05L HLA-DRB4*03:01NL HLA-DPA1*01:03-B1*03:01L HLA-DRB1*14:01L HLA-DQA1*05:01-B1*02:01L HLA-DRB1*04:10L
  REGION 1..13: note = CONT. FROM ABOVE: HLA-DQA1*03:01-B1*03:02L HLA-DPA1*01:03-B1*104 :01L HLA-DRB1*10:01L
  source 1..13: note = Severe acute respiratory syndrome coronavirus 2
NSVFNICQAVTAN

SEQ ID NO: 9430 - protein, 12 aa, Severe acute respiratory syndrome-related coronavirus
  REGION 1..12: note = Table B: HLA-DQA1*03:02-B1*03:03L HLA-DRB1*04:02L HLA-DRB1*01:02L HLA-DPA1*01:03-B1*03:01L HLA-DQA1*05:05-B1*03:19L HLA-DRB1*12:01L HLA-DPA1*03:01-B1*105:01L HLA-DRB1*16:01L HLA-DRB1*04:08L
  REGION 1..12: note = CONT. FROM ABOVE: HLA-DRB1*15:03L
  source 1..12: note = Severe acute respiratory syndrome coronavirus 2
FNICQAVTANVN

SEQ ID NO: 9431 - protein, 10 aa, Severe acute respiratory syndrome-related coronavirus
  REGION 1..10: note = Table B: HLA-DQA1*03:02-B1*03:03L HLA-DQA1*05:01-B1*03:01L HLA-DRB1*13:03L HLA-DQA1*05:01-B1*02:01L HLA-DPA1*03:01-B1*105:01L HLA-DQA1*03:01-B1*03:02L HLA-DQA1*02:01-B1*03:03L
  source 1..10: note = Severe acute respiratory syndrome coronavirus 2
QAVTANVNAL

SEQ ID NO: 9432 - protein, 10 aa, Severe acute respiratory syndrome-related coronavirus
  REGION 1..10: note = Table B: HLA-DQA1*03:02-B1*03:03L HLA-DQA1*05:01-B1*02:01L HLA-DQA1*03:01-B1*03:02L HLA-DQA1*01:03-B1*06:01L HLA-DQA1*02:01-B1*03:03L
  source 1..10: note = Severe acute respiratory syndrome coronavirus 2
AVTANVNALL

SEQ ID NO: 9433 - protein, 10 aa, Severe acute respiratory syndrome-related coronavirus
  REGION 1..10: note = Table B: HLA-DQA1*03:02-B1*03:03M HLA-DQA1*05:01-B1*03:01L HLA-DQA1*01:02-B1*06:02L HLA-DRB1*01:02L HLA-DRB1*08:77L HLA-DPA1*03:01-B1*04:02L HLA-DRB1*14:01L HLA-DRB1*14:02L HLA-DQA1*05:05-B1*03:19L HLA-DQA1*05:01-B1*02:01L
  REGION 1..10: note = CONT. FROM ABOVE: HLA-DPA1*01:03-B1*04:01L HLA-DQA1*05:05-B1*03: 116L HLA-DRB1*09:01L HLA-DRB1*12:01L HLA-DPA1*02:01-B1*13:01L HL A-DPA1*03:01-B1*105:01L HLA-DQA1*03:01-B1*03:02L HLA-DPA1*01:03- B1*104:01L HLA-DPA1*01:02-B1*04:01L HLA-DRB1*07:01L
  REGION 1..10: note = CONT. FROM ABOVE: HLA-DRB1*10:01L HLA-DRB1*16:01L HLA-DQA1*01:03 -B1*06:01L HLA-DRB1*08:03L HLA-DQA1*02:01-B1*03:03L HLA-DRB1*15: 03L
  source 1..10: note = Severe acute respiratory syndrome coronavirus 2
ALLSTDGNKI

SEQ ID NO: 9434 - protein, 10 aa, Severe acute respiratory syndrome-related coronavirus
  REGION 1..10: note = Table B: HLA-DQA1*03:02-B1*03:03L HLA-DRB1*04:03L HLA-DRB1*13:02L HLA-DRB4*03:01NL HLA-DRB1*08:77L HLA-DRB3*02:01L HLA-DQA1*05:01-B1*02:01L HLA-DRB1*12:01L HLA-DRB1*14:17L HLA-DRB1*07:01L HLA-DRB1*16:01L HLA-DQA1*02:01-B1*03:03L
  REGION 1..10: note = CONT. FROM ABOVE: HLA-DRB1*15:03L
  source 1..10: note = Severe acute respiratory syndrome coronavirus 2
LLSTDGNKIA

SEQ ID NO: 9435 - protein, 12 aa, Severe acute respiratory syndrome-related coronavirus
  REGION 1..12: note = Table B: HLA-DQA1*03:02-B1*03:03L HLA-DPA1*02:01-B1*13:01L HLA-DPA1*03:01-B1*105:01L
  source 1..12: note = Severe acute respiratory syndrome coronavirus 2
LSTDGNKIADKY

SEQ ID NO: 9436 - protein, 14 aa, Severe acute respiratory syndrome-related coronavirus
  REGION 1..14: note = Table B: HLA-DQA1*03:02-B1*03:03L HLA-DRB4*03:01NL HLA-DQA1*05:05-B1*03:116L HLA-DPA1*01:03-B1*104:01L HLA-DRB1*15:01L
  source 1..14: note = Severe acute respiratory syndrome coronavirus 2
ADKYVRNLQHRLYE

SEQ ID NO: 9437 - protein, 13 aa, Severe acute respiratory syndrome-related coronavirus
  REGION 1..13: note = Table B: HLA-DQA1*03:02-B1*03:03L HLA-DRB1*04:03L HLA-DRB1*04:02L HLA-DQA1*05:01-B1*02:01L HLA-DRB1*12:01L HLA-DQA1*02:01-B1*03:03L
  source 1..13: note = Severe acute respiratory syndrome coronavirus 2
YRNRDVDTDFVNE

SEQ ID NO: 9438 - protein, 10 aa, Severe acute respiratory syndrome-related coronavirus
  REGION 1..10: note = Table B: HLA-DQA1*03:02-B1*03:03L HLA-DQA1*05:01-B1*03:01L HLA-DRB1*13:03L HLA-DQA1*01:02-B1*06:02L HLA-DRB1*08:77L HLA-DPA1*01:03-B1*03:01L HLA-DRB1*03:01L HLA-DRB1*14:02L HLA-DQA1*01-B1*05L HLA-DQA1*05:05-B1*03:19L
  REGION 1..10: note = CONT. FROM ABOVE: HLA-DQA1*05:01-B1*02:01L HLA-DPA1*01:03-B1*04: 01L HLA-DPA1*02:01-B1*13:01L HLA-DPA1*03:01-B1*105:01L HLA-DPA1* 01:03-B1*104:01L HLA-DRB1*10:01L HLA-DRB1*16:01L HLA-DQA1*01:03- B1*06:01L HLA-DQA1*02:01-B1*03:03L HLA-DRB1*15:03L
  source 1..10: note = Severe acute respiratory syndrome coronavirus 2
DVDTDFVNEF

SEQ ID NO: 9439 - protein, 16 aa, Severe acute respiratory syndrome-related coronavirus
  REGION 1..16: note = Table B: HLA-DQA1*03:02-B1*03:03L HLA-DQA1*01:01-B1*05:01L HLA-DRB1*09:01L HLA-DRB1*08:02L
  source 1..16: note = Severe acute respiratory syndrome coronavirus 2
VDTDFVNEFYAYLRKH

SEQ ID NO: 9440 - protein, 16 aa, Severe acute respiratory syndrome-related coronavirus
  REGION 1..16: note = Table B: HLA-DQA1*03:02-B1*03:03L HLA-DRB3*02:01L HLA-DQA1*05:05-B1*03:116L HLA-DRB1*09:01L
  source 1..16: note = Severe acute respiratory syndrome coronavirus 2
TDFVNEFYAYLRKHFS

SEQ ID NO: 9441 - protein, 13 aa, Severe acute respiratory syndrome-related coronavirus
  REGION 1..13: note = Table B: HLA-DQA1*03:02-B1*03:03L HLA-DQA1*05:01-B1*03:01L HLA-DRB1*01:03L HLA-DRB1*01:02L HLA-DPA1*01:03-B1*03:01L HLA-DPA1*03:01-B1*04:02L HLA-DRB1*03:01L HLA-DQA1*05:05-B1*03:19L HLA-DPA1*01:03-B1*04:02L
  REGION 1..13: note = CONT. FROM ABOVE: HLA-DRB1*12:01L HLA-DQA1*03:01-B1*03:02L HLA-D QA1*05:05-B1*03:01L HLA-DRB1*16:01L HLA-DQA1*01:03-B1*06:01L HLA -DQA1*02:01-B1*03:03L HLA-DRB1*15:03L
  source 1..13: note = Severe acute respiratory syndrome coronavirus 2
ILSDDAVVCFNST

SEQ ID NO: 9442 - protein, 16 aa, Severe acute respiratory syndrome-related coronavirus
  REGION 1..16: note = Table B: HLA-DQA1*03:02-B1*03:03L HLA-DRB1*04:01L HLA-DPA1*01:03-B1*03:01L HLA-DRB1*14:02L HLA-DRB4*01:01L HLA-DRB3*01:01L HLA-DPA1*02:01-B1*13:01L HLA-DPA1*01:03-B1*104:01L HLA-DRB1*07:01L
  source 1..16: note = Severe acute respiratory syndrome coronavirus 2
SDDAVVCFNSTYASQG

SEQ ID NO: 9443 - protein, 10 aa, Severe acute respiratory syndrome-related coronavirus
  REGION 1..10: note = Table B: HLA-DQA1*03:02-B1*03:03L
  source 1..10: note = Severe acute respiratory syndrome coronavirus 2
FNSTYASQGL

SEQ ID NO: 9444 - protein, 10 aa, Severe acute respiratory syndrome-related coronavirus
  REGION 1..10: note = Table B: HLA-DQA1*03:02-B1*03:03L
  source 1..10: note = Severe acute respiratory syndrome coronavirus 2
STYASQGLVA

SEQ ID NO: 9445 - protein, 10 aa, Severe acute respiratory syndrome-related coronavirus
  REGION 1..10: note = Table B: HLA-DQA1*03:02-B1*03:03L HLA-DQA1*05:05-B1*03:19L HLA-DPA1*01:03-B1*104:01L
  source 1..10: note = Severe acute respiratory syndrome coronavirus 2
YASQGLVASI

SEQ ID NO: 9446 - protein, 11 aa, Severe acute respiratory syndrome-related coronavirus
  REGION 1..11: note = Table B: HLA-DQA1*03:02-B1*03:03L HLA-DRB1*04:03L HLA-DPA1*03:01-B1*105:01L
  source 1..11: note = Severe acute respiratory syndrome coronavirus 2
ASQGLVASIKN

SEQ ID NO: 9447 - protein, 15 aa, Severe acute respiratory syndrome-related coronavirus
  REGION 1..15: note = Table B: HLA-DQA1*03:02-B1*03:03L HLA-DRB1*04:01L HLA-DRB1*13:01L HLA-DRB1*09:01L HLA-DPA1*01:03-B1*02:01L HLA-DRB1*10:01L
  source 1..15: note = Severe acute respiratory syndrome coronavirus 2
VASIKNFKSVLYYQN

SEQ ID NO: 9448 - protein, 13 aa, Severe acute respiratory syndrome-related coronavirus
  REGION 1..13: note = Table B: HLA-DQA1*03:02-B1*03:03L HLA-DRB1*13:03L HLA-DRB1*01:01L HLA-DPA1*01:03-B1*03:01L HLA-DRB1*11:03L HLA-DRB1*11:04L HLA-DRB1*14:02L HLA-DQA1*01:01-B1*05:01L HLA-DRB1*11:01L HLA-DQA1*05:05-B1*03:19L
  REGION 1..13: note = CONT. FROM ABOVE: HLA-DPA1*01:03-B1*104:01L HLA-DQA1*05:05-B1*03 :01L HLA-DRB1*07:01L HLA-DRB1*10:01L HLA-DRB1*08:02L HLA-DRB1*08 :03L
  source 1..13: note = Severe acute respiratory syndrome coronavirus 2
IKNFKSVLYYQNN

SEQ ID NO: 9449 - protein, 10 aa, Severe acute respiratory syndrome-related coronavirus
  REGION 1..10: note = Table B: HLA-DQA1*03:02-B1*03:03L HLA-DRB1*04:03L HLA-DQA1*01:02-B1*06:02L HLA-DQA1*01-B1*05L HLA-DQA1*05:05-B1*03:19L HLA-DQA1*05:01-B1*02:01L HLA-DRB1*12:01L HLA-DPA1*02:01-B1*13:01L
  REGION 1..10: note = CONT. FROM ABOVE: HLA-DPA1*03:01-B1*105:01L HLA-DQA1*01:03-B1*06 :01L HLA-DQA1*02:01-B1*03:03L HLA-DRB1*15:03L
  source 1..10: note = Severe acute respiratory syndrome coronavirus 2
SVLYYQNNVF

SEQ ID NO: 9450 - protein, 11 aa, Severe acute respiratory syndrome-related coronavirus
  REGION 1..11: note = Table B: HLA-DQA1*03:02-B1*03:03L HLA-DQA1*05:01-B1*03:01L HLA-DRB1*04:03L HLA-DRB1*13:03L HLA-DRB1*01:03L HLA-DRB1*04:02L HLA-DQA1*01:02-B1*06:02L HLA-DRB4*03:01NL HLA-DQA1*05:05-B1*03:19L HLA-DQA1*05:01-B1*02:01L
  REGION 1..11: note = CONT. FROM ABOVE: HLA-DPA1*01:03-B1*04:02L HLA-DPA1*03:01-B1*105 :01L HLA-DQA1*03:01-B1*03:02L HLA-DQA1*05:05-B1*03:01L HLA-DRB1* 14:17L HLA-DPA1*01:02-B1*04:01L HLA-DRB1*16:01L
  source 1..11: note = Severe acute respiratory syndrome coronavirus 2
YQNNVFMSEAK

SEQ ID NO: 9451 - protein, 14 aa, Severe acute respiratory syndrome-related coronavirus
  REGION 1..14: note = Table B: HLA-DQA1*03:02-B1*03:03L HLA-DQA1*05:01-B1*03:01L HLA-DRB1*01:02L HLA-DRB1*08:04L HLA-DPA1*01:03-B1*03:01L HLA-DPA1*03:01-B1*04:02L HLA-DQA1*03:01-B1*03:02L HLA-DRB1*04:08L HLA-DRB1*15:03L
  source 1..14: note = Severe acute respiratory syndrome coronavirus 2
NVFMSEAKCWTETD

SEQ ID NO: 9452 - protein, 10 aa, Severe acute respiratory syndrome-related coronavirus
  REGION 1..10: note = Table B: HLA-DQA1*03:02-B1*03:03L HLA-DRB1*04:03L HLA-DRB1*13:03L HLA-DRB1*01:03L HLA-DRB1*04:02L HLA-DRB4*03:01NL HLA-DQA1*01-B1*05L HLA-DQA1*03:01-B1*03:02L HLA-DRB1*14:54L HLA-DRB1*14:17L HLA-DPA1*01:02-B1*04:01L HLA-DRB1*16:01L
  REGION 1..10: note = CONT. FROM ABOVE: HLA-DQA1*01:03-B1*06:01L HLA-DQA1*02:01-B1*03: 03L
  source 1..10: note = Severe acute respiratory syndrome coronavirus 2
TETDLTKGPH

SEQ ID NO: 9453 - protein, 10 aa, Severe acute respiratory syndrome-related coronavirus
  REGION 1..10: note = Table B: HLA-DQA1*03:02-B1*03:03L HLA-DQA1*05:01-B1*03:01L HLA-DRB1*13:03L HLA-DRB1*01:03L HLA-DQA1*01:02-B1*06:02L HLA-DRB4*03:01NL HLA-DRB1*08:77L HLA-DPA1*01:03-B1*03:01L HLA-DPA1*03:01-B1*04:02L HLA-DRB1*03:01L HLA-DRB1*11:02L
  REGION 1..10: note = CONT. FROM ABOVE: HLA-DQA1*01-B1*05L HLA-DQA1*05:05-B1*03:19M HL A-DQA1*05:01-B1*02:01L HLA-DRB4*01:01L HLA-DPA1*01:03-B1*04:01L HLA-DRB1*12:01L HLA-DQA1*03:01-B1*03:02L HLA-DPA1*01:03-B1*104:0 1L HLA-DPA1*01:02-B1*04:01L HLA-DRB1*10:01L HLA-DRB1*16:01L
  REGION 1..10: note = CONT. FROM ABOVE: HLA-DQA1*02:01-B1*03:03L HLA-DRB1*15:03L
  source 1..10: note = Severe acute respiratory syndrome coronavirus 2
TDLTKGPHEF

SEQ ID NO: 9454 - protein, 16 aa, Severe acute respiratory syndrome-related coronavirus
  REGION 1..16: note = Table B: HLA-DQA1*03:02-B1*03:03L HLA-DRB1*03:01L HLA-DRB1*11:02L HLA-DRB1*14:02L HLA-DQA1*05:05-B1*03:19L HLA-DPA1*01:03-B1*04:02L HLA-DPA1*01:03-B1*104:01L HLA-DRB1*08:02L
  source 1..16: note = Severe acute respiratory syndrome coronavirus 2
GPHEFCSQHTMLVKQG

SEQ ID NO: 9455 - protein, 12 aa, Severe acute respiratory syndrome-related coronavirus
  REGION 1..12: note = Table B: HLA-DQA1*03:02-B1*03:03L HLA-DQA1*05:01-B1*03:01L HLA-DRB1*04:03L HLA-DRB1*04:02L HLA-DQA1*01:01-B1*05:01L HLA-DRB1*08:01L HLA-DQA1*05:05-B1*03:19L HLA-DPA1*03:01-B1*105:01L HLA-DQA1*05:05-B1*03:01L
  source 1..12: note = Severe acute respiratory syndrome coronavirus 2
SQHTMLVKQGDD

SEQ ID NO: 9456 - protein, 10 aa, Severe acute respiratory syndrome-related coronavirus
  REGION 1..10: note = Table B: HLA-DQA1*03:02-B1*03:03L HLA-DQA1*05:01-B1*03:01L HLA-DRB1*13:03L HLA-DRB1*01:03L HLA-DQA1*01:02-B1*06:02L HLA-DRB1*08:77L HLA-DPA1*01:03-B1*03:01L HLA-DRB1*03:01L HLA-DRB1*14:02L HLA-DQA1*01-B1*05L HLA-DQA1*05:05-B1*03:19L
  REGION 1..10: note = CONT. FROM ABOVE: HLA-DQA1*05:01-B1*02:01L HLA-DPA1*01:03-B1*04: 01L HLA-DPA1*01:03-B1*04:02L HLA-DRB1*12:01L HLA-DPA1*03:01-B1*1 05:01L HLA-DQA1*03:01-B1*03:02L HLA-DPA1*01:03-B1*104:01L HLA-DR B1*16:01L HLA-DQA1*01:03-B1*06:01L HLA-DQA1*02:01-B1*03:03L
  REGION 1..10: note = CONT. FROM ABOVE: HLA-DRB1*15:03L
  source 1..10: note = Severe acute respiratory syndrome coronavirus 2
TMLVKQGDDY

SEQ ID NO: 9457 - protein, 11 aa, Severe acute respiratory syndrome-related coronavirus
  REGION 1..11: note = Table B: HLA-DQA1*03:02-B1*03:03L HLA-DQA1*05:01-B1*02:01L HLA-DPA1*03:01-B1*105:01L HLA-DQA1*03:01-B1*03:02L HLA-DQA1*01:03-B1*06:01L HLA-DQA1*02:01-B1*03:03L
  source 1..11: note = Severe acute respiratory syndrome coronavirus 2
DDYVYLPYPDP

SEQ ID NO: 9458 - protein, 10 aa, Severe acute respiratory syndrome-related coronavirus
  REGION 1..10: note = Table B: HLA-DQA1*03:02-B1*03:03L HLA-DRB1*04:03L HLA-DRB1*04:02L HLA-DQA1*01-B1*05L HLA-DQA1*05:01-B1*02:01L HLA-DQA1*03:01-B1*03:02L HLA-DRB1*14:17L HLA-DQA1*02:01-B1*03:03L
  source 1..10: note = Severe acute respiratory syndrome coronavirus 2
YVYLPYPDPS

SEQ ID NO: 9459 - protein, 10 aa, Severe acute respiratory syndrome-related coronavirus
  REGION 1..10: note = Table B: HLA-DQA1*03:02-B1*03:03L HLA-DQA1*05:01-B1*03:01L HLA-DRB1*04:03L HLA-DRB1*13:02L HLA-DRB1*13:03L HLA-DRB1*01:03L HLA-DRB1*04:02L HLA-DRB1*04:05L HLA-DRB4*03:01NL HLA-DRB1*08:01L HLA-DQA1*01-B1*05L HLA-DQA1*05:01-B1*02:01L HLA-DRB1*12:01L
  REGION 1..10: note = CONT. FROM ABOVE: HLA-DPA1*03:01-B1*105:01L HLA-DQA1*03:01-B1*03 :02L HLA-DQA1*05:05-B1*03:01L HLA-DRB1*14:17L HLA-DPA1*01:02-B1* 04:01L HLA-DRB1*16:01L HLA-DQA1*01:03-B1*06:01L HLA-DRB1*04:08L HLA-DQA1*02:01-B1*03:03L
  source 1..10: note = Severe acute respiratory syndrome coronavirus 2
VYLPYPDPSR

SEQ ID NO: 9460 - protein, 10 aa, Severe acute respiratory syndrome-related coronavirus
  REGION 1..10: note = Table B: HLA-DQA1*03:02-B1*03:03M HLA-DQA1*05:01-B1*03:01L HLA-DRB1*04:01L HLA-DRB1*04:03L HLA-DRB1*13:03L HLA-DRB1*01:03L HLA-DRB1*04:05L HLA-DQA1*01:02-B1*06:02L HLA-DRB1*01:01L HLA-DRB1*01:02L HLA-DRB1*08:77L HLA-DPA1*03:01-B1*04:02L
  REGION 1..10: note = CONT. FROM ABOVE: HLA-DRB1*14:01L HLA-DRB1*11:02L HLA-DRB1*14:02 L HLA-DRB1*08:01L HLA-DQA1*01-B1*05L HLA-DQA1*05:05-B1*03:19M HL A-DQA1*05:01-B1*02:01L HLA-DPA1*01:03-B1*04:01L HLA-DQA1*05:05-B 1*03:116M HLA-DRB1*09:01L HLA-DPA1*02:01-B1*13:01M
  REGION 1..10: note = CONT. FROM ABOVE: HLA-DPA1*03:01-B1*105:01L HLA-DQA1*03:01-B1*03 :02L HLA-DPA1*01:03-B1*104:01L HLA-DPA1*01:02-B1*04:01L HLA-DRB1 *10:01L HLA-DRB1*16:01L HLA-DQA1*01:03-B1*06:01M HLA-DRB1*08:03L HLA-DQA1*02:01-B1*03:03L HLA-DRB1*15:03L
  source 1..10: note = Severe acute respiratory syndrome coronavirus 2
YLPYPDPSRI

SEQ ID NO: 9461 - protein, 10 aa, Severe acute respiratory syndrome-related coronavirus
  REGION 1..10: note = Table B: HLA-DQA1*03:02-B1*03:03L HLA-DQA1*05:01-B1*03:01L HLA-DRB1*13:03L HLA-DRB1*04:02L HLA-DRB1*04:05L HLA-DQA1*01:02-B1*06:02L HLA-DRB1*01:01L HLA-DRB1*01:02L HLA-DRB4*03:01NL HLA-DPA1*01:03-B1*03:01L
  REGION 1..10: note = CONT. FROM ABOVE: HLA-DPA1*03:01-B1*04:02L HLA-DRB1*14:01L HLA-D RB1*08:01L HLA-DQA1*01-B1*05L HLA-DQA1*05:01-B1*02:01L HLA-DQA1* 05:05-B1*03:116L HLA-DPA1*02:01-B1*13:01L HLA-DPA1*03:01-B1*105: 01L HLA-DQA1*03:01-B1*03:02L HLA-DPA1*01:02-B1*04:01L
  REGION 1..10: note = CONT. FROM ABOVE: HLA-DRB1*16:01L HLA-DQA1*01:03-B1*06:01L HLA-D RB1*08:03L HLA-DQA1*02:01-B1*03:03L HLA-DRB1*15:03L
  source 1..10: note = Severe acute respiratory syndrome coronavirus 2
LPYPDPSRIL

SEQ ID NO: 9462 - protein, 19 aa, Severe acute respiratory syndrome-related coronavirus
  REGION 1..19: note = Table B: HLA-DQA1*03:02-B1*03:03L HLA-DPA1*01:03-B1*03:01L HLA-DPA1*01:03-B1*04:02L HLA-DPA1*02:01-B1*13:01L HLA-DPA1*03:01-B1*105:01L HLA-DPA1*01:03-B1*104:01L HLA-DQA1*02:01-B1*03:03L HLA-DRB1*15:03L
  source 1..19: note = Severe acute respiratory syndrome coronavirus 2
PYPDPSRILGAGCFVDDIV

SEQ ID NO: 9463 - protein, 13 aa, Severe acute respiratory syndrome-related coronavirus
  REGION 1..13: note = Table B: HLA-DQA1*03:02-B1*03:03L HLA-DQA1*05:01-B1*02:01L HLA-DPA1*03:01-B1*105:01L HLA-DQA1*03:01-B1*03:02L HLA-DQA1*05:05-B1*03:01L HLA-DQA1*02:01-B1*03:03L
  source 1..13: note = Severe acute respiratory syndrome coronavirus 2
ILGAGCFVDDIVK

SEQ ID NO: 9464 - protein, 10 aa, Severe acute respiratory syndrome-related coronavirus
  REGION 1..10: note = Table B: HLA-DQA1*03:02-B1*03:03L HLA-DQA1*01-B1*05L HLA-DQA1*05:01-B1*02:01L HLA-DQA1*03:01-B1*03:02L
  source 1..10: note = Severe acute respiratory syndrome coronavirus 2
DDIVKTDGTL

SEQ ID NO: 9465 - protein, 10 aa, Severe acute respiratory syndrome-related coronavirus
  REGION 1..10: note = Table B: HLA-DQA1*03:02-B1*03:03L HLA-DQA1*05:01-B1*03:01L HLA-DRB1*04:03L HLA-DRB1*13:02L HLA-DRB1*13:03L HLA-DRB1*01:03L HLA-DRB1*04:02L HLA-DRB1*04:05L HLA-DRB1*01:02L HLA-DRB4*03:01NL HLA-DRB1*08:77L HLA-DRB3*02:01L HLA-DPA1*03:01-B1*04:02L
  REGION 1..10: note = CONT. FROM ABOVE: HLA-DRB1*14:01L HLA-DRB1*11:03L HLA-DRB1*11:04 L HLA-DRB5*01:01L HLA-DQA1*01-B1*05L HLA-DQA1*05:05-B1*03:19L HL A-DQA1*05:01-B1*02:01L HLA-DPA1*01:03-B1*04:01L HLA-DRB1*09:01L HLA-DRB1*12:01L HLA-DRB1*12:02L HLA-DPA1*03:01-B1*105:01L
  REGION 1..10: note = CONT. FROM ABOVE: HLA-DQA1*03:01-B1*03:02L HLA-DRB1*14:54L HLA-D QA1*05:05-B1*03:01L HLA-DRB1*14:17L HLA-DPA1*01:02-B1*04:01L HLA -DRB1*07:01L HLA-DRB1*16:01L HLA-DQA1*01:03-B1*06:01L HLA-DQA1*0 2:01-B1*03:03L HLA-DRB1*15:03L
  source 1..10: note = Severe acute respiratory syndrome coronavirus 2
DIVKTDGTLM

SEQ ID NO: 9466 - protein, 10 aa, Severe acute respiratory syndrome-related coronavirus
  REGION 1..10: note = Table B: HLA-DQA1*03:02-B1*03:03L HLA-DQA1*05:01-B1*03:01L HLA-DQA1*01:02-B1*06:02L HLA-DRB1*08:77L HLA-DPA1*01:03-B1*03:01L HLA-DPA1*03:01-B1*04:02L HLA-DRB1*03:01L HLA-DRB1*11:02L HLA-DQA1*01-B1*05L
  REGION 1..10: note = CONT. FROM ABOVE: HLA-DQA1*05:05-B1*03:19M HLA-DQA1*05:01-B1*02: 01L HLA-DRB4*01:01L HLA-DPA1*01:03-B1*04:01L HLA-DRB1*12:01L HLA -DPA1*03:01-B1*105:01L HLA-DQA1*03:01-B1*03:02L HLA-DPA1*01:03-B 1*104:01L HLA-DPA1*01:02-B1*04:01L HLA-DRB1*10:01L
  REGION 1..10: note = CONT. FROM ABOVE: HLA-DRB1*16:01L HLA-DQA1*01:03-B1*06:01L HLA-D QA1*02:01-B1*03:03L HLA-DRB1*15:03L
  source 1..10: note = Severe acute respiratory syndrome coronavirus 2
TDGTLMIERF

SEQ ID NO: 9467 - protein, 10 aa, Severe acute respiratory syndrome-related coronavirus
  REGION 1..10: note = Table B: HLA-DQA1*03:02-B1*03:03L HLA-DQA1*05:01-B1*03:01L HLA-DRB1*01:03L HLA-DQA1*01:02-B1*06:02L HLA-DRB1*01:02L HLA-DPA1*01:03-B1*03:01L HLA-DPA1*03:01-B1*04:02M HLA-DRB1*14:01L HLA-DRB1*14:02L HLA-DRB1*08:01L HLA-DRB1*11:01L
  REGION 1..10: note = CONT. FROM ABOVE: HLA-DQA1*01-B1*05L HLA-DQA1*05:05-B1*03:19L HL A-DQA1*05:01-B1*02:01L HLA-DPA1*01:03-B1*04:01L HLA-DPA1*01:03-B 1*04:02L HLA-DRB1*12:01L HLA-DPA1*02:01-B1*13:01L HLA-DPA1*03:01 -B1*105:01L HLA-DQA1*03:01-B1*03:02L HLA-DPA1*01:03-B1*104:01L
  REGION 1..10: note = CONT. FROM ABOVE: HLA-DQA1*05:05-B1*03:01L HLA-DPA1*01:02-B1*04: 01M HLA-DRB1*16:01L HLA-DQA1*01:03-B1*06:01L HLA-DRB1*04:08L HLA -DQA1*02:01-B1*03:03L HLA-DRB1*15:03L
  source 1..10: note = Severe acute respiratory syndrome coronavirus 2
TLMIERFVSL

SEQ ID NO: 9468 - protein, 13 aa, Severe acute respiratory syndrome-related coronavirus
  REGION 1..13: note = Table B: HLA-DQA1*03:02-B1*03:03L HLA-DRB1*13:02L HLA-DRB1*04:05L HLA-DPA1*01:03-B1*04:02L HLA-DQA1*05:05-B1*03:01L HLA-DPA1*01:02-B1*04:01L HLA-DRB1*16:01L HLA-DQA1*01:03-B1*06:01L HLA-DRB1*04:08L
  source 1..13: note = Severe acute respiratory syndrome coronavirus 2
IERFVSLAIDAYP

SEQ ID NO: 9469 - protein, 13 aa, Severe acute respiratory syndrome-related coronavirus
  REGION 1..13: note = Table B: HLA-DQA1*03:02-B1*03:03L HLA-DRB1*04:05L HLA-DPA1*02:01-B1*13:01L
  source 1..13: note = Severe acute respiratory syndrome coronavirus 2
LAIDAYPLTKHPN

SEQ ID NO: 9470 - protein, 12 aa, Severe acute respiratory syndrome-related coronavirus
  REGION 1..12: note = Table B: HLA-DQA1*03:02-B1*03:03L HLA-DRB1*01:03L HLA-DRB1*04:05L HLA-DQA1*01:02-B1*06:02L HLA-DRB1*01:02L HLA-DRB4*03:01NL HLA-DRB1*08:04L HLA-DRB1*14:01L HLA-DRB1*12:01L HLA-DRB1*14:54L HLA-DRB1*14:17L HLA-DRB1*16:01L HLA-DRB1*04:08L
  source 1..12: note = Severe acute respiratory syndrome coronavirus 2
IDAYPLTKHPNQ

SEQ ID NO: 9471 - protein, 12 aa, Severe acute respiratory syndrome-related coronavirus
  REGION 1..12: note = Table B: HLA-DQA1*03:02-B1*03:03L HLA-DRB1*04:05L HLA-DQA1*01:02-B1*06:02L HLA-DRB1*01:02L HLA-DRB1*08:04L HLA-DRB1*14:01L HLA-DQA1*05:05-B1*03:19L HLA-DQA1*05:05-B1*03:01L HLA-DRB1*04:08L HLA-DRB1*08:03L
  source 1..12: note = Severe acute respiratory syndrome coronavirus 2
DAYPLTKHPNQE

SEQ ID NO: 9472 - protein, 11 aa, Severe acute respiratory syndrome-related coronavirus
  REGION 1..11: note = Table B: HLA-DQA1*03:02-B1*03:03L HLA-DRB1*13:02L HLA-DRB4*03:01NL HLA-DRB1*08:77L HLA-DPA1*03:01-B1*04:02L HLA-DRB1*14:01L HLA-DRB1*11:01L HLA-DQA1*01-B1*05L HLA-DPA1*01:03-B1*04:01L HLA-DQA1*05:05-B1*03:116L
  REGION 1..11: note = CONT. FROM ABOVE: HLA-DRB1*12:01L HLA-DPA1*02:01-B1*13:01L HLA-D PA1*01:03-B1*104:01L HLA-DQA1*05:05-B1*03:01L HLA-DPA1*01:02-B1* 04:01L HLA-DRB1*10:01L HLA-DRB1*08:02L
  source 1..11: note = Severe acute respiratory syndrome coronavirus 2
YPLTKHPNQEY

SEQ ID NO: 9473 - protein, 11 aa, Severe acute respiratory syndrome-related coronavirus
  REGION 1..11: note = Table B: HLA-DQA1*03:02-B1*03:03L HLA-DRB1*04:03L HLA-DRB1*01:03L HLA-DRB1*04:02L HLA-DRB1*04:05L HLA-DQA1*01:01-B1*05:01L HLA-DQA1*05:01-B1*02:01L HLA-DRB1*12:01L HLA-DPA1*01:02-B1*04:01L HLA-DRB1*16:01L
  REGION 1..11: note = CONT. FROM ABOVE: HLA-DQA1*01:03-B1*06:01L HLA-DQA1*02:01-B1*03: 03L
  source 1..11: note = Severe acute respiratory syndrome coronavirus 2
HPNQEYADVFH

SEQ ID NO: 9474 - protein, 10 aa, Severe acute respiratory syndrome-related coronavirus
  REGION 1..10: note = Table B: HLA-DQA1*03:02-B1*03:03L
  source 1..10: note = Severe acute respiratory syndrome coronavirus 2
NQEYADVFHL

SEQ ID NO: 9475 - protein, 10 aa, Severe acute respiratory syndrome-related coronavirus
  REGION 1..10: note = Table B: HLA-DQA1*03:02-B1*03:03M HLA-DQA1*05:01-B1*03:01H HLA-DRB1*04:01L HLA-DRB1*13:02L HLA-DRB1*13:03M HLA-DRB1*01:03M HLA-DRB1*04:02L HLA-DRB1*04:05L HLA-DQA1*01:02-B1*06:02M HLA-DRB1*01:01L HLA-DRB4*03:01NM HLA-DRB1*08:77H
  REGION 1..10: note = CONT. FROM ABOVE: HLA-DPA1*01:03-B1*03:01M HLA-DPA1*03:01-B1*04: 02H HLA-DRB1*03:01H HLA-DRB1*14:01L HLA-DRB1*11:02M HLA-DRB1*11: 03L HLA-DRB1*11:04L HLA-DRB1*14:02M HLA-DRB1*11:01L HLA-DRB5*01: 01L HLA-DQA1*01-B1*05M HLA-DQA1*05:05-B1*03:19M
  REGION 1..10: note = CONT. FROM ABOVE: HLA-DQA1*05:01-B1*02:01M HLA-DRB4*01:01H HLA-D PA1*01:03-B1*04:01H HLA-DQA1*05:05-B1*03:116M HLA-DRB1*09:01L HL A-DPA1*01:03-B1*04:02M HLA-DRB1*12:01M HLA-DPA1*02:01-B1*13:01L HLA-DPA1*03:01-B1*105:01L HLA-DQA1*03:01-B1*03:02M
  REGION 1..10: note = CONT. FROM ABOVE: HLA-DRB1*14:54L HLA-DPA1*01:03-B1*104:01M HLA- DQA1*05:05-B1*03:01L HLA-DPA1*01:02-B1*04:01M HLA-DRB1*10:01M HL A-DRB1*16:01M HLA-DQA1*01:03-B1*06:01L HLA-DRB1*08:02M HLA-DQA1* 02:01-B1*03:03M HLA-DRB1*15:01L HLA-DRB1*15:03H
  source 1..10: note = Severe acute respiratory syndrome coronavirus 2
QEYADVFHLY

SEQ ID NO: 9476 - protein, 10 aa, Severe acute respiratory syndrome-related coronavirus
  REGION 1..10: note = Table B: HLA-DQA1*03:02-B1*03:03L HLA-DRB1*04:05L HLA-DQA1*01:02-B1*06:02L HLA-DRB1*01:02L HLA-DPA1*03:01-B1*04:02L HLA-DQA1*05:05-B1*03:19L HLA-DPA1*02:01-B1*13:01L HLA-DPA1*03:01-B1*105:01L
  REGION 1..10: note = CONT. FROM ABOVE: HLA-DPA1*01:02-B1*04:01L HLA-DRB1*16:01L HLA-D QA1*01:03-B1*06:01L HLA-DQA1*02:01-B1*03:03L HLA-DRB1*15:03L
  source 1..10: note = Severe acute respiratory syndrome coronavirus 2
EYADVFHLYL

SEQ ID NO: 9477 - protein, 10 aa, Severe acute respiratory syndrome-related coronavirus
  REGION 1..10: note = Table B: HLA-DQA1*03:02-B1*03:03L HLA-DQA1*01:02-B1*06:02L HLA-DRB1*01:02L HLA-DQA1*05:05-B1*03:19L HLA-DPA1*02:01-B1*13:01L HLA-DPA1*03:01-B1*105:01L HLA-DQA1*01:03-B1*06:01L HLA-DRB1*15:03L
  source 1..10: note = Severe acute respiratory syndrome coronavirus 2
DVFHLYLQYI

SEQ ID NO: 9478 - protein, 10 aa, Severe acute respiratory syndrome-related coronavirus
  REGION 1..10: note = Table B: HLA-DQA1*03:02-B1*03:03L HLA-DQA1*03:01-B1*03:02L HLA-DRB1*16:01L HLA-DQA1*02:01-B1*03:03L
  source 1..10: note = Severe acute respiratory syndrome coronavirus 2
KLHDELTGHM

SEQ ID NO: 9479 - protein, 10 aa, Severe acute respiratory syndrome-related coronavirus
  REGION 1..10: note = Table B: HLA-DQA1*03:02-B1*03:03L HLA-DQA1*05:01-B1*03:01L HLA-DPA1*03:01-B1*04:02L HLA-DRB1*14:01L HLA-DQA1*01:01-B1*05:01L HLA-DRB1*08:01L HLA-DQA1*01-B1*05L HLA-DQA1*05:01-B1*02:01L HLA-DQA1*03:01-B1*03:02L
  REGION 1..10: note = CONT. FROM ABOVE: HLA-DPA1*01:02-B1*04:01L HLA-DRB1*16:01L HLA-D QA1*02:01-B1*03:03L
  source 1..10: note = Severe acute respiratory syndrome coronavirus 2
LHDELTGHML

SEQ ID NO: 9480 - protein, 10 aa, Severe acute respiratory syndrome-related coronavirus
  REGION 1..10: note = Table B: HLA-DQA1*03:02-B1*03:03M HLA-DQA1*05:01-B1*03:01L HLA-DRB1*13:03L HLA-DQA1*01:02-B1*06:02L HLA-DPA1*03:01-B1*04:02L HLA-DQA1*01-B1*05L HLA-DQA1*05:05-B1*03:19L HLA-DQA1*05:01-B1*02:01L
  REGION 1..10: note = CONT. FROM ABOVE: HLA-DPA1*01:03-B1*04:01L HLA-DRB1*09:01L HLA-D PA1*01:03-B1*04:02L HLA-DPA1*03:01-B1*105:01L HLA-DQA1*03:01-B1* 03:02L HLA-DPA1*01:03-B1*104:01L HLA-DQA1*05:05-B1*03:01L HLA-DP A1*01:02-B1*04:01L HLA-DRB1*16:01L HLA-DQA1*01:03-B1*06:01L
  REGION 1..10: note = CONT. FROM ABOVE: HLA-DQA1*02:01-B1*03:03L HLA-DRB1*15:03L
  source 1..10: note = Severe acute respiratory syndrome coronavirus 2
DELTGHMLDM

SEQ ID NO: 9481 - protein, 10 aa, Severe acute respiratory syndrome-related coronavirus
  REGION 1..10: note = Table B: HLA-DQA1*03:02-B1*03:03L HLA-DQA1*05:01-B1*03:01L HLA-DRB1*13:03L HLA-DRB1*01:03L HLA-DQA1*01:02-B1*06:02M HLA-DRB4*03:01NL HLA-DRB1*08:77L HLA-DPA1*01:03-B1*03:01L HLA-DPA1*03:01-B1*04:02L HLA-DRB1*03:01L HLA-DRB1*14:02L
  REGION 1..10: note = CONT. FROM ABOVE: HLA-DQA1*01-B1*05L HLA-DQA1*05:05-B1*03:19L HL A-DQA1*05:01-B1*02:01L HLA-DRB4*01:01L HLA-DPA1*01:03-B1*04:01L HLA-DQA1*05:05-B1*03:116L HLA-DPA1*01:03-B1*04:02L HLA-DRB1*12:0 1L HLA-DPA1*02:01-B1*13:01L HLA-DPA1*03:01-B1*105:01L
  REGION 1..10: note = CONT. FROM ABOVE: HLA-DPA1*01:03-B1*104:01L HLA-DQA1*05:05-B1*03 :01L HLA-DPA1*01:02-B1*04:01L HLA-DRB1*10:01L HLA-DRB1*16:01L HL A-DQA1*01:03-B1*06:01L HLA-DQA1*02:01-B1*03:03L HLA-DRB1*15:03L
  source 1..10: note = Severe acute respiratory syndrome coronavirus 2
ELTGHMLDMY

SEQ ID NO: 9482 - protein, 10 aa, Severe acute respiratory syndrome-related coronavirus
  REGION 1..10: note = Table B: HLA-DQA1*03:02-B1*03:03L HLA-DQA1*03:01-B1*03:02L
  source 1..10: note = Severe acute respiratory syndrome coronavirus 2
GHMLDMYSVM

SEQ ID NO: 9483 - protein, 10 aa, Severe acute respiratory syndrome-related coronavirus
  REGION 1..10: note = Table B: HLA-DQA1*03:02-B1*03:03L HLA-DQA1*02:01-B1*03:03L HLA-DRB1*15:03L
  source 1..10: note = Severe acute respiratory syndrome coronavirus 2
HMLDMYSVML

SEQ ID NO: 9484 - protein, 11 aa, Severe acute respiratory syndrome-related coronavirus
  REGION 1..11: note = Table B: HLA-DQA1*03:02-B1*03:03L HLA-DRB1*04:03L HLA-DQA1*01:02-B1*06:02L HLA-DQA1*03:01-B1*03:02L HLA-DRB1*14:17L HLA-DQA1*01:03-B1*06:01L HLA-DQA1*02:01-B1*03:03L
  source 1..11: note = Severe acute respiratory syndrome coronavirus 2
DMYSVMLTNDN

SEQ ID NO: 9485 - protein, 12 aa, Severe acute respiratory syndrome-related coronavirus
  REGION 1..12: note = Table B: HLA-DQA1*03:02-B1*03:03L HLA-DQA1*01:02-B1*06:02L HLA-DRB1*01:02L HLA-DRB1*14:01L HLA-DRB1*11:03L HLA-DQA1*05:01-B1*02:01L
  source 1..12: note = Severe acute respiratory syndrome coronavirus 2
YSVMLTNDNTSR

SEQ ID NO: 9486 - protein, 10 aa, Severe acute respiratory syndrome-related coronavirus
  REGION 1..10: note = Table B: HLA-DQA1*03:02-B1*03:03L HLA-DQA1*05:01-B1*03:01L HLA-DRB1*04:01L HLA-DRB1*04:03L HLA-DRB1*13:02L HLA-DRB1*13:03L HLA-DRB1*01:03M HLA-DRB1*04:02L HLA-DQA1*01:02-B1*06:02L HLA-DRB4*03:01NL HLA-DRB1*08:77M HLA-DPA1*01:03-B1*03:01M
  REGION 1..10: note = CONT. FROM ABOVE: HLA-DPA1*03:01-B1*04:02L HLA-DRB1*03:01L HLA-D RB1*14:01L HLA-DRB1*11:02L HLA-DRB1*11:03L HLA-DRB1*11:04L HLA-D RB1*14:02M HLA-DRB1*11:01L HLA-DRB5*01:01L HLA-DQA1*01-B1*05L HL A-DQA1*05:05-B1*03:19M HLA-DQA1*05:01-B1*02:01M HLA-DRB4*01:01L
  REGION 1..10: note = CONT. FROM ABOVE: HLA-DPA1*01:03-B1*04:01L HLA-DQA1*05:05-B1*03: 116L HLA-DPA1*01:03-B1*04:02L HLA-DRB1*12:01L HLA-DPA1*02:01-B1* 13:01L HLA-DPA1*03:01-B1*105:01L HLA-DRB1*14:54L HLA-DPA1*01:03- B1*104:01L HLA-DQA1*05:05-B1*03:01L HLA-DRB1*14:17L
  REGION 1..10: note = CONT. FROM ABOVE: HLA-DRB1*10:01L HLA-DRB1*16:01L HLA-DQA1*01:03 -B1*06:01L HLA-DRB1*08:02L HLA-DQA1*02:01-B1*03:03L HLA-DRB1*15: 03L
  source 1..10: note = Severe acute respiratory syndrome coronavirus 2
MLTNDNTSRY

SEQ ID NO: 9487 - protein, 12 aa, Severe acute respiratory syndrome-related coronavirus
  REGION 1..12: note = Table B: HLA-DQA1*03:02-B1*03:03L HLA-DRB1*04:03L HLA-DRB1*04:02L HLA-DQA1*01:02-B1*06:02L HLA-DQA1*01-B1*05L HLA-DQA1*05:01-B1*02:01L HLA-DPA1*03:01-B1*105:01L HLA-DQA1*01:03-B1*06:01L HLA-DQA1*02:01-B1*03:03L
  source 1..12: note = Severe acute respiratory syndrome coronavirus 2
TNDNTSRYWEPE

SEQ ID NO: 9488 - protein, 13 aa, Severe acute respiratory syndrome-related coronavirus
  REGION 1..13: note = Table B: HLA-DQA1*03:02-B1*03:03L HLA-DRB1*04:03L HLA-DRB1*04:05L HLA-DRB1*01:02L HLA-DPA1*01:03-B1*03:01L HLA-DPA1*03:01-B1*04:02L HLA-DRB1*12:01L HLA-DPA1*02:01-B1*13:01L HLA-DPA1*03:01-B1*105:01L
  REGION 1..13: note = CONT. FROM ABOVE: HLA-DRB1*15:03L
  source 1..13: note = Severe acute respiratory syndrome coronavirus 2
DNTSRYWEPEFYE

SEQ ID NO: 9489 - protein, 10 aa, Severe acute respiratory syndrome-related coronavirus
  REGION 1..10: note = Table B: HLA-DQA1*03:02-B1*03:03L HLA-DPA1*03:01-B1*04:02L HLA-DQA1*01-B1*05L HLA-DQA1*05:05-B1*03:19L HLA-DQA1*05:01-B1*02:01L HLA-DPA1*02:01-B1*13:01L HLA-DQA1*03:01-B1*03:02L HLA-DPA1*01:02-B1*04:01L
  REGION 1..10: note = CONT. FROM ABOVE: HLA-DRB1*16:01L HLA-DQA1*01:03-B1*06:01L HLA-D QA1*02:01-B1*03:03L HLA-DRB1*15:03L
  source 1..10: note = Severe acute respiratory syndrome coronavirus 2
RYWEPEFYEA

SEQ ID NO: 9490 - protein, 10 aa, Severe acute respiratory syndrome-related coronavirus
  REGION 1..10: note = Table B: HLA-DQA1*03:02-B1*03:03L HLA-DQA1*01:02-B1*06:02L HLA-DPA1*03:01-B1*04:02L HLA-DQA1*01-B1*05L HLA-DQA1*05:01-B1*02:01L HLA-DPA1*01:03-B1*04:01L HLA-DPA1*01:03-B1*04:02L HLA-DPA1*02:01-B1*13:01L
  REGION 1..10: note = CONT. FROM ABOVE: HLA-DPA1*03:01-B1*105:01L HLA-DPA1*01:02-B1*04 :01L HLA-DRB1*16:01L HLA-DQA1*01:03-B1*06:01L HLA-DRB1*15:03L
  source 1..10: note = Severe acute respiratory syndrome coronavirus 2
YWEPEFYEAM

SEQ ID NO: 9491 - protein, 12 aa, Severe acute respiratory syndrome-related coronavirus
  REGION 1..12: note = Table B: HLA-DQA1*03:02-B1*03:03L HLA-DRB1*04:03L HLA-DQA1*01-B1*05L HLA-DQA1*05:01-B1*02:01L HLA-DPA1*03:01-B1*105:01L HLA-DQA1*03:01-B1*03:02L HLA-DPA1*01:02-B1*04:01L HLA-DQA1*01:03-B1*06:01L
  REGION 1..12: note = CONT. FROM ABOVE: HLA-DQA1*02:01-B1*03:03L
  source 1..12: note = Severe acute respiratory syndrome coronavirus 2
EPEFYEAMYTPH

SEQ ID NO: 9492 - protein, 10 aa, Severe acute respiratory syndrome-related coronavirus
  REGION 1..10: note = Table B: HLA-DQA1*03:02-B1*03:03L HLA-DQA1*05:01-B1*03:01L HLA-DRB1*04:03L HLA-DRB1*13:03L HLA-DRB1*01:03L HLA-DRB1*04:02L HLA-DRB1*04:05L HLA-DRB4*03:01NL HLA-DPA1*03:01-B1*04:02L HLA-DQA1*01-B1*05L HLA-DQA1*05:01-B1*02:01L HLA-DRB1*04:10L
  REGION 1..10: note = CONT. FROM ABOVE: HLA-DPA1*03:01-B1*105:01L HLA-DQA1*03:01-B1*03 :02L HLA-DRB1*14:17L HLA-DPA1*01:02-B1*04:01L HLA-DRB1*16:01L HL A-DRB1*04:08L HLA-DQA1*02:01-B1*03:03L
  source 1..10: note = Severe acute respiratory syndrome coronavirus 2
FYEAMYTPHT

SEQ ID NO: 9493 - protein, 10 aa, Severe acute respiratory syndrome-related coronavirus
  REGION 1..10: note = Table B: HLA-DQA1*03:02-B1*03:03M HLA-DQA1*05:01-B1*03:01L HLA-DRB1*13:02L HLA-DRB1*13:03L HLA-DQA1*01:02-B1*06:02L HLA-DRB1*01:02L HLA-DRB1*08:77L HLA-DPA1*03:01-B1*04:02L HLA-DRB1*14:01L HLA-DRB1*11:02M HLA-DRB1*14:02L HLA-DRB1*11:01L
  REGION 1..10: note = CONT. FROM ABOVE: HLA-DQA1*05:05-B1*03:19H HLA-DQA1*05:01-B1*02: 01L HLA-DRB4*01:01L HLA-DPA1*01:03-B1*04:01L HLA-DQA1*05:05-B1*0 3:116L HLA-DRB1*09:01L HLA-DPA1*01:03-B1*04:02L HLA-DRB1*12:01L HLA-DPA1*02:01-B1*13:01L HLA-DPA1*03:01-B1*105:01L
  REGION 1..10: note = CONT. FROM ABOVE: HLA-DQA1*03:01-B1*03:02L HLA-DPA1*01:03-B1*104 :01H HLA-DPA1*01:02-B1*04:01L HLA-DRB1*10:01L HLA-DRB1*16:01L HL A-DQA1*01:03-B1*06:01L HLA-DRB1*08:03L HLA-DQA1*02:01-B1*03:03L HLA-DRB1*15:03L
  source 1..10: note = Severe acute respiratory syndrome coronavirus 2
YEAMYTPHTV

SEQ ID NO: 9494 - protein, 10 aa, Severe acute respiratory syndrome-related coronavirus
  REGION 1..10: note = Table B: HLA-DQA1*03:02-B1*03:03L HLA-DQA1*05:01-B1*03:01L HLA-DRB1*13:03L HLA-DQA1*01:02-B1*06:02L HLA-DRB1*01:02L HLA-DPA1*03:01-B1*04:02L HLA-DRB1*14:01L HLA-DQA1*01-B1*05L HLA-DQA1*05:05-B1*03:19L HLA-DQA1*05:01-B1*02:01L
  REGION 1..10: note = CONT. FROM ABOVE: HLA-DPA1*01:03-B1*04:01L HLA-DRB1*12:01L HLA-D PA1*02:01-B1*13:01L HLA-DPA1*03:01-B1*105:01L HLA-DQA1*03:01-B1* 03:02L HLA-DQA1*05:05-B1*03:01L HLA-DPA1*01:02-B1*04:01L HLA-DRB 1*16:01L HLA-DQA1*01:03-B1*06:01L HLA-DQA1*02:01-B1*03:03L
  REGION 1..10: note = CONT. FROM ABOVE: HLA-DRB1*15:03L
  source 1..10: note = Severe acute respiratory syndrome coronavirus 2
EAMYTPHTVL

SEQ ID NO: 9495 - protein, 10 aa, Severe acute respiratory syndrome-related coronavirus
  REGION 1..10: note = Table B: HLA-DQA1*03:02-B1*03:03L HLA-DQA1*05:01-B1*03:01L HLA-DQA1*01-B1*05L HLA-DQA1*05:05-B1*03:19L HLA-DQA1*03:01-B1*03:02L HLA-DPA1*01:02-B1*04:01L HLA-DRB1*16:01L HLA-DQA1*02:01-B1*03:03L HLA-DRB1*15:03L
  source 1..10: note = Severe acute respiratory syndrome coronavirus 2
MYTPHTVLQA

SEQ ID NO: 9496 - protein, 10 aa, Severe acute respiratory syndrome-related coronavirus
  REGION 1..10: note = Table B: HLA-DQA1*03:02-B1*03:03L HLA-DQA1*05:01-B1*03:01L HLA-DQA1*05:05-B1*03:19L HLA-DQA1*05:05-B1*03:116L HLA-DPA1*02:01-B1*13:01L HLA-DPA1*03:01-B1*105:01L HLA-DRB1*16:01L HLA-DQA1*01:03-B1*06:01L HLA-DRB1*15:03L
  source 1..10: note = Severe acute respiratory syndrome coronavirus 2
YTPHTVLQAV

SEQ ID NO: 9497 - protein, 14 aa, Severe acute respiratory syndrome-related coronavirus
  REGION 1..14: note = Table B: HLA-DQA1*03:02-B1*03:03L HLA-DQA1*05:01-B1*03:01L HLA-DQA1*01:02-B1*06:02L HLA-DRB1*01:02L HLA-DPA1*01:03-B1*03:01L HLA-DPA1*03:01-B1*04:02L HLA-DRB1*14:01L HLA-DQA1*05:05-B1*03:19L HLA-DRB1*12:01L
  REGION 1..14: note = CONT. FROM ABOVE: HLA-DPA1*02:01-B1*13:01L HLA-DPA1*03:01-B1*105 :01L HLA-DPA1*01:03-B1*104:01L HLA-DQA1*05:05-B1*03:01L HLA-DQA1 *01:03-B1*06:01L HLA-DRB1*15:03L
  source 1..14: note = Severe acute respiratory syndrome coronavirus 2
TPHTVLQAVGACVL

SEQ ID NO: 9498 - protein, 10 aa, Severe acute respiratory syndrome-related coronavirus
  REGION 1..10: note = Table B: HLA-DQA1*03:02-B1*03:03L HLA-DQA1*05:01-B1*03:01L HLA-DRB1*14:01L HLA-DRB1*08:01L HLA-DQA1*01-B1*05L HLA-DQA1*03:01-B1*03:02L HLA-DPA1*01:02-B1*04:01L HLA-DRB1*16:01L HLA-DQA1*02:01-B1*03:03L
  source 1..10: note = Severe acute respiratory syndrome coronavirus 2
DHVISTSHKL

SEQ ID NO: 9499 - protein, 12 aa, Severe acute respiratory syndrome-related coronavirus
  REGION 1..12: note = Table B: HLA-DQA1*03:02-B1*03:03L HLA-DQA1*05:01-B1*03:01L HLA-DRB1*13:02L HLA-DRB1*01:03L HLA-DRB1*04:02L HLA-DRB1*04:05L HLA-DRB1*01:02L HLA-DRB4*03:01NL HLA-DPA1*01:03-B1*03:01L HLA-DPA1*03:01-B1*04:02L HLA-DRB1*14:01L HLA-DQA1*01-B1*05L
  REGION 1..12: note = CONT. FROM ABOVE: HLA-DQA1*05:01-B1*02:01L HLA-DRB1*04:10L HLA-D RB1*12:01L HLA-DRB1*12:02L HLA-DPA1*02:01-B1*13:01L HLA-DRB1*14: 54L HLA-DRB1*14:17L HLA-DPA1*01:02-B1*04:01L HLA-DRB1*04:08L HLA -DRB1*15:03L
  source 1..12: note = Severe acute respiratory syndrome coronavirus 2
SHKLVLSVNPYV

SEQ ID NO: 9500 - protein, 15 aa, Severe acute respiratory syndrome-related coronavirus
  REGION 1..15: note = Table B: HLA-DQA1*03:02-B1*03:03L HLA-DRB1*04:01L HLA-DRB1*01:01L HLA-DRB1*08:04L HLA-DRB1*11:03L HLA-DRB1*11:04L HLA-DRB1*14:02L HLA-DRB1*08:01L HLA-DRB1*11:01L HLA-DQA1*01-B1*05L HLA-DQA1*05:01-B1*02:01L
  REGION 1..15: note = CONT. FROM ABOVE: HLA-DPA1*01:03-B1*04:01L HLA-DRB3*01:01L HLA-D PA1*02:01-B1*13:01L HLA-DRB1*10:01L
  source 1..15: note = Severe acute respiratory syndrome coronavirus 2
KLVLSVNPYVCNAPG

SEQ ID NO: 9501 - protein, 14 aa, Severe acute respiratory syndrome-related coronavirus
  REGION 1..14: note = Table B: HLA-DQA1*03:02-B1*03:03L HLA-DQA1*05:01-B1*03:01L HLA-DRB1*04:03L HLA-DRB1*13:02L HLA-DRB1*01:03L HLA-DRB1*04:05L HLA-DRB1*01:02L HLA-DRB1*08:04L HLA-DPA1*01:03-B1*03:01L HLA-DPA1*03:01-B1*04:02L HLA-DRB1*14:01L HLA-DRB1*14:02L
  REGION 1..14: note = CONT. FROM ABOVE: HLA-DRB1*08:01L HLA-DRB1*11:01L HLA-DQA1*05:05 -B1*03:19L HLA-DPA1*01:03-B1*04:02L HLA-DRB1*12:01L HLA-DPA1*02: 01-B1*13:01L HLA-DPA1*03:01-B1*105:01L HLA-DQA1*03:01-B1*03:02L HLA-DPA1*01:03-B1*104:01L HLA-DQA1*05:05-B1*03:01L
  REGION 1..14: note = CONT. FROM ABOVE: HLA-DRB1*16:01L HLA-DQA1*01:03-B1*06:01L HLA-D RB1*04:08L HLA-DQA1*02:01-B1*03:03L HLA-DRB1*15:03L
  source 1..14: note = Severe acute respiratory syndrome coronavirus 2
VNPYVCNAPGCDVT

SEQ ID NO: 9502 - protein, 10 aa, Severe acute respiratory syndrome-related coronavirus
  REGION 1..10: note = Table B: HLA-DQA1*03:02-B1*03:03L HLA-DQA1*05:01-B1*03:01L HLA-DRB1*13:03L HLA-DQA1*01:02-B1*06:02L HLA-DRB1*01:02L HLA-DPA1*03:01-B1*04:02L HLA-DRB1*14:01L HLA-DRB1*14:02L HLA-DRB1*08:01L HLA-DQA1*05:01-B1*02:01L
  REGION 1..10: note = CONT. FROM ABOVE: HLA-DPA1*01:03-B1*04:01L HLA-DRB1*12:01L HLA-D PA1*02:01-B1*13:01L HLA-DPA1*03:01-B1*105:01M HLA-DQA1*03:01-B1* 03:02L HLA-DPA1*01:02-B1*04:01L HLA-DRB1*15:03L
  source 1..10: note = Severe acute respiratory syndrome coronavirus 2
DVTDVTQLYL

SEQ ID NO: 9503 - protein, 10 aa, Severe acute respiratory syndrome-related coronavirus
  REGION 1..10: note = Table B: HLA-DQA1*03:02-B1*03:03L HLA-DQA1*01:02-B1*06:02L HLA-DQA1*05:01-B1*02:01L HLA-DPA1*03:01-B1*105:01L HLA-DQA1*03:01-B1*03:02L HLA-DQA1*01:03-B1*06:01L HLA-DQA1*02:01-B1*03:03L HLA-DRB1*15:03L
  source 1..10: note = Severe acute respiratory syndrome coronavirus 2
DVTQLYLGGM

SEQ ID NO: 9504 - protein, 12 aa, Severe acute respiratory syndrome-related coronavirus
  REGION 1..12: note = Table B: HLA-DQA1*03:02-B1*03:03L HLA-DQA1*05:01-B1*03:01L HLA-DRB1*04:03L HLA-DRB1*13:02L HLA-DRB1*13:03L HLA-DRB1*01:03L HLA-DRB1*04:02L HLA-DRB1*04:04L HLA-DRB1*04:05L HLA-DQA1*01:02-B1*06:02L HLA-DRB1*01:02L HLA-DRB4*03:01NL
  REGION 1..12: note = CONT. FROM ABOVE: HLA-DRB1*08:04L HLA-DRB1*14:01L HLA-DRB1*11:04 L HLA-DRB1*08:01L HLA-DRB1*11:01L HLA-DQA1*01-B1*05L HLA-DQA1*05 :01-B1*02:01L HLA-DRB1*04:10L HLA-DRB1*12:01L HLA-DPA1*02:01-B1* 13:01L HLA-DPA1*03:01-B1*105:01L HLA-DQA1*03:01-B1*03:02L
  REGION 1..12: note = CONT. FROM ABOVE: HLA-DRB1*14:54L HLA-DQA1*05:05-B1*03:01L HLA-D RB1*14:17L HLA-DRB1*10:01L HLA-DRB1*16:01L HLA-DRB1*04:08L HLA-D RB1*08:03L HLA-DQA1*02:01-B1*03:03L HLA-DRB1*15:03L
  source 1..12: note = Severe acute respiratory syndrome coronavirus 2
GLYKNTCVGSDN

SEQ ID NO: 9505 - protein, 11 aa, Severe acute respiratory syndrome-related coronavirus
  REGION 1..11: note = Table B: HLA-DQA1*03:02-B1*03:03L HLA-DPA1*01:03-B1*104:01L
  source 1..11: note = Severe acute respiratory syndrome coronavirus 2
GSDNVTDFNAI

SEQ ID NO: 9506 - protein, 12 aa, Severe acute respiratory syndrome-related coronavirus
  REGION 1..12: note = Table B: HLA-DQA1*03:02-B1*03:03L HLA-DRB1*04:03L HLA-DRB1*04:02L HLA-DRB1*04:05L HLA-DQA1*05:01-B1*02:01L HLA-DQA1*03:01-B1*03:02L HLA-DRB1*14:17L HLA-DRB1*16:01L HLA-DQA1*02:01-B1*03:03L
  source 1..12: note = Severe acute respiratory syndrome coronavirus 2
SDNVTDFNAIAT

SEQ ID NO: 9507 - protein, 14 aa, Severe acute respiratory syndrome-related coronavirus
  REGION 1..14: note = Table B: HLA-DQA1*03:02-B1*03:03L HLA-DQA1*05:01-B1*03:01L HLA-DQA1*03:01-B1*03:02L HLA-DQA1*05:05-B1*03:01L HLA-DQA1*01:03-B1*06:01L HLA-DQA1*02:01-B1*03:03L
  source 1..14: note = Severe acute respiratory syndrome coronavirus 2
VTDFNAIATCDWTN

SEQ ID NO: 9508 - protein, 13 aa, Severe acute respiratory syndrome-related coronavirus
  REGION 1..13: note = Table B: HLA-DQA1*03:02-B1*03:03L HLA-DQA1*01:02-B1*06:02L HLA-DQA1*05:05-B1*03:19L HLA-DQA1*05:01-B1*02:01L HLA-DPA1*03:01-B1*105:01L HLA-DQA1*03:01-B1*03:02L HLA-DQA1*05:05-B1*03:01L HLA-DQA1*02:01-B1*03:03L
  source 1..13: note = Severe acute respiratory syndrome coronavirus 2
DWTNAGDYILANT

SEQ ID NO: 9509 - protein, 11 aa, Severe acute respiratory syndrome-related coronavirus
  REGION 1..11: note = Table B: HLA-DQA1*03:02-B1*03:03L HLA-DQA1*05:01-B1*03:01L HLA-DRB1*13:03L HLA-DRB1*01:03L HLA-DRB1*04:05L HLA-DQA1*01:02-B1*06:02L HLA-DRB4*03:01NL HLA-DRB1*08:01L HLA-DQA1*01-B1*05L HLA-DRB1*04:10L HLA-DPA1*03:01-B1*105:01L
  REGION 1..11: note = CONT. FROM ABOVE: HLA-DQA1*05:05-B1*03:01L HLA-DPA1*01:02-B1*04: 01L HLA-DRB1*16:01L HLA-DQA1*01:03-B1*06:01L HLA-DRB1*04:08L
  source 1..11: note = Severe acute respiratory syndrome coronavirus 2
DYILANTCTER

SEQ ID NO: 9510 - protein, 10 aa, Severe acute respiratory syndrome-related coronavirus
  REGION 1..10: note = Table B: HLA-DQA1*03:02-B1*03:03L HLA-DQA1*05:01-B1*03:01L HLA-DRB1*04:03L HLA-DRB1*04:02L HLA-DQA1*01:02-B1*06:02L HLA-DRB4*03:01NL HLA-DQA1*05:01-B1*02:01L HLA-DPA1*03:01-B1*105:01L HLA-DQA1*03:01-B1*03:02L
  REGION 1..10: note = CONT. FROM ABOVE: HLA-DQA1*05:05-B1*03:01L HLA-DRB1*14:17L HLA-D PA1*01:02-B1*04:01L HLA-DRB1*16:01L HLA-DQA1*01:03-B1*06:01L HLA -DQA1*02:01-B1*03:03L
  source 1..10: note = Severe acute respiratory syndrome coronavirus 2
FAAETLKATE

SEQ ID NO: 9511 - protein, 10 aa, Severe acute respiratory syndrome-related coronavirus
  REGION 1..10: note = Table B: HLA-DQA1*03:02-B1*03:03L HLA-DQA1*03:01-B1*03:02L
  source 1..10: note = Severe acute respiratory syndrome coronavirus 2
AETLKATEET

SEQ ID NO: 9512 - protein, 10 aa, Severe acute respiratory syndrome-related coronavirus
  REGION 1..10: note = Table B: HLA-DQA1*03:02-B1*03:03L HLA-DQA1*05:01-B1*03:01L HLA-DRB1*13:03M HLA-DRB1*01:03L HLA-DQA1*01:02-B1*06:02M HLA-DRB4*03:01NL HLA-DRB1*08:77L HLA-DPA1*01:03-B1*03:01L HLA-DPA1*03:01-B1*04:02L HLA-DRB1*03:01L HLA-DRB1*14:01L
  REGION 1..10: note = CONT. FROM ABOVE: HLA-DRB1*14:02L HLA-DRB5*01:01L HLA-DQA1*01-B1 *05L HLA-DQA1*05:05-B1*03:19L HLA-DQA1*05:01-B1*02:01L HLA-DRB4* 01:01L HLA-DPA1*01:03-B1*04:01L HLA-DQA1*05:05-B1*03:116L HLA-DP A1*01:03-B1*04:02L HLA-DRB1*12:01L HLA-DPA1*02:01-B1*13:01L
  REGION 1..10: note = CONT. FROM ABOVE: HLA-DPA1*03:01-B1*105:01M HLA-DQA1*05:05-B1*03 :01L HLA-DPA1*01:02-B1*04:01L HLA-DRB1*10:01L HLA-DRB1*16:01L HL A-DQA1*01:03-B1*06:01L HLA-DQA1*02:01-B1*03:03L HLA-DRB1*15:03L
  source 1..10: note = Severe acute respiratory syndrome coronavirus 2
ETLKATEETF

SEQ ID NO: 9513 - protein, 12 aa, Severe acute respiratory syndrome-related coronavirus
  REGION 1..12: note = Table B: HLA-DQA1*03:02-B1*03:03L HLA-DQA1*05:01-B1*03:01L HLA-DRB1*04:03L HLA-DRB1*04:02L HLA-DRB1*04:05L HLA-DQA1*01:02-B1*06:02L HLA-DRB4*03:01NL HLA-DRB1*14:01L HLA-DQA1*05:01-B1*02:01L HLA-DRB1*12:01L
  REGION 1..12: note = CONT. FROM ABOVE: HLA-DQA1*03:01-B1*03:02L HLA-DRB1*14:54L HLA-D RB1*14:17L HLA-DRB1*16:01L HLA-DQA1*02:01-B1*03:03L HLA-DRB1*15: 03L
  source 1..12: note = Severe acute respiratory syndrome coronavirus 2
EETFKLSYGIAT

SEQ ID NO: 9514 - protein, 10 aa, Severe acute respiratory syndrome-related coronavirus
  REGION 1..10: note = Table B: HLA-DQA1*03:02-B1*03:03L HLA-DQA1*05:01-B1*03:01L HLA-DRB1*04:03L HLA-DRB1*13:03L HLA-DRB1*04:02L HLA-DQA1*03:01-B1*03:02L HLA-DQA1*05:05-B1*03:01L HLA-DRB1*14:17L HLA-DPA1*01:02-B1*04:01L
  REGION 1..10: note = CONT. FROM ABOVE: HLA-DQA1*01:03-B1*06:01L HLA-DQA1*02:01-B1*03: 03L
  source 1..10: note = Severe acute respiratory syndrome coronavirus 2
LSYGIATVRE

SEQ ID NO: 9515 - protein, 10 aa, Severe acute respiratory syndrome-related coronavirus
  REGION 1..10: note = Table B: HLA-DQA1*03:02-B1*03:03L HLA-DQA1*01:02-B1*06:02L HLA-DQA1*01-B1*05L HLA-DQA1*05:05-B1*03:19L HLA-DQA1*05:01-B1*02:01L HLA-DPA1*02:01-B1*13:01L HLA-DPA1*03:01-B1*105:01L HLA-DQA1*03:01-B1*03:02L
  REGION 1..10: note = CONT. FROM ABOVE: HLA-DPA1*01:02-B1*04:01L HLA-DRB1*16:01L HLA-D QA1*01:03-B1*06:01L HLA-DQA1*02:01-B1*03:03L HLA-DRB1*15:03L
  source 1..10: note = Severe acute respiratory syndrome coronavirus 2
SYGIATVREV

SEQ ID NO: 9516 - protein, 10 aa, Severe acute respiratory syndrome-related coronavirus
  REGION 1..10: note = Table B: HLA-DQA1*03:02-B1*03:03L HLA-DQA1*05:01-B1*03:01L HLA-DRB1*04:03L HLA-DQA1*01:02-B1*06:02L HLA-DQA1*05:05-B1*03:19L HLA-DQA1*05:01-B1*02:01L HLA-DPA1*03:01-B1*105:01L HLA-DQA1*03:01-B1*03:02L
  REGION 1..10: note = CONT. FROM ABOVE: HLA-DQA1*05:05-B1*03:01L HLA-DPA1*01:02-B1*04: 01L HLA-DQA1*01:03-B1*06:01L HLA-DQA1*02:01-B1*03:03L HLA-DRB1*1 5:03L
  source 1..10: note = Severe acute respiratory syndrome coronavirus 2
YGIATVREVL

SEQ ID NO: 9517 - protein, 11 aa, Severe acute respiratory syndrome-related coronavirus
  REGION 1..11: note = Table B: HLA-DQA1*03:02-B1*03:03L HLA-DQA1*05:01-B1*03:01L HLA-DQA1*05:01-B1*02:01L HLA-DPA1*03:01-B1*105:01L HLA-DQA1*05:05-B1*03:01L
  source 1..11: note = Severe acute respiratory syndrome coronavirus 2
GIATVREVLSD

SEQ ID NO: 9518 - protein, 12 aa, Severe acute respiratory syndrome-related coronavirus
  REGION 1..12: note = Table B: HLA-DQA1*03:02-B1*03:03L HLA-DQA1*05:01-B1*03:01L HLA-DRB1*13:02L HLA-DRB1*13:03L HLA-DRB1*01:03L HLA-DRB1*04:02L HLA-DRB1*04:04L HLA-DRB1*04:05L HLA-DRB1*01:02L HLA-DRB4*03:01NL HLA-DPA1*01:03-B1*03:01L HLA-DRB1*14:01L
  REGION 1..12: note = CONT. FROM ABOVE: HLA-DQA1*01:01-B1*05:01L HLA-DRB1*08:01L HLA-D QA1*01-B1*05L HLA-DQA1*05:05-B1*03:19L HLA-DQA1*05:01-B1*02:01L HLA-DRB1*04:10L HLA-DRB1*12:01L HLA-DPA1*02:01-B1*13:01L HLA-DPA 1*03:01-B1*105:01L HLA-DRB1*14:54L HLA-DQA1*05:05-B1*03:01L
  REGION 1..12: note = CONT. FROM ABOVE: HLA-DRB1*14:17L HLA-DPA1*01:02-B1*04:01L HLA-D RB1*16:01L HLA-DRB1*04:08L HLA-DRB1*15:03L
  source 1..12: note = Severe acute respiratory syndrome coronavirus 2
IATVREVLSDRE

SEQ ID NO: 9519 - protein, 10 aa, Severe acute respiratory syndrome-related coronavirus
  REGION 1..10: note = Table B: HLA-DQA1*03:02-B1*03:03M HLA-DQA1*05:01-B1*03:01L HLA-DRB1*13:02L HLA-DRB1*13:03L HLA-DRB1*01:03L HLA-DQA1*01:02-B1*06:02M HLA-DRB1*01:02L HLA-DRB1*08:77L HLA-DRB3*02:01L HLA-DPA1*01:03-B1*03:01L
  REGION 1..10: note = CONT. FROM ABOVE: HLA-DPA1*03:01-B1*04:02L HLA-DRB1*03:01L HLA-D RB1*14:01L HLA-DRB1*14:02L HLA-DRB1*08:01L HLA-DQA1*01-B1*05L HL A-DQA1*05:05-B1*03:19L HLA-DQA1*05:01-B1*02:01L HLA-DPA1*01:03-B 1*04:01L HLA-DQA1*05:05-B1*03:116L HLA-DRB1*09:01L
  REGION 1..10: note = CONT. FROM ABOVE: HLA-DPA1*01:03-B1*04:02L HLA-DRB1*12:01L HLA-D PA1*02:01-B1*13:01L HLA-DPA1*03:01-B1*105:01M HLA-DQA1*03:01-B1* 03:02L HLA-DPA1*01:03-B1*104:01L HLA-DQA1*05:05-B1*03:01L HLA-DP A1*01:02-B1*04:01L HLA-DRB1*10:01L HLA-DRB1*16:01L
  REGION 1..10: note = CONT. FROM ABOVE: HLA-DQA1*01:03-B1*06:01L HLA-DRB1*08:03L HLA-D QA1*02:01-B1*03:03L HLA-DRB1*15:03M
  source 1..10: note = Severe acute respiratory syndrome coronavirus 2
EVLSDRELHL

SEQ ID NO: 9520 - protein, 17 aa, Severe acute respiratory syndrome-related coronavirus
  REGION 1..17: note = Table B: HLA-DQA1*03:02-B1*03:03L HLA-DRB1*01:01L HLA-DPA1*01:03-B1*03:01L HLA-DRB1*11:04L HLA-DQA1*01:01-B1*05:01L HLA-DRB1*11:01L HLA-DQA1*01-B1*05L HLA-DQA1*05:05-B1*03:19L HLA-DQA1*05:01-B1*02:01L
  REGION 1..17: note = CONT. FROM ABOVE: HLA-DPA1*01:02-B1*04:01L
  source 1..17: note = Severe acute respiratory syndrome coronavirus 2
SDRELHLSWEVGKPRPP

SEQ ID NO: 9521 - protein, 10 aa, Severe acute respiratory syndrome-related coronavirus
  REGION 1..10: note = Table B: HLA-DQA1*03:02-B1*03:03L HLA-DQA1*05:05-B1*03:19L HLA-DQA1*03:01-B1*03:02L
  source 1..10: note = Severe acute respiratory syndrome coronavirus 2
WEVGKPRPPL

SEQ ID NO: 9522 - protein, 20 aa, Severe acute respiratory syndrome-related coronavirus
  REGION 1..20: note = Table B: HLA-DQA1*03:02-B1*03:03L HLA-DRB1*08:02L HLA-DRB1*08:03L
  source 1..20: note = Severe acute respiratory syndrome coronavirus 2
KPRPPLNRNYVFTGYRVTKN

SEQ ID NO: 9523 - protein, 11 aa, Severe acute respiratory syndrome-related coronavirus
  REGION 1..11: note = Table B: HLA-DQA1*03:02-B1*03:03L HLA-DRB1*04:04L HLA-DQA1*01:02-B1*06:02L HLA-DRB1*01:01L HLA-DRB3*02:01L HLA-DPA1*03:01-B1*04:02L HLA-DRB1*11:01L HLA-DQA1*05:01-B1*02:01L HLA-DRB1*04:10L HLA-DRB1*12:02L
  REGION 1..11: note = CONT. FROM ABOVE: HLA-DPA1*02:01-B1*13:01L HLA-DPA1*03:01-B1*105 :01L HLA-DRB1*14:54L HLA-DQA1*01:03-B1*06:01L
  source 1..11: note = Severe acute respiratory syndrome coronavirus 2
GYRVTKNSKVQ

SEQ ID NO: 9524 - protein, 12 aa, Severe acute respiratory syndrome-related coronavirus
  REGION 1..12: note = Table B: HLA-DQA1*03:02-B1*03:03L HLA-DQA1*05:01-B1*03:01L HLA-DPA1*03:01-B1*105:01L HLA-DQA1*05:05-B1*03:01L
  source 1..12: note = Severe acute respiratory syndrome coronavirus 2
TKNSKVQIGEYT

SEQ ID NO: 9525 - protein, 10 aa, Severe acute respiratory syndrome-related coronavirus
  REGION 1..10: note = Table B: HLA-DQA1*03:02-B1*03:03L HLA-DQA1*05:01-B1*03:01M HLA-DRB4*03:01NL HLA-DRB1*08:77M HLA-DPA1*01:03-B1*03:01L HLA-DPA1*03:01-B1*04:02L HLA-DRB1*03:01L HLA-DQA1*01-B1*05L HLA-DQA1*05:05-B1*03:19L HLA-DQA1*05:01-B1*02:01L
  REGION 1..10: note = CONT. FROM ABOVE: HLA-DRB4*01:01M HLA-DPA1*01:03-B1*04:01M HLA-D QA1*05:05-B1*03:116L HLA-DPA1*01:03-B1*04:02L HLA-DRB1*12:01L HL A-DQA1*03:01-B1*03:02L HLA-DPA1*01:03-B1*104:01L HLA-DPA1*01:02- B1*04:01L HLA-DRB1*10:01L HLA-DRB1*16:01L HLA-DRB1*15:03L
  source 1..10: note = Severe acute respiratory syndrome coronavirus 2
GEYTFEKGDY

SEQ ID NO: 9526 - protein, 11 aa, Severe acute respiratory syndrome-related coronavirus
  REGION 1..11: note = Table B: HLA-DQA1*03:02-B1*03:03L HLA-DRB1*04:03L HLA-DRB1*13:03L HLA-DRB1*01:03L HLA-DRB1*04:02L HLA-DRB1*04:05L HLA-DRB4*03:01NL HLA-DQA1*05:01-B1*02:01L HLA-DPA1*03:01-B1*105:01L HLA-DQA1*03:01-B1*03:02L
  REGION 1..11: note = CONT. FROM ABOVE: HLA-DRB1*14:54L HLA-DRB1*14:17L HLA-DRB1*16:01 L HLA-DQA1*02:01-B1*03:03L
  source 1..11: note = Severe acute respiratory syndrome coronavirus 2
YTFEKGDYGDA

SEQ ID NO: 9527 - protein, 10 aa, Severe acute respiratory syndrome-related coronavirus
  REGION 1..10: note = Table B: HLA-DQA1*03:02-B1*03:03L HLA-DQA1*05:05-B1*03:19L HLA-DQA1*03:01-B1*03:02L HLA-DPA1*01:03-B1*104:01L
  source 1..10: note = Severe acute respiratory syndrome coronavirus 2
FEKGDYGDAV

SEQ ID NO: 9528 - protein, 12 aa, Severe acute respiratory syndrome-related coronavirus
  REGION 1..12: note = Table B: HLA-DQA1*03:02-B1*03:03L HLA-DQA1*05:01-B1*03:01L HLA-DRB1*04:03L HLA-DQA1*01:02-B1*06:02L HLA-DQA1*05:05-B1*03:19L HLA-DQA1*05:01-B1*02:01L HLA-DPA1*03:01-B1*105:01L
  source 1..12: note = Severe acute respiratory syndrome coronavirus 2
GDYGDAVVYRGT

SEQ ID NO: 9529 - protein, 11 aa, Severe acute respiratory syndrome-related coronavirus
  REGION 1..11: note = Table B: HLA-DQA1*03:02-B1*03:03L HLA-DRB1*04:03L HLA-DQA1*01:02-B1*06:02L HLA-DQA1*03:01-B1*03:02L HLA-DQA1*01:03-B1*06:01L HLA-DQA1*02:01-B1*03:03L
  source 1..11: note = Severe acute respiratory syndrome coronavirus 2
YGDAVVYRGTT

SEQ ID NO: 9530 - protein, 10 aa, Severe acute respiratory syndrome-related coronavirus
  REGION 1..10: note = Table B: HLA-DQA1*03:02-B1*03:03L HLA-DRB1*04:03L HLA-DRB1*04:02L HLA-DQA1*03:01-B1*03:02L HLA-DQA1*02:01-B1*03:03L
  source 1..10: note = Severe acute respiratory syndrome coronavirus 2
DAVVYRGTTT

SEQ ID NO: 9531 - protein, 10 aa, Severe acute respiratory syndrome-related coronavirus
  REGION 1..10: note = Table B: HLA-DQA1*03:02-B1*03:03L HLA-DQA1*05:01-B1*03:01L HLA-DRB1*13:02L HLA-DRB1*13:03L HLA-DRB1*01:03L HLA-DQA1*01:02-B1*06:02L HLA-DRB4*03:01NL HLA-DRB1*08:77L HLA-DPA1*01:03-B1*03:01L HLA-DPA1*03:01-B1*04:02L
  REGION 1..10: note = CONT. FROM ABOVE: HLA-DRB1*03:01L HLA-DRB1*14:01L HLA-DRB1*14:02 L HLA-DRB1*11:01L HLA-DQA1*01-B1*05L HLA-DQA1*05:05-B1*03:19L HL A-DQA1*05:01-B1*02:01L HLA-DRB4*01:01L HLA-DPA1*01:03-B1*04:01L HLA-DQA1*05:05-B1*03:116L HLA-DPA1*01:03-B1*04:02L
  REGION 1..10: note = CONT. FROM ABOVE: HLA-DRB1*12:01L HLA-DPA1*02:01-B1*13:01L HLA-D PA1*03:01-B1*105:01L HLA-DPA1*01:03-B1*104:01L HLA-DRB1*10:01L H LA-DRB1*16:01L HLA-DQA1*01:03-B1*06:01L HLA-DRB1*08:02L HLA-DQA1 *02:01-B1*03:03L HLA-DRB1*15:03L
  source 1..10: note = Severe acute respiratory syndrome coronavirus 2
AVVYRGTTTY

SEQ ID NO: 9532 - protein, 11 aa, Severe acute respiratory syndrome-related coronavirus
  REGION 1..11: note = Table B: HLA-DQA1*03:02-B1*03:03L HLA-DRB1*08:77L HLA-DPA1*03:01-B1*04:02L HLA-DPA1*01:02-B1*04:01L HLA-DRB1*07:01L
  source 1..11: note = Severe acute respiratory syndrome coronavirus 2
VVYRGTTTYKL

SEQ ID NO: 9533 - protein, 13 aa, Severe acute respiratory syndrome-related coronavirus
  REGION 1..13: note = Table B: HLA-DQA1*03:02-B1*03:03L HLA-DRB1*13:03L HLA-DRB1*01:01L HLA-DRB4*03:01NL HLA-DRB1*08:77L HLA-DPA1*01:03-B1*03:01L HLA-DPA1*03:01-B1*04:02L HLA-DRB1*11:03L HLA-DRB1*11:04L HLA-DRB1*14:02L HLA-DRB1*08:01L
  REGION 1..13: note = CONT. FROM ABOVE: HLA-DRB1*11:01L HLA-DQA1*05:05-B1*03:19L HLA-D QA1*05:01-B1*02:01L HLA-DPA1*01:03-B1*04:01L HLA-DRB3*01:01L HLA -DPA1*02:01-B1*13:01L HLA-DRB1*14:54L HLA-DRB1*14:17L HLA-DRB1*1 0:01L
  source 1..13: note = Severe acute respiratory syndrome coronavirus 2
VYRGTTTYKLNVG

SEQ ID NO: 9534 - protein, 10 aa, Severe acute respiratory syndrome-related coronavirus
  REGION 1..10: note = Table B: HLA-DQA1*03:02-B1*03:03L HLA-DQA1*05:01-B1*03:01L HLA-DRB1*04:03L HLA-DRB1*13:02L HLA-DRB1*13:03L HLA-DRB1*01:03L HLA-DRB1*04:05L HLA-DQA1*01:02-B1*06:02M HLA-DRB4*03:01NL HLA-DRB1*08:77L HLA-DPA1*01:03-B1*03:01L
  REGION 1..10: note = CONT. FROM ABOVE: HLA-DPA1*03:01-B1*04:02L HLA-DRB1*03:01L HLA-D RB1*14:01L HLA-DRB1*11:02L HLA-DRB1*14:02L HLA-DRB1*11:01L HLA-D QA1*01-B1*05L HLA-DQA1*05:05-B1*03:19L HLA-DQA1*05:01-B1*02:01L HLA-DRB4*01:01L HLA-DPA1*01:03-B1*04:01L
  REGION 1..10: note = CONT. FROM ABOVE: HLA-DQA1*05:05-B1*03:116L HLA-DPA1*01:03-B1*04 :02L HLA-DRB1*12:01L HLA-DPA1*02:01-B1*13:01L HLA-DPA1*03:01-B1* 105:01L HLA-DQA1*03:01-B1*03:02L HLA-DPA1*01:03-B1*104:01L HLA-D QA1*05:05-B1*03:01L HLA-DPA1*01:02-B1*04:01L HLA-DRB1*10:01L
  REGION 1..10: note = CONT. FROM ABOVE: HLA-DRB1*16:01L HLA-DQA1*01:03-B1*06:01L HLA-D RB1*08:02L HLA-DQA1*02:01-B1*03:03M HLA-DRB1*15:03L
  source 1..10: note = Severe acute respiratory syndrome coronavirus 2
TTYKLNVGDY

SEQ ID NO: 9535 - protein, 10 aa, Severe acute respiratory syndrome-related coronavirus
  REGION 1..10: note = Table B: HLA-DQA1*03:02-B1*03:03L
  source 1..10: note = Severe acute respiratory syndrome coronavirus 2
KLNVGDYFVL

SEQ ID NO: 9536 - protein, 10 aa, Severe acute respiratory syndrome-related coronavirus
  REGION 1..10: note = Table B: HLA-DQA1*03:02-B1*03:03L HLA-DQA1*05:01-B1*03:01L HLA-DRB1*04:05L HLA-DQA1*01:02-B1*06:02L HLA-DRB1*01:02L HLA-DRB1*08:77L HLA-DPA1*03:01-B1*04:02L HLA-DQA1*01-B1*05L HLA-DQA1*05:05-B1*03:19L HLA-DQA1*05:01-B1*02:01L
  REGION 1..10: note = CONT. FROM ABOVE: HLA-DQA1*05:05-B1*03:116L HLA-DRB1*12:01L HLA- DPA1*02:01-B1*13:01L HLA-DPA1*03:01-B1*105:01L HLA-DQA1*03:01-B1 *03:02L HLA-DPA1*01:03-B1*104:01L HLA-DPA1*01:02-B1*04:01L HLA-D RB1*16:01L HLA-DQA1*01:03-B1*06:01L HLA-DQA1*02:01-B1*03:03L
  REGION 1..10: note = CONT. FROM ABOVE: HLA-DRB1*15:03L
  source 1..10: note = Severe acute respiratory syndrome coronavirus 2
DYFVLTSHTV

SEQ ID NO: 9537 - protein, 10 aa, Severe acute respiratory syndrome-related coronavirus
  REGION 1..10: note = Table B: HLA-DQA1*03:02-B1*03:03L HLA-DRB1*14:01L HLA-DQA1*03:01-B1*03:02L HLA-DQA1*02:01-B1*03:03L
  source 1..10: note = Severe acute respiratory syndrome coronavirus 2
VLTSHTVMPL

SEQ ID NO: 9538 - protein, 12 aa, Severe acute respiratory syndrome-related coronavirus
  REGION 1..12: note = Table B: HLA-DQA1*03:02-B1*03:03L HLA-DQA1*05:01-B1*03:01L HLA-DRB1*04:02L HLA-DQA1*01:02-B1*06:02L HLA-DQA1*01:01-B1*05:01L HLA-DQA1*05:05-B1*03:19L HLA-DQA1*05:01-B1*02:01L HLA-DPA1*03:01-B1*105:01L
  REGION 1..12: note = CONT. FROM ABOVE: HLA-DQA1*05:05-B1*03:01L
  source 1..12: note = Severe acute respiratory syndrome coronavirus 2
TSHTVMPLSAPT

SEQ ID NO: 9539 - protein, 10 aa, Severe acute respiratory syndrome-related coronavirus
  REGION 1..10: note = Table B: HLA-DQA1*03:02-B1*03:03M HLA-DQA1*05:01-B1*03:01L HLA-DRB1*13:03L HLA-DRB1*01:03L HLA-DRB1*04:02L HLA-DQA1*01:02-B1*06:02L HLA-DRB1*01:02L HLA-DRB1*08:77L HLA-DRB3*02:01L HLA-DPA1*03:01-B1*04:02L HLA-DRB1*14:01L
  REGION 1..10: note = CONT. FROM ABOVE: HLA-DRB1*14:02L HLA-DRB1*08:01L HLA-DQA1*05:05 -B1*03:19L HLA-DQA1*05:01-B1*02:01L HLA-DPA1*01:03-B1*04:01L HLA -DQA1*05:05-B1*03:116L HLA-DRB1*09:01L HLA-DPA1*01:03-B1*04:02L HLA-DRB1*12:01L HLA-DPA1*02:01-B1*13:01L
  REGION 1..10: note = CONT. FROM ABOVE: HLA-DPA1*03:01-B1*105:01M HLA-DQA1*03:01-B1*03 :02L HLA-DPA1*01:02-B1*04:01L HLA-DRB1*07:01L HLA-DRB1*10:01L HL A-DRB1*16:01L HLA-DQA1*01:03-B1*06:01L HLA-DRB1*08:03L HLA-DQA1* 02:01-B1*03:03L HLA-DRB1*15:03L
  source 1..10: note = Severe acute respiratory syndrome coronavirus 2
TVMPLSAPTL

SEQ ID NO: 9540 - protein, 13 aa, Severe acute respiratory syndrome-related coronavirus
  REGION 1..13: note = Table B: HLA-DQA1*03:02-B1*03:03L HLA-DQA1*01:02-B1*06:02L HLA-DQA1*05:01-B1*02:01L HLA-DQA1*01:03-B1*06:01L
  source 1..13: note = Severe acute respiratory syndrome coronavirus 2
VMPLSAPTLVPQE

SEQ ID NO: 9541 - protein, 10 aa, Severe acute respiratory syndrome-related coronavirus
  REGION 1..10: note = Table B: HLA-DQA1*03:02-B1*03:03L HLA-DQA1*03:01-B1*03:02L HLA-DQA1*01:03-B1*06:01L HLA-DQA1*02:01-B1*03:03L
  source 1..10: note = Severe acute respiratory syndrome coronavirus 2
SAPTLVPQEH

SEQ ID NO: 9542 - protein, 10 aa, Severe acute respiratory syndrome-related coronavirus
  REGION 1..10: note = Table B: HLA-DQA1*03:02-B1*03:03M HLA-DRB1*11:02L HLA-DQA1*05:05-B1*03:19M HLA-DRB1*09:01L HLA-DQA1*03:01-B1*03:02L HLA-DPA1*01:03-B1*104:01L
  source 1..10: note = Severe acute respiratory syndrome coronavirus 2
QEHYVRITGL

SEQ ID NO: 9543 - protein, 10 aa, Severe acute respiratory syndrome-related coronavirus
  REGION 1..10: note = Table B: HLA-DQA1*03:02-B1*03:03L HLA-DQA1*03:01-B1*03:02L
  source 1..10: note = Severe acute respiratory syndrome coronavirus 2
VRITGLYPTL

SEQ ID NO: 9544 - protein, 12 aa, Severe acute respiratory syndrome-related coronavirus
  REGION 1..12: note = Table B: HLA-DQA1*03:02-B1*03:03L HLA-DQA1*05:01-B1*03:01L HLA-DRB1*04:03L HLA-DQA1*01:02-B1*06:02L HLA-DQA1*05:05-B1*03:19L HLA-DPA1*03:01-B1*105:01L HLA-DQA1*03:01-B1*03:02L HLA-DQA1*05:05-B1*03:01L
  REGION 1..12: note = CONT. FROM ABOVE: HLA-DRB1*14:17L HLA-DQA1*01:03-B1*06:01L HLA-D QA1*02:01-B1*03:03L
  source 1..12: note = Severe acute respiratory syndrome coronavirus 2
ITGLYPTLNISD

SEQ ID NO: 9545 - protein, 11 aa, Severe acute respiratory syndrome-related coronavirus
  REGION 1..11: note = Table B: HLA-DQA1*03:02-B1*03:03L HLA-DRB1*04:02L HLA-DRB4*03:01NL HLA-DQA1*05:01-B1*02:01L HLA-DRB1*04:10L HLA-DRB1*16:01L
  source 1..11: note = Severe acute respiratory syndrome coronavirus 2
GLYPTLNISDE

SEQ ID NO: 9546 - protein, 13 aa, Severe acute respiratory syndrome-related coronavirus
  REGION 1..13: note = Table B: HLA-DQA1*03:02-B1*03:03L HLA-DRB1*04:02L HLA-DRB1*04:05L HLA-DRB4*03:01NL HLA-DRB1*14:01L HLA-DQA1*01-B1*05L HLA-DQA1*05:01-B1*02:01L HLA-DRB1*04:10L HLA-DRB1*12:01L HLA-DQA1*03:01-B1*03:02L HLA-DRB1*14:54L
  REGION 1..13: note = CONT. FROM ABOVE: HLA-DRB1*14:17L HLA-DRB1*16:01L HLA-DQA1*01:03 -B1*06:01L HLA-DQA1*02:01-B1*03:03L
  source 1..13: note = Severe acute respiratory syndrome coronavirus 2
YPTLNISDEFSSN

SEQ ID NO: 9547 - protein, 11 aa, Severe acute respiratory syndrome-related coronavirus
  REGION 1..11: note = Table B: HLA-DQA1*03:02-B1*03:03L HLA-DRB1*04:03L HLA-DQA1*01-B1*05L HLA-DQA1*03:01-B1*03:02L
  source 1..11: note = Severe acute respiratory syndrome coronavirus 2
ISDEFSSNVAN

SEQ ID NO: 9548 - protein, 10 aa, Severe acute respiratory syndrome-related coronavirus
  REGION 1..10: note = Table B: HLA-DQA1*03:02-B1*03:03L HLA-DQA1*05:01-B1*03:01M HLA-DRB1*13:03L HLA-DRB1*01:03L HLA-DRB1*04:02L HLA-DQA1*01:02-B1*06:02L HLA-DRB4*03:01NL HLA-DRB1*08:77M HLA-DPA1*01:03-B1*03:01L HLA-DPA1*03:01-B1*04:02M
  REGION 1..10: note = CONT. FROM ABOVE: HLA-DRB1*03:01M HLA-DRB1*14:01L HLA-DRB1*11:02 L HLA-DRB1*14:02L HLA-DQA1*01-B1*05L HLA-DQA1*05:05-B1*03:19M HL A-DQA1*05:01-B1*02:01L HLA-DRB4*01:01M HLA-DPA1*01:03-B1*04:01M HLA-DQA1*05:05-B1*03:116L HLA-DPA1*01:03-B1*04:02L
  REGION 1..10: note = CONT. FROM ABOVE: HLA-DRB1*12:01L HLA-DPA1*03:01-B1*105:01L HLA- DQA1*03:01-B1*03:02L HLA-DRB1*14:54L HLA-DPA1*01:03-B1*104:01L H LA-DPA1*01:02-B1*04:01L HLA-DRB1*10:01M HLA-DRB1*16:01L HLA-DRB1 *08:02L HLA-DQA1*02:01-B1*03:03L HLA-DRB1*15:03M
  source 1..10: note = Severe acute respiratory syndrome coronavirus 2
DEFSSNVANY

SEQ ID NO: 9549 - protein, 10 aa, Severe acute respiratory syndrome-related coronavirus
  REGION 1..10: note = Table B: HLA-DQA1*03:02-B1*03:03L HLA-DQA1*05:01-B1*03:01L HLA-DRB1*04:01L HLA-DRB1*04:03L HLA-DRB1*13:02M HLA-DRB1*13:03M HLA-DRB1*01:03L HLA-DRB1*04:02L HLA-DRB1*04:04L HLA-DRB1*04:05L HLA-DQA1*01:02-B1*06:02L HLA-DRB1*01:01L HLA-DRB1*01:02L
  REGION 1..10: note = CONT. FROM ABOVE: HLA-DRB4*03:01NM HLA-DRB1*08:04L HLA-DRB1*08:7 7L HLA-DRB3*02:01L HLA-DRB1*14:01L HLA-DRB1*11:03L HLA-DRB1*11:0 4L HLA-DRB1*14:02L HLA-DRB1*08:01L HLA-DRB1*11:01L HLA-DRB5*01:0 1L HLA-DQA1*05:05-B1*03:19L HLA-DQA1*05:01-B1*02:01L
  REGION 1..10: note = CONT. FROM ABOVE: HLA-DPA1*01:03-B1*04:02L HLA-DRB1*12:01M HLA-D RB1*12:02L HLA-DRB3*01:01L HLA-DPA1*03:01-B1*105:01L HLA-DQA1*03 :01-B1*03:02M HLA-DRB1*14:54L HLA-DQA1*05:05-B1*03:01M HLA-DRB1* 14:17L HLA-DPA1*01:02-B1*04:01L HLA-DRB1*10:01L HLA-DRB1*16:01L
  REGION 1..10: note = CONT. FROM ABOVE: HLA-DQA1*01:03-B1*06:01L HLA-DRB1*04:08L HLA-D RB1*08:02L HLA-DRB1*08:03L HLA-DQA1*02:01-B1*03:03L HLA-DRB1*15: 01L
  source 1..10: note = Severe acute respiratory syndrome coronavirus 2
FSSNVANYQK

SEQ ID NO: 9550 - protein, 10 aa, Severe acute respiratory syndrome-related coronavirus
  REGION 1..10: note = Table B: HLA-DQA1*03:02-B1*03:03L HLA-DQA1*05:05-B1*03:19L
  source 1..10: note = Severe acute respiratory syndrome coronavirus 2
SSNVANYQKV

SEQ ID NO: 9551 - protein, 10 aa, Severe acute respiratory syndrome-related coronavirus
  REGION 1..10: note = Table B: HLA-DQA1*03:02-B1*03:03L HLA-DQA1*05:01-B1*03:01L HLA-DRB1*04:03L HLA-DRB1*04:02L HLA-DQA1*01:02-B1*06:02L HLA-DQA1*05:05-B1*03:19L HLA-DQA1*05:01-B1*02:01L HLA-DPA1*03:01-B1*105:01L HLA-DQA1*03:01-B1*03:02L
  REGION 1..10: note = CONT. FROM ABOVE: HLA-DQA1*05:05-B1*03:01L HLA-DRB1*14:17L HLA-D PA1*01:02-B1*04:01L HLA-DQA1*01:03-B1*06:01L HLA-DQA1*02:01-B1*0 3:03L
  source 1..10: note = Severe acute respiratory syndrome coronavirus 2
SNVANYQKVG

SEQ ID NO: 9552 - protein, 10 aa, Severe acute respiratory syndrome-related coronavirus
  REGION 1..10: note = Table B: HLA-DQA1*03:02-B1*03:03L HLA-DQA1*05:01-B1*03:01L HLA-DRB1*13:03L HLA-DQA1*01:02-B1*06:02L HLA-DRB1*01:02L HLA-DRB1*14:01L HLA-DQA1*05:01-B1*02:01L HLA-DRB1*12:01L HLA-DPA1*03:01-B1*105:01L HLA-DQA1*03:01-B1*03:02L
  REGION 1..10: note = CONT. FROM ABOVE: HLA-DQA1*05:05-B1*03:01L HLA-DQA1*01:03-B1*06: 01L HLA-DQA1*02:01-B1*03:03L HLA-DRB1*15:03L
  source 1..10: note = Severe acute respiratory syndrome coronavirus 2
NVANYQKVGM

SEQ ID NO: 9553 - protein, 10 aa, Severe acute respiratory syndrome-related coronavirus
  REGION 1..10: note = Table B: HLA-DQA1*03:02-B1*03:03L HLA-DQA1*05:01-B1*03:01L HLA-DRB1*04:01L HLA-DRB1*04:03L HLA-DRB1*13:02L HLA-DRB1*13:03L HLA-DRB1*01:03M HLA-DRB1*04:05L HLA-DQA1*01:02-B1*06:02M HLA-DRB1*01:01L HLA-DRB4*03:01NL HLA-DRB1*08:77L
  REGION 1..10: note = CONT. FROM ABOVE: HLA-DPA1*01:03-B1*03:01L HLA-DPA1*03:01-B1*04: 02L HLA-DRB1*03:01L HLA-DRB1*14:01L HLA-DRB1*11:02L HLA-DRB1*11: 03L HLA-DRB1*14:02L HLA-DQA1*01:01-B1*05:01L HLA-DRB1*11:01L HLA -DQA1*01-B1*05L HLA-DQA1*05:05-B1*03:19L
  REGION 1..10: note = CONT. FROM ABOVE: HLA-DQA1*05:01-B1*02:01L HLA-DRB4*01:01L HLA-D PA1*01:03-B1*04:01L HLA-DQA1*05:05-B1*03:116L HLA-DPA1*01:03-B1* 04:02L HLA-DRB1*12:01L HLA-DPA1*02:01-B1*13:01M HLA-DPA1*03:01-B 1*105:01L HLA-DQA1*03:01-B1*03:02L HLA-DPA1*01:03-B1*104:01L
  REGION 1..10: note = CONT. FROM ABOVE: HLA-DQA1*05:05-B1*03:01L HLA-DPA1*01:02-B1*04: 01L HLA-DRB1*10:01L HLA-DRB1*16:01L HLA-DQA1*01:03-B1*06:01M HLA -DRB1*08:02L HLA-DQA1*02:01-B1*03:03M HLA-DRB1*15:03L
  source 1..10: note = Severe acute respiratory syndrome coronavirus 2
NYQKVGMQKY

SEQ ID NO: 9554 - protein, 12 aa, Severe acute respiratory syndrome-related coronavirus
  REGION 1..12: note = Table B: HLA-DQA1*03:02-B1*03:03L HLA-DQA1*05:01-B1*03:01L HLA-DRB1*13:02L HLA-DRB1*13:03L HLA-DRB1*01:03L HLA-DRB1*04:02L HLA-DRB1*04:04L HLA-DQA1*01:02-B1*06:02L HLA-DRB1*01:02L HLA-DRB4*03:01NL HLA-DRB1*08:04L HLA-DRB1*14:01L HLA-DRB1*11:03L
  REGION 1..12: note = CONT. FROM ABOVE: HLA-DRB1*11:04L HLA-DRB1*08:01L HLA-DQA1*01-B1 *05L HLA-DQA1*05:01-B1*02:01L HLA-DRB1*04:10L HLA-DRB1*12:01L HL A-DRB1*12:02L HLA-DQA1*03:01-B1*03:02L HLA-DRB1*14:54L HLA-DRB1* 10:01L HLA-DRB1*16:01L HLA-DRB1*04:08L HLA-DRB1*08:03L
  REGION 1..12: note = CONT. FROM ABOVE: HLA-DQA1*02:01-B1*03:03L
  source 1..12: note = Severe acute respiratory syndrome coronavirus 2
MQKYSTLQGPPG

SEQ ID NO: 9555 - protein, 13 aa, Severe acute respiratory syndrome-related coronavirus
  REGION 1..13: note = Table B: HLA-DQA1*03:02-B1*03:03L HLA-DRB1*01:03L HLA-DRB1*01:02L HLA-DQA1*01:01-B1*05:01L HLA-DRB1*08:01L HLA-DRB1*11:01L HLA-DPA1*01:03-B1*04:02L HLA-DQA1*03:01-B1*03:02L HLA-DRB1*04:08L
  source 1..13: note = Severe acute respiratory syndrome coronavirus 2
GPPGTGKSHFAIG

SEQ ID NO: 9556 - protein, 10 aa, Severe acute respiratory syndrome-related coronavirus
  REGION 1..10: note = Table B: HLA-DQA1*03:02-B1*03:03L HLA-DQA1*05:01-B1*03:01L HLA-DRB1*13:03L HLA-DRB1*01:03L HLA-DQA1*01:02-B1*06:02L HLA-DRB1*08:77L HLA-DPA1*01:03-B1*03:01L HLA-DPA1*03:01-B1*04:02L HLA-DRB1*03:01L HLA-DRB1*14:01L
  REGION 1..10: note = CONT. FROM ABOVE: HLA-DRB1*11:02L HLA-DRB1*14:02L HLA-DQA1*01-B1 *05L HLA-DQA1*05:05-B1*03:19L HLA-DQA1*05:01-B1*02:01L HLA-DRB4* 01:01L HLA-DPA1*01:03-B1*04:01L HLA-DQA1*05:05-B1*03:116L HLA-DP A1*01:03-B1*04:02L HLA-DRB1*12:01L HLA-DPA1*02:01-B1*13:01L
  REGION 1..10: note = CONT. FROM ABOVE: HLA-DPA1*03:01-B1*105:01L HLA-DPA1*01:03-B1*10 4:01L HLA-DRB1*10:01L HLA-DRB1*16:01L HLA-DQA1*01:03-B1*06:01L H LA-DRB1*08:02L HLA-DQA1*02:01-B1*03:03L HLA-DRB1*15:03L
  source 1..10: note = Severe acute respiratory syndrome coronavirus 2
SHFAIGLALY

SEQ ID NO: 9557 - protein, 11 aa, Severe acute respiratory syndrome-related coronavirus
  REGION 1..11: note = Table B: HLA-DQA1*03:02-B1*03:03L HLA-DQA1*05:01-B1*03:01L HLA-DRB1*04:03L HLA-DRB1*04:02L HLA-DQA1*01:02-B1*06:02L HLA-DPA1*03:01-B1*105:01L HLA-DRB1*14:17L HLA-DPA1*01:02-B1*04:01L HLA-DQA1*01:03-B1*06:01L
  source 1..11: note = Severe acute respiratory syndrome coronavirus 2
IGLALYYPSAR

SEQ ID NO: 9558 - protein, 10 aa, Severe acute respiratory syndrome-related coronavirus
  REGION 1..10: note = Table B: HLA-DQA1*03:02-B1*03:03L HLA-DQA1*01-B1*05L HLA-DQA1*05:05-B1*03:19L HLA-DQA1*05:01-B1*02:01L HLA-DPA1*03:01-B1*105:01L HLA-DQA1*03:01-B1*03:02L HLA-DRB1*16:01L HLA-DQA1*01:03-B1*06:01L
  REGION 1..10: note = CONT. FROM ABOVE: HLA-DQA1*02:01-B1*03:03L HLA-DRB1*15:03L
  source 1..10: note = Severe acute respiratory syndrome coronavirus 2
ALYYPSARIV

SEQ ID NO: 9559 - protein, 10 aa, Severe acute respiratory syndrome-related coronavirus
  REGION 1..10: note = Table B: HLA-DQA1*03:02-B1*03:03L HLA-DQA1*05:01-B1*03:01L HLA-DRB1*04:03L HLA-DRB1*13:02L HLA-DRB1*13:03L HLA-DRB1*01:03L HLA-DRB1*04:05L HLA-DQA1*01:02-B1*06:02M HLA-DRB1*01:01L HLA-DRB1*01:02L HLA-DRB1*08:77L HLA-DPA1*01:03-B1*03:01L
  REGION 1..10: note = CONT. FROM ABOVE: HLA-DPA1*03:01-B1*04:02L HLA-DRB1*03:01L HLA-D RB1*14:01L HLA-DRB1*11:02L HLA-DRB1*11:03L HLA-DRB1*14:02L HLA-D QA1*01:01-B1*05:01L HLA-DRB1*11:01L HLA-DQA1*01-B1*05L HLA-DQA1* 05:05-B1*03:19L HLA-DQA1*05:01-B1*02:01L HLA-DRB4*01:01L
  REGION 1..10: note = CONT. FROM ABOVE: HLA-DPA1*01:03-B1*04:01L HLA-DQA1*05:05-B1*03: 116L HLA-DPA1*01:03-B1*04:02L HLA-DRB1*12:01L HLA-DPA1*02:01-B1* 13:01M HLA-DPA1*03:01-B1*105:01L HLA-DQA1*03:01-B1*03:02L HLA-DP A1*01:03-B1*104:01L HLA-DQA1*05:05-B1*03:01L
  REGION 1..10: note = CONT. FROM ABOVE: HLA-DPA1*01:02-B1*04:01L HLA-DRB1*10:01L HLA-D RB1*16:01L HLA-DQA1*01:03-B1*06:01M HLA-DRB1*08:02L HLA-DRB1*08: 03L HLA-DQA1*02:01-B1*03:03L HLA-DRB1*15:03L
  source 1..10: note = Severe acute respiratory syndrome coronavirus 2
LYYPSARIVY

SEQ ID NO: 9560 - protein, 12 aa, Severe acute respiratory syndrome-related coronavirus
  REGION 1..12: note = Table B: HLA-DQA1*03:02-B1*03:03L HLA-DRB1*13:02L HLA-DRB1*13:03L HLA-DRB1*01:03L HLA-DRB1*04:02L HLA-DRB1*04:04L HLA-DRB1*04:05L HLA-DRB1*01:02L HLA-DRB1*08:04L HLA-DRB3*02:01L HLA-DPA1*01:03-B1*03:01L HLA-DPA1*03:01-B1*04:02L
  REGION 1..12: note = CONT. FROM ABOVE: HLA-DRB1*14:01L HLA-DRB1*11:04L HLA-DRB1*14:02 L HLA-DRB1*08:01L HLA-DRB1*11:01L HLA-DQA1*05:01-B1*02:01L HLA-D PA1*01:03-B1*04:01L HLA-DQA1*05:05-B1*03:116L HLA-DRB1*09:01L HL A-DPA1*01:03-B1*04:02L HLA-DRB1*12:01L HLA-DPA1*02:01-B1*13:01L
  REGION 1..12: note = CONT. FROM ABOVE: HLA-DQA1*03:01-B1*03:02L HLA-DPA1*01:03-B1*02: 01L HLA-DPA1*01:03-B1*104:01L HLA-DRB1*14:17L HLA-DPA1*01:02-B1* 04:01L HLA-DRB1*10:01L HLA-DRB1*16:01L HLA-DRB1*04:08L HLA-DRB1* 08:03L HLA-DRB1*15:03L
  source 1..12: note = Severe acute respiratory syndrome coronavirus 2
IVYTACSHAAVD

SEQ ID NO: 9561 - protein, 12 aa, Severe acute respiratory syndrome-related coronavirus
  REGION 1..12: note = Table B: HLA-DQA1*03:02-B1*03:03L HLA-DRB1*08:04L HLA-DRB1*08:01L HLA-DQA1*03:01-B1*03:02L
  source 1..12: note = Severe acute respiratory syndrome coronavirus 2
VYTACSHAAVDA

SEQ ID NO: 9562 - protein, 11 aa, Severe acute respiratory syndrome-related coronavirus
  REGION 1..11: note = Table B: HLA-DQA1*03:02-B1*03:03L HLA-DRB1*04:03L HLA-DRB1*13:02L HLA-DRB1*13:03L HLA-DRB1*01:03L HLA-DRB1*04:02L HLA-DRB1*04:05L HLA-DRB1*01:02L HLA-DRB4*03:01NL HLA-DRB1*08:04L HLA-DRB1*14:01L HLA-DRB1*11:04L HLA-DRB1*08:01L
  REGION 1..11: note = CONT. FROM ABOVE: HLA-DQA1*01-B1*05L HLA-DRB1*04:10L HLA-DRB1*12 :01L HLA-DQA1*03:01-B1*03:02L HLA-DRB1*14:54L HLA-DRB1*14:17L HL A-DPA1*01:02-B1*04:01L HLA-DRB1*16:01L HLA-DRB1*04:08L HLA-DRB1* 08:03L HLA-DQA1*02:01-B1*03:03L
  source 1..11: note = Severe acute respiratory syndrome coronavirus 2
DKFKVNSTLEQ

SEQ ID NO: 9563 - protein, 10 aa, Severe acute respiratory syndrome-related coronavirus
  REGION 1..10: note = Table B: HLA-DQA1*03:02-B1*03:03L HLA-DQA1*05:01-B1*03:01L HLA-DRB1*04:03L HLA-DRB1*13:02L HLA-DRB1*13:03L HLA-DRB1*01:03L HLA-DQA1*01:02-B1*06:02L HLA-DRB4*03:01NL HLA-DRB1*08:77L HLA-DPA1*01:03-B1*03:01L HLA-DPA1*03:01-B1*04:02L
  REGION 1..10: note = CONT. FROM ABOVE: HLA-DRB1*03:01L HLA-DRB1*14:01L HLA-DRB1*11:02 L HLA-DRB1*14:02L HLA-DRB1*11:01L HLA-DQA1*01-B1*05L HLA-DQA1*05 :05-B1*03:19M HLA-DQA1*05:01-B1*02:01L HLA-DRB4*01:01L HLA-DPA1* 01:03-B1*04:01L HLA-DQA1*05:05-B1*03:116L
  REGION 1..10: note = CONT. FROM ABOVE: HLA-DPA1*01:03-B1*04:02L HLA-DRB1*12:01L HLA-D PA1*02:01-B1*13:01L HLA-DPA1*03:01-B1*105:01L HLA-DPA1*01:03-B1* 104:01L HLA-DQA1*05:05-B1*03:01L HLA-DPA1*01:02-B1*04:01L HLA-DR B1*10:01L HLA-DRB1*16:01L HLA-DQA1*01:03-B1*06:01L
  REGION 1..10: note = CONT. FROM ABOVE: HLA-DRB1*08:02L HLA-DQA1*02:01-B1*03:03L HLA-D RB1*15:03L
  source 1..10: note = Severe acute respiratory syndrome coronavirus 2
FKVNSTLEQY

SEQ ID NO: 9564 - protein, 10 aa, Severe acute respiratory syndrome-related coronavirus
  REGION 1..10: note = Table B: HLA-DQA1*03:02-B1*03:03L HLA-DQA1*01:02-B1*06:02L HLA-DRB1*01:02L HLA-DQA1*05:05-B1*03:19L HLA-DQA1*05:01-B1*02:01L HLA-DPA1*03:01-B1*105:01L HLA-DQA1*03:01-B1*03:02L HLA-DQA1*02:01-B1*03:03L
  REGION 1..10: note = CONT. FROM ABOVE: HLA-DRB1*15:03L
  source 1..10: note = Severe acute respiratory syndrome coronavirus 2
KVNSTLEQYV

SEQ ID NO: 9565 - protein, 10 aa, Severe acute respiratory syndrome-related coronavirus
  REGION 1..10: note = Table B: HLA-DQA1*03:02-B1*03:03L HLA-DQA1*05:01-B1*03:01L HLA-DQA1*01:02-B1*06:02L HLA-DQA1*05:05-B1*03:19L HLA-DQA1*05:01-B1*02:01L HLA-DPA1*03:01-B1*105:01L HLA-DQA1*01:03-B1*06:01L HLA-DQA1*02:01-B1*03:03L
  REGION 1..10: note = CONT. FROM ABOVE: HLA-DRB1*15:03L
  source 1..10: note = Severe acute respiratory syndrome coronavirus 2
VNSTLEQYVF

SEQ ID NO: 9566 - protein, 13 aa, Severe acute respiratory syndrome-related coronavirus
  REGION 1..13: note = Table B: HLA-DQA1*03:02-B1*03:03L HLA-DQA1*05:01-B1*03:01L HLA-DRB1*13:02L HLA-DRB1*13:03L HLA-DRB1*01:03L HLA-DRB1*04:02L HLA-DRB1*04:04L HLA-DRB1*04:05L HLA-DRB1*01:02L HLA-DRB4*03:01NL HLA-DRB1*08:04L HLA-DRB1*08:77L HLA-DPA1*03:01-B1*04:02L
  REGION 1..13: note = CONT. FROM ABOVE: HLA-DRB1*14:01L HLA-DQA1*01-B1*05L HLA-DQA1*05 :05-B1*03:19L HLA-DQA1*05:01-B1*02:01L HLA-DRB1*04:10L HLA-DPA1* 01:03-B1*04:02L HLA-DRB1*12:01L HLA-DRB1*12:02L HLA-DQA1*03:01-B 1*03:02L HLA-DRB1*14:54L HLA-DQA1*05:05-B1*03:01L
  REGION 1..13: note = CONT. FROM ABOVE: HLA-DRB1*14:17L HLA-DPA1*01:02-B1*04:01L HLA-D RB1*10:01L HLA-DRB1*16:01L HLA-DRB1*04:08L HLA-DQA1*02:01-B1*03: 03L HLA-DRB1*15:03L
  source 1..13: note = Severe acute respiratory syndrome coronavirus 2
EQYVFCTVNALPE

SEQ ID NO: 9567 - protein, 13 aa, Severe acute respiratory syndrome-related coronavirus
  REGION 1..13: note = Table B: HLA-DQA1*03:02-B1*03:03L HLA-DQA1*05:01-B1*03:01L HLA-DQA1*05:05-B1*03:19L HLA-DQA1*05:01-B1*02:01L HLA-DQA1*03:01-B1*03:02L HLA-DQA1*02:01-B1*03:03L
  source 1..13: note = Severe acute respiratory syndrome coronavirus 2
YVFCTVNALPETT

SEQ ID NO: 9568 - protein, 10 aa, Severe acute respiratory syndrome-related coronavirus
  REGION 1..10: note = Table B: HLA-DQA1*03:02-B1*03:03L
  source 1..10: note = Severe acute respiratory syndrome coronavirus 2
TVNALPETTA

SEQ ID NO: 9569 - protein, 12 aa, Severe acute respiratory syndrome-related coronavirus
  REGION 1..12: note = Table B: HLA-DQA1*03:02-B1*03:03L HLA-DQA1*05:01-B1*03:01L HLA-DRB1*04:03L HLA-DQA1*01:02-B1*06:02L HLA-DQA1*01-B1*05L HLA-DQA1*05:05-B1*03:19L HLA-DQA1*05:01-B1*02:01L HLA-DQA1*05:05-B1*03:01L HLA-DRB1*16:01L
  REGION 1..12: note = CONT. FROM ABOVE: HLA-DQA1*01:03-B1*06:01L HLA-DQA1*02:01-B1*03: 03L
  source 1..12: note = Severe acute respiratory syndrome coronavirus 2
VNALPETTADIV

SEQ ID NO: 9570 - protein, 12 aa, Severe acute respiratory syndrome-related coronavirus
  REGION 1..12: note = Table B: HLA-DQA1*03:02-B1*03:03L HLA-DQA1*03:01-B1*03:02L HLA-DQA1*01:03-B1*06:01L
  source 1..12: note = Severe acute respiratory syndrome coronavirus 2
ALPETTADIVVF

SEQ ID NO: 9571 - protein, 12 aa, Severe acute respiratory syndrome-related coronavirus
  REGION 1..12: note = Table B: HLA-DQA1*03:02-B1*03:03L HLA-DQA1*03:01-B1*03:02L HLA-DQA1*02:01-B1*03:03L
  source 1..12: note = Severe acute respiratory syndrome coronavirus 2
LPETTADIVVFD

SEQ ID NO: 9572 - protein, 11 aa, Severe acute respiratory syndrome-related coronavirus
  REGION 1..11: note = Table B: HLA-DQA1*03:02-B1*03:03L HLA-DQA1*01:02-B1*06:02L HLA-DPA1*03:01-B1*105:01L HLA-DPA1*01:03-B1*104:01L
  source 1..11: note = Severe acute respiratory syndrome coronavirus 2
TTADIVVFDEI

SEQ ID NO: 9573 - protein, 11 aa, Severe acute respiratory syndrome-related coronavirus
  REGION 1..11: note = Table B: HLA-DQA1*03:02-B1*03:03L HLA-DRB1*04:03L HLA-DRB1*12:01L HLA-DRB1*16:01L
  source 1..11: note = Severe acute respiratory syndrome coronavirus 2
ADIVVFDEISM

SEQ ID NO: 9574 - protein, 12 aa, Severe acute respiratory syndrome-related coronavirus
  REGION 1..12: note = Table B: HLA-DQA1*03:02-B1*03:03L HLA-DQA1*05:01-B1*03:01L HLA-DRB1*13:02L HLA-DRB1*13:03L HLA-DRB1*01:03L HLA-DRB1*04:04L HLA-DRB1*04:05L HLA-DQA1*01:02-B1*06:02L HLA-DRB1*01:02L HLA-DRB4*03:01NL HLA-DRB1*08:04L HLA-DRB1*08:77L HLA-DRB3*02:01L
  REGION 1..12: note = CONT. FROM ABOVE: HLA-DPA1*01:03-B1*03:01L HLA-DPA1*03:01-B1*04: 02L HLA-DRB1*14:01L HLA-DRB1*11:03L HLA-DRB1*14:02L HLA-DQA1*05: 05-B1*03:19L HLA-DRB4*01:01L HLA-DRB1*04:10L HLA-DRB1*09:01L HLA -DPA1*01:03-B1*04:02L HLA-DRB1*12:01L HLA-DRB1*12:02L
  REGION 1..12: note = CONT. FROM ABOVE: HLA-DPA1*02:01-B1*13:01L HLA-DPA1*03:01-B1*105 :01L HLA-DRB1*14:54L HLA-DPA1*01:03-B1*104:01L HLA-DQA1*05:05-B1 *03:01L HLA-DPA1*01:02-B1*04:01L HLA-DRB1*10:01L HLA-DRB1*16:01L HLA-DQA1*01:03-B1*06:01L HLA-DRB1*04:08L HLA-DRB1*08:03L
  REGION 1..12: note = CONT. FROM ABOVE: HLA-DRB1*15:01L
  source 1..12: note = Severe acute respiratory syndrome coronavirus 2
IVVFDEISMATN

SEQ ID NO: 9575 - protein, 12 aa, Severe acute respiratory syndrome-related coronavirus
  REGION 1..12: note = Table B: HLA-DQA1*03:02-B1*03:03L HLA-DQA1*05:01-B1*03:01L HLA-DPA1*03:01-B1*04:02L HLA-DRB1*14:02L HLA-DPA1*01:03-B1*04:02L HLA-DRB1*12:01L HLA-DPA1*02:01-B1*13:01L HLA-DPA1*03:01-B1*105:01L
  REGION 1..12: note = CONT. FROM ABOVE: HLA-DRB1*15:03L
  source 1..12: note = Severe acute respiratory syndrome coronavirus 2
VVFDEISMATNY

SEQ ID NO: 9576 - protein, 12 aa, Severe acute respiratory syndrome-related coronavirus
  REGION 1..12: note = Table B: HLA-DQA1*03:02-B1*03:03L HLA-DPA1*03:01-B1*105:01L HLA-DQA1*02:01-B1*03:03L
  source 1..12: note = Severe acute respiratory syndrome coronavirus 2
VFDEISMATNYD

SEQ ID NO: 9577 - protein, 11 aa, Severe acute respiratory syndrome-related coronavirus
  REGION 1..11: note = Table B: HLA-DQA1*03:02-B1*03:03L HLA-DRB1*04:03L HLA-DRB1*04:02L HLA-DQA1*01-B1*05L HLA-DQA1*05:05-B1*03:19L HLA-DQA1*05:01-B1*02:01L HLA-DRB1*12:01L HLA-DQA1*03:01-B1*03:02L HLA-DRB1*14:17L HLA-DRB1*16:01L
  REGION 1..11: note = CONT. FROM ABOVE: HLA-DQA1*02:01-B1*03:03L HLA-DRB1*15:03L
  source 1..11: note = Severe acute respiratory syndrome coronavirus 2
DEISMATNYDL

SEQ ID NO: 9578 - protein, 13 aa, Severe acute respiratory syndrome-related coronavirus
  REGION 1..13: note = Table B: HLA-DQA1*03:02-B1*03:03L HLA-DRB1*04:02L HLA-DRB1*04:05L HLA-DQA1*01:02-B1*06:02L HLA-DRB1*01:02L HLA-DRB1*14:01L HLA-DQA1*05:05-B1*03:19L HLA-DRB1*12:01L HLA-DPA1*03:01-B1*105:01L HLA-DQA1*05:05-B1*03:01L
  REGION 1..13: note = CONT. FROM ABOVE: HLA-DRB1*16:01L HLA-DQA1*01:03-B1*06:01L HLA-D QA1*02:01-B1*03:03L
  source 1..13: note = Severe acute respiratory syndrome coronavirus 2
ISMATNYDLSVVN

SEQ ID NO: 9579 - protein, 12 aa, Severe acute respiratory syndrome-related coronavirus
  REGION 1..12: note = Table B: HLA-DQA1*03:02-B1*03:03L HLA-DQA1*05:01-B1*03:01L HLA-DRB1*04:05L HLA-DQA1*01:02-B1*06:02L HLA-DQA1*01:01-B1*05:01L HLA-DQA1*01-B1*05L HLA-DQA1*05:05-B1*03:19L HLA-DQA1*05:01-B1*02:01L
  REGION 1..12: note = CONT. FROM ABOVE: HLA-DRB1*04:10L HLA-DPA1*03:01-B1*105:01L HLA- DRB1*14:54L HLA-DRB1*04:08L
  source 1..12: note = Severe acute respiratory syndrome coronavirus 2
ATNYDLSVVNAR

SEQ ID NO: 9580 - protein, 10 aa, Severe acute respiratory syndrome-related coronavirus
  REGION 1..10: note = Table B: HLA-DQA1*03:02-B1*03:03L HLA-DQA1*05:01-B1*03:01L HLA-DRB1*04:03L HLA-DQA1*01-B1*05L HLA-DQA1*05:05-B1*03:19L HLA-DQA1*05:01-B1*02:01L HLA-DQA1*03:01-B1*03:02L HLA-DPA1*01:02-B1*04:01L HLA-DRB1*16:01L
  REGION 1..10: note = CONT. FROM ABOVE: HLA-DQA1*01:03-B1*06:01L HLA-DQA1*02:01-B1*03: 03L
  source 1..10: note = Severe acute respiratory syndrome coronavirus 2
YDLSVVNARL

SEQ ID NO: 9581 - protein, 10 aa, Severe acute respiratory syndrome-related coronavirus
  REGION 1..10: note = Table B: HLA-DQA1*03:02-B1*03:03L HLA-DRB1*04:03L HLA-DRB1*13:03L HLA-DRB1*01:03L HLA-DRB1*04:02L HLA-DRB1*04:05L HLA-DRB4*03:01NL HLA-DQA1*01-B1*05L HLA-DQA1*05:01-B1*02:01L HLA-DRB1*04:10L HLA-DRB1*12:01L HLA-DQA1*03:01-B1*03:02L
  REGION 1..10: note = CONT. FROM ABOVE: HLA-DRB1*14:54L HLA-DRB1*14:17L HLA-DRB1*16:01 L HLA-DRB1*04:08L HLA-DQA1*02:01-B1*03:03L
  source 1..10: note = Severe acute respiratory syndrome coronavirus 2
HYVYIGDPAQ

SEQ ID NO: 9582 - protein, 10 aa, Severe acute respiratory syndrome-related coronavirus
  REGION 1..10: note = Table B: HLA-DQA1*03:02-B1*03:03L HLA-DQA1*03:01-B1*03:02L
  source 1..10: note = Severe acute respiratory syndrome coronavirus 2
YVYIGDPAQL

SEQ ID NO: 9583 - protein, 12 aa, Severe acute respiratory syndrome-related coronavirus
  REGION 1..12: note = Table B: HLA-DQA1*03:02-B1*03:03L HLA-DQA1*05:01-B1*03:01L HLA-DRB1*04:03L HLA-DRB1*13:03L HLA-DRB1*01:03L HLA-DRB1*04:02L HLA-DRB1*04:05L HLA-DRB4*03:01NL HLA-DQA1*01-B1*05L HLA-DQA1*05:05-B1*03:19L HLA-DQA1*05:01-B1*02:01L
  REGION 1..12: note = CONT. FROM ABOVE: HLA-DRB1*12:01L HLA-DPA1*03:01-B1*105:01L HLA- DQA1*03:01-B1*03:02L HLA-DRB1*14:54L HLA-DQA1*05:05-B1*03:01L HL A-DRB1*14:17L HLA-DRB1*16:01L HLA-DRB1*04:08L HLA-DQA1*02:01-B1* 03:03L HLA-DRB1*15:03L
  source 1..12: note = Severe acute respiratory syndrome coronavirus 2
VYIGDPAQLPAP

SEQ ID NO: 9584 - protein, 10 aa, Severe acute respiratory syndrome-related coronavirus
  REGION 1..10: note = Table B: HLA-DQA1*03:02-B1*03:03L HLA-DRB1*13:03L HLA-DRB1*04:02L HLA-DQA1*01-B1*05L HLA-DQA1*03:01-B1*03:02L HLA-DRB1*14:17L HLA-DQA1*02:01-B1*03:03L
  source 1..10: note = Severe acute respiratory syndrome coronavirus 2
GDPAQLPAPR

SEQ ID NO: 9585 - protein, 10 aa, Severe acute respiratory syndrome-related coronavirus
  REGION 1..10: note = Table B: HLA-DQA1*03:02-B1*03:03L HLA-DQA1*05:01-B1*03:01L HLA-DRB1*04:03L HLA-DRB1*13:03L HLA-DRB1*01:03L HLA-DRB1*04:02L HLA-DRB1*04:05L HLA-DRB4*03:01NL HLA-DQA1*01-B1*05L HLA-DQA1*05:01-B1*02:01L HLA-DQA1*03:01-B1*03:02L
  REGION 1..10: note = CONT. FROM ABOVE: HLA-DQA1*05:05-B1*03:01L HLA-DRB1*16:01L HLA-D QA1*01:03-B1*06:01L HLA-DQA1*02:01-B1*03:03L
  source 1..10: note = Severe acute respiratory syndrome coronavirus 2
DPAQLPAPRT

SEQ ID NO: 9586 - protein, 10 aa, Severe acute respiratory syndrome-related coronavirus
  REGION 1..10: note = Table B: HLA-DQA1*03:02-B1*03:03L HLA-DQA1*05:01-B1*03:01L HLA-DQA1*03:01-B1*03:02L HLA-DQA1*01:03-B1*06:01L HLA-DQA1*02:01-B1*03:03L
  source 1..10: note = Severe acute respiratory syndrome coronavirus 2
PAQLPAPRTL

SEQ ID NO: 9587 - protein, 16 aa, Severe acute respiratory syndrome-related coronavirus
  REGION 1..16: note = Table B: HLA-DQA1*03:02-B1*03:03L HLA-DQA1*05:01-B1*03:01L HLA-DRB1*13:02L HLA-DRB1*01:03L HLA-DRB1*01:02L HLA-DRB1*08:04L HLA-DRB1*14:01L HLA-DRB1*11:04L HLA-DQA1*01:01-B1*05:01L HLA-DRB1*11:01L HLA-DRB1*12:01L HLA-DRB3*01:01L
  REGION 1..16: note = CONT. FROM ABOVE: HLA-DPA1*02:01-B1*13:01L HLA-DPA1*03:01-B1*105 :01L HLA-DQA1*05:05-B1*03:01L HLA-DPA1*01:02-B1*04:01L HLA-DRB1* 16:01L HLA-DQA1*01:03-B1*06:01L HLA-DRB1*08:03L HLA-DRB1*15:03L
  source 1..16: note = Severe acute respiratory syndrome coronavirus 2
LPAPRTLLTKGTLEPE

SEQ ID NO: 9588 - protein, 10 aa, Severe acute respiratory syndrome-related coronavirus
  REGION 1..10: note = Table B: HLA-DQA1*03:02-B1*03:03L HLA-DQA1*05:01-B1*03:01L HLA-DRB1*04:03L HLA-DRB1*13:02L HLA-DRB1*13:03L HLA-DRB1*01:03L HLA-DRB1*04:05L HLA-DQA1*01:02-B1*06:02M HLA-DRB4*03:01NL HLA-DRB1*08:77L HLA-DPA1*01:03-B1*03:01L
  REGION 1..10: note = CONT. FROM ABOVE: HLA-DPA1*03:01-B1*04:02L HLA-DRB1*03:01L HLA-D RB1*14:01L HLA-DRB1*11:02L HLA-DRB1*14:02L HLA-DRB1*11:01L HLA-D QA1*01-B1*05L HLA-DQA1*05:05-B1*03:19M HLA-DQA1*05:01-B1*02:01M HLA-DRB4*01:01L HLA-DPA1*01:03-B1*04:01L
  REGION 1..10: note = CONT. FROM ABOVE: HLA-DQA1*05:05-B1*03:116L HLA-DPA1*01:03-B1*04 :02L HLA-DRB1*12:01L HLA-DPA1*02:01-B1*13:01L HLA-DPA1*03:01-B1* 105:01L HLA-DQA1*03:01-B1*03:02L HLA-DPA1*01:03-B1*104:01L HLA-D QA1*05:05-B1*03:01L HLA-DPA1*01:02-B1*04:01L HLA-DRB1*10:01L
  REGION 1..10: note = CONT. FROM ABOVE: HLA-DRB1*16:01M HLA-DQA1*01:03-B1*06:01L HLA-D RB1*08:02L HLA-DQA1*02:01-B1*03:03L HLA-DRB1*15:03L
  source 1..10: note = Severe acute respiratory syndrome coronavirus 2
LTKGTLEPEY

SEQ ID NO: 9589 - protein, 10 aa, Severe acute respiratory syndrome-related coronavirus
  REGION 1..10: note = Table B: HLA-DQA1*03:02-B1*03:03L HLA-DQA1*01:02-B1*06:02L HLA-DRB1*01:02L HLA-DPA1*03:01-B1*04:02L HLA-DRB1*11:02L HLA-DQA1*05:05-B1*03:19M HLA-DQA1*05:01-B1*02:01L HLA-DPA1*01:03-B1*04:01L HLA-DPA1*01:03-B1*04:02L
  REGION 1..10: note = CONT. FROM ABOVE: HLA-DPA1*02:01-B1*13:01L HLA-DPA1*03:01-B1*105 :01L HLA-DQA1*03:01-B1*03:02L HLA-DPA1*01:03-B1*104:01L HLA-DPA1 *01:02-B1*04:01L HLA-DRB1*16:01L HLA-DQA1*01:03-B1*06:01L HLA-DQ A1*02:01-B1*03:03L HLA-DRB1*15:03L
  source 1..10: note = Severe acute respiratory syndrome coronavirus 2
TLEPEYFNSV

SEQ ID NO: 9590 - protein, 10 aa, Severe acute respiratory syndrome-related coronavirus
  REGION 1..10: note = Table B: HLA-DQA1*03:02-B1*03:03L HLA-DQA1*05:01-B1*03:01L HLA-DRB1*13:02L HLA-DRB1*12:01L HLA-DQA1*03:01-B1*03:02L HLA-DRB1*16:01L HLA-DQA1*02:01-B1*03:03L HLA-DRB1*15:03L
  source 1..10: note = Severe acute respiratory syndrome coronavirus 2
RLMKTIGPDM

SEQ ID NO: 9591 - protein, 10 aa, Severe acute respiratory syndrome-related coronavirus
  REGION 1..10: note = Table B: HLA-DQA1*03:02-B1*03:03L HLA-DQA1*05:01-B1*03:01L HLA-DQA1*01:02-B1*06:02L HLA-DPA1*03:01-B1*04:02L HLA-DQA1*01-B1*05L HLA-DQA1*05:05-B1*03:19L HLA-DQA1*05:01-B1*02:01L HLA-DRB1*12:01L
  REGION 1..10: note = CONT. FROM ABOVE: HLA-DPA1*02:01-B1*13:01L HLA-DPA1*03:01-B1*105 :01L HLA-DRB1*16:01L HLA-DQA1*01:03-B1*06:01L HLA-DQA1*02:01-B1* 03:03L HLA-DRB1*15:03L
  source 1..10: note = Severe acute respiratory syndrome coronavirus 2
LMKTIGPDMF

SEQ ID NO: 9592 - protein, 10 aa, Severe acute respiratory syndrome-related coronavirus
  REGION 1..10: note = Table B: HLA-DQA1*03:02-B1*03:03H HLA-DQA1*05:01-B1*03:01L HLA-DRB1*13:03L HLA-DRB1*08:77L HLA-DRB1*11:02L HLA-DQA1*05:05-B1*03:19M HLA-DQA1*05:05-B1*03:116L HLA-DRB1*09:01M HLA-DPA1*01:03-B1*04:02L
  REGION 1..10: note = CONT. FROM ABOVE: HLA-DQA1*03:01-B1*03:02M HLA-DPA1*01:03-B1*104 :01L
  source 1..10: note = Severe acute respiratory syndrome coronavirus 2
AEIVDTVSAL

SEQ ID NO: 9593 - protein, 11 aa, Severe acute respiratory syndrome-related coronavirus
  REGION 1..11: note = Table B: HLA-DQA1*03:02-B1*03:03L HLA-DRB1*04:02L HLA-DRB1*14:01L HLA-DQA1*03:01-B1*03:02L HLA-DRB1*14:54L HLA-DRB1*14:17L HLA-DQA1*02:01-B1*03:03L
  source 1..11: note = Severe acute respiratory syndrome coronavirus 2
IVDTVSALVYD

SEQ ID NO: 9594 - protein, 11 aa, Severe acute respiratory syndrome-related coronavirus
  REGION 1..11: note = Table B: HLA-DQA1*03:02-B1*03:03L HLA-DRB1*04:03L HLA-DQA1*05:01-B1*02:01L HLA-DQA1*03:01-B1*03:02L HLA-DQA1*02:01-B1*03:03L
  source 1..11: note = Severe acute respiratory syndrome coronavirus 2
VDTVSALVYDN

SEQ ID NO: 9595 - protein, 11 aa, Severe acute respiratory syndrome-related coronavirus
  REGION 1..11: note = Table B: HLA-DQA1*03:02-B1*03:03L HLA-DQA1*01:01-B1*05:01L HLA-DQA1*05:05-B1*03:19L HLA-DQA1*05:01-B1*02:01L
  source 1..11: note = Severe acute respiratory syndrome coronavirus 2
DTVSALVYDNK

SEQ ID NO: 9596 - protein, 10 aa, Severe acute respiratory syndrome-related coronavirus
  REGION 1..10: note = Table B: HLA-DQA1*03:02-B1*03:03L HLA-DQA1*03:01-B1*03:02L HLA-DQA1*01:03-B1*06:01L HLA-DQA1*02:01-B1*03:03L
  source 1..10: note = Severe acute respiratory syndrome coronavirus 2
VSALVYDNKL

SEQ ID NO: 9597 - protein, 11 aa, Severe acute respiratory syndrome-related coronavirus
  REGION 1..11: note = Table B: HLA-DQA1*03:02-B1*03:03L HLA-DQA1*05:01-B1*03:01L HLA-DRB1*04:03L HLA-DRB1*01:03L HLA-DRB1*04:02L HLA-DQA1*01:02-B1*06:02L HLA-DRB1*01:02L HLA-DQA1*01-B1*05L HLA-DPA1*03:01-B1*105:01L HLA-DQA1*05:05-B1*03:01L
  REGION 1..11: note = CONT. FROM ABOVE: HLA-DRB1*16:01L HLA-DRB1*04:08L
  source 1..11: note = Severe acute respiratory syndrome coronavirus 2
FYKGVITHDVS

SEQ ID NO: 9598 - protein, 10 aa, Severe acute respiratory syndrome-related coronavirus
  REGION 1..10: note = Table B: HLA-DQA1*03:02-B1*03:03L HLA-DRB1*04:03L HLA-DRB1*13:03L HLA-DRB1*04:02L HLA-DQA1*01-B1*05L HLA-DQA1*03:01-B1*03:02L HLA-DRB1*16:01L HLA-DQA1*02:01-B1*03:03L
  source 1..10: note = Severe acute respiratory syndrome coronavirus 2
GVITHDVSSA

SEQ ID NO: 9599 - protein, 11 aa, Severe acute respiratory syndrome-related coronavirus
  REGION 1..11: note = Table B: HLA-DQA1*03:02-B1*03:03L HLA-DQA1*05:01-B1*03:01L HLA-DRB1*04:03L HLA-DRB1*13:02L HLA-DRB1*13:03L HLA-DRB1*01:03L HLA-DRB1*04:02L HLA-DRB1*04:05L HLA-DRB1*01:02L HLA-DRB4*03:01NL HLA-DRB1*08:04L HLA-DRB1*08:77L HLA-DRB3*02:01L
  REGION 1..11: note = CONT. FROM ABOVE: HLA-DPA1*01:03-B1*03:01L HLA-DPA1*03:01-B1*04: 02L HLA-DRB1*14:01L HLA-DRB1*11:03L HLA-DRB1*11:04L HLA-DRB1*14: 02L HLA-DQA1*01-B1*05L HLA-DQA1*05:01-B1*02:01L HLA-DRB1*04:10L HLA-DRB1*12:01L HLA-DRB1*12:02L HLA-DRB3*01:01L
  REGION 1..11: note = CONT. FROM ABOVE: HLA-DPA1*03:01-B1*105:01L HLA-DQA1*03:01-B1*03 :02L HLA-DRB1*14:54L HLA-DQA1*05:05-B1*03:01L HLA-DRB1*14:17L HL A-DPA1*01:02-B1*04:01L HLA-DRB1*16:01L HLA-DQA1*01:03-B1*06:01L HLA-DRB1*04:08L HLA-DQA1*02:01-B1*03:03L HLA-DRB1*15:03L
  source 1..11: note = Severe acute respiratory syndrome coronavirus 2
VITHDVSSAIN

SEQ ID NO: 9600 - protein, 10 aa, Severe acute respiratory syndrome-related coronavirus
  REGION 1..10: note = Table B: HLA-DQA1*03:02-B1*03:03L HLA-DQA1*05:01-B1*03:01L HLA-DRB1*04:03L HLA-DRB1*13:02L HLA-DRB1*13:03L HLA-DRB1*01:03L HLA-DRB1*04:02L HLA-DRB1*04:04L HLA-DRB1*04:05L HLA-DQA1*01:02-B1*06:02L HLA-DRB1*01:01L HLA-DRB1*01:02L
  REGION 1..10: note = CONT. FROM ABOVE: HLA-DRB4*03:01NL HLA-DRB1*08:77L HLA-DRB3*02:0 1L HLA-DPA1*01:03-B1*03:01L HLA-DRB1*14:01L HLA-DRB1*11:03L HLA- DRB1*11:04L HLA-DRB1*14:02L HLA-DQA1*01:01-B1*05:01L HLA-DRB1*08 :01L HLA-DRB1*11:01L HLA-DRB5*01:01L HLA-DQA1*01-B1*05L
  REGION 1..10: note = CONT. FROM ABOVE: HLA-DQA1*05:05-B1*03:19L HLA-DQA1*05:01-B1*02: 01L HLA-DRB1*04:10L HLA-DPA1*01:03-B1*04:02L HLA-DRB1*12:01L HLA -DRB1*12:02L HLA-DPA1*03:01-B1*105:01L HLA-DQA1*03:01-B1*03:02L HLA-DRB1*14:54L HLA-DQA1*05:05-B1*03:01L HLA-DRB1*14:17L
  REGION 1..10: note = CONT. FROM ABOVE: HLA-DPA1*01:02-B1*04:01L HLA-DRB1*10:01L HLA-D RB1*16:01L HLA-DQA1*01:03-B1*06:01L HLA-DRB1*04:08L HLA-DRB1*08: 03L HLA-DQA1*02:01-B1*03:03L HLA-DRB1*15:03L
  source 1..10: note = Severe acute respiratory syndrome coronavirus 2
DVSSAINRPQ

SEQ ID NO: 9601 - protein, 10 aa, Severe acute respiratory syndrome-related coronavirus
  REGION 1..10: note = Table B: HLA-DQA1*03:02-B1*03:03L HLA-DQA1*01:02-B1*06:02L HLA-DQA1*05:05-B1*03:19L HLA-DQA1*05:01-B1*02:01L HLA-DPA1*03:01-B1*105:01L HLA-DQA1*03:01-B1*03:02L HLA-DQA1*01:03-B1*06:01L HLA-DQA1*02:01-B1*03:03L
  source 1..10: note = Severe acute respiratory syndrome coronavirus 2
VSSAINRPQI

SEQ ID NO: 9602 - protein, 10 aa, Severe acute respiratory syndrome-related coronavirus
  REGION 1..10: note = Table B: HLA-DQA1*03:02-B1*03:03L HLA-DQA1*05:01-B1*03:01L HLA-DQA1*01:02-B1*06:02L HLA-DQA1*05:05-B1*03:19L HLA-DQA1*03:01-B1*03:02L HLA-DQA1*05:05-B1*03:01L HLA-DQA1*01:03-B1*06:01L HLA-DQA1*02:01-B1*03:03L
  source 1..10: note = Severe acute respiratory syndrome coronavirus 2
SSAINRPQIG

SEQ ID NO: 9603 - protein, 10 aa, Severe acute respiratory syndrome-related coronavirus
  REGION 1..10: note = Table B: HLA-DQA1*03:02-B1*03:03M HLA-DQA1*05:01-B1*03:01L HLA-DRB1*13:03L HLA-DQA1*01:02-B1*06:02L HLA-DRB1*01:02L HLA-DPA1*03:01-B1*04:02L HLA-DRB1*14:01L HLA-DRB1*14:02L HLA-DQA1*05:05-B1*03:19L HLA-DQA1*05:01-B1*02:01L
  REGION 1..10: note = CONT. FROM ABOVE: HLA-DPA1*01:03-B1*04:01L HLA-DQA1*05:05-B1*03: 116L HLA-DRB1*09:01L HLA-DPA1*02:01-B1*13:01L HLA-DPA1*03:01-B1* 105:01L HLA-DQA1*03:01-B1*03:02L HLA-DPA1*01:03-B1*104:01L HLA-D PA1*01:02-B1*04:01L HLA-DRB1*10:01L HLA-DRB1*16:01L
  REGION 1..10: note = CONT. FROM ABOVE: HLA-DQA1*01:03-B1*06:01L HLA-DRB1*08:03L HLA-D QA1*02:01-B1*03:03L HLA-DRB1*15:03L
  source 1..10: note = Severe acute respiratory syndrome coronavirus 2
SAINRPQIGV

SEQ ID NO: 9604 - protein, 10 aa, Severe acute respiratory syndrome-related coronavirus
  REGION 1..10: note = Table B: HLA-DQA1*03:02-B1*03:03L HLA-DQA1*05:01-B1*03:01M HLA-DRB1*13:03L HLA-DRB1*01:03L HLA-DQA1*01:02-B1*06:02L HLA-DRB4*03:01NL HLA-DRB1*08:77M HLA-DPA1*01:03-B1*03:01L HLA-DPA1*03:01-B1*04:02L HLA-DRB1*03:01L HLA-DRB1*11:02L
  REGION 1..10: note = CONT. FROM ABOVE: HLA-DRB1*14:02L HLA-DQA1*01-B1*05L HLA-DQA1*05 :05-B1*03:19M HLA-DQA1*05:01-B1*02:01L HLA-DRB4*01:01M HLA-DPA1* 01:03-B1*04:01M HLA-DQA1*05:05-B1*03:116L HLA-DPA1*01:03-B1*04:0 2L HLA-DPA1*02:01-B1*13:01L HLA-DQA1*03:01-B1*03:02L
  REGION 1..10: note = CONT. FROM ABOVE: HLA-DPA1*01:03-B1*104:01L HLA-DPA1*01:02-B1*04 :01L HLA-DRB1*10:01L HLA-DRB1*16:01L HLA-DQA1*01:03-B1*06:01L HL A-DRB1*08:02L HLA-DQA1*02:01-B1*03:03L HLA-DRB1*15:03L
  source 1..10: note = Severe acute respiratory syndrome coronavirus 2
REFLTRNPAW

SEQ ID NO: 9605 - protein, 14 aa, Severe acute respiratory syndrome-related coronavirus
  REGION 1..14: note = Table B: HLA-DQA1*03:02-B1*03:03L HLA-DRB1*04:03L HLA-DRB1*13:02L HLA-DRB1*13:03L HLA-DRB1*04:02L HLA-DRB1*04:04L HLA-DRB1*04:05L HLA-DRB1*08:04L HLA-DRB3*02:01L HLA-DPA1*01:03-B1*03:01L HLA-DPA1*03:01-B1*04:02L
  REGION 1..14: note = CONT. FROM ABOVE: HLA-DRB1*14:01L HLA-DRB1*11:04L HLA-DRB1*14:02 L HLA-DQA1*01:01-B1*05:01L HLA-DRB1*11:01L HLA-DQA1*01-B1*05L HL A-DPA1*01:03-B1*04:01L HLA-DPA1*01:03-B1*04:02L HLA-DRB3*01:01L HLA-DPA1*01:03-B1*02:01L HLA-DPA1*01:03-B1*104:01L
  REGION 1..14: note = CONT. FROM ABOVE: HLA-DQA1*05:05-B1*03:01L HLA-DRB1*07:01L HLA-D RB1*10:01L HLA-DRB1*08:02L HLA-DRB1*08:03L
  source 1..14: note = Severe acute respiratory syndrome coronavirus 2
NPAWRKAVFISPYN

SEQ ID NO: 9606 - protein, 12 aa, Severe acute respiratory syndrome-related coronavirus
  REGION 1..12: note = Table B: HLA-DQA1*03:02-B1*03:03L HLA-DQA1*05:01-B1*03:01L HLA-DRB1*01:03L HLA-DRB1*04:05L HLA-DQA1*01:02-B1*06:02L HLA-DRB1*01:02L HLA-DPA1*03:01-B1*04:02L HLA-DRB1*04:10L HLA-DRB1*12:01L HLA-DPA1*03:01-B1*105:01L HLA-DRB1*14:54L
  REGION 1..12: note = CONT. FROM ABOVE: HLA-DQA1*05:05-B1*03:01L HLA-DPA1*01:02-B1*04: 01L HLA-DRB1*16:01L HLA-DQA1*01:03-B1*06:01L HLA-DRB1*04:08L HLA -DRB1*15:03L
  source 1..12: note = Severe acute respiratory syndrome coronavirus 2
KAVFISPYNSQN

SEQ ID NO: 9607 - protein, 11 aa, Severe acute respiratory syndrome-related coronavirus
  REGION 1..11: note = Table B: HLA-DQA1*03:02-B1*03:03L HLA-DQA1*05:01-B1*03:01L HLA-DRB1*04:02L HLA-DRB1*01:02L HLA-DRB3*02:01L HLA-DPA1*03:01-B1*04:02L HLA-DQA1*05:05-B1*03:19L HLA-DQA1*05:01-B1*02:01L HLA-DRB1*12:01L
  REGION 1..11: note = CONT. FROM ABOVE: HLA-DPA1*02:01-B1*13:01L HLA-DPA1*03:01-B1*105 :01L HLA-DQA1*03:01-B1*03:02L HLA-DRB1*14:17L HLA-DQA1*01:03-B1* 06:01L HLA-DQA1*02:01-B1*03:03L HLA-DRB1*15:03L
  source 1..11: note = Severe acute respiratory syndrome coronavirus 2
FISPYNSQNAV

SEQ ID NO: 9608 - protein, 12 aa, Severe acute respiratory syndrome-related coronavirus
  REGION 1..12: note = Table B: HLA-DQA1*03:02-B1*03:03L HLA-DQA1*05:01-B1*03:01L HLA-DRB1*04:01L HLA-DRB1*13:02L HLA-DQA1*01:02-B1*06:02L HLA-DRB1*01:01L HLA-DRB1*08:04L HLA-DRB1*08:77L HLA-DRB3*02:01L HLA-DPA1*01:03-B1*03:01L HLA-DRB1*14:02L HLA-DRB1*08:01L
  REGION 1..12: note = CONT. FROM ABOVE: HLA-DRB5*01:01L HLA-DQA1*05:05-B1*03:19L HLA-D RB1*09:01L HLA-DRB1*12:02L HLA-DPA1*03:01-B1*105:01L HLA-DQA1*05 :05-B1*03:01L HLA-DRB1*07:01L HLA-DRB1*10:01L HLA-DRB1*08:03L
  source 1..12: note = Severe acute respiratory syndrome coronavirus 2
ISPYNSQNAVAS

SEQ ID NO: 9609 - protein, 12 aa, Severe acute respiratory syndrome-related coronavirus
  REGION 1..12: note = Table B: HLA-DQA1*03:02-B1*03:03L HLA-DRB1*04:01L HLA-DRB1*04:04L HLA-DQA1*01:02-B1*06:02L HLA-DRB1*08:04L HLA-DRB1*08:77L HLA-DRB3*02:01L HLA-DPA1*01:03-B1*03:01L HLA-DRB1*14:01L HLA-DRB1*11:03L HLA-DRB1*11:04L HLA-DRB1*14:02L
  REGION 1..12: note = CONT. FROM ABOVE: HLA-DRB1*08:01L HLA-DRB1*11:01L HLA-DRB5*01:01 L HLA-DQA1*05:05-B1*03:19L HLA-DQA1*05:01-B1*02:01L HLA-DRB1*04: 10L HLA-DRB1*09:01L HLA-DRB1*12:02L HLA-DPA1*03:01-B1*105:01L HL A-DRB1*07:01L HLA-DRB1*08:03L HLA-DRB1*15:03L
  source 1..12: note = Severe acute respiratory syndrome coronavirus 2
SPYNSQNAVASK

SEQ ID NO: 9610 - protein, 10 aa, Severe acute respiratory syndrome-related coronavirus
  REGION 1..10: note = Table B: HLA-DQA1*03:02-B1*03:03L HLA-DQA1*01:02-B1*06:02L HLA-DQA1*05:05-B1*03:19L HLA-DPA1*03:01-B1*105:01L HLA-DQA1*03:01-B1*03:02L HLA-DRB1*16:01L HLA-DQA1*01:03-B1*06:01L HLA-DQA1*02:01-B1*03:03L
  REGION 1..10: note = CONT. FROM ABOVE: HLA-DRB1*15:03L
  source 1..10: note = Severe acute respiratory syndrome coronavirus 2
NSQNAVASKI

SEQ ID NO: 9611 - protein, 10 aa, Severe acute respiratory syndrome-related coronavirus
  REGION 1..10: note = Table B: HLA-DQA1*03:02-B1*03:03L HLA-DQA1*03:01-B1*03:02L HLA-DQA1*01:03-B1*06:01L HLA-DQA1*02:01-B1*03:03L
  source 1..10: note = Severe acute respiratory syndrome coronavirus 2
SQNAVASKIL

SEQ ID NO: 9612 - protein, 12 aa, Severe acute respiratory syndrome-related coronavirus
  REGION 1..12: note = Table B: HLA-DQA1*03:02-B1*03:03L HLA-DRB1*04:02L HLA-DQA1*05:05-B1*03:19L HLA-DQA1*05:01-B1*02:01L HLA-DQA1*05:05-B1*03:01L HLA-DRB1*16:01L
  source 1..12: note = Severe acute respiratory syndrome coronavirus 2
NAVASKILGLPT

SEQ ID NO: 9613 - protein, 12 aa, Severe acute respiratory syndrome-related coronavirus
  REGION 1..12: note = Table B: HLA-DQA1*03:02-B1*03:03L HLA-DRB1*04:02L HLA-DPA1*03:01-B1*04:02L HLA-DQA1*05:05-B1*03:19L HLA-DPA1*01:03-B1*04:02L HLA-DQA1*05:05-B1*03:01L
  source 1..12: note = Severe acute respiratory syndrome coronavirus 2
AVASKILGLPTQ

SEQ ID NO: 9614 - protein, 10 aa, Severe acute respiratory syndrome-related coronavirus
  REGION 1..10: note = Table B: HLA-DQA1*03:02-B1*03:03M HLA-DQA1*05:01-B1*03:01L HLA-DQA1*01:02-B1*06:02L HLA-DRB1*01:02L HLA-DPA1*03:01-B1*04:02L HLA-DRB1*14:01L HLA-DRB1*14:02L HLA-DQA1*05:05-B1*03:19L HLA-DQA1*05:05-B1*03:116L
  REGION 1..10: note = CONT. FROM ABOVE: HLA-DRB1*09:01L HLA-DPA1*02:01-B1*13:01L HLA-D PA1*03:01-B1*105:01L HLA-DQA1*03:01-B1*03:02L HLA-DPA1*01:03-B1* 104:01L HLA-DPA1*01:02-B1*04:01L HLA-DRB1*10:01L HLA-DRB1*16:01L HLA-DQA1*01:03-B1*06:01L HLA-DRB1*08:03L
  REGION 1..10: note = CONT. FROM ABOVE: HLA-DQA1*02:01-B1*03:03L HLA-DRB1*15:03L
  source 1..10: note = Severe acute respiratory syndrome coronavirus 2
KILGLPTQTV

SEQ ID NO: 9615 - protein, 10 aa, Severe acute respiratory syndrome-related coronavirus
  REGION 1..10: note = Table B: HLA-DQA1*03:02-B1*03:03L HLA-DQA1*05:01-B1*03:01L HLA-DRB1*04:03L HLA-DRB1*13:03L HLA-DRB1*01:03L HLA-DRB1*04:02L HLA-DRB1*04:05L HLA-DQA1*01:02-B1*06:02L HLA-DRB1*01:02L HLA-DRB4*03:01NL HLA-DRB1*14:01L HLA-DQA1*01-B1*05L
  REGION 1..10: note = CONT. FROM ABOVE: HLA-DQA1*05:05-B1*03:19L HLA-DQA1*05:01-B1*02: 01L HLA-DRB1*04:10L HLA-DRB1*12:01L HLA-DPA1*03:01-B1*105:01L HL A-DQA1*03:01-B1*03:02L HLA-DRB1*14:54L HLA-DQA1*05:05-B1*03:01L HLA-DRB1*14:17L HLA-DRB1*16:01L HLA-DQA1*01:03-B1*06:01L
  REGION 1..10: note = CONT. FROM ABOVE: HLA-DQA1*02:01-B1*03:03L HLA-DRB1*15:03L
  source 1..10: note = Severe acute respiratory syndrome coronavirus 2
ILGLPTQTVD

SEQ ID NO: 9616 - protein, 12 aa, Severe acute respiratory syndrome-related coronavirus
  REGION 1..12: note = Table B: HLA-DQA1*03:02-B1*03:03L HLA-DRB1*13:03L HLA-DRB1*04:02L HLA-DRB1*04:05L HLA-DRB4*03:01NL HLA-DRB1*04:10L HLA-DRB1*14:54L HLA-DRB1*16:01L HLA-DQA1*02:01-B1*03:03L
  source 1..12: note = Severe acute respiratory syndrome coronavirus 2
GLPTQTVDSSQG

SEQ ID NO: 9617 - protein, 13 aa, Severe acute respiratory syndrome-related coronavirus
  REGION 1..13: note = Table B: HLA-DQA1*03:02-B1*03:03L HLA-DQA1*05:01-B1*03:01L HLA-DRB1*13:03L HLA-DRB1*04:02L HLA-DRB1*04:05L HLA-DRB4*03:01NL HLA-DQA1*01:01-B1*05:01L HLA-DQA1*05:05-B1*03:01L HLA-DRB1*16:01L HLA-DQA1*02:01-B1*03:03L
  source 1..13: note = Severe acute respiratory syndrome coronavirus 2
LPTQTVDSSQGSE

SEQ ID NO: 9618 - protein, 12 aa, Severe acute respiratory syndrome-related coronavirus
  REGION 1..12: note = Table B: HLA-DQA1*03:02-B1*03:03L
  source 1..12: note = Severe acute respiratory syndrome coronavirus 2
QTVDSSQGSEYD

SEQ ID NO: 9619 - protein, 14 aa, Severe acute respiratory syndrome-related coronavirus
  REGION 1..14: note = Table B: HLA-DQA1*03:02-B1*03:03L
  source 1..14: note = Severe acute respiratory syndrome coronavirus 2
TVDSSQGSEYDYVI

SEQ ID NO: 9620 - protein, 11 aa, Severe acute respiratory syndrome-related coronavirus
  REGION 1..11: note = Table B: HLA-DQA1*03:02-B1*03:03L HLA-DPA1*03:01-B1*04:02L HLA-DPA1*01:02-B1*04:01L
  source 1..11: note = Severe acute respiratory syndrome coronavirus 2
SEYDYVIFTQT

SEQ ID NO: 9621 - protein, 12 aa, Severe acute respiratory syndrome-related coronavirus
  REGION 1..12: note = Table B: HLA-DQA1*03:02-B1*03:03L HLA-DRB1*01:03L HLA-DRB1*04:05L HLA-DQA1*01:02-B1*06:02L HLA-DPA1*03:01-B1*04:02L HLA-DQA1*05:01-B1*02:01L HLA-DPA1*01:03-B1*04:01L HLA-DPA1*01:03-B1*04:02L
  REGION 1..12: note = CONT. FROM ABOVE: HLA-DRB1*12:01L HLA-DPA1*03:01-B1*105:01L HLA- DPA1*01:02-B1*04:01L HLA-DRB1*16:01L HLA-DQA1*01:03-B1*06:01L HL A-DRB1*04:08L HLA-DQA1*02:01-B1*03:03L HLA-DRB1*15:03L
  source 1..12: note = Severe acute respiratory syndrome coronavirus 2
YDYVIFTQTTET

SEQ ID NO: 9622 - protein, 12 aa, Severe acute respiratory syndrome-related coronavirus
  REGION 1..12: note = Table B: HLA-DQA1*03:02-B1*03:03L HLA-DRB1*04:02L HLA-DRB1*04:05L HLA-DQA1*05:01-B1*02:01L HLA-DRB1*04:10L HLA-DRB1*16:01L HLA-DQA1*02:01-B1*03:03L
  source 1..12: note = Severe acute respiratory syndrome coronavirus 2
DYVIFTQTTETA

SEQ ID NO: 9623 - protein, 11 aa, Severe acute respiratory syndrome-related coronavirus
  REGION 1..11: note = Table B: HLA-DQA1*03:02-B1*03:03L HLA-DQA1*05:01-B1*03:01L HLA-DRB1*04:01L HLA-DRB1*13:02L HLA-DRB1*04:04L HLA-DQA1*01:02-B1*06:02L HLA-DRB1*01:02L HLA-DRB1*08:77L HLA-DPA1*01:03-B1*03:01L HLA-DRB1*14:01L HLA-DRB1*11:03L
  REGION 1..11: note = CONT. FROM ABOVE: HLA-DRB1*11:04L HLA-DRB1*14:02L HLA-DQA1*01:01 -B1*05:01L HLA-DRB5*01:01L HLA-DQA1*05:05-B1*03:19L HLA-DRB1*12: 02L HLA-DPA1*03:01-B1*105:01L HLA-DQA1*05:05-B1*03:01L HLA-DRB1* 10:01L HLA-DQA1*01:03-B1*06:01L HLA-DRB1*08:03L HLA-DRB1*15:03L
  source 1..11: note = Severe acute respiratory syndrome coronavirus 2
VIFTQTTETAH

SEQ ID NO: 9624 - protein, 10 aa, Severe acute respiratory syndrome-related coronavirus
  REGION 1..10: note = Table B: HLA-DQA1*03:02-B1*03:03L HLA-DRB1*04:03L HLA-DRB1*13:03L HLA-DRB1*01:03L HLA-DRB1*04:02L HLA-DRB1*04:05L HLA-DRB4*03:01NL HLA-DQA1*01-B1*05L HLA-DQA1*05:01-B1*02:01L HLA-DRB1*04:10L HLA-DRB1*12:01L HLA-DQA1*03:01-B1*03:02L
  REGION 1..10: note = CONT. FROM ABOVE: HLA-DRB1*14:54L HLA-DRB1*14:17L HLA-DRB1*16:01 L HLA-DQA1*02:01-B1*03:03L
  source 1..10: note = Severe acute respiratory syndrome coronavirus 2
FTQTTETAHS

SEQ ID NO: 9625 - protein, 11 aa, Severe acute respiratory syndrome-related coronavirus
  REGION 1..11: note = Table B: HLA-DQA1*03:02-B1*03:03L HLA-DQA1*05:01-B1*03:01L HLA-DQA1*01:02-B1*06:02L HLA-DQA1*05:05-B1*03:19L HLA-DPA1*03:01-B1*105:01L HLA-DQA1*03:01-B1*03:02L HLA-DQA1*05:05-B1*03:01L HLA-DQA1*02:01-B1*03:03L
  source 1..11: note = Severe acute respiratory syndrome coronavirus 2
TTETAHSCNVN

SEQ ID NO: 9626 - protein, 13 aa, Severe acute respiratory syndrome-related coronavirus
  REGION 1..13: note = Table B: HLA-DQA1*03:02-B1*03:03L HLA-DRB1*01:02L HLA-DRB1*04:08L HLA-DRB1*15:03L
  source 1..13: note = Severe acute respiratory syndrome coronavirus 2
TETAHSCNVNRFN

SEQ ID NO: 9627 - protein, 10 aa, Severe acute respiratory syndrome-related coronavirus
  REGION 1..10: note = Table B: HLA-DQA1*03:02-B1*03:03L HLA-DQA1*05:01-B1*03:01L HLA-DRB1*04:03L HLA-DRB1*13:03L HLA-DRB1*01:03L HLA-DRB1*04:02L HLA-DQA1*01:02-B1*06:02L HLA-DRB4*03:01NL HLA-DRB1*14:01L HLA-DQA1*03:01-B1*03:02L HLA-DRB1*14:17L
  REGION 1..10: note = CONT. FROM ABOVE: HLA-DPA1*01:02-B1*04:01L HLA-DRB1*16:01L HLA-D QA1*01:03-B1*06:01L HLA-DQA1*02:01-B1*03:03L
  source 1..10: note = Severe acute respiratory syndrome coronavirus 2
NVAITRAKVG

SEQ ID NO: 9628 - protein, 11 aa, Severe acute respiratory syndrome-related coronavirus
  REGION 1..11: note = Table B: HLA-DQA1*03:02-B1*03:03L HLA-DQA1*05:01-B1*03:01L HLA-DRB1*04:03L HLA-DRB1*01:03L HLA-DRB1*04:02L HLA-DRB1*01:02L HLA-DRB1*14:01L HLA-DQA1*05:01-B1*02:01L HLA-DRB1*12:01L HLA-DPA1*03:01-B1*105:01L HLA-DQA1*03:01-B1*03:02L
  REGION 1..11: note = CONT. FROM ABOVE: HLA-DQA1*05:05-B1*03:01L HLA-DRB1*14:17L HLA-D PA1*01:02-B1*04:01L HLA-DRB1*15:03L
  source 1..11: note = Severe acute respiratory syndrome coronavirus 2
VAITRAKVGIL

SEQ ID NO: 9629 - protein, 10 aa, Severe acute respiratory syndrome-related coronavirus
  REGION 1..10: note = Table B: HLA-DQA1*03:02-B1*03:03L HLA-DQA1*05:05-B1*03:19L HLA-DQA1*03:01-B1*03:02L
  source 1..10: note = Severe acute respiratory syndrome coronavirus 2
MSDRDLYDKL

SEQ ID NO: 9630 - protein, 10 aa, Severe acute respiratory syndrome-related coronavirus
  REGION 1..10: note = Table B: HLA-DQA1*03:02-B1*03:03L HLA-DQA1*05:01-B1*03:01L HLA-DQA1*01:02-B1*06:02L HLA-DPA1*03:01-B1*04:02L HLA-DRB1*14:02L HLA-DQA1*01-B1*05L HLA-DQA1*05:05-B1*03:19L HLA-DQA1*05:01-B1*02:01L HLA-DQA1*05:05-B1*03:116L
  REGION 1..10: note = CONT. FROM ABOVE: HLA-DPA1*02:01-B1*13:01L HLA-DPA1*03:01-B1*105 :01L HLA-DQA1*03:01-B1*03:02L HLA-DPA1*01:03-B1*104:01L HLA-DPA1 *01:02-B1*04:01L HLA-DRB1*16:01L HLA-DQA1*01:03-B1*06:01L HLA-DQ A1*02:01-B1*03:03L HLA-DRB1*15:03L
  source 1..10: note = Severe acute respiratory syndrome coronavirus 2
LYDKLQFTSL

SEQ ID NO: 9631 - protein, 13 aa, Severe acute respiratory syndrome-related coronavirus
  REGION 1..13: note = Table B: HLA-DQA1*03:02-B1*03:03L HLA-DQA1*05:01-B1*03:01L HLA-DRB1*13:03L HLA-DRB1*01:02L HLA-DPA1*03:01-B1*04:02L HLA-DQA1*05:01-B1*02:01L HLA-DRB1*04:10L HLA-DPA1*02:01-B1*13:01L HLA-DRB1*15:03L
  source 1..13: note = Severe acute respiratory syndrome coronavirus 2
YDKLQFTSLEIPR

SEQ ID NO: 9632 - protein, 12 aa, Severe acute respiratory syndrome-related coronavirus
  REGION 1..12: note = Table B: HLA-DQA1*03:02-B1*03:03L HLA-DRB1*13:02L HLA-DRB1*01:03L HLA-DRB1*04:04L HLA-DRB1*04:05L HLA-DRB3*02:01L HLA-DPA1*03:01-B1*04:02L HLA-DRB1*14:01L HLA-DRB1*08:01L HLA-DQA1*05:05-B1*03:19L HLA-DQA1*05:01-B1*02:01L
  REGION 1..12: note = CONT. FROM ABOVE: HLA-DPA1*01:03-B1*04:02L HLA-DRB1*12:01L HLA-D PA1*02:01-B1*13:01L HLA-DQA1*05:05-B1*03:01L HLA-DRB1*04:08L HLA -DRB1*15:03L
  source 1..12: note = Severe acute respiratory syndrome coronavirus 2
LQFTSLEIPRRN

SEQ ID NO: 9633 - protein, 11 aa, Severe acute respiratory syndrome-related coronavirus
  REGION 1..11: note = Table B: HLA-DQA1*03:02-B1*03:03L
  source 1..11: note = Severe acute respiratory syndrome coronavirus 2
LEIPRRNVATL

SEQ ID NO: 9634 - protein, 13 aa, Severe acute respiratory syndrome-related coronavirus
  REGION 1..13: note = Table B: HLA-DQA1*03:02-B1*03:03L HLA-DQA1*05:01-B1*03:01L HLA-DRB1*13:02L HLA-DRB1*13:03L HLA-DRB1*01:03L HLA-DRB1*04:04L HLA-DRB1*04:05L HLA-DQA1*01:02-B1*06:02L HLA-DRB1*01:02L HLA-DPA1*01:03-B1*03:01L HLA-DQA1*01:01-B1*05:01L
  REGION 1..13: note = CONT. FROM ABOVE: HLA-DRB1*08:01L HLA-DQA1*05:05-B1*03:19L HLA-D QA1*05:01-B1*02:01L HLA-DRB1*04:10L HLA-DRB1*12:01L HLA-DPA1*02: 01-B1*13:01L HLA-DPA1*03:01-B1*105:01L HLA-DPA1*01:03-B1*104:01L HLA-DQA1*05:05-B1*03:01L HLA-DRB1*07:01L HLA-DRB1*16:01L
  REGION 1..13: note = CONT. FROM ABOVE: HLA-DQA1*01:03-B1*06:01L HLA-DRB1*04:08L HLA-D RB1*15:03L
  source 1..13: note = Severe acute respiratory syndrome coronavirus 2
IPRRNVATLQAEN

SEQ ID NO: 9635 - protein, 11 aa, Severe acute respiratory syndrome-related coronavirus
  REGION 1..11: note = Table B: HLA-DQA1*03:02-B1*03:03L HLA-DQA1*05:01-B1*03:01L HLA-DQA1*01:02-B1*06:02L HLA-DRB1*01:02L HLA-DPA1*03:01-B1*105:01L HLA-DQA1*05:05-B1*03:01L HLA-DRB1*14:17L HLA-DRB1*16:01L HLA-DRB1*15:03L
  source 1..11: note = Severe acute respiratory syndrome coronavirus 2
NVATLQAENVT

SEQ ID NO: 9636 - protein, 11 aa, Severe acute respiratory syndrome-related coronavirus
  REGION 1..11: note = Table B: HLA-DQA1*03:02-B1*03:03L HLA-DQA1*05:01-B1*03:01L HLA-DRB1*13:03L HLA-DRB1*01:03L HLA-DRB1*04:02L HLA-DRB1*04:05L HLA-DRB1*01:02L HLA-DRB4*03:01NL HLA-DQA1*05:05-B1*03:19L HLA-DRB1*04:10L HLA-DRB1*14:54L HLA-DQA1*05:05-B1*03:01L
  REGION 1..11: note = CONT. FROM ABOVE: HLA-DRB1*10:01L HLA-DRB1*16:01L HLA-DRB1*04:08 L HLA-DRB1*15:03L
  source 1..11: note = Severe acute respiratory syndrome coronavirus 2
VATLQAENVTG

SEQ ID NO: 9637 - protein, 10 aa, Severe acute respiratory syndrome-related coronavirus
  REGION 1..10: note = Table B: HLA-DQA1*03:02-B1*03:03M HLA-DQA1*05:01-B1*03:01L HLA-DRB1*13:03L HLA-DQA1*01:02-B1*06:02L HLA-DPA1*03:01-B1*04:02L HLA-DRB1*14:01L HLA-DRB1*14:02L HLA-DQA1*05:05-B1*03:19L HLA-DQA1*05:01-B1*02:01L
  REGION 1..10: note = CONT. FROM ABOVE: HLA-DQA1*05:05-B1*03:116L HLA-DRB1*09:01L HLA- DPA1*03:01-B1*105:01L HLA-DQA1*03:01-B1*03:02L HLA-DPA1*01:02-B1 *04:01L HLA-DRB1*16:01L HLA-DQA1*02:01-B1*03:03L HLA-DRB1*15:03L
  source 1..10: note = Severe acute respiratory syndrome coronavirus 2
TLQAENVTGL

SEQ ID NO: 9638 - protein, 10 aa, Severe acute respiratory syndrome-related coronavirus
  REGION 1..10: note = Table B: HLA-DQA1*03:02-B1*03:03L HLA-DQA1*05:05-B1*03:19L HLA-DQA1*03:01-B1*03:02L HLA-DQA1*02:01-B1*03:03L
  source 1..10: note = Severe acute respiratory syndrome coronavirus 2
AENVTGLFKD

SEQ ID NO: 9639 - protein, 12 aa, Severe acute respiratory syndrome-related coronavirus
  REGION 1..12: note = Table B: HLA-DQA1*03:02-B1*03:03L HLA-DRB1*04:01L HLA-DRB1*13:02L HLA-DRB1*13:03L HLA-DRB1*01:03L HLA-DRB1*04:04L HLA-DRB1*04:05L HLA-DRB1*01:01L HLA-DRB1*08:04L HLA-DRB1*08:77L HLA-DPA1*01:03-B1*03:01L HLA-DRB1*14:01L HLA-DRB1*11:03L
  REGION 1..12: note = CONT. FROM ABOVE: HLA-DRB1*11:04L HLA-DRB1*14:02L HLA-DQA1*01-B1 *05L HLA-DQA1*05:05-B1*03:19L HLA-DQA1*05:01-B1*02:01L HLA-DRB1* 04:10L HLA-DRB1*12:01L HLA-DRB1*12:02L HLA-DPA1*03:01-B1*105:01L HLA-DRB1*14:54L HLA-DRB1*10:01L HLA-DRB1*16:01L HLA-DRB1*04:08L
  REGION 1..12: note = CONT. FROM ABOVE: HLA-DRB1*15:03L
  source 1..12: note = Severe acute respiratory syndrome coronavirus 2
VITGLHPTQAPT

SEQ ID NO: 9640 - protein, 12 aa, Severe acute respiratory syndrome-related coronavirus
  REGION 1..12: note = Table B: HLA-DQA1*03:02-B1*03:03L HLA-DRB1*04:05L HLA-DQA1*01:02-B1*06:02L HLA-DPA1*01:03-B1*03:01L HLA-DQA1*05:05-B1*03:19L HLA-DRB1*12:01L HLA-DPA1*03:01-B1*105:01L HLA-DQA1*01:03-B1*06:01L
  REGION 1..12: note = CONT. FROM ABOVE: HLA-DRB1*04:08L HLA-DRB1*15:03L
  source 1..12: note = Severe acute respiratory syndrome coronavirus 2
ITGLHPTQAPTH

SEQ ID NO: 9641 - protein, 10 aa, Severe acute respiratory syndrome-related coronavirus
  REGION 1..10: note = Table B: HLA-DQA1*03:02-B1*03:03L HLA-DQA1*05:01-B1*03:01L HLA-DRB1*13:03L HLA-DRB1*04:02L HLA-DRB1*14:01L HLA-DRB1*08:01L HLA-DQA1*01-B1*05L HLA-DQA1*05:01-B1*02:01L HLA-DQA1*03:01-B1*03:02L HLA-DPA1*01:02-B1*04:01L
  REGION 1..10: note = CONT. FROM ABOVE: HLA-DRB1*16:01L HLA-DQA1*02:01-B1*03:03L
  source 1..10: note = Severe acute respiratory syndrome coronavirus 2
LHPTQAPTHL

SEQ ID NO: 9642 - protein, 13 aa, Severe acute respiratory syndrome-related coronavirus
  REGION 1..13: note = Table B: HLA-DQA1*03:02-B1*03:03L
  source 1..13: note = Severe acute respiratory syndrome coronavirus 2
HPTQAPTHLSVDT

SEQ ID NO: 9643 - protein, 15 aa, Severe acute respiratory syndrome-related coronavirus
  REGION 1..15: note = Table B: HLA-DQA1*03:02-B1*03:03L HLA-DRB1*14:04L HLA-DRB1*04:01L HLA-DRB1*01:01L HLA-DRB1*11:02L HLA-DRB5*01:01L HLA-DQA1*01-B1*05L HLA-DQA1*05:05-B1*03:19L HLA-DRB4*02:01NL HLA-DRB4*01:01L HLA-DPA1*01:03-B1*04:01L
  REGION 1..15: note = CONT. FROM ABOVE: HLA-DQA1*05:05-B1*03:116L HLA-DRB1*09:01L HLA- DPA1*01:03-B1*04:02L HLA-DPA1*01:03-B1*02:01L HLA-DPA1*01:03-B1* 104:01L HLA-DQA1*05:05-B1*03:01L HLA-DRB1*07:01L HLA-DQA1*01:03- B1*06:01L HLA-DRB1*08:02L HLA-DRB1*15:01L
  source 1..15: note = Severe acute respiratory syndrome coronavirus 2
APTHLSVDTKFKTEG

SEQ ID NO: 9644 - protein, 10 aa, Severe acute respiratory syndrome-related coronavirus
  REGION 1..10: note = Table B: HLA-DQA1*03:02-B1*03:03L HLA-DQA1*01-B1*05L HLA-DQA1*05:05-B1*03:19L HLA-DQA1*05:01-B1*02:01L HLA-DQA1*03:01-B1*03:02L HLA-DRB1*16:01L
  source 1..10: note = Severe acute respiratory syndrome coronavirus 2
VDTKFKTEGL

SEQ ID NO: 9645 - protein, 15 aa, Severe acute respiratory syndrome-related coronavirus
  REGION 1..15: note = Table B: HLA-DQA1*03:02-B1*03:03L HLA-DQA1*05:01-B1*03:01L HLA-DRB1*04:03L HLA-DRB1*13:02L HLA-DRB1*13:03L HLA-DRB1*04:04L HLA-DRB1*08:04L HLA-DRB1*14:01L HLA-DRB1*14:02L HLA-DQA1*01-B1*05L HLA-DQA1*05:01-B1*02:01L
  REGION 1..15: note = CONT. FROM ABOVE: HLA-DQA1*03:01-B1*03:02L HLA-DPA1*01:03-B1*104 :01L HLA-DQA1*05:05-B1*03:01L HLA-DRB1*10:01L HLA-DRB1*08:03L
  source 1..15: note = Severe acute respiratory syndrome coronavirus 2
DTKFKTEGLCVDIPG

SEQ ID NO: 9646 - protein, 10 aa, Severe acute respiratory syndrome-related coronavirus
  REGION 1..10: note = Table B: HLA-DQA1*03:02-B1*03:03L HLA-DQA1*05:01-B1*02:01L HLA-DQA1*03:01-B1*03:02L
  source 1..10: note = Severe acute respiratory syndrome coronavirus 2
VDIPGIPKDM

SEQ ID NO: 9647 - protein, 10 aa, Severe acute respiratory syndrome-related coronavirus
  REGION 1..10: note = Table B: HLA-DQA1*03:02-B1*03:03L HLA-DRB1*04:03L HLA-DRB1*04:02L HLA-DQA1*01-B1*05L HLA-DQA1*05:01-B1*02:01L HLA-DQA1*03:01-B1*03:02L HLA-DRB1*14:17L HLA-DQA1*02:01-B1*03:03L
  source 1..10: note = Severe acute respiratory syndrome coronavirus 2
MNYQVNGYPN

SEQ ID NO: 9648 - protein, 10 aa, Severe acute respiratory syndrome-related coronavirus
  REGION 1..10: note = Table B: HLA-DQA1*03:02-B1*03:03L HLA-DQA1*05:01-B1*03:01L HLA-DRB1*04:03L HLA-DPA1*03:01-B1*04:02L HLA-DQA1*01-B1*05L HLA-DQA1*05:05-B1*03:19L HLA-DQA1*05:01-B1*02:01L HLA-DRB1*12:01L HLA-DPA1*02:01-B1*13:01L
  REGION 1..10: note = CONT. FROM ABOVE: HLA-DPA1*03:01-B1*105:01L HLA-DQA1*03:01-B1*03 :02L HLA-DPA1*01:02-B1*04:01L HLA-DRB1*16:01L HLA-DQA1*01:03-B1* 06:01L HLA-DQA1*02:01-B1*03:03L HLA-DRB1*15:03L
  source 1..10: note = Severe acute respiratory syndrome coronavirus 2
NYQVNGYPNM

SEQ ID NO: 9649 - protein, 10 aa, Severe acute respiratory syndrome-related coronavirus
  REGION 1..10: note = Table B: HLA-DQA1*03:02-B1*03:03L HLA-DQA1*05:01-B1*03:01L HLA-DRB1*04:03L HLA-DRB1*13:03L HLA-DRB1*01:03L HLA-DRB1*04:05L HLA-DQA1*01:02-B1*06:02L HLA-DRB1*01:01L HLA-DRB1*08:77L HLA-DPA1*01:03-B1*03:01L HLA-DPA1*03:01-B1*04:02L
  REGION 1..10: note = CONT. FROM ABOVE: HLA-DRB1*03:01L HLA-DRB1*14:01L HLA-DRB1*14:02 L HLA-DQA1*01:01-B1*05:01L HLA-DQA1*01-B1*05L HLA-DQA1*05:05-B1* 03:19L HLA-DQA1*05:01-B1*02:01L HLA-DRB4*01:01L HLA-DPA1*01:03-B 1*04:01L HLA-DQA1*05:05-B1*03:116L HLA-DPA1*01:03-B1*04:02L
  REGION 1..10: note = CONT. FROM ABOVE: HLA-DRB1*12:01L HLA-DPA1*02:01-B1*13:01M HLA-D PA1*03:01-B1*105:01L HLA-DQA1*03:01-B1*03:02L HLA-DPA1*01:03-B1* 104:01L HLA-DQA1*05:05-B1*03:01L HLA-DPA1*01:02-B1*04:01L HLA-DR B1*10:01L HLA-DRB1*16:01L HLA-DQA1*01:03-B1*06:01L
  REGION 1..10: note = CONT. FROM ABOVE: HLA-DQA1*02:01-B1*03:03L HLA-DRB1*15:03L
  source 1..10: note = Severe acute respiratory syndrome coronavirus 2
YQVNGYPNMF

SEQ ID NO: 9650 - protein, 10 aa, Severe acute respiratory syndrome-related coronavirus
  REGION 1..10: note = Table B: HLA-DQA1*03:02-B1*03:03L HLA-DQA1*05:05-B1*03:19L HLA-DPA1*02:01-B1*13:01L HLA-DPA1*01:03-B1*104:01L
  source 1..10: note = Severe acute respiratory syndrome coronavirus 2
QVNGYPNMFI

SEQ ID NO: 9651 - protein, 13 aa, Severe acute respiratory syndrome-related coronavirus
  REGION 1..13: note = Table B: HLA-DQA1*03:02-B1*03:03L HLA-DQA1*05:01-B1*03:01L HLA-DRB1*04:05L HLA-DQA1*05:01-B1*02:01L HLA-DPA1*02:01-B1*13:01L HLA-DPA1*03:01-B1*105:01L HLA-DPA1*01:02-B1*04:01L
  source 1..13: note = Severe acute respiratory syndrome coronavirus 2
VNGYPNMFITREE

SEQ ID NO: 9652 - protein, 11 aa, Severe acute respiratory syndrome-related coronavirus
  REGION 1..11: note = Table B: HLA-DQA1*03:02-B1*03:03L HLA-DQA1*01-B1*05L
  source 1..11: note = Severe acute respiratory syndrome coronavirus 2
YPNMFITREEA

SEQ ID NO: 9653 - protein, 10 aa, Severe acute respiratory syndrome-related coronavirus
  REGION 1..10: note = Table B: HLA-DQA1*03:02-B1*03:03L HLA-DQA1*05:01-B1*03:01M HLA-DQA1*01:02-B1*06:02L HLA-DRB4*03:01NL HLA-DRB1*08:77L HLA-DPA1*01:03-B1*03:01L HLA-DPA1*03:01-B1*04:02L HLA-DRB1*03:01L HLA-DQA1*01-B1*05L HLA-DQA1*05:05-B1*03:19L
  REGION 1..10: note = CONT. FROM ABOVE: HLA-DQA1*05:01-B1*02:01L HLA-DRB4*01:01M HLA-D PA1*01:03-B1*04:01M HLA-DQA1*05:05-B1*03:116L HLA-DPA1*01:03-B1* 04:02L HLA-DRB1*12:01L HLA-DQA1*03:01-B1*03:02L HLA-DPA1*01:03-B 1*104:01L HLA-DPA1*01:02-B1*04:01L HLA-DRB1*10:01L
  REGION 1..10: note = CONT. FROM ABOVE: HLA-DRB1*16:01L HLA-DQA1*02:01-B1*03:03L HLA-D RB1*15:03L
  source 1..10: note = Severe acute respiratory syndrome coronavirus 2
EEAIRHVRAW

SEQ ID NO: 9654 - protein, 15 aa, Severe acute respiratory syndrome-related coronavirus
  REGION 1..15: note = Table B: HLA-DQA1*03:02-B1*03:03L HLA-DPA1*01:03-B1*04:02L HLA-DPA1*01:03-B1*104:01L HLA-DRB1*07:01L
  source 1..15: note = Severe acute respiratory syndrome coronavirus 2
EAIRHVRAWIGFDVE

SEQ ID NO: 9655 - protein, 14 aa, Severe acute respiratory syndrome-related coronavirus
  REGION 1..14: note = Table B: HLA-DQA1*03:02-B1*03:03L HLA-DQA1*05:01-B1*03:01L HLA-DRB1*13:03L HLA-DRB1*01:01L HLA-DRB3*02:01L HLA-DRB1*11:02L HLA-DRB1*11:04L HLA-DQA1*05:01-B1*02:01L HLA-DRB3*01:01L HLA-DPA1*01:03-B1*104:01L HLA-DQA1*05:05-B1*03:01L
  source 1..14: note = Severe acute respiratory syndrome coronavirus 2
IRHVRAWIGFDVEG

SEQ ID NO: 9656 - protein, 12 aa, Severe acute respiratory syndrome-related coronavirus
  REGION 1..12: note = Table B: HLA-DQA1*03:02-B1*03:03L HLA-DQA1*05:01-B1*03:01L HLA-DQA1*05:05-B1*03:19L HLA-DPA1*03:01-B1*105:01L HLA-DQA1*03:01-B1*03:02L HLA-DQA1*05:05-B1*03:01L
  source 1..12: note = Severe acute respiratory syndrome coronavirus 2
FDVEGCHATREA

SEQ ID NO: 9657 - protein, 13 aa, Severe acute respiratory syndrome-related coronavirus
  REGION 1..13: note = Table B: HLA-DQA1*03:02-B1*03:03L HLA-DRB1*08:01L HLA-DQA1*05:05-B1*03:19L HLA-DPA1*03:01-B1*105:01L HLA-DRB1*04:08L
  source 1..13: note = Severe acute respiratory syndrome coronavirus 2
DVEGCHATREAVG

SEQ ID NO: 9658 - protein, 10 aa, Severe acute respiratory syndrome-related coronavirus
  REGION 1..10: note = Table B: HLA-DQA1*03:02-B1*03:03L HLA-DQA1*05:01-B1*03:01L HLA-DPA1*03:01-B1*04:02L HLA-DRB1*14:01L HLA-DRB1*08:01L HLA-DQA1*01-B1*05L HLA-DQA1*03:01-B1*03:02L
  source 1..10: note = Severe acute respiratory syndrome coronavirus 2
ATREAVGTNL

SEQ ID NO: 9659 - protein, 10 aa, Severe acute respiratory syndrome-related coronavirus
  REGION 1..10: note = Table B: HLA-DQA1*03:02-B1*03:03M HLA-DQA1*05:05-B1*03:19L HLA-DQA1*05:05-B1*03:116L HLA-DRB1*09:01L HLA-DPA1*01:03-B1*04:02L HLA-DQA1*03:01-B1*03:02L HLA-DPA1*01:03-B1*104:01L HLA-DQA1*02:01-B1*03:03L
  source 1..10: note = Severe acute respiratory syndrome coronavirus 2
REAVGTNLPL

SEQ ID NO: 9660 - protein, 10 aa, Severe acute respiratory syndrome-related coronavirus
  REGION 1..10: note = Table B: HLA-DQA1*03:02-B1*03:03L HLA-DQA1*05:01-B1*02:01L HLA-DQA1*03:01-B1*03:02L HLA-DQA1*01:03-B1*06:01L HLA-DQA1*02:01-B1*03:03L
  source 1..10: note = Severe acute respiratory syndrome coronavirus 2
EAVGTNLPLQ

SEQ ID NO: 9661 - protein, 10 aa, Severe acute respiratory syndrome-related coronavirus
  REGION 1..10: note = Table B: HLA-DQA1*03:02-B1*03:03L HLA-DQA1*05:05-B1*03:19L HLA-DQA1*03:01-B1*03:02L HLA-DQA1*02:01-B1*03:03L HLA-DRB1*15:03L
  source 1..10: note = Severe acute respiratory syndrome coronavirus 2
AVGTNLPLQL

SEQ ID NO: 9662 - protein, 10 aa, Severe acute respiratory syndrome-related coronavirus
  REGION 1..10: note = Table B: HLA-DQA1*03:02-B1*03:03L HLA-DQA1*05:01-B1*03:01L HLA-DRB1*13:03L HLA-DQA1*01:02-B1*06:02L HLA-DRB1*08:77L HLA-DPA1*01:03-B1*03:01L HLA-DRB1*03:01L HLA-DRB1*14:02L HLA-DQA1*01-B1*05L HLA-DQA1*05:05-B1*03:19L
  REGION 1..10: note = CONT. FROM ABOVE: HLA-DQA1*05:01-B1*02:01L HLA-DRB4*01:01L HLA-D PA1*01:03-B1*04:01L HLA-DQA1*05:05-B1*03:116L HLA-DPA1*02:01-B1* 13:01L HLA-DPA1*03:01-B1*105:01L HLA-DPA1*01:03-B1*104:01L HLA-D RB1*10:01L HLA-DRB1*16:01L HLA-DQA1*01:03-B1*06:01L
  REGION 1..10: note = CONT. FROM ABOVE: HLA-DQA1*02:01-B1*03:03L HLA-DRB1*15:03L
  source 1..10: note = Severe acute respiratory syndrome coronavirus 2
GTNLPLQLGF

SEQ ID NO: 9663 - protein, 12 aa, Severe acute respiratory syndrome-related coronavirus
  REGION 1..12: note = Table B: HLA-DQA1*03:02-B1*03:03L HLA-DQA1*05:01-B1*03:01L HLA-DRB1*04:03L HLA-DQA1*01:02-B1*06:02L HLA-DQA1*05:05-B1*03:19L HLA-DQA1*05:01-B1*02:01L HLA-DPA1*03:01-B1*105:01L HLA-DQA1*03:01-B1*03:02L
  REGION 1..12: note = CONT. FROM ABOVE: HLA-DQA1*05:05-B1*03:01L HLA-DQA1*01:03-B1*06: 01L HLA-DQA1*02:01-B1*03:03L
  source 1..12: note = Severe acute respiratory syndrome coronavirus 2
LPLQLGFSTGVN

SEQ ID NO: 9664 - protein, 10 aa, Severe acute respiratory syndrome-related coronavirus
  REGION 1..10: note = Table B: HLA-DQA1*03:02-B1*03:03L HLA-DQA1*03:01-B1*03:02L HLA-DQA1*02:01-B1*03:03L
  source 1..10: note = Severe acute respiratory syndrome coronavirus 2
QLGFSTGVNL

SEQ ID NO: 9665 - protein, 12 aa, Severe acute respiratory syndrome-related coronavirus
  REGION 1..12: note = Table B: HLA-DQA1*03:02-B1*03:03L HLA-DQA1*05:01-B1*03:01L HLA-DRB1*04:03L HLA-DQA1*01:02-B1*06:02L HLA-DQA1*05:05-B1*03:19L HLA-DPA1*03:01-B1*105:01L HLA-DQA1*03:01-B1*03:02L HLA-DQA1*05:05-B1*03:01L
  REGION 1..12: note = CONT. FROM ABOVE: HLA-DQA1*02:01-B1*03:03L
  source 1..12: note = Severe acute respiratory syndrome coronavirus 2
FSTGVNLVAVPT

SEQ ID NO: 9666 - protein, 12 aa, Severe acute respiratory syndrome-related coronavirus
  REGION 1..12: note = Table B: HLA-DQA1*03:02-B1*03:03L HLA-DQA1*05:01-B1*03:01L HLA-DRB1*13:02L HLA-DRB1*13:03L HLA-DRB1*01:03L HLA-DRB1*04:04L HLA-DRB1*04:05L HLA-DRB1*01:02L HLA-DRB4*03:01NL HLA-DRB1*08:04L HLA-DRB1*08:77L HLA-DPA1*01:03-B1*03:01L HLA-DRB1*14:01L
  REGION 1..12: note = CONT. FROM ABOVE: HLA-DRB1*11:04L HLA-DQA1*01-B1*05L HLA-DRB1*04 :10L HLA-DRB1*12:01L HLA-DRB1*12:02L HLA-DPA1*03:01-B1*105:01L H LA-DRB1*14:54L HLA-DQA1*05:05-B1*03:01L HLA-DRB1*10:01L HLA-DRB1 *16:01L HLA-DQA1*01:03-B1*06:01L HLA-DRB1*04:08L HLA-DRB1*08:03L
  REGION 1..12: note = CONT. FROM ABOVE: HLA-DRB1*15:03L
  source 1..12: note = Severe acute respiratory syndrome coronavirus 2
VNLVAVPTGYVD

SEQ ID NO: 9667 - protein, 12 aa, Severe acute respiratory syndrome-related coronavirus
  REGION 1..12: note = Table B: HLA-DQA1*03:02-B1*03:03L HLA-DRB1*04:03L HLA-DRB1*04:02L HLA-DRB1*04:05L HLA-DQA1*01:01-B1*05:01L HLA-DQA1*05:01-B1*02:01L HLA-DRB1*04:10L HLA-DQA1*03:01-B1*03:02L HLA-DRB1*14:17L HLA-DRB1*16:01L
  REGION 1..12: note = CONT. FROM ABOVE: HLA-DQA1*01:03-B1*06:01L HLA-DQA1*02:01-B1*03: 03L
  source 1..12: note = Severe acute respiratory syndrome coronavirus 2
VAVPTGYVDTPN

SEQ ID NO: 9668 - protein, 11 aa, Severe acute respiratory syndrome-related coronavirus
  REGION 1..11: note = Table B: HLA-DQA1*03:02-B1*03:03L HLA-DRB1*04:03L HLA-DRB1*04:02L HLA-DQA1*05:01-B1*02:01L HLA-DQA1*03:01-B1*03:02L HLA-DRB1*16:01L HLA-DQA1*02:01-B1*03:03L
  source 1..11: note = Severe acute respiratory syndrome coronavirus 2
VPTGYVDTPNN

SEQ ID NO: 9669 - protein, 10 aa, Severe acute respiratory syndrome-related coronavirus
  REGION 1..10: note = Table B: HLA-DQA1*03:02-B1*03:03L HLA-DQA1*05:01-B1*03:01L HLA-DRB1*04:03L HLA-DRB1*13:02L HLA-DRB1*13:03L HLA-DRB1*01:03L HLA-DRB1*04:02L HLA-DRB1*04:05L HLA-DQA1*01:02-B1*06:02L HLA-DRB4*03:01NL HLA-DRB1*08:77L HLA-DPA1*01:03-B1*03:01L
  REGION 1..10: note = CONT. FROM ABOVE: HLA-DPA1*03:01-B1*04:02L HLA-DRB1*03:01L HLA-D RB1*14:01L HLA-DRB1*11:02L HLA-DRB1*11:03L HLA-DRB1*14:02L HLA-D QA1*01-B1*05L HLA-DQA1*05:05-B1*03:19L HLA-DQA1*05:01-B1*02:01L HLA-DRB4*01:01L HLA-DPA1*01:03-B1*04:01L
  REGION 1..10: note = CONT. FROM ABOVE: HLA-DQA1*05:05-B1*03:116L HLA-DPA1*01:03-B1*04 :02L HLA-DRB1*12:01L HLA-DPA1*02:01-B1*13:01L HLA-DPA1*03:01-B1* 105:01L HLA-DQA1*03:01-B1*03:02L HLA-DPA1*01:03-B1*104:01L HLA-D QA1*05:05-B1*03:01L HLA-DPA1*01:02-B1*04:01L HLA-DRB1*10:01L
  REGION 1..10: note = CONT. FROM ABOVE: HLA-DRB1*16:01L HLA-DQA1*01:03-B1*06:01L HLA-D RB1*08:02L HLA-DQA1*02:01-B1*03:03L HLA-DRB1*15:03L
  source 1..10: note = Severe acute respiratory syndrome coronavirus 2
YVDTPNNTDF

SEQ ID NO: 9670 - protein, 13 aa, Severe acute respiratory syndrome-related coronavirus
  REGION 1..13: note = Table B: HLA-DQA1*03:02-B1*03:03L HLA-DQA1*01:02-B1*06:02L
  source 1..13: note = Severe acute respiratory syndrome coronavirus 2
VDTPNNTDFSRVS

SEQ ID NO: 9671 - protein, 13 aa, Severe acute respiratory syndrome-related coronavirus
  REGION 1..13: note = Table B: HLA-DQA1*03:02-B1*03:03L HLA-DQA1*05:01-B1*03:01L HLA-DRB1*04:03L HLA-DRB1*13:03L HLA-DRB1*04:05L HLA-DQA1*01:02-B1*06:02L HLA-DRB1*01:02L HLA-DRB4*03:01NL HLA-DRB1*14:01L HLA-DRB1*08:01L HLA-DRB1*04:10L HLA-DRB1*12:01L
  REGION 1..13: note = CONT. FROM ABOVE: HLA-DRB1*14:54L HLA-DRB1*14:17L HLA-DRB1*04:08 L HLA-DRB1*15:03L
  source 1..13: note = Severe acute respiratory syndrome coronavirus 2
NTDFSRVSAKPPP

SEQ ID NO: 9672 - protein, 10 aa, Severe acute respiratory syndrome-related coronavirus
  REGION 1..10: note = Table B: HLA-DQA1*03:02-B1*03:03L HLA-DQA1*05:01-B1*03:01L HLA-DRB1*04:03L HLA-DRB1*13:03L HLA-DRB1*01:03L HLA-DRB1*04:02L HLA-DRB1*04:05L HLA-DQA1*01:02-B1*06:02L HLA-DRB4*03:01NL HLA-DQA1*05:05-B1*03:19L HLA-DQA1*05:01-B1*02:01L
  REGION 1..10: note = CONT. FROM ABOVE: HLA-DQA1*03:01-B1*03:02L HLA-DQA1*05:05-B1*03: 01L HLA-DRB1*14:17L HLA-DRB1*16:01L HLA-DQA1*01:03-B1*06:01L HLA -DQA1*02:01-B1*03:03L
  source 1..10: note = Severe acute respiratory syndrome coronavirus 2
VSAKPPPGDQ

SEQ ID NO: 9673 - protein, 10 aa, Severe acute respiratory syndrome-related coronavirus
  REGION 1..10: note = Table B: HLA-DQA1*03:02-B1*03:03L HLA-DQA1*05:01-B1*03:01L HLA-DRB1*13:02L HLA-DRB1*13:03L HLA-DRB1*01:03M HLA-DRB1*04:05L HLA-DQA1*01:02-B1*06:02M HLA-DRB4*03:01NL HLA-DRB1*08:77L HLA-DPA1*01:03-B1*03:01L HLA-DPA1*03:01-B1*04:02L
  REGION 1..10: note = CONT. FROM ABOVE: HLA-DRB1*03:01L HLA-DRB1*14:01L HLA-DRB1*14:02 M HLA-DRB1*11:01L HLA-DQA1*01-B1*05L HLA-DQA1*05:05-B1*03:19L HL A-DQA1*05:01-B1*02:01L HLA-DPA1*01:03-B1*04:01L HLA-DQA1*05:05-B 1*03:116L HLA-DPA1*01:03-B1*04:02L HLA-DPA1*02:01-B1*13:01L
  REGION 1..10: note = CONT. FROM ABOVE: HLA-DPA1*03:01-B1*105:01L HLA-DRB1*10:01L HLA- DRB1*16:01L HLA-DQA1*01:03-B1*06:01L HLA-DRB1*08:02L HLA-DQA1*02 :01-B1*03:03M HLA-DRB1*15:03L
  source 1..10: note = Severe acute respiratory syndrome coronavirus 2
SAKPPPGDQF

SEQ ID NO: 9674 - protein, 17 aa, Severe acute respiratory syndrome-related coronavirus
  REGION 1..17: note = Table B: HLA-DQA1*03:02-B1*03:03L HLA-DRB1*04:03L HLA-DRB1*13:03L HLA-DRB1*04:04L HLA-DRB1*01:01L HLA-DRB1*08:04L HLA-DRB3*02:01L HLA-DRB1*11:03L HLA-DRB1*11:04L HLA-DRB1*11:01L HLA-DRB3*01:01L HLA-DQA1*03:01-B1*03:02L
  REGION 1..17: note = CONT. FROM ABOVE: HLA-DPA1*01:03-B1*104:01L HLA-DQA1*05:05-B1*03 :01L
  source 1..17: note = Severe acute respiratory syndrome coronavirus 2
KPPPGDQFKHLIPLMYK

SEQ ID NO: 9675 - protein, 19 aa, Severe acute respiratory syndrome-related coronavirus
  REGION 1..19: note = Table B: HLA-DQA1*03:02-B1*03:03L HLA-DRB1*08:04L HLA-DRB3*02:01L HLA-DRB1*11:02L HLA-DQA1*01-B1*05L HLA-DRB1*09:01L HLA-DPA1*01:03-B1*104:01L HLA-DRB1*08:02L
  source 1..19: note = Severe acute respiratory syndrome coronavirus 2
PPPGDQFKHLIPLMYKGLP

SEQ ID NO: 9676 - protein, 11 aa, Severe acute respiratory syndrome-related coronavirus
  REGION 1..11: note = Table B: HLA-DQA1*03:02-B1*03:03L HLA-DQA1*05:01-B1*03:01L HLA-DRB1*04:03L HLA-DRB1*04:02L HLA-DQA1*01:02-B1*06:02L HLA-DQA1*01-B1*05L HLA-DQA1*05:01-B1*02:01L HLA-DRB1*12:01L HLA-DQA1*03:01-B1*03:02L HLA-DPA1*01:02-B1*04:01L
  REGION 1..11: note = CONT. FROM ABOVE: HLA-DRB1*16:01L HLA-DQA1*01:03-B1*06:01L HLA-D QA1*02:01-B1*03:03L HLA-DRB1*15:03L
  source 1..11: note = Severe acute respiratory syndrome coronavirus 2
IPLMYKGLPWN

SEQ ID NO: 9677 - protein, 10 aa, Severe acute respiratory syndrome-related coronavirus
  REGION 1..10: note = Table B: HLA-DQA1*03:02-B1*03:03L HLA-DQA1*05:01-B1*03:01L HLA-DQA1*01:02-B1*06:02L HLA-DPA1*01:03-B1*03:01L HLA-DRB1*14:01L HLA-DQA1*05:01-B1*02:01L HLA-DRB1*12:01L HLA-DPA1*03:01-B1*105:01L HLA-DQA1*03:01-B1*03:02L
  REGION 1..10: note = CONT. FROM ABOVE: HLA-DPA1*01:02-B1*04:01L HLA-DQA1*01:03-B1*06: 01L HLA-DQA1*02:01-B1*03:03L HLA-DRB1*15:03L
  source 1..10: note = Severe acute respiratory syndrome coronavirus 2
NVVRIKIVQM

SEQ ID NO: 9678 - protein, 10 aa, Severe acute respiratory syndrome-related coronavirus
  REGION 1..10: note = Table B: HLA-DQA1*03:02-B1*03:03L HLA-DPA1*03:01-B1*04:02L HLA-DQA1*03:01-B1*03:02L HLA-DQA1*02:01-B1*03:03L HLA-DRB1*15:03L
  source 1..10: note = Severe acute respiratory syndrome coronavirus 2
QMLSDTLKNL

SEQ ID NO: 9679 - protein, 12 aa, Severe acute respiratory syndrome-related coronavirus
  REGION 1..12: note = Table B: HLA-DQA1*03:02-B1*03:03L HLA-DRB1*04:02L HLA-DQA1*01:02-B1*06:02L HLA-DPA1*03:01-B1*04:02L HLA-DRB1*14:01L HLA-DQA1*05:01-B1*02:01L HLA-DRB1*12:01L HLA-DPA1*03:01-B1*105:01L HLA-DRB1*14:17L HLA-DRB1*16:01L
  REGION 1..12: note = CONT. FROM ABOVE: HLA-DQA1*01:03-B1*06:01L HLA-DRB1*15:03L
  source 1..12: note = Severe acute respiratory syndrome coronavirus 2
SDTLKNLSDRVV

SEQ ID NO: 9680 - protein, 10 aa, Severe acute respiratory syndrome-related coronavirus
  REGION 1..10: note = Table B: HLA-DQA1*03:02-B1*03:03L HLA-DQA1*03:01-B1*03:02L HLA-DQA1*02:01-B1*03:03L HLA-DRB1*15:03L
  source 1..10: note = Severe acute respiratory syndrome coronavirus 2
NLSDRVVFVL

SEQ ID NO: 9681 - protein, 13 aa, Severe acute respiratory syndrome-related coronavirus
  REGION 1..13: note = Table B: HLA-DQA1*03:02-B1*03:03L HLA-DRB1*01:03L HLA-DRB1*04:04L HLA-DRB1*04:05L HLA-DRB1*08:04L HLA-DRB3*02:01L HLA-DPA1*01:03-B1*03:01L HLA-DRB1*14:02L HLA-DRB1*08:01L HLA-DQA1*05:05-B1*03:19L HLA-DRB1*09:01L
  REGION 1..13: note = CONT. FROM ABOVE: HLA-DQA1*03:01-B1*03:02L HLA-DPA1*01:03-B1*02: 01L HLA-DPA1*01:03-B1*104:01L HLA-DQA1*05:05-B1*03:01L
  source 1..13: note = Severe acute respiratory syndrome coronavirus 2
DRVVFVLWAHGFE

SEQ ID NO: 9682 - protein, 10 aa, Severe acute respiratory syndrome-related coronavirus
  REGION 1..10: note = Table B: HLA-DQA1*03:02-B1*03:03L HLA-DQA1*05:01-B1*03:01L HLA-DPA1*03:01-B1*04:02L HLA-DPA1*02:01-B1*13:01L HLA-DQA1*03:01-B1*03:02L HLA-DPA1*01:02-B1*04:01L HLA-DQA1*01:03-B1*06:01L HLA-DQA1*02:01-B1*03:03L
  REGION 1..10: note = CONT. FROM ABOVE: HLA-DRB1*15:03L
  source 1..10: note = Severe acute respiratory syndrome coronavirus 2
FVLWAHGFEL

SEQ ID NO: 9683 - protein, 10 aa, Severe acute respiratory syndrome-related coronavirus
  REGION 1..10: note = Table B: HLA-DQA1*03:02-B1*03:03L HLA-DQA1*05:01-B1*03:01L HLA-DQA1*01:02-B1*06:02L HLA-DPA1*03:01-B1*04:02L HLA-DQA1*01-B1*05L HLA-DQA1*05:05-B1*03:19L HLA-DQA1*05:01-B1*02:01L HLA-DPA1*01:03-B1*04:02L
  REGION 1..10: note = CONT. FROM ABOVE: HLA-DPA1*02:01-B1*13:01L HLA-DPA1*03:01-B1*105 :01L HLA-DQA1*03:01-B1*03:02L HLA-DPA1*01:02-B1*04:01L HLA-DRB1* 16:01L HLA-DQA1*01:03-B1*06:01L HLA-DQA1*02:01-B1*03:03L HLA-DRB 1*15:03L
  source 1..10: note = Severe acute respiratory syndrome coronavirus 2
WAHGFELTSM

SEQ ID NO: 9684 - protein, 10 aa, Severe acute respiratory syndrome-related coronavirus
  REGION 1..10: note = Table B: HLA-DQA1*03:02-B1*03:03L HLA-DQA1*05:05-B1*03:19M HLA-DPA1*01:03-B1*104:01L
  source 1..10: note = Severe acute respiratory syndrome coronavirus 2
FELTSMKYFV

SEQ ID NO: 9685 - protein, 10 aa, Severe acute respiratory syndrome-related coronavirus
  REGION 1..10: note = Table B: HLA-DQA1*03:02-B1*03:03L HLA-DQA1*05:01-B1*03:01L HLA-DRB1*04:03L HLA-DRB1*13:03L HLA-DRB1*01:03L HLA-DRB1*04:02L HLA-DRB1*04:05L HLA-DQA1*01:02-B1*06:02L HLA-DRB1*01:02L HLA-DRB4*03:01NL HLA-DQA1*01-B1*05L HLA-DQA1*05:01-B1*02:01L
  REGION 1..10: note = CONT. FROM ABOVE: HLA-DRB1*12:01L HLA-DPA1*03:01-B1*105:01L HLA- DQA1*03:01-B1*03:02L HLA-DQA1*05:05-B1*03:01L HLA-DRB1*14:17L HL A-DPA1*01:02-B1*04:01L HLA-DRB1*16:01L HLA-DQA1*01:03-B1*06:01L HLA-DRB1*04:08L HLA-DQA1*02:01-B1*03:03L HLA-DRB1*15:03L
  source 1..10: note = Severe acute respiratory syndrome coronavirus 2
YFVKIGPERT

SEQ ID NO: 9686 - protein, 14 aa, Severe acute respiratory syndrome-related coronavirus
  REGION 1..14: note = Table B: HLA-DQA1*03:02-B1*03:03L HLA-DQA1*05:05-B1*03:19L
  source 1..14: note = Severe acute respiratory syndrome coronavirus 2
TASDTYACWHHSIG

SEQ ID NO: 9687 - protein, 10 aa, Severe acute respiratory syndrome-related coronavirus
  REGION 1..10: note = Table B: HLA-DQA1*03:02-B1*03:03L HLA-DQA1*01-B1*05L HLA-DQA1*05:01-B1*02:01L
  source 1..10: note = Severe acute respiratory syndrome coronavirus 2
GFDYVYNPFM

SEQ ID NO: 9688 - protein, 10 aa, Severe acute respiratory syndrome-related coronavirus
  REGION 1..10: note = Table B: HLA-DQA1*03:02-B1*03:03L HLA-DQA1*01:02-B1*06:02L HLA-DRB1*01:02L HLA-DPA1*03:01-B1*04:02L HLA-DRB1*14:02L HLA-DQA1*05:05-B1*03:19L HLA-DPA1*02:01-B1*13:01L HLA-DPA1*03:01-B1*105:01L HLA-DPA1*01:03-B1*104:01L
  REGION 1..10: note = CONT. FROM ABOVE: HLA-DPA1*01:02-B1*04:01L HLA-DQA1*01:03-B1*06: 01L HLA-DRB1*08:03L HLA-DQA1*02:01-B1*03:03L HLA-DRB1*15:03L
  source 1..10: note = Severe acute respiratory syndrome coronavirus 2
YVYNPFMIDV

SEQ ID NO: 9689 - protein, 11 aa, Severe acute respiratory syndrome-related coronavirus
  REGION 1..11: note = Table B: HLA-DQA1*03:02-B1*03:03L HLA-DRB1*04:03L HLA-DQA1*05:01-B1*02:01L HLA-DQA1*03:01-B1*03:02L HLA-DRB1*16:01L HLA-DQA1*02:01-B1*03:03L
  source 1..11: note = Severe acute respiratory syndrome coronavirus 2
VYNPFMIDVQQ

SEQ ID NO: 9690 - protein, 11 aa, Severe acute respiratory syndrome-related coronavirus
  REGION 1..11: note = Table B: HLA-DQA1*03:02-B1*03:03L HLA-DRB1*04:03L HLA-DRB1*04:02L HLA-DRB4*03:01NL HLA-DQA1*01:01-B1*05:01L HLA-DQA1*01-B1*05L HLA-DRB1*12:01L HLA-DQA1*03:01-B1*03:02L HLA-DRB1*14:17L HLA-DRB1*16:01L
  source 1..11: note = Severe acute respiratory syndrome coronavirus 2
NPFMIDVQQWG

SEQ ID NO: 9691 - protein, 10 aa, Severe acute respiratory syndrome-related coronavirus
  REGION 1..10: note = Table B: HLA-DQA1*03:02-B1*03:03L HLA-DRB1*01:03L HLA-DRB1*04:05L HLA-DQA1*01:02-B1*06:02L HLA-DRB1*01:01L HLA-DRB1*08:77L HLA-DPA1*03:01-B1*04:02L HLA-DRB1*14:02L HLA-DQA1*05:05-B1*03:19L HLA-DRB4*01:01L
  REGION 1..10: note = CONT. FROM ABOVE: HLA-DPA1*01:03-B1*04:01L HLA-DQA1*05:05-B1*03: 116L HLA-DPA1*02:01-B1*13:01M HLA-DPA1*03:01-B1*105:01L HLA-DPA1 *01:03-B1*104:01L HLA-DRB1*16:01L HLA-DQA1*01:03-B1*06:01L HLA-D QA1*02:01-B1*03:03L HLA-DRB1*15:03L
  source 1..10: note = Severe acute respiratory syndrome coronavirus 2
FMIDVQQWGF

SEQ ID NO: 9692 - protein, 12 aa, Severe acute respiratory syndrome-related coronavirus
  REGION 1..12: note = Table B: HLA-DQA1*03:02-B1*03:03L HLA-DQA1*05:01-B1*02:01L HLA-DQA1*03:01-B1*03:02L HLA-DQA1*01:03-B1*06:01L HLA-DQA1*02:01-B1*03:03L
  source 1..12: note = Severe acute respiratory syndrome coronavirus 2
DVQQWGFTGNLQ

SEQ ID NO: 9693 - protein, 13 aa, Severe acute respiratory syndrome-related coronavirus
  REGION 1..13: note = Table B: HLA-DQA1*03:02-B1*03:03L HLA-DQA1*05:01-B1*03:01L HLA-DRB1*13:02L HLA-DRB1*13:03L HLA-DRB1*01:03L HLA-DRB1*04:04L HLA-DQA1*01:02-B1*06:02L HLA-DRB1*01:02L HLA-DRB1*08:04L HLA-DRB1*08:77L HLA-DPA1*01:03-B1*03:01L HLA-DRB1*11:04L
  REGION 1..13: note = CONT. FROM ABOVE: HLA-DRB1*08:01L HLA-DQA1*05:05-B1*03:19L HLA-D QA1*05:01-B1*02:01L HLA-DRB1*12:01L HLA-DRB1*12:02L HLA-DPA1*02: 01-B1*13:01L HLA-DPA1*03:01-B1*105:01L HLA-DQA1*03:01-B1*03:02L HLA-DRB1*14:54L HLA-DQA1*05:05-B1*03:01L HLA-DRB1*10:01L
  REGION 1..13: note = CONT. FROM ABOVE: HLA-DQA1*01:03-B1*06:01L HLA-DRB1*04:08L HLA-D RB1*08:03L HLA-DQA1*02:01-B1*03:03L HLA-DRB1*15:03L
  source 1..13: note = Severe acute respiratory syndrome coronavirus 2
VQQWGFTGNLQSN

SEQ ID NO: 9694 - protein, 10 aa, Severe acute respiratory syndrome-related coronavirus
  REGION 1..10: note = Table B: HLA-DQA1*03:02-B1*03:03L HLA-DQA1*05:01-B1*03:01L HLA-DRB1*04:03L HLA-DRB1*13:03L HLA-DRB1*01:03L HLA-DRB1*04:02L HLA-DQA1*01:02-B1*06:02L HLA-DRB1*01:02L HLA-DRB4*03:01NL HLA-DQA1*01:01-B1*05:01L HLA-DQA1*01-B1*05L
  REGION 1..10: note = CONT. FROM ABOVE: HLA-DQA1*05:05-B1*03:19L HLA-DQA1*05:01-B1*02: 01L HLA-DPA1*01:03-B1*04:02L HLA-DRB1*12:01L HLA-DPA1*03:01-B1*1 05:01L HLA-DQA1*03:01-B1*03:02L HLA-DQA1*05:05-B1*03:01L HLA-DRB 1*14:17L HLA-DPA1*01:02-B1*04:01L HLA-DRB1*16:01L
  REGION 1..10: note = CONT. FROM ABOVE: HLA-DQA1*01:03-B1*06:01M HLA-DQA1*02:01-B1*03: 03L
  source 1..10: note = Severe acute respiratory syndrome coronavirus 2
FTGNLQSNHD

SEQ ID NO: 9695 - protein, 10 aa, Severe acute respiratory syndrome-related coronavirus
  REGION 1..10: note = Table B: HLA-DQA1*03:02-B1*03:03L HLA-DQA1*03:01-B1*03:02L HLA-DQA1*01:03-B1*06:01L HLA-DQA1*02:01-B1*03:03L
  source 1..10: note = Severe acute respiratory syndrome coronavirus 2
TGNLQSNHDL

SEQ ID NO: 9696 - protein, 10 aa, Severe acute respiratory syndrome-related coronavirus
  REGION 1..10: note = Table B: HLA-DQA1*03:02-B1*03:03L HLA-DQA1*05:01-B1*03:01L HLA-DRB1*04:03L HLA-DRB1*04:02L HLA-DQA1*01:02-B1*06:02L HLA-DRB1*01:02L HLA-DQA1*05:05-B1*03:19L HLA-DPA1*03:01-B1*105:01L HLA-DQA1*03:01-B1*03:02L
  REGION 1..10: note = CONT. FROM ABOVE: HLA-DQA1*05:05-B1*03:01L HLA-DRB1*14:17L HLA-D QA1*01:03-B1*06:01M HLA-DQA1*02:01-B1*03:03L
  source 1..10: note = Severe acute respiratory syndrome coronavirus 2
VASCDAIMTR

SEQ ID NO: 9697 - protein, 11 aa, Severe acute respiratory syndrome-related coronavirus
  REGION 1..11: note = Table B: HLA-DQA1*03:02-B1*03:03L HLA-DQA1*05:01-B1*03:01L HLA-DQA1*01:02-B1*06:02L HLA-DQA1*01-B1*05L HLA-DQA1*05:05-B1*03:19L HLA-DQA1*05:01-B1*02:01L HLA-DPA1*03:01-B1*105:01L HLA-DQA1*03:01-B1*03:02L
  REGION 1..11: note = CONT. FROM ABOVE: HLA-DQA1*05:05-B1*03:01L HLA-DRB1*16:01L HLA-D QA1*01:03-B1*06:01L HLA-DQA1*02:01-B1*03:03L
  source 1..11: note = Severe acute respiratory syndrome coronavirus 2
VDWTIEYPIIG

SEQ ID NO: 9698 - protein, 12 aa, Severe acute respiratory syndrome-related coronavirus
  REGION 1..12: note = Table B: HLA-DQA1*03:02-B1*03:03L HLA-DQA1*05:01-B1*03:01L HLA-DQA1*01:02-B1*06:02L HLA-DRB1*01:02L HLA-DQA1*01-B1*05L HLA-DQA1*05:05-B1*03:19L HLA-DQA1*05:01-B1*02:01L HLA-DQA1*05:05-B1*03:01L
  source 1..12: note = Severe acute respiratory syndrome coronavirus 2
DWTIEYPIIGDE

SEQ ID NO: 9699 - protein, 10 aa, Severe acute respiratory syndrome-related coronavirus
  REGION 1..10: note = Table B: HLA-DQA1*03:02-B1*03:03H HLA-DQA1*05:01-B1*03:01L HLA-DRB1*13:02L HLA-DRB1*13:03L HLA-DQA1*01:02-B1*06:02L HLA-DRB1*08:77L HLA-DPA1*03:01-B1*04:02L HLA-DRB1*03:01L HLA-DRB1*14:01L HLA-DRB1*11:02L HLA-DRB1*14:02L HLA-DRB1*08:01L
  REGION 1..10: note = CONT. FROM ABOVE: HLA-DRB1*11:01L HLA-DQA1*01-B1*05L HLA-DQA1*05 :05-B1*03:19M HLA-DQA1*05:01-B1*02:01L HLA-DRB4*01:01L HLA-DPA1* 01:03-B1*04:01L HLA-DQA1*05:05-B1*03:116M HLA-DRB1*09:01M HLA-DP A1*01:03-B1*04:02L HLA-DRB1*12:01L HLA-DPA1*02:01-B1*13:01L
  REGION 1..10: note = CONT. FROM ABOVE: HLA-DPA1*03:01-B1*105:01L HLA-DQA1*03:01-B1*03 :02M HLA-DPA1*01:03-B1*104:01M HLA-DPA1*01:02-B1*04:01L HLA-DRB1 *10:01L HLA-DRB1*16:01L HLA-DQA1*01:03-B1*06:01L HLA-DRB1*08:03L HLA-DQA1*02:01-B1*03:03L HLA-DRB1*15:03L
  source 1..10: note = Severe acute respiratory syndrome coronavirus 2
IEYPIIGDEL

SEQ ID NO: 9700 - protein, 10 aa, Severe acute respiratory syndrome-related coronavirus
  REGION 1..10: note = Table B: HLA-DQA1*03:02-B1*03:03L HLA-DQA1*05:01-B1*03:01L HLA-DRB1*13:03L HLA-DRB1*04:05L HLA-DQA1*01:02-B1*06:02L HLA-DRB1*01:01L HLA-DPA1*03:01-B1*04:02L HLA-DQA1*01-B1*05L HLA-DQA1*05:05-B1*03:19L HLA-DQA1*05:05-B1*03:116M
  REGION 1..10: note = CONT. FROM ABOVE: HLA-DPA1*02:01-B1*13:01M HLA-DPA1*03:01-B1*105 :01L HLA-DPA1*01:02-B1*04:01L HLA-DQA1*01:03-B1*06:01L HLA-DRB1* 08:03L HLA-DRB1*15:03L
  source 1..10: note = Severe acute respiratory syndrome coronavirus 2
YPIIGDELKI

SEQ ID NO: 9701 - protein, 10 aa, Severe acute respiratory syndrome-related coronavirus
  REGION 1..10: note = Table B: HLA-DQA1*03:02-B1*03:03L HLA-DQA1*05:01-B1*03:01L HLA-DQA1*01:02-B1*06:02L HLA-DRB1*14:01L HLA-DQA1*03:01-B1*03:02L HLA-DPA1*01:02-B1*04:01L HLA-DRB1*16:01L HLA-DQA1*01:03-B1*06:01L
  REGION 1..10: note = CONT. FROM ABOVE: HLA-DQA1*02:01-B1*03:03L
  source 1..10: note = Severe acute respiratory syndrome coronavirus 2
VQHMVVKAAL

SEQ ID NO: 9702 - protein, 10 aa, Severe acute respiratory syndrome-related coronavirus
  REGION 1..10: note = Table B: HLA-DQA1*03:02-B1*03:03M HLA-DQA1*05:01-B1*03:01L HLA-DQA1*01:02-B1*06:02L HLA-DPA1*03:01-B1*04:02L HLA-DRB1*14:01L HLA-DRB1*14:02L HLA-DQA1*05:05-B1*03:19L HLA-DQA1*05:01-B1*02:01L HLA-DPA1*01:03-B1*04:01L
  REGION 1..10: note = CONT. FROM ABOVE: HLA-DQA1*05:05-B1*03:116L HLA-DRB1*09:01L HLA- DPA1*01:03-B1*04:02L HLA-DPA1*02:01-B1*13:01L HLA-DPA1*03:01-B1* 105:01L HLA-DQA1*03:01-B1*03:02L HLA-DPA1*01:03-B1*104:01L HLA-D PA1*01:02-B1*04:01L HLA-DRB1*16:01L HLA-DQA1*01:03-B1*06:01L
  REGION 1..10: note = CONT. FROM ABOVE: HLA-DRB1*08:03L HLA-DQA1*02:01-B1*03:03L HLA-D RB1*15:03L
  source 1..10: note = Severe acute respiratory syndrome coronavirus 2
ALLADKFPVL

SEQ ID NO: 9703 - protein, 10 aa, Severe acute respiratory syndrome-related coronavirus
  REGION 1..10: note = Table B: HLA-DQA1*03:02-B1*03:03L HLA-DQA1*05:01-B1*03:01L HLA-DRB1*13:03L HLA-DRB1*14:02L HLA-DQA1*05:05-B1*03:116L HLA-DQA1*03:01-B1*03:02L HLA-DRB1*16:01L HLA-DQA1*02:01-B1*03:03L HLA-DRB1*15:03L
  source 1..10: note = Severe acute respiratory syndrome coronavirus 2
VLHDIGNPKA

SEQ ID NO: 9704 - protein, 10 aa, Severe acute respiratory syndrome-related coronavirus
  REGION 1..10: note = Table B: HLA-DQA1*03:02-B1*03:03L HLA-DQA1*01-B1*05L HLA-DQA1*05:05-B1*03:19L HLA-DQA1*05:01-B1*02:01L HLA-DQA1*03:01-B1*03:02L HLA-DRB1*16:01L
  source 1..10: note = Severe acute respiratory syndrome coronavirus 2
LHDIGNPKAI

SEQ ID NO: 9705 - protein, 13 aa, Severe acute respiratory syndrome-related coronavirus
  REGION 1..13: note = Table B: HLA-DQA1*03:02-B1*03:03L HLA-DQA1*05:01-B1*03:01L HLA-DRB1*04:03L HLA-DRB1*01:02L HLA-DQA1*05:05-B1*03:19L HLA-DQA1*03:01-B1*03:02L HLA-DQA1*05:05-B1*03:01L HLA-DQA1*01:03-B1*06:01L HLA-DRB1*04:08L
  REGION 1..13: note = CONT. FROM ABOVE: HLA-DQA1*02:01-B1*03:03L
  source 1..13: note = Severe acute respiratory syndrome coronavirus 2
IGNPKAIKCVPQA

SEQ ID NO: 9706 - protein, 12 aa, Severe acute respiratory syndrome-related coronavirus
  REGION 1..12: note = Table B: HLA-DQA1*03:02-B1*03:03L HLA-DQA1*05:01-B1*03:01L HLA-DRB1*04:03L HLA-DQA1*01:02-B1*06:02L HLA-DQA1*05:05-B1*03:19L HLA-DPA1*03:01-B1*105:01L HLA-DQA1*03:01-B1*03:02L HLA-DQA1*05:05-B1*03:01L
  REGION 1..12: note = CONT. FROM ABOVE: HLA-DQA1*01:03-B1*06:01L HLA-DQA1*02:01-B1*03: 03L
  source 1..12: note = Severe acute respiratory syndrome coronavirus 2
NPKAIKCVPQAD

SEQ ID NO: 9707 - protein, 15 aa, Severe acute respiratory syndrome-related coronavirus
  REGION 1..15: note = Table B: HLA-DQA1*03:02-B1*03:03L HLA-DRB1*04:03L HLA-DRB1*01:03L HLA-DRB1*04:05L HLA-DRB1*01:02L HLA-DRB1*08:04L HLA-DRB1*14:01L HLA-DRB1*08:01L HLA-DPA1*01:03-B1*04:01L HLA-DPA1*01:03-B1*04:02L HLA-DRB1*12:01L
  REGION 1..15: note = CONT. FROM ABOVE: HLA-DQA1*03:01-B1*03:02L HLA-DRB1*04:08L HLA-D QA1*02:01-B1*03:03L
  source 1..15: note = Severe acute respiratory syndrome coronavirus 2
VPQADVEWKFYDAQP

SEQ ID NO: 9708 - protein, 13 aa, Severe acute respiratory syndrome-related coronavirus
  REGION 1..13: note = Table B: HLA-DQA1*03:02-B1*03:03L HLA-DQA1*05:01-B1*03:01L HLA-DRB1*04:03L HLA-DRB1*13:02L HLA-DRB1*04:05L HLA-DQA1*01:02-B1*06:02L HLA-DRB1*01:01L HLA-DRB3*02:01L HLA-DPA1*03:01-B1*04:02L HLA-DRB1*14:02L HLA-DRB1*08:01L
  REGION 1..13: note = CONT. FROM ABOVE: HLA-DQA1*05:05-B1*03:19L HLA-DQA1*05:01-B1*02: 01L HLA-DPA1*02:01-B1*13:01L HLA-DPA1*03:01-B1*105:01L HLA-DQA1* 03:01-B1*03:02L HLA-DQA1*05:05-B1*03:01L HLA-DRB1*07:01L HLA-DRB 1*10:01L HLA-DRB1*15:01L
  source 1..13: note = Severe acute respiratory syndrome coronavirus 2
VEWKFYDAQPCSD

SEQ ID NO: 9709 - protein, 12 aa, Severe acute respiratory syndrome-related coronavirus
  REGION 1..12: note = Table B: HLA-DQA1*03:02-B1*03:03L HLA-DQA1*05:01-B1*03:01L HLA-DRB1*04:01L HLA-DRB1*13:02L HLA-DRB1*04:04L HLA-DQA1*01:02-B1*06:02L HLA-DRB1*01:01L HLA-DRB3*02:01L HLA-DPA1*01:03-B1*03:01L HLA-DPA1*03:01-B1*04:02L
  REGION 1..12: note = CONT. FROM ABOVE: HLA-DRB1*14:01L HLA-DRB1*11:03L HLA-DRB1*11:04 L HLA-DRB1*14:02L HLA-DRB1*11:01L HLA-DQA1*05:05-B1*03:19L HLA-D QA1*05:01-B1*02:01L HLA-DPA1*01:03-B1*04:02L HLA-DRB3*01:01L HLA -DPA1*02:01-B1*13:01L HLA-DPA1*01:03-B1*104:01L
  REGION 1..12: note = CONT. FROM ABOVE: HLA-DQA1*05:05-B1*03:01L HLA-DRB1*07:01L HLA-D RB1*10:01L HLA-DQA1*01:03-B1*06:01L HLA-DRB1*08:03L HLA-DRB1*15: 01L
  source 1..12: note = Severe acute respiratory syndrome coronavirus 2
WKFYDAQPCSDK

SEQ ID NO: 9710 - protein, 10 aa, Severe acute respiratory syndrome-related coronavirus
  REGION 1..10: note = Table B: HLA-DQA1*03:02-B1*03:03L HLA-DQA1*01-B1*05L HLA-DQA1*03:01-B1*03:02L
  source 1..10: note = Severe acute respiratory syndrome coronavirus 2
SDKAYKIEEL

SEQ ID NO: 9711 - protein, 13 aa, Severe acute respiratory syndrome-related coronavirus
  REGION 1..13: note = Table B: HLA-DQA1*03:02-B1*03:03L HLA-DRB1*01:02L HLA-DQA1*05:05-B1*03:01L HLA-DRB1*04:08L
  source 1..13: note = Severe acute respiratory syndrome coronavirus 2
DKAYKIEELFYSY

SEQ ID NO: 9712 - protein, 12 aa, Severe acute respiratory syndrome-related coronavirus
  REGION 1..12: note = Table B: HLA-DQA1*03:02-B1*03:03L HLA-DRB1*04:03L HLA-DRB1*04:02L HLA-DQA1*05:01-B1*02:01L HLA-DRB1*16:01L HLA-DQA1*02:01-B1*03:03L HLA-DRB1*15:03L
  source 1..12: note = Severe acute respiratory syndrome coronavirus 2
EELFYSYATHSD

SEQ ID NO: 9713 - protein, 10 aa, Severe acute respiratory syndrome-related coronavirus
  REGION 1..10: note = Table B: HLA-DQA1*03:02-B1*03:03L HLA-DQA1*05:01-B1*03:01L HLA-DRB1*04:03L HLA-DRB1*13:03L HLA-DRB1*01:03L HLA-DRB1*04:02L HLA-DRB1*04:04L HLA-DRB1*04:05L HLA-DQA1*01:02-B1*06:02L HLA-DRB1*01:02L HLA-DRB4*03:01NL HLA-DQA1*01:01-B1*05:01L
  REGION 1..10: note = CONT. FROM ABOVE: HLA-DRB1*08:01L HLA-DQA1*01-B1*05L HLA-DQA1*05 :01-B1*02:01L HLA-DRB1*04:10L HLA-DRB1*12:01L HLA-DPA1*03:01-B1* 105:01L HLA-DQA1*03:01-B1*03:02L HLA-DRB1*14:54L HLA-DRB1*14:17L HLA-DPA1*01:02-B1*04:01L HLA-DRB1*10:01L HLA-DRB1*16:01L
  REGION 1..10: note = CONT. FROM ABOVE: HLA-DQA1*01:03-B1*06:01L HLA-DRB1*04:08L HLA-D RB1*08:03L HLA-DQA1*02:01-B1*03:03L HLA-DRB1*15:03L
  source 1..10: note = Severe acute respiratory syndrome coronavirus 2
FYSYATHSDK

SEQ ID NO: 9714 - protein, 10 aa, Severe acute respiratory syndrome-related coronavirus
  REGION 1..10: note = Table B: HLA-DQA1*03:02-B1*03:03L HLA-DQA1*05:01-B1*03:01L HLA-DRB1*04:03L HLA-DRB1*01:03L HLA-DRB1*04:05L HLA-DQA1*01:02-B1*06:02L HLA-DRB1*01:01L HLA-DRB1*01:02L HLA-DRB1*08:77L HLA-DRB1*14:02L HLA-DQA1*01:01-B1*05:01L
  REGION 1..10: note = CONT. FROM ABOVE: HLA-DQA1*05:05-B1*03:19L HLA-DQA1*05:01-B1*02: 01L HLA-DPA1*01:03-B1*04:01L HLA-DPA1*02:01-B1*13:01L HLA-DPA1*0 3:01-B1*105:01L HLA-DRB1*16:01L HLA-DQA1*01:03-B1*06:01M HLA-DQA 1*02:01-B1*03:03L HLA-DRB1*15:03L
  source 1..10: note = Severe acute respiratory syndrome coronavirus 2
YSYATHSDKF

SEQ ID NO: 9715 - protein, 11 aa, Severe acute respiratory syndrome-related coronavirus
  REGION 1..11: note = Table B: HLA-DQA1*03:02-B1*03:03L HLA-DRB1*04:03L HLA-DRB1*13:03L HLA-DRB1*01:03L HLA-DRB1*04:02L HLA-DRB1*04:05L HLA-DQA1*01-B1*05L HLA-DQA1*05:01-B1*02:01L HLA-DRB1*14:17L HLA-DPA1*01:02-B1*04:01L HLA-DRB1*16:01L
  REGION 1..11: note = CONT. FROM ABOVE: HLA-DQA1*01:03-B1*06:01L HLA-DQA1*02:01-B1*03: 03L
  source 1..11: note = Severe acute respiratory syndrome coronavirus 2
YATHSDKFTDG

SEQ ID NO: 9716 - protein, 10 aa, Severe acute respiratory syndrome-related coronavirus
  REGION 1..10: note = Table B: HLA-DQA1*03:02-B1*03:03L HLA-DQA1*05:05-B1*03:19L HLA-DQA1*03:01-B1*03:02L HLA-DPA1*01:03-B1*104:01L HLA-DRB1*16:01L HLA-DQA1*02:01-B1*03:03L
  source 1..10: note = Severe acute respiratory syndrome coronavirus 2
NVDRYPANSI

SEQ ID NO: 9717 - protein, 10 aa, Severe acute respiratory syndrome-related coronavirus
  REGION 1..10: note = Table B: HLA-DQA1*03:02-B1*03:03L HLA-DQA1*05:01-B1*03:01L HLA-DRB1*04:03L HLA-DRB1*13:03L HLA-DRB1*01:03L HLA-DRB1*04:02L HLA-DQA1*01:02-B1*06:02L HLA-DRB1*01:02L HLA-DRB4*03:01NL HLA-DPA1*01:03-B1*03:01L HLA-DPA1*03:01-B1*04:02L
  REGION 1..10: note = CONT. FROM ABOVE: HLA-DRB1*14:01L HLA-DQA1*01-B1*05L HLA-DQA1*05 :05-B1*03:19L HLA-DQA1*05:01-B1*02:01L HLA-DQA1*05:05-B1*03:116L HLA-DRB1*12:01L HLA-DPA1*02:01-B1*13:01L HLA-DPA1*03:01-B1*105:0 1L HLA-DQA1*03:01-B1*03:02L HLA-DPA1*01:03-B1*104:01L
  REGION 1..10: note = CONT. FROM ABOVE: HLA-DRB1*14:17L HLA-DPA1*01:02-B1*04:01L HLA-D RB1*16:01L HLA-DQA1*01:03-B1*06:01L HLA-DQA1*02:01-B1*03:03L HLA -DRB1*15:03L
  source 1..10: note = Severe acute respiratory syndrome coronavirus 2
VDRYPANSIV

SEQ ID NO: 9718 - protein, 10 aa, Severe acute respiratory syndrome-related coronavirus
  REGION 1..10: note = Table B: HLA-DQA1*03:02-B1*03:03L HLA-DRB1*01:03L HLA-DQA1*03:01-B1*03:02L HLA-DPA1*01:02-B1*04:01L HLA-DRB1*16:01L HLA-DQA1*01:03-B1*06:01L HLA-DQA1*02:01-B1*03:03L
  source 1..10: note = Severe acute respiratory syndrome coronavirus 2
RFDTRVLSNL

SEQ ID NO: 9719 - protein, 12 aa, Severe acute respiratory syndrome-related coronavirus
  REGION 1..12: note = Table B: HLA-DQA1*03:02-B1*03:03L HLA-DRB1*13:03L HLA-DRB1*01:03L HLA-DRB1*04:05L HLA-DQA1*01-B1*05L HLA-DQA1*05:01-B1*02:01L HLA-DRB1*04:10L HLA-DRB1*12:01L HLA-DRB1*14:54L HLA-DRB1*16:01L HLA-DQA1*02:01-B1*03:03L
  source 1..12: note = Severe acute respiratory syndrome coronavirus 2
DTRVLSNLNLPG

SEQ ID NO: 9720 - protein, 15 aa, Severe acute respiratory syndrome-related coronavirus
  REGION 1..15: note = Table B: HLA-DQA1*03:02-B1*03:03L HLA-DQA1*05:05-B1*03:19L HLA-DPA1*03:01-B1*105:01L HLA-DRB1*04:08L
  source 1..15: note = Severe acute respiratory syndrome coronavirus 2
LPGCDGGSLYVNKHA

SEQ ID NO: 9721 - protein, 16 aa, Severe acute respiratory syndrome-related coronavirus
  REGION 1..16: note = Table B: HLA-DQA1*03:02-B1*03:03L HLA-DRB1*08:77L HLA-DRB3*02:01L HLA-DQA1*05:01-B1*02:01L HLA-DRB1*12:02L
  source 1..16: note = Severe acute respiratory syndrome coronavirus 2
DGGSLYVNKHAFHTPA

SEQ ID NO: 9722 - protein, 13 aa, Severe acute respiratory syndrome-related coronavirus
  REGION 1..13: note = Table B: HLA-DQA1*03:02-B1*03:03L HLA-DQA1*05:01-B1*03:01L HLA-DPA1*01:03-B1*03:01L HLA-DRB1*14:01L HLA-DRB1*08:01L HLA-DQA1*01-B1*05L HLA-DPA1*03:01-B1*105:01L HLA-DQA1*05:05-B1*03:01L HLA-DQA1*01:03-B1*06:01L
  REGION 1..13: note = CONT. FROM ABOVE: HLA-DRB1*15:03L
  source 1..13: note = Severe acute respiratory syndrome coronavirus 2
YVNKHAFHTPAFD

SEQ ID NO: 9723 - protein, 15 aa, Severe acute respiratory syndrome-related coronavirus
  REGION 1..15: note = Table B: HLA-DQA1*03:02-B1*03:03L HLA-DRB1*04:03L HLA-DPA1*03:01-B1*04:02L HLA-DPA1*01:03-B1*04:01L
  source 1..15: note = Severe acute respiratory syndrome coronavirus 2
VNKHAFHTPAFDKSA

SEQ ID NO: 9724 - protein, 11 aa, Severe acute respiratory syndrome-related coronavirus
  REGION 1..11: note = Table B: HLA-DQA1*03:02-B1*03:03L HLA-DRB1*04:03L HLA-DQA1*05:01-B1*02:01L HLA-DQA1*03:01-B1*03:02L HLA-DQA1*02:01-B1*03:03L
  source 1..11: note = Severe acute respiratory syndrome coronavirus 2
TPAFDKSAFVN

SEQ ID NO: 9725 - protein, 10 aa, Severe acute respiratory syndrome-related coronavirus
  REGION 1..10: note = Table B: HLA-DQA1*03:02-B1*03:03L HLA-DQA1*05:01-B1*03:01L HLA-DPA1*03:01-B1*04:02L HLA-DQA1*05:01-B1*02:01L HLA-DPA1*01:03-B1*04:01L HLA-DPA1*03:01-B1*105:01L HLA-DQA1*03:01-B1*03:02L HLA-DPA1*01:02-B1*04:01L
  REGION 1..10: note = CONT. FROM ABOVE: HLA-DRB1*16:01L HLA-DQA1*01:03-B1*06:01L HLA-D QA1*02:01-B1*03:03L HLA-DRB1*15:03L
  source 1..10: note = Severe acute respiratory syndrome coronavirus 2
AFDKSAFVNL

SEQ ID NO: 9726 - protein, 10 aa, Severe acute respiratory syndrome-related coronavirus
  REGION 1..10: note = Table B: HLA-DQA1*03:02-B1*03:03L HLA-DQA1*05:01-B1*03:01L HLA-DRB1*04:03L HLA-DRB1*13:02L HLA-DRB1*13:03L HLA-DRB1*01:03L HLA-DRB1*04:02L HLA-DRB1*04:05L HLA-DQA1*01:02-B1*06:02L HLA-DRB1*01:01L HLA-DRB1*01:02L HLA-DRB4*03:01NL HLA-DRB1*08:04L
  REGION 1..10: note = CONT. FROM ABOVE: HLA-DRB1*08:77L HLA-DRB3*02:01L HLA-DPA1*01:03 -B1*03:01L HLA-DPA1*03:01-B1*04:02L HLA-DRB1*14:01L HLA-DRB1*11: 03L HLA-DRB1*14:02L HLA-DQA1*01:01-B1*05:01L HLA-DRB1*08:01L HLA -DRB1*11:01L HLA-DQA1*01-B1*05L HLA-DQA1*05:05-B1*03:19L
  REGION 1..10: note = CONT. FROM ABOVE: HLA-DQA1*05:01-B1*02:01L HLA-DRB4*01:01L HLA-D PA1*01:03-B1*04:01L HLA-DRB1*09:01L HLA-DPA1*01:03-B1*04:02L HLA -DRB1*12:01M HLA-DRB1*12:02L HLA-DPA1*02:01-B1*13:01L HLA-DPA1*0 3:01-B1*105:01L HLA-DQA1*03:01-B1*03:02L HLA-DRB1*14:54L
  REGION 1..10: note = CONT. FROM ABOVE: HLA-DPA1*01:03-B1*104:01L HLA-DQA1*05:05-B1*03 :01L HLA-DPA1*01:02-B1*04:01L HLA-DRB1*07:01L HLA-DRB1*10:01L HL A-DRB1*16:01L HLA-DQA1*01:03-B1*06:01M HLA-DRB1*04:08L HLA-DRB1* 08:03L HLA-DQA1*02:01-B1*03:03L HLA-DRB1*15:03M
  source 1..10: note = Severe acute respiratory syndrome coronavirus 2
AFVNLKQLPF

SEQ ID NO: 9727 - protein, 15 aa, Severe acute respiratory syndrome-related coronavirus
  REGION 1..15: note = Table B: HLA-DQA1*03:02-B1*03:03L HLA-DRB1*04:03L HLA-DRB1*13:02L HLA-DRB1*01:03L HLA-DRB1*04:05L HLA-DRB1*08:04L HLA-DRB3*02:01L HLA-DRB1*08:01L HLA-DQA1*01-B1*05L HLA-DPA1*02:01-B1*13:01L HLA-DQA1*03:01-B1*03:02L
  REGION 1..15: note = CONT. FROM ABOVE: HLA-DQA1*05:05-B1*03:01L HLA-DQA1*01:03-B1*06: 01L HLA-DRB1*04:08L
  source 1..15: note = Severe acute respiratory syndrome coronavirus 2
VNLKQLPFFYYSDSP

SEQ ID NO: 9728 - protein, 14 aa, Severe acute respiratory syndrome-related coronavirus
  REGION 1..14: note = Table B: HLA-DQA1*03:02-B1*03:03L HLA-DQA1*05:01-B1*03:01L HLA-DRB1*04:01L HLA-DRB1*13:02L HLA-DRB1*13:03L HLA-DRB1*08:04L HLA-DRB3*02:01L HLA-DPA1*01:03-B1*03:01L HLA-DRB1*11:04L HLA-DRB1*14:02L HLA-DRB1*08:01L HLA-DQA1*05:05-B1*03:19L
  REGION 1..14: note = CONT. FROM ABOVE: HLA-DPA1*01:03-B1*04:02L HLA-DRB3*01:01L HLA-D PA1*02:01-B1*13:01L HLA-DQA1*03:01-B1*03:02L HLA-DQA1*05:05-B1*0 3:01L HLA-DPA1*01:02-B1*04:01L HLA-DRB1*08:03L HLA-DQA1*02:01-B1 *03:03L
  source 1..14: note = Severe acute respiratory syndrome coronavirus 2
LPFFYYSDSPCESH

SEQ ID NO: 9729 - protein, 12 aa, Severe acute respiratory syndrome-related coronavirus
  REGION 1..12: note = Table B: HLA-DQA1*03:02-B1*03:03L HLA-DQA1*05:01-B1*03:01L HLA-DQA1*01:02-B1*06:02L HLA-DQA1*01:01-B1*05:01L HLA-DQA1*05:05-B1*03:19L HLA-DQA1*05:01-B1*02:01L HLA-DQA1*05:05-B1*03:01L HLA-DQA1*01:03-B1*06:01L
  REGION 1..12: note = CONT. FROM ABOVE: HLA-DQA1*02:01-B1*03:03L
  source 1..12: note = Severe acute respiratory syndrome coronavirus 2
ESHGKQVVSDID

SEQ ID NO: 9730 - protein, 12 aa, Severe acute respiratory syndrome-related coronavirus
  REGION 1..12: note = Table B: HLA-DQA1*03:02-B1*03:03L HLA-DRB1*04:03L HLA-DRB1*04:02L HLA-DRB1*04:05L HLA-DRB1*14:01L HLA-DQA1*01-B1*05L HLA-DQA1*05:01-B1*02:01L HLA-DQA1*03:01-B1*03:02L HLA-DRB1*14:54L HLA-DRB1*14:17L
  REGION 1..12: note = CONT. FROM ABOVE: HLA-DRB1*16:01L HLA-DRB1*15:03L
  source 1..12: note = Severe acute respiratory syndrome coronavirus 2
KQVVSDIDYVPL

SEQ ID NO: 9731 - protein, 10 aa, Severe acute respiratory syndrome-related coronavirus
  REGION 1..10: note = Table B: HLA-DQA1*03:02-B1*03:03L HLA-DRB1*04:03L HLA-DQA1*01-B1*05L HLA-DQA1*05:01-B1*02:01L HLA-DQA1*03:01-B1*03:02L HLA-DQA1*01:03-B1*06:01L HLA-DQA1*02:01-B1*03:03L
  source 1..10: note = Severe acute respiratory syndrome coronavirus 2
VSDIDYVPLK

SEQ ID NO: 9732 - protein, 10 aa, Severe acute respiratory syndrome-related coronavirus
  REGION 1..10: note = Table B: HLA-DQA1*03:02-B1*03:03L HLA-DQA1*03:01-B1*03:02L
  source 1..10: note = Severe acute respiratory syndrome coronavirus 2
SDIDYVPLKS

SEQ ID NO: 9733 - protein, 10 aa, Severe acute respiratory syndrome-related coronavirus
  REGION 1..10: note = Table B: HLA-DQA1*03:02-B1*03:03L HLA-DRB1*04:03L HLA-DRB1*04:02L HLA-DQA1*01-B1*05L HLA-DQA1*03:01-B1*03:02L HLA-DRB1*14:17L HLA-DPA1*01:02-B1*04:01L HLA-DQA1*02:01-B1*03:03L
  source 1..10: note = Severe acute respiratory syndrome coronavirus 2
IDYVPLKSAT

SEQ ID NO: 9734 - protein, 10 aa, Severe acute respiratory syndrome-related coronavirus
  REGION 1..10: note = Table B: HLA-DQA1*03:02-B1*03:03L HLA-DQA1*05:01-B1*03:01M HLA-DRB1*01:03L HLA-DQA1*01:02-B1*06:02L HLA-DRB4*03:01NL HLA-DRB1*08:77M HLA-DPA1*01:03-B1*03:01L HLA-DPA1*03:01-B1*04:02L HLA-DRB1*03:01L HLA-DRB1*11:02L
  REGION 1..10: note = CONT. FROM ABOVE: HLA-DRB1*14:02L HLA-DQA1*01-B1*05L HLA-DQA1*05 :05-B1*03:19M HLA-DQA1*05:01-B1*02:01L HLA-DRB4*01:01M HLA-DPA1* 01:03-B1*04:01M HLA-DQA1*05:05-B1*03:116L HLA-DPA1*01:03-B1*04:0 2L HLA-DRB1*12:01L HLA-DQA1*03:01-B1*03:02L
  REGION 1..10: note = CONT. FROM ABOVE: HLA-DPA1*01:03-B1*104:01L HLA-DPA1*01:02-B1*04 :01L HLA-DRB1*10:01L HLA-DRB1*16:01L HLA-DRB1*08:02L HLA-DQA1*02 :01-B1*03:03L HLA-DRB1*15:03L
  source 1..10: note = Severe acute respiratory syndrome coronavirus 2
NEYRLYLDAY

SEQ ID NO: 9735 - protein, 10 aa, Severe acute respiratory syndrome-related coronavirus
  REGION 1..10: note = Table B: HLA-DQA1*03:02-B1*03:03L HLA-DQA1*01:02-B1*06:02L HLA-DPA1*03:01-B1*04:02L HLA-DQA1*01-B1*05L HLA-DQA1*05:01-B1*02:01L HLA-DPA1*01:03-B1*04:01L HLA-DRB1*12:01L HLA-DPA1*02:01-B1*13:01L
  REGION 1..10: note = CONT. FROM ABOVE: HLA-DPA1*03:01-B1*105:01L HLA-DPA1*01:02-B1*04 :01L HLA-DRB1*16:01L HLA-DQA1*01:03-B1*06:01L HLA-DQA1*02:01-B1* 03:03L HLA-DRB1*15:03L
  source 1..10: note = Severe acute respiratory syndrome coronavirus 2
RLYLDAYNMM

SEQ ID NO: 9736 - protein, 13 aa, Severe acute respiratory syndrome-related coronavirus
  REGION 1..13: note = Table B: HLA-DQA1*03:02-B1*03:03L HLA-DQA1*01:02-B1*06:02L HLA-DPA1*01:03-B1*03:01L HLA-DPA1*03:01-B1*04:02L HLA-DQA1*05:05-B1*03:19L HLA-DPA1*01:03-B1*04:02L HLA-DRB1*12:01L HLA-DQA1*05:05-B1*03:01L
  REGION 1..13: note = CONT. FROM ABOVE: HLA-DPA1*01:02-B1*04:01L HLA-DRB1*16:01L HLA-D QA1*01:03-B1*06:01L HLA-DRB1*15:03L
  source 1..13: note = Severe acute respiratory syndrome coronavirus 2
LYLDAYNMMISAG

SEQ ID NO: 9737 - protein, 12 aa, Severe acute respiratory syndrome-related coronavirus
  REGION 1..12: note = Table B: HLA-DQA1*03:02-B1*03:03L HLA-DQA1*05:01-B1*03:01L HLA-DRB1*13:02L HLA-DRB1*01:02L HLA-DQA1*05:05-B1*03:19L HLA-DQA1*05:01-B1*02:01L HLA-DQA1*05:05-B1*03:01L HLA-DRB1*14:17L
  source 1..12: note = Severe acute respiratory syndrome coronavirus 2
DAYNMMISAGFS

SEQ ID NO: 9738 - protein, 11 aa, Severe acute respiratory syndrome-related coronavirus
  REGION 1..11: note = Table B: HLA-DQA1*03:02-B1*03:03L HLA-DQA1*05:01-B1*03:01L HLA-DPA1*03:01-B1*105:01L HLA-DQA1*03:01-B1*03:02L HLA-DQA1*05:05-B1*03:01L HLA-DQA1*02:01-B1*03:03L
  source 1..11: note = Severe acute respiratory syndrome coronavirus 2
ISAGFSLWVYK

SEQ ID NO: 9739 - protein, 10 aa, Severe acute respiratory syndrome-related coronavirus
  REGION 1..10: note = Table B: HLA-DQA1*03:02-B1*03:03L HLA-DQA1*05:01-B1*03:01L HLA-DRB1*04:03L HLA-DRB1*01:03L HLA-DQA1*01:02-B1*06:02L HLA-DRB1*01:02L HLA-DPA1*01:03-B1*03:01L HLA-DPA1*03:01-B1*04:02M HLA-DRB1*14:01L HLA-DRB1*08:01L
  REGION 1..10: note = CONT. FROM ABOVE: HLA-DQA1*01-B1*05L HLA-DQA1*05:01-B1*02:01L HL A-DPA1*01:03-B1*04:01L HLA-DPA1*01:03-B1*04:02L HLA-DRB1*12:01L HLA-DPA1*03:01-B1*105:01M HLA-DQA1*03:01-B1*03:02L HLA-DPA1*01:0 3-B1*02:01L HLA-DPA1*01:02-B1*04:01M HLA-DRB1*16:01L
  REGION 1..10: note = CONT. FROM ABOVE: HLA-DQA1*01:03-B1*06:01L HLA-DRB1*04:08L HLA-D QA1*02:01-B1*03:03L HLA-DRB1*15:03L
  source 1..10: note = Severe acute respiratory syndrome coronavirus 2
WVYKQFDTYN

SEQ ID NO: 9740 - protein, 12 aa, Severe acute respiratory syndrome-related coronavirus
  REGION 1..12: note = Table B: HLA-DQA1*03:02-B1*03:03L HLA-DQA1*01:02-B1*06:02L HLA-DPA1*03:01-B1*04:02L HLA-DQA1*05:01-B1*02:01L HLA-DPA1*01:03-B1*04:01L HLA-DPA1*01:03-B1*04:02L HLA-DPA1*03:01-B1*105:01L HLA-DPA1*01:02-B1*04:01L
  REGION 1..12: note = CONT. FROM ABOVE: HLA-DRB1*16:01L HLA-DRB1*15:03L
  source 1..12: note = Severe acute respiratory syndrome coronavirus 2
KQFDTYNLWNTF

SEQ ID NO: 9741 - protein, 10 aa, Severe acute respiratory syndrome-related coronavirus
  REGION 1..10: note = Table B: HLA-DQA1*03:02-B1*03:03L HLA-DPA1*03:01-B1*04:02L HLA-DQA1*05:05-B1*03:19L HLA-DPA1*01:02-B1*04:01L HLA-DQA1*01:03-B1*06:01L HLA-DQA1*02:01-B1*03:03L HLA-DRB1*15:03L
  source 1..10: note = Severe acute respiratory syndrome coronavirus 2
YNLWNTFTRL

SEQ ID NO: 9742 - protein, 10 aa, Severe acute respiratory syndrome-related coronavirus
  REGION 1..10: note = Table B: HLA-DQA1*03:02-B1*03:03L HLA-DQA1*05:01-B1*03:01L HLA-DRB1*04:03L HLA-DRB1*01:03L HLA-DRB1*04:05L HLA-DQA1*01:02-B1*06:02L HLA-DRB1*01:02L HLA-DQA1*01-B1*05L HLA-DRB1*12:01L HLA-DPA1*03:01-B1*105:01L
  REGION 1..10: note = CONT. FROM ABOVE: HLA-DQA1*03:01-B1*03:02L HLA-DRB1*14:17L HLA-D PA1*01:02-B1*04:01L HLA-DRB1*16:01L HLA-DQA1*01:03-B1*06:01L HLA -DRB1*04:08L HLA-DQA1*02:01-B1*03:03L
  source 1..10: note = Severe acute respiratory syndrome coronavirus 2
TFTRLQSLEN

SEQ ID NO: 9743 - protein, 10 aa, Severe acute respiratory syndrome-related coronavirus
  REGION 1..10: note = Table B: HLA-DQA1*03:02-B1*03:03L HLA-DQA1*05:01-B1*03:01L HLA-DRB1*04:01L HLA-DRB1*04:03L HLA-DRB1*13:02L HLA-DRB1*13:03L HLA-DRB1*01:03M HLA-DRB1*04:05L HLA-DQA1*01:02-B1*06:02M HLA-DRB1*01:01L HLA-DRB1*01:02L HLA-DRB1*08:77L
  REGION 1..10: note = CONT. FROM ABOVE: HLA-DPA1*01:03-B1*03:01L HLA-DPA1*03:01-B1*04: 02L HLA-DRB1*03:01L HLA-DRB1*14:01L HLA-DRB1*11:03L HLA-DRB1*14: 02M HLA-DQA1*01:01-B1*05:01L HLA-DRB1*11:01L HLA-DQA1*01-B1*05L HLA-DQA1*05:05-B1*03:19L HLA-DQA1*05:01-B1*02:01L
  REGION 1..10: note = CONT. FROM ABOVE: HLA-DRB4*01:01L HLA-DPA1*01:03-B1*04:01L HLA-D QA1*05:05-B1*03:116L HLA-DPA1*01:03-B1*04:02L HLA-DRB1*12:01L HL A-DPA1*02:01-B1*13:01M HLA-DPA1*03:01-B1*105:01L HLA-DQA1*03:01- B1*03:02L HLA-DPA1*01:03-B1*104:01L HLA-DPA1*01:02-B1*04:01L
  REGION 1..10: note = CONT. FROM ABOVE: HLA-DRB1*07:01L HLA-DRB1*10:01L HLA-DRB1*16:01 L HLA-DQA1*01:03-B1*06:01M HLA-DRB1*08:02L HLA-DQA1*02:01-B1*03: 03M HLA-DRB1*15:03L
  source 1..10: note = Severe acute respiratory syndrome coronavirus 2
RLQSLENVAF

SEQ ID NO: 9744 - protein, 10 aa, Severe acute respiratory syndrome-related coronavirus
  REGION 1..10: note = Table B: HLA-DQA1*03:02-B1*03:03L HLA-DQA1*05:05-B1*03:19L
  source 1..10: note = Severe acute respiratory syndrome coronavirus 2
SLENVAFNVV

SEQ ID NO: 9745 - protein, 10 aa, Severe acute respiratory syndrome-related coronavirus
  REGION 1..10: note = Table B: HLA-DQA1*03:02-B1*03:03L HLA-DPA1*03:01-B1*04:02L HLA-DQA1*01-B1*05L HLA-DQA1*05:01-B1*02:01L HLA-DPA1*01:03-B1*04:01L HLA-DPA1*01:03-B1*04:02L HLA-DPA1*03:01-B1*105:01L HLA-DPA1*01:02-B1*04:01L
  REGION 1..10: note = CONT. FROM ABOVE: HLA-DRB1*16:01L HLA-DQA1*01:03-B1*06:01L
  source 1..10: note = Severe acute respiratory syndrome coronavirus 2
LENVAFNVVN

SEQ ID NO: 9746 - protein, 11 aa, Severe acute respiratory syndrome-related coronavirus
  REGION 1..11: note = Table B: HLA-DQA1*03:02-B1*03:03L HLA-DQA1*05:01-B1*03:01L HLA-DRB1*04:02L HLA-DRB1*14:17L HLA-DPA1*01:02-B1*04:01L
  source 1..11: note = Severe acute respiratory syndrome coronavirus 2
ENVAFNVVNKG

SEQ ID NO: 9747 - protein, 12 aa, Severe acute respiratory syndrome-related coronavirus
  REGION 1..12: note = Table B: HLA-DQA1*03:02-B1*03:03L HLA-DRB1*13:02L HLA-DRB1*04:05L HLA-DRB1*01:02L HLA-DRB4*03:01NL HLA-DRB3*02:01L HLA-DPA1*01:03-B1*03:01L HLA-DRB1*11:03L HLA-DRB1*11:04L HLA-DRB1*11:01L HLA-DQA1*05:01-B1*02:01L
  REGION 1..12: note = CONT. FROM ABOVE: HLA-DQA1*05:05-B1*03:116L HLA-DPA1*01:03-B1*04 :02L HLA-DRB1*12:02L HLA-DRB3*01:01L HLA-DQA1*05:05-B1*03:01L HL A-DRB1*14:17L HLA-DRB1*04:08L HLA-DRB1*08:02L HLA-DRB1*08:03L
  source 1..12: note = Severe acute respiratory syndrome coronavirus 2
VAFNVVNKGHFD

SEQ ID NO: 9748 - protein, 10 aa, Severe acute respiratory syndrome-related coronavirus
  REGION 1..10: note = Table B: HLA-DQA1*03:02-B1*03:03L
  source 1..10: note = Severe acute respiratory syndrome coronavirus 2
GHFDGQQGEV

SEQ ID NO: 9749 - protein, 12 aa, Severe acute respiratory syndrome-related coronavirus
  REGION 1..12: note = Table B: HLA-DQA1*03:02-B1*03:03L HLA-DQA1*05:01-B1*03:01L HLA-DQA1*05:05-B1*03:19L HLA-DQA1*05:05-B1*03:01L HLA-DQA1*02:01-B1*03:03L
  source 1..12: note = Severe acute respiratory syndrome coronavirus 2
HFDGQQGEVPVS

SEQ ID NO: 9750 - protein, 10 aa, Severe acute respiratory syndrome-related coronavirus
  REGION 1..10: note = Table B: HLA-DQA1*03:02-B1*03:03M HLA-DQA1*05:01-B1*03:01L HLA-DQA1*01:02-B1*06:02L HLA-DPA1*03:01-B1*04:02L HLA-DRB1*14:01L HLA-DRB1*11:02L HLA-DRB1*14:02L HLA-DQA1*05:05-B1*03:19M HLA-DQA1*05:05-B1*03:116L
  REGION 1..10: note = CONT. FROM ABOVE: HLA-DRB1*09:01L HLA-DPA1*02:01-B1*13:01L HLA-D PA1*03:01-B1*105:01L HLA-DQA1*03:01-B1*03:02L HLA-DPA1*01:03-B1* 104:01L HLA-DPA1*01:02-B1*04:01L HLA-DRB1*10:01L HLA-DRB1*16:01L HLA-DQA1*01:03-B1*06:01L HLA-DRB1*08:03L
  REGION 1..10: note = CONT. FROM ABOVE: HLA-DQA1*02:01-B1*03:03L HLA-DRB1*15:03L
  source 1..10: note = Severe acute respiratory syndrome coronavirus 2
GQQGEVPVSI

SEQ ID NO: 9751 - protein, 10 aa, Severe acute respiratory syndrome-related coronavirus
  REGION 1..10: note = Table B: HLA-DQA1*03:02-B1*03:03L HLA-DQA1*03:01-B1*03:02L
  source 1..10: note = Severe acute respiratory syndrome coronavirus 2
GEVPVSIINN

SEQ ID NO: 9752 - protein, 10 aa, Severe acute respiratory syndrome-related coronavirus
  REGION 1..10: note = Table B: HLA-DQA1*03:02-B1*03:03L HLA-DQA1*05:01-B1*03:01L HLA-DRB1*13:03L HLA-DRB1*04:05L HLA-DQA1*01:02-B1*06:02L HLA-DRB1*01:01L HLA-DRB1*01:02L HLA-DPA1*03:01-B1*04:02L HLA-DRB1*14:01L HLA-DRB1*08:01L HLA-DQA1*01-B1*05L
  REGION 1..10: note = CONT. FROM ABOVE: HLA-DQA1*05:01-B1*02:01L HLA-DQA1*05:05-B1*03: 116M HLA-DPA1*02:01-B1*13:01L HLA-DPA1*03:01-B1*105:01L HLA-DQA1 *03:01-B1*03:02L HLA-DPA1*01:02-B1*04:01L HLA-DRB1*16:01L HLA-DR B1*08:03L HLA-DQA1*02:01-B1*03:03L HLA-DRB1*15:03L
  source 1..10: note = Severe acute respiratory syndrome coronavirus 2
VPVSIINNTV

SEQ ID NO: 9753 - protein, 10 aa, Severe acute respiratory syndrome-related coronavirus
  REGION 1..10: note = Table B: HLA-DQA1*03:02-B1*03:03L HLA-DQA1*05:05-B1*03:19L HLA-DQA1*03:01-B1*03:02L HLA-DQA1*01:03-B1*06:01L HLA-DQA1*02:01-B1*03:03L HLA-DRB1*15:03L
  source 1..10: note = Severe acute respiratory syndrome coronavirus 2
IINNTVYTKV

SEQ ID NO: 9754 - protein, 10 aa, Severe acute respiratory syndrome-related coronavirus
  REGION 1..10: note = Table B: HLA-DQA1*03:02-B1*03:03L HLA-DQA1*05:01-B1*03:01L HLA-DRB1*04:03L HLA-DRB1*04:02L HLA-DQA1*01:02-B1*06:02L HLA-DQA1*01-B1*05L HLA-DQA1*05:01-B1*02:01L HLA-DPA1*03:01-B1*105:01L HLA-DQA1*03:01-B1*03:02L
  REGION 1..10: note = CONT. FROM ABOVE: HLA-DPA1*01:02-B1*04:01L HLA-DRB1*16:01L HLA-D QA1*01:03-B1*06:01L HLA-DQA1*02:01-B1*03:03L
  source 1..10: note = Severe acute respiratory syndrome coronavirus 2
TVYTKVDGVD

SEQ ID NO: 9755 - protein, 10 aa, Severe acute respiratory syndrome-related coronavirus
  REGION 1..10: note = Table B: HLA-DQA1*03:02-B1*03:03L HLA-DQA1*01-B1*05L HLA-DQA1*03:01-B1*03:02L HLA-DPA1*01:02-B1*04:01L HLA-DRB1*16:01L HLA-DQA1*01:03-B1*06:01L HLA-DQA1*02:01-B1*03:03L
  source 1..10: note = Severe acute respiratory syndrome coronavirus 2
VYTKVDGVDV

SEQ ID NO: 9756 - protein, 10 aa, Severe acute respiratory syndrome-related coronavirus
  REGION 1..10: note = Table B: HLA-DQA1*03:02-B1*03:03L HLA-DQA1*05:01-B1*03:01L HLA-DRB1*04:03L HLA-DRB1*13:03L HLA-DRB1*04:02L HLA-DRB1*04:05L HLA-DRB4*03:01NL HLA-DQA1*01-B1*05L HLA-DQA1*05:01-B1*02:01L HLA-DRB1*04:10L HLA-DRB1*12:01L HLA-DQA1*03:01-B1*03:02L
  REGION 1..10: note = CONT. FROM ABOVE: HLA-DRB1*14:54L HLA-DRB1*14:17L HLA-DRB1*16:01 L HLA-DQA1*02:01-B1*03:03L
  source 1..10: note = Severe acute respiratory syndrome coronavirus 2
YTKVDGVDVE

SEQ ID NO: 9757 - protein, 10 aa, Severe acute respiratory syndrome-related coronavirus
  REGION 1..10: note = Table B: HLA-DQA1*03:02-B1*03:03L HLA-DQA1*05:01-B1*03:01L HLA-DRB1*13:03L HLA-DRB1*04:02L HLA-DPA1*03:01-B1*04:02L HLA-DRB1*14:01L HLA-DRB1*08:01L HLA-DQA1*01-B1*05L HLA-DQA1*05:01-B1*02:01L HLA-DQA1*05:05-B1*03:116L
  REGION 1..10: note = CONT. FROM ABOVE: HLA-DQA1*03:01-B1*03:02L HLA-DPA1*01:02-B1*04: 01L HLA-DRB1*16:01L HLA-DQA1*02:01-B1*03:03L
  source 1..10: note = Severe acute respiratory syndrome coronavirus 2
TKVDGVDVEL

SEQ ID NO: 9758 - protein, 10 aa, Severe acute respiratory syndrome-related coronavirus
  REGION 1..10: note = Table B: HLA-DQA1*03:02-B1*03:03L HLA-DQA1*05:01-B1*03:01L HLA-DRB1*13:03L HLA-DRB1*01:03L HLA-DQA1*01:02-B1*06:02L HLA-DRB1*08:77L HLA-DPA1*01:03-B1*03:01L HLA-DPA1*03:01-B1*04:02L HLA-DRB1*03:01L HLA-DRB1*14:01L
  REGION 1..10: note = CONT. FROM ABOVE: HLA-DRB1*14:02L HLA-DQA1*01-B1*05L HLA-DQA1*05 :05-B1*03:19L HLA-DQA1*05:01-B1*02:01L HLA-DRB4*01:01L HLA-DPA1* 01:03-B1*04:01L HLA-DQA1*05:05-B1*03:116L HLA-DPA1*01:03-B1*04:0 2L HLA-DPA1*02:01-B1*13:01L HLA-DPA1*03:01-B1*105:01L
  REGION 1..10: note = CONT. FROM ABOVE: HLA-DQA1*03:01-B1*03:02L HLA-DPA1*01:03-B1*104 :01L HLA-DPA1*01:02-B1*04:01L HLA-DRB1*16:01L HLA-DQA1*01:03-B1* 06:01L HLA-DRB1*08:02L HLA-DQA1*02:01-B1*03:03L HLA-DRB1*15:03L
  source 1..10: note = Severe acute respiratory syndrome coronavirus 2
KVDGVDVELF

SEQ ID NO: 9759 - protein, 12 aa, Severe acute respiratory syndrome-related coronavirus
  REGION 1..12: note = Table B: HLA-DQA1*03:02-B1*03:03L HLA-DQA1*05:01-B1*03:01L HLA-DRB1*04:03L HLA-DQA1*01:02-B1*06:02L HLA-DQA1*01:01-B1*05:01L HLA-DQA1*01-B1*05L HLA-DQA1*05:01-B1*02:01L HLA-DPA1*03:01-B1*105:01L
  REGION 1..12: note = CONT. FROM ABOVE: HLA-DQA1*05:05-B1*03:01L HLA-DPA1*01:02-B1*04: 01L HLA-DRB1*16:01L
  source 1..12: note = Severe acute respiratory syndrome coronavirus 2
VDGVDVELFENK

SEQ ID NO: 9760 - protein, 11 aa, Severe acute respiratory syndrome-related coronavirus
  REGION 1..11: note = Table B: HLA-DQA1*03:02-B1*03:03L HLA-DRB1*04:03L HLA-DRB1*04:02L HLA-DPA1*03:01-B1*04:02L HLA-DQA1*05:01-B1*02:01L HLA-DPA1*03:01-B1*105:01L HLA-DQA1*03:01-B1*03:02L HLA-DRB1*14:17L
  REGION 1..11: note = CONT. FROM ABOVE: HLA-DPA1*01:02-B1*04:01L HLA-DRB1*16:01L HLA-D QA1*01:03-B1*06:01L HLA-DQA1*02:01-B1*03:03L
  source 1..11: note = Severe acute respiratory syndrome coronavirus 2
VDVELFENKTT

SEQ ID NO: 9761 - protein, 10 aa, Severe acute respiratory syndrome-related coronavirus
  REGION 1..10: note = Table B: HLA-DQA1*03:02-B1*03:03M HLA-DQA1*05:05-B1*03:19L HLA-DQA1*05:05-B1*03:116L HLA-DRB1*09:01L HLA-DQA1*03:01-B1*03:02L HLA-DPA1*01:03-B1*104:01L
  source 1..10: note = Severe acute respiratory syndrome coronavirus 2
VELFENKTTL

SEQ ID NO: 9762 - protein, 10 aa, Severe acute respiratory syndrome-related coronavirus
  REGION 1..10: note = Table B: HLA-DQA1*03:02-B1*03:03L HLA-DQA1*05:01-B1*03:01L HLA-DRB1*04:03L HLA-DRB1*13:02L HLA-DRB1*13:03L HLA-DRB1*01:03L HLA-DRB1*04:02L HLA-DRB1*04:05L HLA-DQA1*01:02-B1*06:02L HLA-DRB1*01:02L HLA-DRB4*03:01NL HLA-DRB1*08:04L HLA-DRB1*08:77L
  REGION 1..10: note = CONT. FROM ABOVE: HLA-DRB3*02:01L HLA-DPA1*01:03-B1*03:01L HLA-D PA1*03:01-B1*04:02L HLA-DRB1*14:01L HLA-DRB1*11:03L HLA-DRB1*11: 04L HLA-DRB1*14:02L HLA-DQA1*01:01-B1*05:01L HLA-DRB1*08:01L HLA -DRB1*11:01L HLA-DQA1*01-B1*05L HLA-DQA1*05:05-B1*03:19L
  REGION 1..10: note = CONT. FROM ABOVE: HLA-DQA1*05:01-B1*02:01L HLA-DPA1*01:03-B1*04: 01L HLA-DRB1*04:10L HLA-DPA1*01:03-B1*04:02L HLA-DRB1*12:01L HLA -DRB1*12:02L HLA-DRB3*01:01L HLA-DPA1*02:01-B1*13:01L HLA-DPA1*0 3:01-B1*105:01L HLA-DQA1*03:01-B1*03:02L HLA-DRB1*14:54L
  REGION 1..10: note = CONT. FROM ABOVE: HLA-DQA1*05:05-B1*03:01L HLA-DRB1*14:17L HLA-D PA1*01:02-B1*04:01L HLA-DRB1*10:01L HLA-DRB1*16:01L HLA-DQA1*01: 03-B1*06:01L HLA-DRB1*04:08L HLA-DRB1*08:03L HLA-DQA1*02:01-B1*0 3:03L HLA-DRB1*15:03L
  source 1..10: note = Severe acute respiratory syndrome coronavirus 2
FENKTTLPVN

SEQ ID NO: 9763 - protein, 11 aa, Severe acute respiratory syndrome-related coronavirus
  REGION 1..11: note = Table B: HLA-DQA1*03:02-B1*03:03L HLA-DQA1*05:01-B1*03:01L HLA-DRB1*04:03L HLA-DQA1*01:02-B1*06:02L HLA-DQA1*01-B1*05L HLA-DQA1*05:01-B1*02:01L
  source 1..11: note = Severe acute respiratory syndrome coronavirus 2
ENKTTLPVNVA

SEQ ID NO: 9764 - protein, 10 aa, Severe acute respiratory syndrome-related coronavirus
  REGION 1..10: note = Table B: HLA-DQA1*03:02-B1*03:03L HLA-DQA1*05:01-B1*03:01L HLA-DRB1*04:01L HLA-DRB1*04:03L HLA-DRB1*13:02L HLA-DRB1*13:03L HLA-DRB1*01:03M HLA-DRB1*04:05L HLA-DQA1*01:02-B1*06:02M HLA-DRB1*01:01L HLA-DRB4*03:01NL HLA-DRB1*08:77L
  REGION 1..10: note = CONT. FROM ABOVE: HLA-DPA1*01:03-B1*03:01L HLA-DPA1*03:01-B1*04: 02L HLA-DRB1*03:01L HLA-DRB1*14:01L HLA-DRB1*14:02M HLA-DRB1*11: 01L HLA-DQA1*01-B1*05L HLA-DQA1*05:05-B1*03:19L HLA-DQA1*05:01-B 1*02:01L HLA-DRB4*01:01L HLA-DPA1*01:03-B1*04:01L
  REGION 1..10: note = CONT. FROM ABOVE: HLA-DQA1*05:05-B1*03:116L HLA-DPA1*01:03-B1*04 :02L HLA-DRB1*12:01L HLA-DPA1*02:01-B1*13:01L HLA-DPA1*03:01-B1* 105:01L HLA-DQA1*03:01-B1*03:02L HLA-DPA1*01:02-B1*04:01L HLA-DR B1*10:01L HLA-DRB1*16:01L HLA-DQA1*01:03-B1*06:01L
  REGION 1..10: note = CONT. FROM ABOVE: HLA-DRB1*08:02L HLA-DQA1*02:01-B1*03:03M HLA-D RB1*15:03L
  source 1..10: note = Severe acute respiratory syndrome coronavirus 2
KTTLPVNVAF

SEQ ID NO: 9765 - protein, 10 aa, Severe acute respiratory syndrome-related coronavirus
  REGION 1..10: note = Table B: HLA-DQA1*03:02-B1*03:03L
  source 1..10: note = Severe acute respiratory syndrome coronavirus 2
TLPVNVAFEL

SEQ ID NO: 9766 - protein, 10 aa, Severe acute respiratory syndrome-related coronavirus
  REGION 1..10: note = Table B: HLA-DQA1*03:02-B1*03:03L HLA-DQA1*05:01-B1*03:01L HLA-DRB1*14:01L HLA-DQA1*05:05-B1*03:19L HLA-DPA1*02:01-B1*13:01L HLA-DQA1*03:01-B1*03:02L HLA-DPA1*01:03-B1*104:01L HLA-DRB1*16:01L
  REGION 1..10: note = CONT. FROM ABOVE: HLA-DQA1*01:03-B1*06:01L HLA-DQA1*02:01-B1*03: 03L HLA-DRB1*15:03L
  source 1..10: note = Severe acute respiratory syndrome coronavirus 2
NIKPVPEVKI

SEQ ID NO: 9767 - protein, 15 aa, Severe acute respiratory syndrome-related coronavirus
  REGION 1..15: note = Table B: HLA-DQA1*03:02-B1*03:03L HLA-DRB1*14:04L HLA-DQA1*05:05-B1*03:19L HLA-DRB3*01:01L HLA-DPA1*02:01-B1*13:01L HLA-DPA1*01:03-B1*104:01L HLA-DPA1*01:02-B1*04:01L HLA-DRB1*07:01L
  REGION 1..15: note = CONT. FROM ABOVE: HLA-DQA1*01:03-B1*06:01L
  source 1..15: note = Severe acute respiratory syndrome coronavirus 2
KPVPEVKILNNLGVD

SEQ ID NO: 9768 - protein, 12 aa, Severe acute respiratory syndrome-related coronavirus
  REGION 1..12: note = Table B: HLA-DQA1*03:02-B1*03:03L HLA-DQA1*05:01-B1*03:01L HLA-DRB1*04:01L HLA-DRB1*13:02L HLA-DRB1*13:03L HLA-DRB1*01:03L HLA-DRB1*04:02L HLA-DRB1*04:04L HLA-DRB1*04:05L HLA-DQA1*01:02-B1*06:02L HLA-DRB1*01:02L HLA-DRB4*03:01NL
  REGION 1..12: note = CONT. FROM ABOVE: HLA-DRB1*08:04L HLA-DRB1*08:77L HLA-DRB3*02:01 L HLA-DPA1*01:03-B1*03:01L HLA-DPA1*03:01-B1*04:02L HLA-DRB1*14: 01L HLA-DRB1*11:03L HLA-DRB1*11:04L HLA-DRB1*14:02L HLA-DRB5*01: 01L HLA-DQA1*01-B1*05L HLA-DQA1*05:05-B1*03:19L
  REGION 1..12: note = CONT. FROM ABOVE: HLA-DQA1*05:01-B1*02:01L HLA-DRB4*01:01L HLA-D RB1*04:10L HLA-DRB1*09:01L HLA-DRB1*12:01L HLA-DRB1*12:02L HLA-D PA1*03:01-B1*105:01L HLA-DQA1*03:01-B1*03:02L HLA-DRB1*14:54L HL A-DQA1*05:05-B1*03:01L HLA-DPA1*01:02-B1*04:01L HLA-DRB1*07:01L
  REGION 1..12: note = CONT. FROM ABOVE: HLA-DRB1*10:01L HLA-DRB1*16:01L HLA-DQA1*01:03 -B1*06:01L HLA-DRB1*04:08L HLA-DRB1*08:03L HLA-DQA1*02:01-B1*03: 03L HLA-DRB1*15:03L
  source 1..12: note = Severe acute respiratory syndrome coronavirus 2
ILNNLGVDIAAN

SEQ ID NO: 9769 - protein, 12 aa, Severe acute respiratory syndrome-related coronavirus
  REGION 1..12: note = Table B: HLA-DQA1*03:02-B1*03:03L HLA-DQA1*01:02-B1*06:02L HLA-DQA1*05:05-B1*03:19L HLA-DQA1*05:01-B1*02:01L HLA-DQA1*03:01-B1*03:02L HLA-DQA1*05:05-B1*03:01L HLA-DQA1*01:03-B1*06:01L HLA-DQA1*02:01-B1*03:03L
  source 1..12: note = Severe acute respiratory syndrome coronavirus 2
NNLGVDIAANTV

SEQ ID NO: 9770 - protein, 12 aa, Severe acute respiratory syndrome-related coronavirus
  REGION 1..12: note = Table B: HLA-DQA1*03:02-B1*03:03L HLA-DRB1*04:02L HLA-DRB1*12:01L HLA-DQA1*03:01-B1*03:02L HLA-DQA1*05:05-B1*03:01L HLA-DRB1*14:17L HLA-DQA1*02:01-B1*03:03L HLA-DRB1*15:03L
  source 1..12: note = Severe acute respiratory syndrome coronavirus 2
GVDIAANTVIWD

SEQ ID NO: 9771 - protein, 11 aa, Severe acute respiratory syndrome-related coronavirus
  REGION 1..11: note = Table B: HLA-DQA1*03:02-B1*03:03L HLA-DQA1*05:01-B1*03:01L HLA-DRB1*04:03L HLA-DRB1*01:03L HLA-DRB1*04:02L HLA-DRB1*01:02L HLA-DRB4*03:01NL HLA-DQA1*01:01-B1*05:01L HLA-DRB1*12:01L HLA-DRB1*14:17L HLA-DPA1*01:02-B1*04:01L HLA-DRB1*15:03L
  source 1..11: note = Severe acute respiratory syndrome coronavirus 2
IAANTVIWDYK

SEQ ID NO: 9772 - protein, 13 aa, Severe acute respiratory syndrome-related coronavirus
  REGION 1..13: note = Table B: HLA-DQA1*03:02-B1*03:03L HLA-DQA1*05:01-B1*03:01L HLA-DPA1*03:01-B1*04:02L HLA-DRB1*11:01L HLA-DQA1*01-B1*05L HLA-DRB1*13:01L HLA-DRB1*09:01L HLA-DRB1*12:02L HLA-DPA1*02:01-B1*13:01L HLA-DPA1*03:01-B1*105:01L
  REGION 1..13: note = CONT. FROM ABOVE: HLA-DRB1*10:01L HLA-DRB1*08:03L
  source 1..13: note = Severe acute respiratory syndrome coronavirus 2
IWDYKRDAPAHIS

SEQ ID NO: 9773 - protein, 12 aa, Severe acute respiratory syndrome-related coronavirus
  REGION 1..12: note = Table B: HLA-DQA1*03:02-B1*03:03L HLA-DRB1*04:01L HLA-DRB1*04:04L HLA-DQA1*01:02-B1*06:02L HLA-DRB1*01:01L HLA-DPA1*03:01-B1*04:02L HLA-DRB1*08:01L HLA-DRB1*11:01L HLA-DRB5*01:01L HLA-DQA1*01-B1*05L HLA-DQA1*05:05-B1*03:19L
  REGION 1..12: note = CONT. FROM ABOVE: HLA-DRB1*13:01L HLA-DRB1*04:10L HLA-DRB1*09:01 L HLA-DPA1*01:03-B1*04:02L HLA-DRB1*12:02L HLA-DPA1*02:01-B1*13: 01L HLA-DPA1*03:01-B1*105:01L HLA-DQA1*05:05-B1*03:01L HLA-DRB1* 07:01L HLA-DRB1*10:01L HLA-DRB1*08:03L
  source 1..12: note = Severe acute respiratory syndrome coronavirus 2
DYKRDAPAHIST

SEQ ID NO: 9774 - protein, 10 aa, Severe acute respiratory syndrome-related coronavirus
  REGION 1..10: note = Table B: HLA-DQA1*03:02-B1*03:03L HLA-DQA1*05:05-B1*03:19M HLA-DQA1*03:01-B1*03:02L HLA-DPA1*01:03-B1*104:01L HLA-DRB1*16:01L
  source 1..10: note = Severe acute respiratory syndrome coronavirus 2
RDAPAHISTI

SEQ ID NO: 9775 - protein, 10 aa, Severe acute respiratory syndrome-related coronavirus
  REGION 1..10: note = Table B: HLA-DQA1*03:02-B1*03:03L HLA-DQA1*05:01-B1*03:01L HLA-DQA1*05:05-B1*03:19L HLA-DQA1*03:01-B1*03:02L HLA-DQA1*05:05-B1*03:01L HLA-DQA1*01:03-B1*06:01L HLA-DQA1*02:01-B1*03:03L
  source 1..10: note = Severe acute respiratory syndrome coronavirus 2
DAPAHISTIG

SEQ ID NO: 9776 - protein, 10 aa, Severe acute respiratory syndrome-related coronavirus
  REGION 1..10: note = Table B: HLA-DQA1*03:02-B1*03:03L HLA-DQA1*05:01-B1*03:01L HLA-DRB1*13:03M HLA-DRB1*01:03L HLA-DRB1*04:02L HLA-DRB1*04:05L HLA-DQA1*01:02-B1*06:02L HLA-DRB1*01:01L HLA-DRB1*01:02L HLA-DRB4*03:01NL HLA-DPA1*01:03-B1*03:01L
  REGION 1..10: note = CONT. FROM ABOVE: HLA-DPA1*03:01-B1*04:02L HLA-DRB1*14:01L HLA-D RB1*08:01L HLA-DRB5*01:01L HLA-DQA1*01-B1*05L HLA-DQA1*05:01-B1* 02:01L HLA-DQA1*05:05-B1*03:116M HLA-DPA1*02:01-B1*13:01L HLA-DP A1*03:01-B1*105:01M HLA-DQA1*03:01-B1*03:02L
  REGION 1..10: note = CONT. FROM ABOVE: HLA-DPA1*01:02-B1*04:01L HLA-DRB1*10:01L HLA-D RB1*16:01L HLA-DRB1*08:03L HLA-DQA1*02:01-B1*03:03L HLA-DRB1*15: 03L
  source 1..10: note = Severe acute respiratory syndrome coronavirus 2
APAHISTIGV

SEQ ID NO: 9777 - protein, 10 aa, Severe acute respiratory syndrome-related coronavirus
  REGION 1..10: note = Table B: HLA-DQA1*03:02-B1*03:03L HLA-DQA1*05:01-B1*03:01L HLA-DRB1*04:03L HLA-DRB1*13:03L HLA-DRB1*01:03L HLA-DRB1*04:02L HLA-DRB1*04:05L HLA-DRB1*01:02L HLA-DRB4*03:01NL HLA-DRB1*14:01L HLA-DRB1*12:01L HLA-DQA1*03:01-B1*03:02L HLA-DRB1*14:54L
  REGION 1..10: note = CONT. FROM ABOVE: HLA-DRB1*14:17L HLA-DPA1*01:02-B1*04:01L HLA-D RB1*16:01L HLA-DQA1*01:03-B1*06:01L HLA-DRB1*04:08L HLA-DQA1*02: 01-B1*03:03L
  source 1..10: note = Severe acute respiratory syndrome coronavirus 2
SMTDIAKKPT

SEQ ID NO: 9778 - protein, 10 aa, Severe acute respiratory syndrome-related coronavirus
  REGION 1..10: note = Table B: HLA-DQA1*03:02-B1*03:03L HLA-DRB1*04:03L HLA-DRB1*13:03L HLA-DRB1*04:02L HLA-DQA1*01-B1*05L HLA-DQA1*03:01-B1*03:02L HLA-DRB1*14:17L HLA-DRB1*16:01L HLA-DQA1*02:01-B1*03:03L
  source 1..10: note = Severe acute respiratory syndrome coronavirus 2
TDIAKKPTET

SEQ ID NO: 9779 - protein, 10 aa, Severe acute respiratory syndrome-related coronavirus
  REGION 1..10: note = Table B: HLA-DQA1*03:02-B1*03:03L HLA-DQA1*05:01-B1*03:01L HLA-DQA1*01:02-B1*06:02L HLA-DRB1*01:02L HLA-DQA1*05:05-B1*03:19L HLA-DQA1*05:01-B1*02:01L HLA-DQA1*05:05-B1*03:116L HLA-DPA1*02:01-B1*13:01L
  REGION 1..10: note = CONT. FROM ABOVE: HLA-DPA1*03:01-B1*105:01L HLA-DPA1*01:02-B1*04 :01L HLA-DQA1*02:01-B1*03:03L HLA-DRB1*15:03L
  source 1..10: note = Severe acute respiratory syndrome coronavirus 2
DIAKKPTETI

SEQ ID NO: 9780 - protein, 12 aa, Severe acute respiratory syndrome-related coronavirus
  REGION 1..12: note = Table B: HLA-DQA1*03:02-B1*03:03L HLA-DRB1*04:03L HLA-DRB1*04:02L HLA-DQA1*01:02-B1*06:02L HLA-DQA1*05:01-B1*02:01L HLA-DQA1*03:01-B1*03:02L HLA-DRB1*16:01L HLA-DQA1*01:03-B1*06:01L
  REGION 1..12: note = CONT. FROM ABOVE: HLA-DQA1*02:01-B1*03:03L HLA-DRB1*15:03L
  source 1..12: note = Severe acute respiratory syndrome coronavirus 2
APLTVFFDGRVD

SEQ ID NO: 9781 - protein, 10 aa, Severe acute respiratory syndrome-related coronavirus
  REGION 1..10: note = Table B: HLA-DQA1*03:02-B1*03:03L HLA-DQA1*01-B1*05L HLA-DQA1*05:01-B1*02:01L HLA-DQA1*03:01-B1*03:02L HLA-DQA1*02:01-B1*03:03L
  source 1..10: note = Severe acute respiratory syndrome coronavirus 2
FDGRVDGQVD

SEQ ID NO: 9782 - protein, 14 aa, Severe acute respiratory syndrome-related coronavirus
  REGION 1..14: note = Table B: HLA-DQA1*03:02-B1*03:03L HLA-DQA1*05:01-B1*03:01L HLA-DRB1*13:02L HLA-DRB1*08:04L HLA-DPA1*03:01-B1*04:02L HLA-DRB3*01:01L HLA-DPA1*02:01-B1*13:01L HLA-DPA1*03:01-B1*105:01L HLA-DPA1*01:02-B1*04:01L
  REGION 1..14: note = CONT. FROM ABOVE: HLA-DRB1*10:01L
  source 1..14: note = Severe acute respiratory syndrome coronavirus 2
VDGQVDLFRNARNG

SEQ ID NO: 9783 - protein, 12 aa, Severe acute respiratory syndrome-related coronavirus
  REGION 1..12: note = Table B: HLA-DQA1*03:02-B1*03:03L HLA-DQA1*05:01-B1*03:01L HLA-DRB1*04:03L HLA-DRB1*13:02L HLA-DRB1*13:03L HLA-DRB1*01:03L HLA-DRB1*04:02L HLA-DRB1*04:05L HLA-DQA1*01:02-B1*06:02L HLA-DRB1*01:02L HLA-DRB1*08:04L HLA-DRB1*08:77L HLA-DRB3*02:01L
  REGION 1..12: note = CONT. FROM ABOVE: HLA-DPA1*03:01-B1*04:02L HLA-DRB1*08:01L HLA-D QA1*05:01-B1*02:01L HLA-DRB1*12:01L HLA-DRB1*12:02L HLA-DRB3*01: 01L HLA-DPA1*02:01-B1*13:01L HLA-DPA1*03:01-B1*105:01L HLA-DQA1* 03:01-B1*03:02L HLA-DRB1*14:54L HLA-DRB1*14:17L HLA-DRB1*07:01L
  REGION 1..12: note = CONT. FROM ABOVE: HLA-DRB1*04:08L HLA-DQA1*02:01-B1*03:03L HLA-D RB1*15:03L
  source 1..12: note = Severe acute respiratory syndrome coronavirus 2
VDLFRNARNGVL

SEQ ID NO: 9784 - protein, 11 aa, Severe acute respiratory syndrome-related coronavirus
  REGION 1..11: note = Table B: HLA-DQA1*03:02-B1*03:03L HLA-DQA1*01:03-B1*06:01L
  source 1..11: note = Severe acute respiratory syndrome coronavirus 2
NGVLITEGSVK

SEQ ID NO: 9785 - protein, 11 aa, Severe acute respiratory syndrome-related coronavirus
  REGION 1..11: note = Table B: HLA-DQA1*03:02-B1*03:03L HLA-DRB1*13:02L HLA-DRB1*04:04L HLA-DRB1*01:02L HLA-DRB1*14:01L HLA-DRB1*11:03L HLA-DRB1*11:04L HLA-DQA1*01-B1*05L HLA-DQA1*05:01-B1*02:01L HLA-DRB1*12:02L HLA-DRB1*10:01L HLA-DRB1*04:08L HLA-DRB1*08:03L
  source 1..11: note = Severe acute respiratory syndrome coronavirus 2
GVLITEGSVKG

SEQ ID NO: 9786 - protein, 10 aa, Severe acute respiratory syndrome-related coronavirus
  REGION 1..10: note = Table B: HLA-DQA1*03:02-B1*03:03L HLA-DQA1*05:01-B1*03:01L HLA-DQA1*03:01-B1*03:02L HLA-DQA1*02:01-B1*03:03L HLA-DRB1*15:03L
  source 1..10: note = Severe acute respiratory syndrome coronavirus 2
LITEGSVKGL

SEQ ID NO: 9787 - protein, 11 aa, Severe acute respiratory syndrome-related coronavirus
  REGION 1..11: note = Table B: HLA-DQA1*03:02-B1*03:03L HLA-DQA1*03:01-B1*03:02L HLA-DQA1*01:03-B1*06:01L HLA-DQA1*02:01-B1*03:03L
  source 1..11: note = Severe acute respiratory syndrome coronavirus 2
ITEGSVKGLQP

SEQ ID NO: 9788 - protein, 10 aa, Severe acute respiratory syndrome-related coronavirus
  REGION 1..10: note = Table B: HLA-DQA1*03:02-B1*03:03L
  source 1..10: note = Severe acute respiratory syndrome coronavirus 2
GSVKGLQPSV

SEQ ID NO: 9789 - protein, 10 aa, Severe acute respiratory syndrome-related coronavirus
  REGION 1..10: note = Table B: HLA-DQA1*03:02-B1*03:03L HLA-DQA1*05:01-B1*03:01L HLA-DRB1*04:03L HLA-DRB1*13:03L HLA-DRB1*01:03L HLA-DRB1*04:02L HLA-DRB4*03:01NL HLA-DQA1*03:01-B1*03:02L HLA-DRB1*14:17L HLA-DQA1*02:01-B1*03:03L
  source 1..10: note = Severe acute respiratory syndrome coronavirus 2
GLQPSVGPKQ

SEQ ID NO: 9790 - protein, 11 aa, Severe acute respiratory syndrome-related coronavirus
  REGION 1..11: note = Table B: HLA-DQA1*03:02-B1*03:03L HLA-DQA1*05:01-B1*03:01L HLA-DRB1*04:02L HLA-DPA1*03:01-B1*04:02L HLA-DRB1*14:01L HLA-DRB1*08:01L HLA-DRB5*01:01L HLA-DQA1*01-B1*05L HLA-DQA1*05:01-B1*02:01L HLA-DPA1*01:02-B1*04:01L
  source 1..11: note = Severe acute respiratory syndrome coronavirus 2
QPSVGPKQASL

SEQ ID NO: 9791 - protein, 12 aa, Severe acute respiratory syndrome-related coronavirus
  REGION 1..12: note = Table B: HLA-DQA1*03:02-B1*03:03L HLA-DQA1*05:01-B1*03:01L HLA-DRB1*04:03L HLA-DRB1*04:02L HLA-DQA1*01:02-B1*06:02L HLA-DQA1*05:05-B1*03:19L HLA-DQA1*05:01-B1*02:01L HLA-DPA1*03:01-B1*105:01L HLA-DQA1*03:01-B1*03:02L
  REGION 1..12: note = CONT. FROM ABOVE: HLA-DQA1*05:05-B1*03:01L HLA-DRB1*14:17L HLA-D QA1*01:03-B1*06:01L HLA-DQA1*02:01-B1*03:03L
  source 1..12: note = Severe acute respiratory syndrome coronavirus 2
VGPKQASLNGVT

SEQ ID NO: 9792 - protein, 10 aa, Severe acute respiratory syndrome-related coronavirus
  REGION 1..10: note = Table B: HLA-DQA1*03:02-B1*03:03L HLA-DQA1*05:01-B1*03:01L HLA-DRB1*08:01L HLA-DQA1*05:05-B1*03:116L HLA-DQA1*03:01-B1*03:02L HLA-DQA1*02:01-B1*03:03L
  source 1..10: note = Severe acute respiratory syndrome coronavirus 2
KQASLNGVTL

SEQ ID NO: 9793 - protein, 11 aa, Severe acute respiratory syndrome-related coronavirus
  REGION 1..11: note = Table B: HLA-DQA1*03:02-B1*03:03L HLA-DQA1*05:01-B1*03:01L HLA-DRB1*04:02L HLA-DQA1*01:02-B1*06:02L HLA-DQA1*05:05-B1*03:01L
  source 1..11: note = Severe acute respiratory syndrome coronavirus 2
NGVTLIGEAVK

SEQ ID NO: 9794 - protein, 10 aa, Severe acute respiratory syndrome-related coronavirus
  REGION 1..10: note = Table B: HLA-DQA1*03:02-B1*03:03L HLA-DQA1*05:01-B1*03:01L HLA-DRB1*04:03L HLA-DRB1*13:03L HLA-DRB1*01:03L HLA-DRB1*04:02L HLA-DQA1*01:02-B1*06:02L HLA-DRB1*01:02L HLA-DRB4*03:01NL HLA-DRB1*14:01L HLA-DQA1*05:01-B1*02:01L HLA-DRB1*12:01L
  REGION 1..10: note = CONT. FROM ABOVE: HLA-DPA1*03:01-B1*105:01L HLA-DQA1*03:01-B1*03 :02L HLA-DRB1*14:54L HLA-DQA1*05:05-B1*03:01L HLA-DRB1*14:17L HL A-DPA1*01:02-B1*04:01L HLA-DRB1*16:01L HLA-DQA1*01:03-B1*06:01L HLA-DQA1*02:01-B1*03:03L HLA-DRB1*15:03L
  source 1..10: note = Severe acute respiratory syndrome coronavirus 2
TLIGEAVKTQ

SEQ ID NO: 9795 - protein, 10 aa, Severe acute respiratory syndrome-related coronavirus
  REGION 1..10: note = Table B: HLA-DQA1*03:02-B1*03:03L HLA-DQA1*05:01-B1*03:01L HLA-DRB1*04:03L HLA-DRB1*13:03L HLA-DRB1*01:03L HLA-DRB1*04:05L HLA-DQA1*01:02-B1*06:02M HLA-DRB1*01:01L HLA-DRB1*08:77L HLA-DPA1*01:03-B1*03:01L HLA-DPA1*03:01-B1*04:02L
  REGION 1..10: note = CONT. FROM ABOVE: HLA-DRB1*03:01L HLA-DRB1*14:01L HLA-DRB1*14:02 L HLA-DQA1*01-B1*05L HLA-DQA1*05:05-B1*03:19L HLA-DQA1*05:01-B1* 02:01L HLA-DRB4*01:01L HLA-DPA1*01:03-B1*04:01L HLA-DQA1*05:05-B 1*03:116L HLA-DPA1*01:03-B1*04:02L HLA-DRB1*12:01L
  REGION 1..10: note = CONT. FROM ABOVE: HLA-DPA1*02:01-B1*13:01L HLA-DPA1*03:01-B1*105 :01L HLA-DQA1*03:01-B1*03:02L HLA-DPA1*01:02-B1*04:01L HLA-DRB1* 10:01L HLA-DRB1*16:01L HLA-DQA1*01:03-B1*06:01L HLA-DRB1*08:02L HLA-DQA1*02:01-B1*03:03M HLA-DRB1*15:03L
  source 1..10: note = Severe acute respiratory syndrome coronavirus 2
LIGEAVKTQF

SEQ ID NO: 9796 - protein, 10 aa, Severe acute respiratory syndrome-related coronavirus
  REGION 1..10: note = Table B: HLA-DQA1*03:02-B1*03:03L HLA-DRB1*04:03L HLA-DQA1*05:01-B1*02:01L HLA-DQA1*03:01-B1*03:02L HLA-DQA1*02:01-B1*03:03L
  source 1..10: note = Severe acute respiratory syndrome coronavirus 2
IGEAVKTQFN

SEQ ID NO: 9797 - protein, 10 aa, Severe acute respiratory syndrome-related coronavirus
  REGION 1..10: note = Table B: HLA-DQA1*03:02-B1*03:03L HLA-DQA1*05:01-B1*03:01M HLA-DRB1*13:03L HLA-DRB1*01:03L HLA-DRB4*03:01NL HLA-DRB1*08:77M HLA-DPA1*01:03-B1*03:01L HLA-DPA1*03:01-B1*04:02M HLA-DRB1*03:01M HLA-DRB1*11:02L HLA-DQA1*01-B1*05L
  REGION 1..10: note = CONT. FROM ABOVE: HLA-DQA1*05:05-B1*03:19M HLA-DQA1*05:01-B1*02: 01M HLA-DRB4*01:01M HLA-DPA1*01:03-B1*04:01M HLA-DQA1*05:05-B1*0 3:116L HLA-DPA1*01:03-B1*04:02L HLA-DRB1*12:01L HLA-DQA1*03:01-B 1*03:02L HLA-DPA1*01:03-B1*104:01L HLA-DPA1*01:02-B1*04:01L
  REGION 1..10: note = CONT. FROM ABOVE: HLA-DRB1*10:01M HLA-DRB1*16:01L HLA-DRB1*15:03 M
  source 1..10: note = Severe acute respiratory syndrome coronavirus 2
GEAVKTQFNY

SEQ ID NO: 9798 - protein, 13 aa, Severe acute respiratory syndrome-related coronavirus
  REGION 1..13: note = Table B: HLA-DQA1*03:02-B1*03:03L HLA-DRB1*04:01L HLA-DRB1*01:01L HLA-DPA1*01:03-B1*03:01L HLA-DRB1*11:03L HLA-DRB1*14:02L HLA-DPA1*01:03-B1*04:02L HLA-DQA1*05:05-B1*03:01L HLA-DRB1*07:01L
  source 1..13: note = Severe acute respiratory syndrome coronavirus 2
FNYYKKVDGVVQQ

SEQ ID NO: 9799 - protein, 14 aa, Severe acute respiratory syndrome-related coronavirus
  REGION 1..14: note = Table B: HLA-DQA1*03:02-B1*03:03L HLA-DQA1*05:01-B1*03:01L HLA-DRB1*13:02L HLA-DRB1*04:04L HLA-DPA1*01:03-B1*03:01L HLA-DRB1*14:01L HLA-DQA1*05:01-B1*02:01L HLA-DPA1*02:01-B1*13:01L HLA-DPA1*03:01-B1*105:01L
  REGION 1..14: note = CONT. FROM ABOVE: HLA-DQA1*05:05-B1*03:01L HLA-DRB1*15:03L
  source 1..14: note = Severe acute respiratory syndrome coronavirus 2
YYKKVDGVVQQLPE

SEQ ID NO: 9800 - protein, 11 aa, Severe acute respiratory syndrome-related coronavirus
  REGION 1..11: note = Table B: HLA-DQA1*03:02-B1*03:03L HLA-DQA1*03:01-B1*03:02L HLA-DQA1*02:01-B1*03:03L
  source 1..11: note = Severe acute respiratory syndrome coronavirus 2
VDGVVQQLPET

SEQ ID NO: 9801 - protein, 10 aa, Severe acute respiratory syndrome-related coronavirus
  REGION 1..10: note = Table B: HLA-DQA1*03:02-B1*03:03L HLA-DQA1*05:01-B1*03:01L HLA-DRB1*04:01L HLA-DRB1*04:03L HLA-DRB1*13:02L HLA-DRB1*13:03M HLA-DRB1*01:03M HLA-DRB1*04:02L HLA-DQA1*01:02-B1*06:02M HLA-DRB1*01:01L HLA-DRB4*03:01NL HLA-DRB1*08:77M
  REGION 1..10: note = CONT. FROM ABOVE: HLA-DPA1*01:03-B1*03:01L HLA-DPA1*03:01-B1*04: 02L HLA-DRB1*03:01M HLA-DRB1*14:01L HLA-DRB1*11:02L HLA-DRB1*11: 03L HLA-DRB1*11:04L HLA-DRB1*14:02M HLA-DRB1*08:01L HLA-DRB1*11: 01L HLA-DRB5*01:01L HLA-DQA1*01-B1*05L HLA-DQA1*05:05-B1*03:19M
  REGION 1..10: note = CONT. FROM ABOVE: HLA-DQA1*05:01-B1*02:01M HLA-DRB4*01:01L HLA-D PA1*01:03-B1*04:01M HLA-DQA1*05:05-B1*03:116L HLA-DRB1*09:01L HL A-DPA1*01:03-B1*04:02M HLA-DRB1*12:01L HLA-DPA1*02:01-B1*13:01L HLA-DPA1*03:01-B1*105:01L HLA-DQA1*03:01-B1*03:02L
  REGION 1..10: note = CONT. FROM ABOVE: HLA-DPA1*01:03-B1*104:01L HLA-DQA1*05:05-B1*03 :01L HLA-DRB1*14:17L HLA-DPA1*01:02-B1*04:01L HLA-DRB1*10:01L HL A-DRB1*16:01L HLA-DQA1*01:03-B1*06:01L HLA-DRB1*08:02L HLA-DQA1* 02:01-B1*03:03M HLA-DRB1*15:03L
  source 1..10: note = Severe acute respiratory syndrome coronavirus 2
GVVQQLPETY

SEQ ID NO: 9802 - protein, 10 aa, Severe acute respiratory syndrome-related coronavirus
  REGION 1..10: note = Table B: HLA-DQA1*03:02-B1*03:03L HLA-DQA1*05:01-B1*03:01L HLA-DRB1*04:03L HLA-DRB1*13:02L HLA-DRB1*13:03L HLA-DRB1*01:03L HLA-DRB1*04:05L HLA-DQA1*01:02-B1*06:02L HLA-DRB1*01:02L HLA-DRB1*08:77L HLA-DPA1*01:03-B1*03:01L
  REGION 1..10: note = CONT. FROM ABOVE: HLA-DPA1*03:01-B1*04:02L HLA-DRB1*14:01L HLA-D RB1*14:02L HLA-DQA1*01-B1*05L HLA-DQA1*05:05-B1*03:19L HLA-DQA1* 05:01-B1*02:01L HLA-DRB4*01:01L HLA-DPA1*01:03-B1*04:01L HLA-DPA 1*01:03-B1*04:02L HLA-DRB1*12:01L HLA-DPA1*02:01-B1*13:01L
  REGION 1..10: note = CONT. FROM ABOVE: HLA-DPA1*03:01-B1*105:01L HLA-DQA1*03:01-B1*03 :02L HLA-DPA1*01:03-B1*104:01L HLA-DQA1*05:05-B1*03:01L HLA-DPA1 *01:02-B1*04:01L HLA-DRB1*16:01L HLA-DQA1*01:03-B1*06:01L HLA-DQ A1*02:01-B1*03:03L HLA-DRB1*15:03L
  source 1..10: note = Severe acute respiratory syndrome coronavirus 2
VVQQLPETYF

SEQ ID NO: 9803 - protein, 10 aa, Severe acute respiratory syndrome-related coronavirus
  REGION 1..10: note = Table B: HLA-DQA1*03:02-B1*03:03L HLA-DQA1*01:02-B1*06:02L HLA-DPA1*03:01-B1*105:01L
  source 1..10: note = Severe acute respiratory syndrome coronavirus 2
ETYFTQSRNL

SEQ ID NO: 9804 - protein, 10 aa, Severe acute respiratory syndrome-related coronavirus
  REGION 1..10: note = Table B: HLA-DQA1*03:02-B1*03:03L HLA-DQA1*05:01-B1*03:01L HLA-DRB1*13:03L HLA-DRB1*01:03L HLA-DQA1*01:02-B1*06:02L HLA-DRB1*08:77L HLA-DPA1*01:03-B1*03:01L HLA-DPA1*03:01-B1*04:02L HLA-DRB1*03:01L HLA-DRB1*14:01L
  REGION 1..10: note = CONT. FROM ABOVE: HLA-DRB1*14:02L HLA-DQA1*01-B1*05L HLA-DQA1*05 :05-B1*03:19L HLA-DQA1*05:01-B1*02:01L HLA-DRB4*01:01L HLA-DPA1* 01:03-B1*04:01L HLA-DQA1*05:05-B1*03:116L HLA-DPA1*01:03-B1*04:0 2L HLA-DPA1*02:01-B1*13:01L HLA-DPA1*03:01-B1*105:01L
  REGION 1..10: note = CONT. FROM ABOVE: HLA-DQA1*03:01-B1*03:02L HLA-DPA1*01:02-B1*04: 01L HLA-DRB1*16:01L HLA-DQA1*01:03-B1*06:01L HLA-DRB1*08:02L HLA -DQA1*02:01-B1*03:03L HLA-DRB1*15:03L
  source 1..10: note = Severe acute respiratory syndrome coronavirus 2
FTQSRNLQEF

SEQ ID NO: 9805 - protein, 11 aa, Severe acute respiratory syndrome-related coronavirus
  REGION 1..11: note = Table B: HLA-DQA1*03:02-B1*03:03L HLA-DRB1*11:02L HLA-DQA1*05:05-B1*03:19M HLA-DPA1*01:03-B1*104:01L
  source 1..11: note = Severe acute respiratory syndrome coronavirus 2
QEFKPRSQMEI

SEQ ID NO: 9806 - protein, 10 aa, Severe acute respiratory syndrome-related coronavirus
  REGION 1..10: note = Table B: HLA-DQA1*03:02-B1*03:03M HLA-DQA1*05:01-B1*03:01L HLA-DPA1*03:01-B1*04:02L HLA-DRB1*14:02L HLA-DQA1*05:05-B1*03:19L HLA-DQA1*05:05-B1*03:116L HLA-DRB1*09:01L HLA-DQA1*03:01-B1*03:02L
  REGION 1..10: note = CONT. FROM ABOVE: HLA-DPA1*01:02-B1*04:01L HLA-DQA1*02:01-B1*03: 03L HLA-DRB1*15:03L
  source 1..10: note = Severe acute respiratory syndrome coronavirus 2
SQMEIDFLEL

SEQ ID NO: 9807 - protein, 10 aa, Severe acute respiratory syndrome-related coronavirus
  REGION 1..10: note = Table B: HLA-DQA1*03:02-B1*03:03L HLA-DRB1*11:02L HLA-DQA1*05:05-B1*03:19M HLA-DPA1*01:03-B1*104:01L
  source 1..10: note = Severe acute respiratory syndrome coronavirus 2
MEIDFLELAM

SEQ ID NO: 9808 - protein, 10 aa, Severe acute respiratory syndrome-related coronavirus
  REGION 1..10: note = Table B: HLA-DQA1*03:02-B1*03:03L HLA-DQA1*05:01-B1*03:01L HLA-DRB1*04:03L HLA-DRB1*13:02L HLA-DRB1*13:03L HLA-DRB1*01:03L HLA-DRB1*04:05L HLA-DQA1*01:02-B1*06:02M HLA-DRB4*03:01NL HLA-DRB1*08:77M HLA-DPA1*01:03-B1*03:01M
  REGION 1..10: note = CONT. FROM ABOVE: HLA-DPA1*03:01-B1*04:02L HLA-DRB1*03:01M HLA-D RB1*14:01L HLA-DRB1*11:02M HLA-DRB1*11:03L HLA-DRB1*14:02L HLA-D RB1*11:01L HLA-DRB5*01:01L HLA-DQA1*01-B1*05M HLA-DQA1*05:05-B1* 03:19H HLA-DQA1*05:01-B1*02:01M HLA-DRB4*01:01M
  REGION 1..10: note = CONT. FROM ABOVE: HLA-DPA1*01:03-B1*04:01M HLA-DQA1*05:05-B1*03: 116M HLA-DPA1*01:03-B1*04:02L HLA-DRB1*12:01L HLA-DPA1*02:01-B1* 13:01L HLA-DPA1*03:01-B1*105:01L HLA-DPA1*01:03-B1*104:01M HLA-D QA1*05:05-B1*03:01L HLA-DPA1*01:02-B1*04:01L HLA-DRB1*10:01L
  REGION 1..10: note = CONT. FROM ABOVE: HLA-DRB1*16:01M HLA-DQA1*01:03-B1*06:01L HLA-D RB1*08:02L HLA-DQA1*02:01-B1*03:03L HLA-DRB1*15:03L
  source 1..10: note = Severe acute respiratory syndrome coronavirus 2
LAMDEFIERY

SEQ ID NO: 9809 - protein, 11 aa, Severe acute respiratory syndrome-related coronavirus
  REGION 1..11: note = Table B: HLA-DQA1*03:02-B1*03:03L HLA-DQA1*05:05-B1*03:19L
  source 1..11: note = Severe acute respiratory syndrome coronavirus 2
AMDEFIERYKL

SEQ ID NO: 9810 - protein, 10 aa, Severe acute respiratory syndrome-related coronavirus
  REGION 1..10: note = Table B: HLA-DQA1*03:02-B1*03:03L HLA-DQA1*01-B1*05L HLA-DQA1*05:05-B1*03:19L HLA-DQA1*05:01-B1*02:01L HLA-DPA1*01:03-B1*104:01L HLA-DPA1*01:02-B1*04:01L
  source 1..10: note = Severe acute respiratory syndrome coronavirus 2
LEGYAFEHIV

SEQ ID NO: 9811 - protein, 10 aa, Severe acute respiratory syndrome-related coronavirus
  REGION 1..10: note = Table B: HLA-DQA1*03:02-B1*03:03L HLA-DQA1*05:01-B1*03:01L HLA-DRB1*13:03L HLA-DQA1*01:02-B1*06:02M HLA-DRB1*08:77L HLA-DPA1*01:03-B1*03:01L HLA-DRB1*03:01L HLA-DRB1*14:02L HLA-DQA1*01-B1*05L HLA-DQA1*05:05-B1*03:19L
  REGION 1..10: note = CONT. FROM ABOVE: HLA-DQA1*05:01-B1*02:01L HLA-DRB4*01:01L HLA-D PA1*01:03-B1*04:01L HLA-DQA1*05:05-B1*03:116L HLA-DPA1*02:01-B1* 13:01L HLA-DPA1*03:01-B1*105:01L HLA-DPA1*01:03-B1*104:01L HLA-D RB1*16:01L HLA-DQA1*01:03-B1*06:01L HLA-DQA1*02:01-B1*03:03L
  REGION 1..10: note = CONT. FROM ABOVE: HLA-DRB1*15:03L
  source 1..10: note = Severe acute respiratory syndrome coronavirus 2
EGYAFEHIVY

SEQ ID NO: 9812 - protein, 11 aa, Severe acute respiratory syndrome-related coronavirus
  REGION 1..11: note = Table B: HLA-DQA1*03:02-B1*03:03L HLA-DPA1*01:03-B1*03:01L HLA-DRB1*14:02L HLA-DPA1*01:03-B1*04:02L HLA-DRB1*12:01L HLA-DQA1*03:01-B1*03:02L HLA-DPA1*01:03-B1*104:01L HLA-DQA1*05:05-B1*03:01L
  source 1..11: note = Severe acute respiratory syndrome coronavirus 2
YAFEHIVYGDF

SEQ ID NO: 9813 - protein, 10 aa, Severe acute respiratory syndrome-related coronavirus
  REGION 1..10: note = Table B: HLA-DQA1*03:02-B1*03:03L HLA-DQA1*05:01-B1*03:01L HLA-DRB1*04:03L HLA-DRB1*01:03L HLA-DRB1*04:02L HLA-DQA1*01:02-B1*06:02L HLA-DPA1*03:01-B1*04:02L HLA-DQA1*01-B1*05L HLA-DQA1*05:01-B1*02:01L
  REGION 1..10: note = CONT. FROM ABOVE: HLA-DPA1*01:03-B1*04:01L HLA-DPA1*01:03-B1*04: 02L HLA-DPA1*03:01-B1*105:01L HLA-DQA1*03:01-B1*03:02L HLA-DRB1* 14:17L HLA-DPA1*01:02-B1*04:01L HLA-DRB1*16:01L HLA-DQA1*01:03-B 1*06:01L HLA-DRB1*04:08L HLA-DQA1*02:01-B1*03:03L
  REGION 1..10: note = CONT. FROM ABOVE: HLA-DRB1*15:03L
  source 1..10: note = Severe acute respiratory syndrome coronavirus 2
IVYGDFSHSQ

SEQ ID NO: 9814 - protein, 10 aa, Severe acute respiratory syndrome-related coronavirus
  REGION 1..10: note = Table B: HLA-DQA1*03:02-B1*03:03L HLA-DQA1*05:01-B1*03:01L HLA-DRB1*04:03L HLA-DRB1*01:03L HLA-DRB1*04:05L HLA-DQA1*01:02-B1*06:02L HLA-DRB1*01:02L HLA-DPA1*03:01-B1*04:02L HLA-DRB1*14:02L HLA-DQA1*01-B1*05L
  REGION 1..10: note = CONT. FROM ABOVE: HLA-DQA1*05:05-B1*03:19L HLA-DQA1*05:05-B1*03: 116L HLA-DPA1*02:01-B1*13:01L HLA-DPA1*03:01-B1*105:01L HLA-DQA1 *03:01-B1*03:02L HLA-DPA1*01:02-B1*04:01L HLA-DRB1*16:01L HLA-DQ A1*01:03-B1*06:01L HLA-DQA1*02:01-B1*03:03L HLA-DRB1*15:03L
  source 1..10: note = Severe acute respiratory syndrome coronavirus 2
VYGDFSHSQL

SEQ ID NO: 9815 - protein, 11 aa, Severe acute respiratory syndrome-related coronavirus
  REGION 1..11: note = Table B: HLA-DQA1*03:02-B1*03:03L HLA-DPA1*03:01-B1*04:02L HLA-DQA1*01-B1*05L HLA-DQA1*05:01-B1*02:01L HLA-DPA1*03:01-B1*105:01L HLA-DQA1*03:01-B1*03:02L HLA-DPA1*01:02-B1*04:01L HLA-DRB1*16:01L
  REGION 1..11: note = CONT. FROM ABOVE: HLA-DQA1*01:03-B1*06:01L HLA-DQA1*02:01-B1*03: 03L
  source 1..11: note = Severe acute respiratory syndrome coronavirus 2
GDFSHSQLGGL

SEQ ID NO: 9816 - protein, 11 aa, Severe acute respiratory syndrome-related coronavirus
  REGION 1..11: note = Table B: HLA-DQA1*03:02-B1*03:03L HLA-DRB1*04:03L HLA-DRB1*04:02L HLA-DRB1*01:02L HLA-DPA1*03:01-B1*04:02L HLA-DRB1*08:01L HLA-DQA1*01-B1*05L HLA-DQA1*05:05-B1*03:19L HLA-DQA1*05:01-B1*02:01L HLA-DPA1*01:03-B1*04:01L
  REGION 1..11: note = CONT. FROM ABOVE: HLA-DPA1*01:03-B1*04:02L HLA-DRB1*12:01L HLA-D QA1*05:05-B1*03:01L HLA-DRB1*04:08L
  source 1..11: note = Severe acute respiratory syndrome coronavirus 2
DFSHSQLGGLH

SEQ ID NO: 9817 - protein, 10 aa, Severe acute respiratory syndrome-related coronavirus
  REGION 1..10: note = Table B: HLA-DQA1*03:02-B1*03:03L HLA-DQA1*05:01-B1*03:01L HLA-DRB1*13:02L HLA-DRB1*13:03L HLA-DRB1*01:03L HLA-DRB1*04:02L HLA-DRB1*04:05L HLA-DQA1*01:02-B1*06:02L HLA-DRB1*01:02L HLA-DPA1*01:03-B1*03:01L HLA-DPA1*03:01-B1*04:02L
  REGION 1..10: note = CONT. FROM ABOVE: HLA-DRB1*14:01L HLA-DQA1*01:01-B1*05:01L HLA-D RB1*08:01M HLA-DRB5*01:01L HLA-DQA1*01-B1*05L HLA-DQA1*05:05-B1* 03:19L HLA-DQA1*05:01-B1*02:01L HLA-DPA1*01:03-B1*04:01L HLA-DQA 1*05:05-B1*03:116L HLA-DPA1*01:03-B1*04:02L HLA-DRB3*01:01L
  REGION 1..10: note = CONT. FROM ABOVE: HLA-DPA1*03:01-B1*105:01L HLA-DQA1*03:01-B1*03 :02M HLA-DPA1*01:02-B1*04:01L HLA-DRB1*10:01L HLA-DRB1*16:01L HL A-DQA1*01:03-B1*06:01L HLA-DQA1*02:01-B1*03:03L HLA-DRB1*15:03L
  source 1..10: note = Severe acute respiratory syndrome coronavirus 2
SHSQLGGLHL

SEQ ID NO: 9818 - protein, 10 aa, Severe acute respiratory syndrome-related coronavirus
  REGION 1..10: note = Table B: HLA-DQA1*03:02-B1*03:03L HLA-DQA1*05:01-B1*03:01L HLA-DQA1*03:01-B1*03:02L HLA-DQA1*02:01-B1*03:03L
  source 1..10: note = Severe acute respiratory syndrome coronavirus 2
HSQLGGLHLL

SEQ ID NO: 9819 - protein, 10 aa, Severe acute respiratory syndrome-related coronavirus
  REGION 1..10: note = Table B: HLA-DQA1*03:02-B1*03:03L HLA-DQA1*05:05-B1*03:19L HLA-DPA1*01:03-B1*104:01L HLA-DQA1*02:01-B1*03:03L HLA-DRB1*15:03L
  source 1..10: note = Severe acute respiratory syndrome coronavirus 2
SQLGGLHLLI

SEQ ID NO: 9820 - protein, 10 aa, Severe acute respiratory syndrome-related coronavirus
  REGION 1..10: note = Table B: HLA-DQA1*03:02-B1*03:03L HLA-DQA1*05:01-B1*03:01M HLA-DRB4*03:01NL HLA-DRB1*08:77M HLA-DPA1*01:03-B1*03:01L HLA-DPA1*03:01-B1*04:02L HLA-DRB1*03:01L HLA-DRB1*11:02L HLA-DRB1*14:02L HLA-DQA1*01-B1*05L HLA-DQA1*05:05-B1*03:19M
  REGION 1..10: note = CONT. FROM ABOVE: HLA-DQA1*05:01-B1*02:01L HLA-DRB4*01:01M HLA-D PA1*01:03-B1*04:01M HLA-DQA1*05:05-B1*03:116L HLA-DPA1*01:03-B1* 04:02L HLA-DQA1*03:01-B1*03:02L HLA-DPA1*01:03-B1*104:01L HLA-DP A1*01:02-B1*04:01L HLA-DRB1*10:01L HLA-DRB1*16:01L
  REGION 1..10: note = CONT. FROM ABOVE: HLA-DQA1*02:01-B1*03:03L HLA-DRB1*15:03L
  source 1..10: note = Severe acute respiratory syndrome coronavirus 2
KESPFELEDF

SEQ ID NO: 9821 - protein, 12 aa, Severe acute respiratory syndrome-related coronavirus
  REGION 1..12: note = Table B: HLA-DQA1*03:02-B1*03:03L HLA-DQA1*05:01-B1*03:01L HLA-DRB1*04:03L HLA-DRB1*13:03L HLA-DQA1*01:02-B1*06:02L HLA-DRB1*08:04L HLA-DRB1*14:01L HLA-DRB1*11:04L HLA-DRB1*11:01L HLA-DPA1*02:01-B1*13:01L HLA-DQA1*03:01-B1*03:02L
  REGION 1..12: note = CONT. FROM ABOVE: HLA-DPA1*01:03-B1*02:01L HLA-DPA1*01:03-B1*104 :01L HLA-DQA1*05:05-B1*03:01L HLA-DQA1*02:01-B1*03:03L
  source 1..12: note = Severe acute respiratory syndrome coronavirus 2
SPFELEDFIPMD

SEQ ID NO: 9822 - protein, 11 aa, Severe acute respiratory syndrome-related coronavirus
  REGION 1..11: note = Table B: HLA-DQA1*03:02-B1*03:03L HLA-DRB1*04:03L HLA-DRB1*13:03L HLA-DRB1*04:02L HLA-DRB1*04:05L HLA-DRB4*03:01NL HLA-DQA1*01-B1*05L HLA-DQA1*05:01-B1*02:01L HLA-DRB1*14:17L HLA-DRB1*16:01L HLA-DQA1*01:03-B1*06:01L
  source 1..11: note = Severe acute respiratory syndrome coronavirus 2
EDFIPMDSTVK

SEQ ID NO: 9823 - protein, 11 aa, Severe acute respiratory syndrome-related coronavirus
  REGION 1..11: note = Table B: HLA-DQA1*03:02-B1*03:03L HLA-DRB1*13:02L HLA-DQA1*01:02-B1*06:02L HLA-DPA1*01:03-B1*03:01L HLA-DRB1*14:01L HLA-DQA1*05:05-B1*03:19L HLA-DRB1*04:10L HLA-DPA1*03:01-B1*105:01L HLA-DRB1*14:54L
  REGION 1..11: note = CONT. FROM ABOVE: HLA-DQA1*05:05-B1*03:01L HLA-DPA1*01:02-B1*04: 01L HLA-DRB1*10:01L HLA-DQA1*01:03-B1*06:01L HLA-DRB1*04:08L
  source 1..11: note = Severe acute respiratory syndrome coronavirus 2
DFIPMDSTVKN

SEQ ID NO: 9824 - protein, 10 aa, Severe acute respiratory syndrome-related coronavirus
  REGION 1..10: note = Table B: HLA-DQA1*03:02-B1*03:03L HLA-DQA1*05:01-B1*03:01M HLA-DRB1*04:01L HLA-DRB1*04:03L HLA-DRB1*13:02L HLA-DRB1*13:03M HLA-DRB1*01:03M HLA-DRB1*04:02L HLA-DRB1*04:05L HLA-DQA1*01:02-B1*06:02H HLA-DRB1*01:01L HLA-DRB1*01:02L
  REGION 1..10: note = CONT. FROM ABOVE: HLA-DRB4*03:01NL HLA-DRB1*08:77L HLA-DPA1*01:0 3-B1*03:01M HLA-DPA1*03:01-B1*04:02L HLA-DRB1*03:01L HLA-DRB1*14 :01L HLA-DRB1*11:02L HLA-DRB1*11:03L HLA-DRB1*11:04L HLA-DRB1*14 :02M HLA-DRB1*08:01L HLA-DRB1*11:01L HLA-DRB5*01:01L
  REGION 1..10: note = CONT. FROM ABOVE: HLA-DQA1*01-B1*05L HLA-DQA1*05:05-B1*03:19L HL A-DRB4*02:01NL HLA-DQA1*05:01-B1*02:01M HLA-DRB4*01:01L HLA-DPA1 *01:03-B1*04:01M HLA-DQA1*05:05-B1*03:116L HLA-DPA1*01:03-B1*04: 02L HLA-DRB1*12:01L HLA-DPA1*02:01-B1*13:01L
  REGION 1..10: note = CONT. FROM ABOVE: HLA-DPA1*03:01-B1*105:01H HLA-DQA1*03:01-B1*03 :02L HLA-DPA1*01:03-B1*104:01L HLA-DQA1*05:05-B1*03:01L HLA-DRB1 *14:17L HLA-DPA1*01:02-B1*04:01L HLA-DRB1*10:01L HLA-DRB1*16:01L HLA-DQA1*01:03-B1*06:01L HLA-DRB1*08:02L HLA-DRB1*08:03L
  REGION 1..10: note = CONT. FROM ABOVE: HLA-DQA1*02:01-B1*03:03L HLA-DRB1*15:01L HLA -DRB1*15:03M
  source 1..10: note = Severe acute respiratory syndrome coronavirus 2
IPMDSTVKNY

SEQ ID NO: 9825 - protein, 13 aa, Severe acute respiratory syndrome-related coronavirus
  REGION 1..13: note = Table B: HLA-DQA1*03:02-B1*03:03L HLA-DRB1*04:03L HLA-DRB1*04:02L HLA-DQA1*01:02-B1*06:02L HLA-DQA1*05:01-B1*02:01L
  source 1..13: note = Severe acute respiratory syndrome coronavirus 2
DSTVKNYFITDAQ

SEQ ID NO: 9826 - protein, 12 aa, Severe acute respiratory syndrome-related coronavirus
  REGION 1..12: note = Table B: HLA-DQA1*03:02-B1*03:03L HLA-DRB1*13:02L HLA-DRB1*13:03L HLA-DRB1*01:03L HLA-DRB1*04:02L HLA-DRB1*04:04L HLA-DRB1*04:05L HLA-DQA1*01:02-B1*06:02L HLA-DRB1*01:02L HLA-DRB4*03:01NL HLA-DRB1*08:04L HLA-DPA1*01:03-B1*03:01L
  REGION 1..12: note = CONT. FROM ABOVE: HLA-DPA1*03:01-B1*04:02L HLA-DRB1*14:01L HLA-D QA1*01:01-B1*05:01L HLA-DRB1*08:01L HLA-DQA1*05:01-B1*02:01L HLA -DRB1*04:10L HLA-DRB1*12:01L HLA-DRB1*12:02L HLA-DPA1*02:01-B1*1 3:01L HLA-DPA1*03:01-B1*105:01L HLA-DRB1*14:54L HLA-DRB1*14:17L
  REGION 1..12: note = CONT. FROM ABOVE: HLA-DPA1*01:02-B1*04:01L HLA-DRB1*10:01L HLA-D RB1*16:01L HLA-DRB1*04:08L HLA-DRB1*08:03L HLA-DQA1*02:01-B1*03: 03L HLA-DRB1*15:03L
  source 1..12: note = Severe acute respiratory syndrome coronavirus 2
VKNYFITDAQTG

SEQ ID NO: 9827 - protein, 12 aa, Severe acute respiratory syndrome-related coronavirus
  REGION 1..12: note = Table B: HLA-DQA1*03:02-B1*03:03L HLA-DQA1*05:01-B1*03:01L HLA-DRB1*04:01L HLA-DRB1*13:02L HLA-DRB1*01:03L HLA-DRB1*01:02L HLA-DRB1*08:04L HLA-DRB1*08:77L HLA-DRB3*02:01L HLA-DPA1*01:03-B1*03:01L HLA-DRB1*14:01L HLA-DRB1*11:03L
  REGION 1..12: note = CONT. FROM ABOVE: HLA-DRB1*11:04L HLA-DRB1*14:02L HLA-DQA1*05:05 -B1*03:19L HLA-DRB1*04:10L HLA-DRB1*12:01L HLA-DRB1*12:02L HLA-D RB3*01:01L HLA-DPA1*03:01-B1*105:01L HLA-DQA1*05:05-B1*03:01L HL A-DRB1*10:01L HLA-DRB1*04:08L HLA-DQA1*02:01-B1*03:03L
  REGION 1..12: note = CONT. FROM ABOVE: HLA-DRB1*15:03L
  source 1..12: note = Severe acute respiratory syndrome coronavirus 2
NYFITDAQTGSS

SEQ ID NO: 9828 - protein, 10 aa, Severe acute respiratory syndrome-related coronavirus
  REGION 1..10: note = Table B: HLA-DQA1*03:02-B1*03:03L HLA-DQA1*05:01-B1*03:01L HLA-DRB1*04:01L HLA-DRB1*04:03L HLA-DRB1*13:02L HLA-DRB1*13:03M HLA-DRB1*01:03L HLA-DRB1*04:02L HLA-DRB1*04:04L HLA-DRB1*04:05L HLA-DQA1*01:02-B1*06:02L HLA-DRB1*01:01L HLA-DRB1*01:02L
  REGION 1..10: note = CONT. FROM ABOVE: HLA-DRB4*03:01NM HLA-DRB1*08:04L HLA-DRB1*08:7 7L HLA-DRB3*02:01L HLA-DPA1*01:03-B1*03:01L HLA-DRB1*14:01L HLA- DRB1*11:03L HLA-DRB1*11:04L HLA-DRB1*14:02L HLA-DQA1*01:01-B1*05 :01L HLA-DRB1*08:01L HLA-DRB1*11:01L HLA-DRB5*01:01L
  REGION 1..10: note = CONT. FROM ABOVE: HLA-DQA1*01-B1*05L HLA-DQA1*05:05-B1*03:19L HL A-DQA1*05:01-B1*02:01L HLA-DRB1*13:01L HLA-DRB4*01:01L HLA-DRB1* 04:10L HLA-DPA1*01:03-B1*04:02L HLA-DRB1*12:01M HLA-DRB1*12:02L HLA-DRB3*01:01L HLA-DPA1*03:01-B1*105:01L
  REGION 1..10: note = CONT. FROM ABOVE: HLA-DQA1*03:01-B1*03:02M HLA-DRB1*14:54L HLA-D QA1*05:05-B1*03:01L HLA-DRB1*14:17M HLA-DPA1*01:02-B1*04:01L HLA -DRB1*10:01L HLA-DRB1*16:01L HLA-DQA1*01:03-B1*06:01L HLA-DRB1*0 4:08L HLA-DRB1*08:02L HLA-DRB1*08:03L HLA-DQA1*02:01-B1*03:03L
  REGION 1..10: note = CONT. FROM ABOVE: HLA-DRB1*15:01L
  source 1..10: note = Severe acute respiratory syndrome coronavirus 2
ITDAQTGSSK

SEQ ID NO: 9829 - protein, 15 aa, Severe acute respiratory syndrome-related coronavirus
  REGION 1..15: note = Table B: HLA-DQA1*03:02-B1*03:03L
  source 1..15: note = Severe acute respiratory syndrome coronavirus 2
DAQTGSSKCVCSVID

SEQ ID NO: 9830 - protein, 10 aa, Severe acute respiratory syndrome-related coronavirus
  REGION 1..10: note = Table B: HLA-DQA1*03:02-B1*03:03L HLA-DRB1*13:03L HLA-DQA1*01:02-B1*06:02M HLA-DRB1*14:02L HLA-DQA1*05:05-B1*03:19L HLA-DQA1*05:01-B1*02:01L HLA-DRB4*01:01L HLA-DPA1*01:03-B1*04:01L
  REGION 1..10: note = CONT. FROM ABOVE: HLA-DPA1*02:01-B1*13:01L HLA-DPA1*03:01-B1*105 :01L HLA-DQA1*01:03-B1*06:01L HLA-DQA1*02:01-B1*03:03L HLA-DRB1* 15:03L
  source 1..10: note = Severe acute respiratory syndrome coronavirus 2
SVIDLLLDDF

SEQ ID NO: 9831 - protein, 10 aa, Severe acute respiratory syndrome-related coronavirus
  REGION 1..10: note = Table B: HLA-DQA1*03:02-B1*03:03L
  source 1..10: note = Severe acute respiratory syndrome coronavirus 2
LLLDDFVEII

SEQ ID NO: 9832 - protein, 10 aa, Severe acute respiratory syndrome-related coronavirus
  REGION 1..10: note = Table B: HLA-DQA1*03:02-B1*03:03L HLA-DQA1*05:01-B1*03:01L HLA-DQA1*01:02-B1*06:02L HLA-DQA1*01-B1*05L HLA-DQA1*05:01-B1*02:01L HLA-DPA1*03:01-B1*105:01L HLA-DQA1*03:01-B1*03:02L HLA-DPA1*01:02-B1*04:01L
  REGION 1..10: note = CONT. FROM ABOVE: HLA-DQA1*01:03-B1*06:01L HLA-DQA1*02:01-B1*03: 03L
  source 1..10: note = Severe acute respiratory syndrome coronavirus 2
DFVEIIKSQD

SEQ ID NO: 9833 - protein, 10 aa, Severe acute respiratory syndrome-related coronavirus
  REGION 1..10: note = Table B: HLA-DQA1*03:02-B1*03:03L HLA-DQA1*05:01-B1*03:01L HLA-DRB1*04:03L HLA-DRB1*13:03L HLA-DRB1*04:02L HLA-DRB1*04:05L HLA-DQA1*01:02-B1*06:02L HLA-DPA1*03:01-B1*04:02L HLA-DRB1*14:01L HLA-DRB1*08:01L HLA-DQA1*01-B1*05L
  REGION 1..10: note = CONT. FROM ABOVE: HLA-DQA1*05:01-B1*02:01L HLA-DPA1*03:01-B1*105 :01L HLA-DQA1*03:01-B1*03:02L HLA-DPA1*01:02-B1*04:01L HLA-DRB1* 16:01L HLA-DQA1*01:03-B1*06:01L HLA-DQA1*02:01-B1*03:03L HLA-DRB 1*15:03L
  source 1..10: note = Severe acute respiratory syndrome coronavirus 2
FVEIIKSQDL

SEQ ID NO: 9834 - protein, 10 aa, Severe acute respiratory syndrome-related coronavirus
  REGION 1..10: note = Table B: HLA-DQA1*03:02-B1*03:03L HLA-DQA1*05:01-B1*03:01L HLA-DRB1*04:03L HLA-DRB1*04:02L HLA-DRB1*04:05L HLA-DRB1*01:02L HLA-DRB4*03:01NL HLA-DRB1*14:01L HLA-DQA1*01-B1*05L HLA-DQA1*05:01-B1*02:01L HLA-DRB1*04:10L HLA-DRB1*12:01L
  REGION 1..10: note = CONT. FROM ABOVE: HLA-DQA1*03:01-B1*03:02L HLA-DRB1*14:54L HLA-D RB1*14:17L HLA-DPA1*01:02-B1*04:01L HLA-DRB1*16:01L HLA-DQA1*01: 03-B1*06:01L HLA-DQA1*02:01-B1*03:03L HLA-DRB1*15:03L
  source 1..10: note = Severe acute respiratory syndrome coronavirus 2
VEIIKSQDLS

SEQ ID NO: 9835 - protein, 10 aa, Severe acute respiratory syndrome-related coronavirus
  REGION 1..10: note = Table B: HLA-DQA1*03:02-B1*03:03L HLA-DQA1*05:01-B1*03:01L HLA-DRB1*13:03L HLA-DQA1*01:02-B1*06:02L HLA-DRB1*01:02L HLA-DQA1*05:05-B1*03:19L HLA-DQA1*05:01-B1*02:01L HLA-DPA1*02:01-B1*13:01L HLA-DPA1*03:01-B1*105:01L
  REGION 1..10: note = CONT. FROM ABOVE: HLA-DQA1*02:01-B1*03:03L HLA-DRB1*15:03L
  source 1..10: note = Severe acute respiratory syndrome coronavirus 2
EIIKSQDLSV

SEQ ID NO: 9836 - protein, 11 aa, Severe acute respiratory syndrome-related coronavirus
  REGION 1..11: note = Table B: HLA-DQA1*03:02-B1*03:03L HLA-DQA1*05:01-B1*03:01L HLA-DRB1*04:01L HLA-DRB1*13:02L HLA-DRB1*13:03L HLA-DRB1*01:03L HLA-DRB1*04:02M HLA-DRB1*04:04L HLA-DRB1*04:05L HLA-DQA1*01:02-B1*06:02L HLA-DRB1*01:02L HLA-DRB4*03:01NL
  REGION 1..11: note = CONT. FROM ABOVE: HLA-DRB1*08:04L HLA-DRB1*08:77L HLA-DRB3*02:01 L HLA-DPA1*01:03-B1*03:01L HLA-DPA1*03:01-B1*04:02L HLA-DRB1*14: 01L HLA-DRB1*11:03L HLA-DRB1*11:04L HLA-DRB1*14:02L HLA-DQA1*05: 05-B1*03:19L HLA-DRB1*04:10L HLA-DRB1*09:01L HLA-DRB1*12:01L
  REGION 1..11: note = CONT. FROM ABOVE: HLA-DRB1*12:02L HLA-DPA1*03:01-B1*105:01L HLA- DRB1*14:54L HLA-DQA1*05:05-B1*03:01L HLA-DRB1*14:17M HLA-DPA1*01 :02-B1*04:01L HLA-DRB1*07:01L HLA-DRB1*10:01L HLA-DQA1*01:03-B1* 06:01L HLA-DRB1*04:08L HLA-DRB1*08:03L HLA-DQA1*02:01-B1*03:03L
  source 1..11: note = Severe acute respiratory syndrome coronavirus 2
IIKSQDLSVVS

SEQ ID NO: 9837 - protein, 10 aa, Severe acute respiratory syndrome-related coronavirus
  REGION 1..10: note = Table B: HLA-DQA1*03:02-B1*03:03L HLA-DQA1*05:01-B1*03:01L HLA-DRB1*11:02L HLA-DQA1*05:05-B1*03:19M HLA-DQA1*05:01-B1*02:01L HLA-DQA1*05:05-B1*03:116L HLA-DRB1*09:01L HLA-DQA1*03:01-B1*03:02L
  REGION 1..10: note = CONT. FROM ABOVE: HLA-DPA1*01:03-B1*104:01L HLA-DRB1*10:01L HLA- DRB1*16:01L HLA-DQA1*02:01-B1*03:03L HLA-DRB1*15:03L
  source 1..10: note = Severe acute respiratory syndrome coronavirus 2
SQDLSVVSKV

SEQ ID NO: 9838 - protein, 10 aa, Severe acute respiratory syndrome-related coronavirus
  REGION 1..10: note = Table B: HLA-DQA1*03:02-B1*03:03L HLA-DQA1*05:01-B1*03:01L HLA-DRB1*04:03L HLA-DRB1*13:02L HLA-DRB1*13:03L HLA-DRB1*01:03L HLA-DRB1*04:02L HLA-DQA1*01:02-B1*06:02L HLA-DRB4*03:01NL HLA-DRB1*14:01L HLA-DQA1*01:01-B1*05:01L HLA-DRB1*08:01L
  REGION 1..10: note = CONT. FROM ABOVE: HLA-DRB1*12:01L HLA-DQA1*03:01-B1*03:02L HLA-D QA1*05:05-B1*03:01L HLA-DRB1*14:17L HLA-DPA1*01:02-B1*04:01L HLA -DRB1*16:01L HLA-DQA1*01:03-B1*06:01L HLA-DQA1*02:01-B1*03:03L
  source 1..10: note = Severe acute respiratory syndrome coronavirus 2
DLSVVSKVVK

SEQ ID NO: 9839 - protein, 10 aa, Severe acute respiratory syndrome-related coronavirus
  REGION 1..10: note = Table B: HLA-DQA1*03:02-B1*03:03L HLA-DQA1*01:02-B1*06:02L HLA-DQA1*05:05-B1*03:19L HLA-DPA1*02:01-B1*13:01L HLA-DRB1*16:01L HLA-DQA1*01:03-B1*06:01L HLA-DQA1*02:01-B1*03:03L HLA-DRB1*15:03L
  source 1..10: note = Severe acute respiratory syndrome coronavirus 2
VVSKVVKVTI

SEQ ID NO: 9840 - protein, 13 aa, Severe acute respiratory syndrome-related coronavirus
  REGION 1..13: note = Table B: HLA-DQA1*03:02-B1*03:03L HLA-DRB1*01:02L HLA-DPA1*01:03-B1*03:01L HLA-DRB1*14:01L HLA-DQA1*05:01-B1*02:01L HLA-DPA1*02:01-B1*13:01L HLA-DPA1*03:01-B1*105:01L HLA-DRB1*16:01L HLA-DRB1*04:08L
  REGION 1..13: note = CONT. FROM ABOVE: HLA-DQA1*02:01-B1*03:03L
  source 1..13: note = Severe acute respiratory syndrome coronavirus 2
VSKVVKVTIDYTE

SEQ ID NO: 9841 - protein, 12 aa, Severe acute respiratory syndrome-related coronavirus
  REGION 1..12: note = Table B: HLA-DQA1*03:02-B1*03:03L HLA-DQA1*05:01-B1*03:01L HLA-DRB1*13:02L HLA-DRB1*13:03L HLA-DRB1*01:03L HLA-DRB1*04:02L HLA-DRB1*04:04L HLA-DRB1*04:05L HLA-DQA1*01:02-B1*06:02L HLA-DRB1*01:02L HLA-DRB4*03:01NL HLA-DRB1*08:04L
  REGION 1..12: note = CONT. FROM ABOVE: HLA-DPA1*01:03-B1*03:01L HLA-DPA1*03:01-B1*04: 02L HLA-DRB1*14:01L HLA-DRB1*04:10L HLA-DRB1*12:01L HLA-DPA1*02: 01-B1*13:01L HLA-DPA1*03:01-B1*105:01L HLA-DRB1*14:54L HLA-DQA1* 05:05-B1*03:01L HLA-DRB1*14:17L HLA-DPA1*01:02-B1*04:01L
  REGION 1..12: note = CONT. FROM ABOVE: HLA-DRB1*16:01L HLA-DQA1*01:03-B1*06:01L HLA-D RB1*04:08L HLA-DQA1*02:01-B1*03:03L HLA-DRB1*15:03L
  source 1..12: note = Severe acute respiratory syndrome coronavirus 2
VVKVTIDYTEIS

SEQ ID NO: 9842 - protein, 10 aa, Severe acute respiratory syndrome-related coronavirus
  REGION 1..10: note = Table B: HLA-DQA1*03:02-B1*03:03L HLA-DQA1*05:01-B1*03:01L HLA-DRB1*04:03L HLA-DRB1*13:03L HLA-DRB1*01:03L HLA-DRB1*04:05L HLA-DQA1*01:02-B1*06:02M HLA-DRB1*08:77L HLA-DPA1*01:03-B1*03:01L HLA-DPA1*03:01-B1*04:02L
  REGION 1..10: note = CONT. FROM ABOVE: HLA-DRB1*03:01L HLA-DRB1*14:01L HLA-DRB1*14:02 L HLA-DQA1*01-B1*05L HLA-DQA1*05:05-B1*03:19L HLA-DQA1*05:01-B1* 02:01L HLA-DRB4*01:01L HLA-DPA1*01:03-B1*04:01L HLA-DQA1*05:05-B 1*03:116L HLA-DPA1*01:03-B1*04:02L HLA-DRB1*12:01L
  REGION 1..10: note = CONT. FROM ABOVE: HLA-DPA1*02:01-B1*13:01L HLA-DPA1*03:01-B1*105 :01L HLA-DQA1*03:01-B1*03:02L HLA-DPA1*01:03-B1*104:01L HLA-DPA1 *01:02-B1*04:01L HLA-DRB1*10:01L HLA-DRB1*16:01L HLA-DQA1*01:03- B1*06:01L HLA-DQA1*02:01-B1*03:03L HLA-DRB1*15:03L
  source 1..10: note = Severe acute respiratory syndrome coronavirus 2
VTIDYTEISF

SEQ ID NO: 9843 - protein, 10 aa, Severe acute respiratory syndrome-related coronavirus
  REGION 1..10: note = Table B: HLA-DQA1*03:02-B1*03:03L HLA-DPA1*03:01-B1*04:02L HLA-DQA1*01-B1*05L HLA-DQA1*05:01-B1*02:01L HLA-DPA1*03:01-B1*105:01L HLA-DQA1*03:01-B1*03:02L HLA-DPA1*01:02-B1*04:01L HLA-DQA1*01:03-B1*06:01L
  REGION 1..10: note = CONT. FROM ABOVE: HLA-DRB1*15:03L
  source 1..10: note = Severe acute respiratory syndrome coronavirus 2
TIDYTEISFM

SEQ ID NO: 9844 - protein, 10 aa, Severe acute respiratory syndrome-related coronavirus
  REGION 1..10: note = Table B: HLA-DQA1*03:02-B1*03:03L HLA-DQA1*03:01-B1*03:02L
  source 1..10: note = Severe acute respiratory syndrome coronavirus 2
GHVETFYPKL

SEQ ID NO: 9845 - protein, 10 aa, Severe acute respiratory syndrome-related coronavirus
  REGION 1..10: note = Table B: HLA-DQA1*03:02-B1*03:03L
  source 1..10: note = Severe acute respiratory syndrome coronavirus 2
VETFYPKLQS

SEQ ID NO: 9846 - protein, 13 aa, Severe acute respiratory syndrome-related coronavirus
  REGION 1..13: note = Table B: HLA-DQA1*03:02-B1*03:03L HLA-DRB1*04:03L HLA-DRB1*13:02L HLA-DRB1*01:03L HLA-DRB1*04:02L HLA-DRB1*04:04L HLA-DRB1*04:05L HLA-DRB1*01:02L HLA-DRB4*03:01NL HLA-DPA1*01:03-B1*03:01L HLA-DQA1*01:01-B1*05:01L
  REGION 1..13: note = CONT. FROM ABOVE: HLA-DQA1*01-B1*05L HLA-DQA1*05:05-B1*03:19L HL A-DRB1*04:10L HLA-DRB1*12:01L HLA-DQA1*03:01-B1*03:02L HLA-DRB1* 14:54L HLA-DQA1*05:05-B1*03:01L HLA-DRB1*14:17L HLA-DRB1*16:01L HLA-DQA1*01:03-B1*06:01L HLA-DRB1*04:08L
  source 1..13: note = Severe acute respiratory syndrome coronavirus 2
YPKLQSSQAWQPG

SEQ ID NO: 9847 - protein, 12 aa, Severe acute respiratory syndrome-related coronavirus
  REGION 1..12: note = Table B: HLA-DQA1*03:02-B1*03:03L HLA-DQA1*05:01-B1*03:01L HLA-DQA1*01:02-B1*06:02L HLA-DQA1*05:05-B1*03:19L HLA-DQA1*05:01-B1*02:01L HLA-DPA1*03:01-B1*105:01L HLA-DQA1*03:01-B1*03:02L HLA-DQA1*05:05-B1*03:01L
  REGION 1..12: note = CONT. FROM ABOVE: HLA-DQA1*01:03-B1*06:01L HLA-DQA1*02:01-B1*03: 03L
  source 1..12: note = Severe acute respiratory syndrome coronavirus 2
LQSSQAWQPGVA

SEQ ID NO: 9848 - protein, 10 aa, Severe acute respiratory syndrome-related coronavirus
  REGION 1..10: note = Table B: HLA-DQA1*03:02-B1*03:03L
  source 1..10: note = Severe acute respiratory syndrome coronavirus 2
SQAWQPGVAM

SEQ ID NO: 9849 - protein, 11 aa, Severe acute respiratory syndrome-related coronavirus
  REGION 1..11: note = Table B: HLA-DQA1*03:02-B1*03:03L HLA-DQA1*05:01-B1*03:01L HLA-DQA1*05:05-B1*03:19L HLA-DQA1*03:01-B1*03:02L HLA-DQA1*05:05-B1*03:01L
  source 1..11: note = Severe acute respiratory syndrome coronavirus 2
QAWQPGVAMPN

SEQ ID NO: 9850 - protein, 10 aa, Severe acute respiratory syndrome-related coronavirus
  REGION 1..10: note = Table B: HLA-DQA1*03:02-B1*03:03L HLA-DQA1*05:01-B1*03:01L HLA-DQA1*01:02-B1*06:02L HLA-DQA1*05:05-B1*03:19L HLA-DQA1*05:01-B1*02:01L HLA-DPA1*03:01-B1*105:01L HLA-DQA1*03:01-B1*03:02L HLA-DQA1*05:05-B1*03:01L
  REGION 1..10: note = CONT. FROM ABOVE: HLA-DQA1*01:03-B1*06:01L HLA-DQA1*02:01-B1*03: 03L
  source 1..10: note = Severe acute respiratory syndrome coronavirus 2
WQPGVAMPNL

SEQ ID NO: 9851 - protein, 11 aa, Severe acute respiratory syndrome-related coronavirus
  REGION 1..11: note = Table B: HLA-DQA1*03:02-B1*03:03L HLA-DRB1*04:03L HLA-DQA1*01:01-B1*05:01L
  source 1..11: note = Severe acute respiratory syndrome coronavirus 2
QPGVAMPNLYK

SEQ ID NO: 9852 - protein, 12 aa, Severe acute respiratory syndrome-related coronavirus
  REGION 1..12: note = Table B: HLA-DQA1*03:02-B1*03:03L HLA-DQA1*05:01-B1*03:01L HLA-DRB1*04:04L HLA-DRB1*04:05L HLA-DQA1*01:02-B1*06:02L HLA-DRB1*01:02L HLA-DRB1*14:01L HLA-DRB1*11:03L HLA-DRB1*11:04L HLA-DQA1*01:01-B1*05:01L HLA-DRB1*08:01L
  REGION 1..12: note = CONT. FROM ABOVE: HLA-DQA1*05:01-B1*02:01L HLA-DRB1*04:10L HLA-D RB1*12:02L HLA-DPA1*03:01-B1*105:01L HLA-DRB1*14:54L HLA-DRB1*10 :01L HLA-DQA1*01:03-B1*06:01L HLA-DRB1*04:08L HLA-DRB1*08:03L HL A-DRB1*15:03L
  source 1..12: note = Severe acute respiratory syndrome coronavirus 2
LQNYGDSATLPK

SEQ ID NO: 9853 - protein, 10 aa, Severe acute respiratory syndrome-related coronavirus
  REGION 1..10: note = Table B: HLA-DQA1*03:02-B1*03:03L HLA-DQA1*05:01-B1*03:01L HLA-DRB1*04:03L HLA-DRB1*13:02L HLA-DRB1*13:03L HLA-DRB1*01:03L HLA-DRB1*04:02L HLA-DRB1*04:05L HLA-DRB4*03:01NL HLA-DRB1*08:77L HLA-DRB1*14:01L HLA-DRB1*11:04L HLA-DRB1*14:02L
  REGION 1..10: note = CONT. FROM ABOVE: HLA-DQA1*01:01-B1*05:01L HLA-DQA1*01-B1*05L HL A-DQA1*05:05-B1*03:19L HLA-DQA1*05:01-B1*02:01L HLA-DRB1*04:10L HLA-DRB1*12:01L HLA-DPA1*03:01-B1*105:01L HLA-DQA1*03:01-B1*03:0 2L HLA-DRB1*14:54L HLA-DQA1*05:05-B1*03:01L HLA-DRB1*14:17L
  REGION 1..10: note = CONT. FROM ABOVE: HLA-DPA1*01:02-B1*04:01L HLA-DRB1*16:01L HLA-D QA1*01:03-B1*06:01L HLA-DRB1*04:08L HLA-DQA1*02:01-B1*03:03L
  source 1..10: note = Severe acute respiratory syndrome coronavirus 2
YGDSATLPKG

SEQ ID NO: 9854 - protein, 10 aa, Severe acute respiratory syndrome-related coronavirus
  REGION 1..10: note = Table B: HLA-DQA1*03:02-B1*03:03L HLA-DQA1*05:05-B1*03:19L HLA-DPA1*01:03-B1*104:01L
  source 1..10: note = Severe acute respiratory syndrome coronavirus 2
GDSATLPKGI

SEQ ID NO: 9855 - protein, 10 aa, Severe acute respiratory syndrome-related coronavirus
  REGION 1..10: note = Table B: HLA-DQA1*03:02-B1*03:03L HLA-DQA1*05:01-B1*03:01L HLA-DQA1*01:02-B1*06:02L HLA-DQA1*05:05-B1*03:19L HLA-DQA1*05:01-B1*02:01L HLA-DPA1*03:01-B1*105:01L HLA-DQA1*03:01-B1*03:02L HLA-DQA1*05:05-B1*03:01L
  REGION 1..10: note = CONT. FROM ABOVE: HLA-DPA1*01:02-B1*04:01L HLA-DQA1*01:03-B1*06: 01L HLA-DQA1*02:01-B1*03:03L
  source 1..10: note = Severe acute respiratory syndrome coronavirus 2
DSATLPKGIM

SEQ ID NO: 9856 - protein, 10 aa, Severe acute respiratory syndrome-related coronavirus
  REGION 1..10: note = Table B: HLA-DQA1*03:02-B1*03:03L HLA-DQA1*05:01-B1*03:01L HLA-DQA1*03:01-B1*03:02L HLA-DQA1*02:01-B1*03:03L
  source 1..10: note = Severe acute respiratory syndrome coronavirus 2
SATLPKGIMM

SEQ ID NO: 9857 - protein, 10 aa, Severe acute respiratory syndrome-related coronavirus
  REGION 1..10: note = Table B: HLA-DQA1*03:02-B1*03:03L HLA-DQA1*05:05-B1*03:19L
  source 1..10: note = Severe acute respiratory syndrome coronavirus 2
TLPKGIMMNV

SEQ ID NO: 9858 - protein, 13 aa, Severe acute respiratory syndrome-related coronavirus
  REGION 1..13: note = Table B: HLA-DQA1*03:02-B1*03:03L HLA-DRB1*04:03L HLA-DRB1*04:02L HLA-DRB1*04:05L HLA-DRB1*01:02L HLA-DPA1*01:03-B1*03:01L HLA-DRB1*14:01L HLA-DQA1*05:01-B1*02:01L HLA-DRB1*12:01L HLA-DRB1*16:01L
  REGION 1..13: note = CONT. FROM ABOVE: HLA-DRB1*15:03L
  source 1..13: note = Severe acute respiratory syndrome coronavirus 2
LPKGIMMNVAKYT

SEQ ID NO: 9859 - protein, 10 aa, Severe acute respiratory syndrome-related coronavirus
  REGION 1..10: note = Table B: HLA-DQA1*03:02-B1*03:03L HLA-DQA1*05:01-B1*03:01L HLA-DQA1*01:02-B1*06:02L HLA-DPA1*03:01-B1*04:02L HLA-DRB1*14:01L HLA-DRB1*14:02L HLA-DQA1*01-B1*05L HLA-DQA1*05:05-B1*03:19L HLA-DQA1*05:01-B1*02:01L
  REGION 1..10: note = CONT. FROM ABOVE: HLA-DPA1*01:03-B1*04:01L HLA-DPA1*01:03-B1*04: 02L HLA-DRB1*12:01L HLA-DPA1*03:01-B1*105:01L HLA-DQA1*03:01-B1* 03:02L HLA-DPA1*01:02-B1*04:01L HLA-DRB1*16:01L HLA-DQA1*01:03-B 1*06:01L HLA-DQA1*02:01-B1*03:03L HLA-DRB1*15:03L
  source 1..10: note = Severe acute respiratory syndrome coronavirus 2
MMNVAKYTQL

SEQ ID NO: 9860 - protein, 16 aa, Severe acute respiratory syndrome-related coronavirus
  REGION 1..16: note = Table B: HLA-DQA1*03:02-B1*03:03L HLA-DRB1*11:02L
  source 1..16: note = Severe acute respiratory syndrome coronavirus 2
NVAKYTQLCQYLNTLT

SEQ ID NO: 9861 - protein, 12 aa, Severe acute respiratory syndrome-related coronavirus
  REGION 1..12: note = Table B: HLA-DQA1*03:02-B1*03:03L HLA-DQA1*05:01-B1*03:01L HLA-DRB1*04:03L HLA-DQA1*01:02-B1*06:02L HLA-DPA1*03:01-B1*04:02L HLA-DQA1*05:05-B1*03:19L HLA-DQA1*05:01-B1*02:01L HLA-DRB1*12:01L
  REGION 1..12: note = CONT. FROM ABOVE: HLA-DPA1*03:01-B1*105:01L HLA-DQA1*05:05-B1*03 :01L HLA-DRB1*14:17L HLA-DQA1*01:03-B1*06:01L HLA-DQA1*02:01-B1* 03:03L HLA-DRB1*15:03L
  source 1..12: note = Severe acute respiratory syndrome coronavirus 2
YLNTLTLAVPYN

SEQ ID NO: 9862 - protein, 12 aa, Severe acute respiratory syndrome-related coronavirus
  REGION 1..12: note = Table B: HLA-DQA1*03:02-B1*03:03L HLA-DRB1*01:02L HLA-DPA1*01:03-B1*03:01L HLA-DQA1*05:05-B1*03:19L HLA-DQA1*05:01-B1*02:01L HLA-DRB1*12:01L HLA-DRB1*16:01L HLA-DRB1*15:03L
  source 1..12: note = Severe acute respiratory syndrome coronavirus 2
NTLTLAVPYNMR

SEQ ID NO: 9863 - protein, 14 aa, Severe acute respiratory syndrome-related coronavirus
  REGION 1..14: note = Table B: HLA-DQA1*03:02-B1*03:03L HLA-DQA1*05:01-B1*03:01L HLA-DQA1*01:02-B1*06:02L HLA-DQA1*05:05-B1*03:19L HLA-DQA1*05:01-B1*02:01L HLA-DQA1*05:05-B1*03:01L HLA-DQA1*01:03-B1*06:01L
  source 1..14: note = Severe acute respiratory syndrome coronavirus 2
VIHFGAGSDKGVAP

SEQ ID NO: 9864 - protein, 12 aa, Severe acute respiratory syndrome-related coronavirus
  REGION 1..12: note = Table B: HLA-DQA1*03:02-B1*03:03L HLA-DQA1*05:01-B1*03:01L HLA-DRB1*04:03L HLA-DRB1*13:03L HLA-DRB1*01:03L HLA-DRB1*04:02L HLA-DRB1*04:05L HLA-DRB4*03:01NL HLA-DRB1*08:77L HLA-DRB1*14:02L HLA-DQA1*01:01-B1*05:01L HLA-DQA1*05:05-B1*03:19L
  REGION 1..12: note = CONT. FROM ABOVE: HLA-DQA1*05:01-B1*02:01L HLA-DRB1*12:01L HLA-D RB1*14:54L HLA-DQA1*05:05-B1*03:01L HLA-DRB1*14:17L HLA-DRB1*16: 01L HLA-DQA1*01:03-B1*06:01L HLA-DRB1*04:08L HLA-DQA1*02:01-B1*0 3:03L
  source 1..12: note = Severe acute respiratory syndrome coronavirus 2
FGAGSDKGVAPG

SEQ ID NO: 9865 - protein, 10 aa, Severe acute respiratory syndrome-related coronavirus
  REGION 1..10: note = Table B: HLA-DQA1*03:02-B1*03:03L HLA-DRB1*04:03L HLA-DRB1*13:03L HLA-DQA1*01-B1*05L HLA-DQA1*03:01-B1*03:02L
  source 1..10: note = Severe acute respiratory syndrome coronavirus 2
SDKGVAPGTA

SEQ ID NO: 9866 - protein, 11 aa, Severe acute respiratory syndrome-related coronavirus
  REGION 1..11: note = Table B: HLA-DQA1*03:02-B1*03:03L
  source 1..11: note = Severe acute respiratory syndrome coronavirus 2
DKGVAPGTAVL

SEQ ID NO: 9867 - protein, 12 aa, Severe acute respiratory syndrome-related coronavirus
  REGION 1..12: note = Table B: HLA-DQA1*03:02-B1*03:03L HLA-DRB1*04:03L HLA-DRB1*04:05L HLA-DRB1*01:02L HLA-DRB1*11:02L HLA-DRB4*01:01L HLA-DQA1*05:05-B1*03:116L HLA-DPA1*01:03-B1*104:01L HLA-DPA1*01:02-B1*04:01L HLA-DRB1*07:01L HLA-DRB1*10:01L
  REGION 1..12: note = CONT. FROM ABOVE: HLA-DRB1*04:08L
  source 1..12: note = Severe acute respiratory syndrome coronavirus 2
GVAPGTAVLRQW

SEQ ID NO: 9868 - protein, 14 aa, Severe acute respiratory syndrome-related coronavirus
  REGION 1..14: note = Table B: HLA-DQA1*03:02-B1*03:03L HLA-DRB1*01:02L HLA-DRB1*08:01L HLA-DRB1*04:08L
  source 1..14: note = Severe acute respiratory syndrome coronavirus 2
VAPGTAVLRQWLPT

SEQ ID NO: 9869 - protein, 14 aa, Severe acute respiratory syndrome-related coronavirus
  REGION 1..14: note = Table B: HLA-DQA1*03:02-B1*03:03L
  source 1..14: note = Severe acute respiratory syndrome coronavirus 2
APGTAVLRQWLPTG

SEQ ID NO: 9870 - protein, 12 aa, Severe acute respiratory syndrome-related coronavirus
  REGION 1..12: note = Table B: HLA-DQA1*03:02-B1*03:03L HLA-DRB1*04:03L HLA-DRB1*04:02L HLA-DQA1*01:02-B1*06:02L HLA-DRB1*01:02L HLA-DPA1*03:01-B1*04:02L HLA-DRB1*14:01L HLA-DQA1*05:01-B1*02:01L HLA-DRB1*12:01L
  REGION 1..12: note = CONT. FROM ABOVE: HLA-DPA1*02:01-B1*13:01L HLA-DPA1*03:01-B1*105 :01L HLA-DQA1*03:01-B1*03:02L HLA-DPA1*01:02-B1*04:01L HLA-DRB1* 16:01L HLA-DQA1*02:01-B1*03:03L HLA-DRB1*15:03L
  source 1..12: note = Severe acute respiratory syndrome coronavirus 2
AVLRQWLPTGTL

SEQ ID NO: 9871 - protein, 10 aa, Severe acute respiratory syndrome-related coronavirus
  REGION 1..10: note = Table B: HLA-DQA1*03:02-B1*03:03M HLA-DQA1*05:01-B1*03:01L HLA-DRB1*13:02L HLA-DRB1*01:03L HLA-DRB1*04:05L HLA-DQA1*01:02-B1*06:02L HLA-DPA1*03:01-B1*04:02L HLA-DRB1*14:01L HLA-DRB1*14:02L HLA-DRB1*08:01L
  REGION 1..10: note = CONT. FROM ABOVE: HLA-DQA1*01-B1*05L HLA-DQA1*05:05-B1*03:19L HL A-DQA1*05:01-B1*02:01L HLA-DPA1*01:03-B1*04:01L HLA-DQA1*05:05-B 1*03:116L HLA-DRB1*09:01L HLA-DPA1*01:03-B1*04:02L HLA-DPA1*02:0 1-B1*13:01L HLA-DPA1*03:01-B1*105:01L HLA-DQA1*03:01-B1*03:02L
  REGION 1..10: note = CONT. FROM ABOVE: HLA-DPA1*01:03-B1*104:01L HLA-DPA1*01:02-B1*04 :01L HLA-DRB1*16:01L HLA-DQA1*01:03-B1*06:01L HLA-DQA1*02:01-B1* 03:03L HLA-DRB1*15:03L
  source 1..10: note = Severe acute respiratory syndrome coronavirus 2
RQWLPTGTLL

SEQ ID NO: 9872 - protein, 11 aa, Severe acute respiratory syndrome-related coronavirus
  REGION 1..11: note = Table B: HLA-DQA1*03:02-B1*03:03L HLA-DQA1*05:01-B1*02:01L HLA-DQA1*03:01-B1*03:02L HLA-DQA1*02:01-B1*03:03L
  source 1..11: note = Severe acute respiratory syndrome coronavirus 2
LPTGTLLVDSD

SEQ ID NO: 9873 - protein, 10 aa, Severe acute respiratory syndrome-related coronavirus
  REGION 1..10: note = Table B: HLA-DQA1*03:02-B1*03:03L HLA-DRB1*04:03L HLA-DQA1*01:02-B1*06:02L HLA-DPA1*03:01-B1*04:02L HLA-DRB1*14:02L HLA-DQA1*01-B1*05L HLA-DQA1*05:05-B1*03:19L HLA-DQA1*05:01-B1*02:01L HLA-DRB4*01:01L
  REGION 1..10: note = CONT. FROM ABOVE: HLA-DPA1*01:03-B1*04:01L HLA-DPA1*02:01-B1*13: 01L HLA-DPA1*03:01-B1*105:01L HLA-DQA1*03:01-B1*03:02L HLA-DQA1* 01:03-B1*06:01L HLA-DQA1*02:01-B1*03:03L HLA-DRB1*15:03L
  source 1..10: note = Severe acute respiratory syndrome coronavirus 2
LLVDSDLNDF

SEQ ID NO: 9874 - protein, 13 aa, Severe acute respiratory syndrome-related coronavirus
  REGION 1..13: note = Table B: HLA-DQA1*03:02-B1*03:03L HLA-DQA1*03:01-B1*03:02L HLA-DQA1*01:03-B1*06:01L
  source 1..13: note = Severe acute respiratory syndrome coronavirus 2
VDSDLNDFVSDAD

SEQ ID NO: 9875 - protein, 14 aa, Severe acute respiratory syndrome-related coronavirus
  REGION 1..14: note = Table B: HLA-DQA1*03:02-B1*03:03L HLA-DRB1*04:02L HLA-DRB1*04:05L HLA-DQA1*01:01-B1*05:01L HLA-DRB1*04:10L HLA-DRB1*16:01L HLA-DQA1*01:03-B1*06:01L HLA-DQA1*02:01-B1*03:03L
  source 1..14: note = Severe acute respiratory syndrome coronavirus 2
DSDLNDFVSDADST

SEQ ID NO: 9876 - protein, 10 aa, Severe acute respiratory syndrome-related coronavirus
  REGION 1..10: note = Table B: HLA-DQA1*03:02-B1*03:03L HLA-DRB1*04:03L HLA-DRB1*13:03L HLA-DQA1*01-B1*05L HLA-DQA1*05:01-B1*02:01L HLA-DQA1*03:01-B1*03:02L HLA-DRB1*16:01L
  source 1..10: note = Severe acute respiratory syndrome coronavirus 2
DFVSDADSTL

SEQ ID NO: 9877 - protein, 10 aa, Severe acute respiratory syndrome-related coronavirus
  REGION 1..10: note = Table B: HLA-DQA1*03:02-B1*03:03L HLA-DQA1*05:05-B1*03:19L
  source 1..10: note = Severe acute respiratory syndrome coronavirus 2
FVSDADSTLI

SEQ ID NO: 9878 - protein, 14 aa, Severe acute respiratory syndrome-related coronavirus
  REGION 1..14: note = Table B: HLA-DQA1*03:02-B1*03:03L HLA-DQA1*05:01-B1*03:01L HLA-DQA1*01:02-B1*06:02L HLA-DQA1*05:05-B1*03:19L HLA-DPA1*03:01-B1*105:01L HLA-DQA1*03:01-B1*03:02L HLA-DQA1*05:05-B1*03:01L HLA-DQA1*02:01-B1*03:03L
  source 1..14: note = Severe acute respiratory syndrome coronavirus 2
VSDADSTLIGDCAT

SEQ ID NO: 9879 - protein, 12 aa, Severe acute respiratory syndrome-related coronavirus
  REGION 1..12: note = Table B: HLA-DQA1*03:02-B1*03:03L HLA-DQA1*05:01-B1*03:01L HLA-DQA1*01:02-B1*06:02L HLA-DQA1*03:01-B1*03:02L HLA-DQA1*05:05-B1*03:01L HLA-DQA1*01:03-B1*06:01L HLA-DQA1*02:01-B1*03:03L
  source 1..12: note = Severe acute respiratory syndrome coronavirus 2
DSTLIGDCATVH

SEQ ID NO: 9880 - protein, 12 aa, Severe acute respiratory syndrome-related coronavirus
  REGION 1..12: note = Table B: HLA-DQA1*03:02-B1*03:03L HLA-DQA1*05:01-B1*03:01L HLA-DRB1*04:03L HLA-DQA1*05:05-B1*03:19L HLA-DPA1*03:01-B1*105:01L HLA-DQA1*03:01-B1*03:02L
  source 1..12: note = Severe acute respiratory syndrome coronavirus 2
LIGDCATVHTAN

SEQ ID NO: 9881 - protein, 11 aa, Severe acute respiratory syndrome-related coronavirus
  REGION 1..11: note = Table B: HLA-DQA1*03:02-B1*03:03L HLA-DQA1*05:01-B1*02:01L
  source 1..11: note = Severe acute respiratory syndrome coronavirus 2
DLIISDMYDPK

SEQ ID NO: 9882 - protein, 12 aa, Severe acute respiratory syndrome-related coronavirus
  REGION 1..12: note = Table B: HLA-DQA1*03:02-B1*03:03L HLA-DQA1*01:02-B1*06:02L HLA-DRB1*14:01L HLA-DPA1*02:01-B1*13:01L HLA-DPA1*03:01-B1*105:01L HLA-DPA1*01:02-B1*04:01L HLA-DQA1*01:03-B1*06:01L HLA-DRB1*15:03L
  source 1..12: note = Severe acute respiratory syndrome coronavirus 2
IISDMYDPKTKN

SEQ ID NO: 9883 - protein, 10 aa, Severe acute respiratory syndrome-related coronavirus
  REGION 1..10: note = Table B: HLA-DQA1*03:02-B1*03:03L HLA-DQA1*05:01-B1*03:01L HLA-DRB1*13:03L HLA-DRB1*04:05L HLA-DQA1*01:02-B1*06:02L HLA-DRB1*01:02L HLA-DPA1*03:01-B1*04:02L HLA-DRB1*14:01L HLA-DRB1*14:02L HLA-DRB1*08:01L HLA-DQA1*01-B1*05L
  REGION 1..10: note = CONT. FROM ABOVE: HLA-DQA1*05:05-B1*03:19L HLA-DQA1*05:01-B1*02: 01L HLA-DPA1*01:03-B1*04:01L HLA-DQA1*05:05-B1*03:116L HLA-DPA1* 02:01-B1*13:01L HLA-DPA1*03:01-B1*105:01M HLA-DQA1*03:01-B1*03:0 2L HLA-DPA1*01:02-B1*04:01L HLA-DRB1*16:01L
  REGION 1..10: note = CONT. FROM ABOVE: HLA-DQA1*01:03-B1*06:01L HLA-DRB1*08:03L HLA-D QA1*02:01-B1*03:03L HLA-DRB1*15:03L
  source 1..10: note = Severe acute respiratory syndrome coronavirus 2
DMYDPKTKNV

SEQ ID NO: 9884 - protein, 16 aa, Severe acute respiratory syndrome-related coronavirus
  REGION 1..16: note = Table B: HLA-DQA1*03:02-B1*03:03L HLA-DQA1*05:01-B1*03:01L HLA-DRB1*13:02L HLA-DRB1*08:04L HLA-DPA1*01:03-B1*03:01L HLA-DRB1*14:01L HLA-DRB1*11:04L HLA-DRB1*11:01L HLA-DQA1*05:01-B1*02:01L HLA-DRB3*01:01L
  REGION 1..16: note = CONT. FROM ABOVE: HLA-DPA1*03:01-B1*105:01L HLA-DQA1*05:05-B1*03 :01L HLA-DRB1*07:01L HLA-DRB1*08:03L HLA-DRB1*15:03L
  source 1..16: note = Severe acute respiratory syndrome coronavirus 2
DPKTKNVTKENDSKEG

SEQ ID NO: 9885 - protein, 10 aa, Severe acute respiratory syndrome-related coronavirus
  REGION 1..10: note = Table B: HLA-DQA1*03:02-B1*03:03L HLA-DQA1*05:01-B1*03:01M HLA-DRB1*13:03L HLA-DRB1*01:03L HLA-DRB4*03:01NL HLA-DRB1*08:77M HLA-DPA1*01:03-B1*03:01L HLA-DPA1*03:01-B1*04:02M HLA-DRB1*03:01L HLA-DRB1*11:02L HLA-DQA1*01-B1*05L
  REGION 1..10: note = CONT. FROM ABOVE: HLA-DQA1*05:05-B1*03:19L HLA-DQA1*05:01-B1*02: 01L HLA-DRB4*01:01M HLA-DPA1*01:03-B1*04:01M HLA-DQA1*05:05-B1*0 3:116L HLA-DPA1*01:03-B1*04:02L HLA-DRB1*12:01L HLA-DQA1*03:01-B 1*03:02L HLA-DPA1*01:03-B1*104:01L HLA-DPA1*01:02-B1*04:01L
  REGION 1..10: note = CONT. FROM ABOVE: HLA-DRB1*10:01L HLA-DRB1*16:01L HLA-DRB1*15:03 M
  source 1..10: note = Severe acute respiratory syndrome coronavirus 2
KENDSKEGFF

SEQ ID NO: 9886 - protein, 10 aa, Severe acute respiratory syndrome-related coronavirus
  REGION 1..10: note = Table B: HLA-DQA1*03:02-B1*03:03L HLA-DQA1*01:02-B1*06:02L HLA-DPA1*03:01-B1*04:02L HLA-DQA1*05:05-B1*03:19L HLA-DQA1*05:01-B1*02:01L HLA-DPA1*02:01-B1*13:01L HLA-DPA1*03:01-B1*105:01L HLA-DPA1*01:02-B1*04:01L
  REGION 1..10: note = CONT. FROM ABOVE: HLA-DQA1*01:03-B1*06:01L HLA-DQA1*02:01-B1*03: 03L HLA-DRB1*15:03L
  source 1..10: note = Severe acute respiratory syndrome coronavirus 2
YICGFIQQKL

SEQ ID NO: 9887 - protein, 12 aa, Severe acute respiratory syndrome-related coronavirus
  REGION 1..12: note = Table B: HLA-DQA1*03:02-B1*03:03L HLA-DQA1*05:01-B1*03:01L HLA-DRB1*04:02L HLA-DQA1*01:02-B1*06:02L HLA-DRB1*14:01L HLA-DQA1*05:05-B1*03:19L HLA-DQA1*03:01-B1*03:02L HLA-DQA1*05:05-B1*03:01L HLA-DRB1*14:17L
  REGION 1..12: note = CONT. FROM ABOVE: HLA-DQA1*01:03-B1*06:01L HLA-DQA1*02:01-B1*03: 03L
  source 1..12: note = Severe acute respiratory syndrome coronavirus 2
IQQKLALGGSVA

SEQ ID NO: 9888 - protein, 10 aa, Severe acute respiratory syndrome-related coronavirus
  REGION 1..10: note = Table B: HLA-DQA1*03:02-B1*03:03L HLA-DQA1*05:05-B1*03:19L
  source 1..10: note = Severe acute respiratory syndrome coronavirus 2
KLALGGSVAI

SEQ ID NO: 9889 - protein, 10 aa, Severe acute respiratory syndrome-related coronavirus
  REGION 1..10: note = Table B: HLA-DQA1*03:02-B1*03:03L HLA-DQA1*05:01-B1*03:01L HLA-DQA1*01:02-B1*06:02L HLA-DQA1*05:05-B1*03:19L HLA-DRB1*12:01L HLA-DQA1*03:01-B1*03:02L HLA-DQA1*05:05-B1*03:01L HLA-DQA1*01:03-B1*06:01L
  REGION 1..10: note = CONT. FROM ABOVE: HLA-DQA1*02:01-B1*03:03L
  source 1..10: note = Severe acute respiratory syndrome coronavirus 2
LGGSVAIKIT

SEQ ID NO: 9890 - protein, 10 aa, Severe acute respiratory syndrome-related coronavirus
  REGION 1..10: note = Table B: HLA-DQA1*03:02-B1*03:03L HLA-DQA1*05:01-B1*03:01L HLA-DQA1*03:01-B1*03:02L HLA-DQA1*05:05-B1*03:01L HLA-DQA1*01:03-B1*06:01L HLA-DQA1*02:01-B1*03:03L
  source 1..10: note = Severe acute respiratory syndrome coronavirus 2
GGSVAIKITE

SEQ ID NO: 9891 - protein, 12 aa, Severe acute respiratory syndrome-related coronavirus
  REGION 1..12: note = Table B: HLA-DQA1*03:02-B1*03:03L HLA-DQA1*05:01-B1*03:01L HLA-DRB1*13:03L HLA-DRB1*01:02L HLA-DRB1*08:04L HLA-DRB1*08:01L HLA-DRB1*04:10L HLA-DQA1*05:05-B1*03:01L HLA-DRB1*04:08L
  source 1..12: note = Severe acute respiratory syndrome coronavirus 2
SVAIKITEHSWN

SEQ ID NO: 9892 - protein, 10 aa, Severe acute respiratory syndrome-related coronavirus
  REGION 1..10: note = Table B: HLA-DQA1*03:02-B1*03:03L HLA-DQA1*01-B1*05L HLA-DQA1*03:01-B1*03:02L
  source 1..10: note = Severe acute respiratory syndrome coronavirus 2
ITEHSWNADL

SEQ ID NO: 9893 - protein, 10 aa, Severe acute respiratory syndrome-related coronavirus
  REGION 1..10: note = Table B: HLA-DQA1*03:02-B1*03:03L HLA-DQA1*05:01-B1*03:01M HLA-DRB1*13:03L HLA-DRB1*01:03L HLA-DQA1*01:02-B1*06:02L HLA-DRB4*03:01NL HLA-DRB1*08:77M HLA-DPA1*01:03-B1*03:01L HLA-DPA1*03:01-B1*04:02M HLA-DRB1*03:01M HLA-DRB1*11:02L
  REGION 1..10: note = CONT. FROM ABOVE: HLA-DRB1*14:02L HLA-DQA1*01-B1*05L HLA-DQA1*05 :05-B1*03:19M HLA-DQA1*05:01-B1*02:01M HLA-DRB4*01:01M HLA-DPA1* 01:03-B1*04:01M HLA-DQA1*05:05-B1*03:116L HLA-DPA1*01:03-B1*04:0 2L HLA-DRB1*12:01L HLA-DQA1*03:01-B1*03:02L
  REGION 1..10: note = CONT. FROM ABOVE: HLA-DPA1*01:03-B1*104:01L HLA-DPA1*01:02-B1*04 :01L HLA-DRB1*10:01L HLA-DRB1*16:01L HLA-DQA1*02:01-B1*03:03L HL A-DRB1*15:03L
  source 1..10: note = Severe acute respiratory syndrome coronavirus 2
TEHSWNADLY

SEQ ID NO: 9894 - protein, 10 aa, Severe acute respiratory syndrome-related coronavirus
  REGION 1..10: note = Table B: HLA-DQA1*03:02-B1*03:03L HLA-DQA1*05:01-B1*03:01L HLA-DQA1*01:02-B1*06:02L HLA-DPA1*03:01-B1*04:02L HLA-DQA1*05:05-B1*03:19L HLA-DQA1*05:01-B1*02:01L HLA-DQA1*05:05-B1*03:116L HLA-DPA1*03:01-B1*105:01L
  REGION 1..10: note = CONT. FROM ABOVE: HLA-DQA1*03:01-B1*03:02L HLA-DPA1*01:02-B1*04: 01L HLA-DQA1*01:03-B1*06:01L HLA-DQA1*02:01-B1*03:03L HLA-DRB1*1 5:03L
  source 1..10: note = Severe acute respiratory syndrome coronavirus 2
HSWNADLYKL

SEQ ID NO: 9895 - protein, 12 aa, Severe acute respiratory syndrome-related coronavirus
  REGION 1..12: note = Table B: HLA-DQA1*03:02-B1*03:03L HLA-DQA1*05:01-B1*03:01L HLA-DRB1*04:03L HLA-DRB1*13:02L HLA-DRB1*01:03L HLA-DRB1*04:05L HLA-DQA1*01:02-B1*06:02L HLA-DRB1*01:02L HLA-DRB3*02:01L HLA-DPA1*01:03-B1*03:01L HLA-DPA1*03:01-B1*04:02L
  REGION 1..12: note = CONT. FROM ABOVE: HLA-DRB1*14:01L HLA-DRB1*08:01L HLA-DQA1*01-B1 *05L HLA-DQA1*05:05-B1*03:19L HLA-DQA1*05:01-B1*02:01L HLA-DPA1* 01:03-B1*04:01L HLA-DRB1*09:01L HLA-DPA1*01:03-B1*04:02L HLA-DRB 1*12:01L HLA-DPA1*02:01-B1*13:01L HLA-DPA1*03:01-B1*105:01L
  REGION 1..12: note = CONT. FROM ABOVE: HLA-DQA1*03:01-B1*03:02L HLA-DPA1*01:03-B1*104 :01L HLA-DQA1*05:05-B1*03:01L HLA-DPA1*01:02-B1*04:01L HLA-DRB1* 07:01L HLA-DRB1*16:01L HLA-DQA1*01:03-B1*06:01L HLA-DRB1*04:08L HLA-DQA1*02:01-B1*03:03L HLA-DRB1*15:01L HLA-DRB1*15:03L
  source 1..12: note = Severe acute respiratory syndrome coronavirus 2
GHFAWWTAFVTN

SEQ ID NO: 9896 - protein, 12 aa, Severe acute respiratory syndrome-related coronavirus
  REGION 1..12: note = Table B: HLA-DQA1*03:02-B1*03:03L HLA-DRB1*01:02L HLA-DPA1*01:03-B1*03:01L HLA-DRB1*12:01L HLA-DPA1*02:01-B1*13:01L HLA-DRB1*04:08L HLA-DRB1*15:03L
  source 1..12: note = Severe acute respiratory syndrome coronavirus 2
FAWWTAFVTNVN

SEQ ID NO: 9897 - protein, 12 aa, Severe acute respiratory syndrome-related coronavirus
  REGION 1..12: note = Table B: HLA-DQA1*03:02-B1*03:03L HLA-DRB1*04:05L HLA-DQA1*01:02-B1*06:02L HLA-DRB1*14:01L HLA-DQA1*01-B1*05L HLA-DQA1*05:01-B1*02:01L HLA-DRB1*04:10L HLA-DRB1*12:01L HLA-DPA1*03:01-B1*105:01L HLA-DQA1*03:01-B1*03:02L
  REGION 1..12: note = CONT. FROM ABOVE: HLA-DQA1*05:05-B1*03:01L HLA-DRB1*04:08L HLA-D QA1*02:01-B1*03:03L
  source 1..12: note = Severe acute respiratory syndrome coronavirus 2
WTAFVTNVNASS

SEQ ID NO: 9898 - protein, 12 aa, Severe acute respiratory syndrome-related coronavirus
  REGION 1..12: note = Table B: HLA-DQA1*03:02-B1*03:03L HLA-DRB1*13:02L HLA-DRB1*01:03L HLA-DRB1*04:04L HLA-DRB1*04:05L HLA-DRB1*08:04L HLA-DRB1*08:77L HLA-DRB1*14:01L HLA-DRB1*11:03L HLA-DRB1*11:04L HLA-DQA1*01-B1*05L HLA-DQA1*05:01-B1*02:01L HLA-DRB1*04:10L
  REGION 1..12: note = CONT. FROM ABOVE: HLA-DRB1*12:01L HLA-DRB1*12:02L HLA-DQA1*03:01 -B1*03:02L HLA-DRB1*10:01L HLA-DRB1*04:08L HLA-DRB1*08:03L HLA-D QA1*02:01-B1*03:03L HLA-DRB1*15:03L
  source 1..12: note = Severe acute respiratory syndrome coronavirus 2
TAFVTNVNASSS

SEQ ID NO: 9899 - protein, 12 aa, Severe acute respiratory syndrome-related coronavirus
  REGION 1..12: note = Table B: HLA-DQA1*03:02-B1*03:03L HLA-DPA1*03:01-B1*04:02L HLA-DRB1*03:01L HLA-DRB1*11:02L HLA-DRB5*01:01L HLA-DRB4*01:01L HLA-DRB1*09:01L HLA-DPA1*01:03-B1*04:02L HLA-DRB3*01:01L HLA-DRB1*07:01L HLA-DQA1*01:03-B1*06:01L
  source 1..12: note = Severe acute respiratory syndrome coronavirus 2
AFVTNVNASSSE

SEQ ID NO: 9900 - protein, 12 aa, Severe acute respiratory syndrome-related coronavirus
  REGION 1..12: note = Table B: HLA-DQA1*03:02-B1*03:03L HLA-DPA1*03:01-B1*04:02L HLA-DRB1*03:01L HLA-DRB5*01:01L HLA-DRB4*01:01L HLA-DRB1*09:01L HLA-DRB1*07:01L HLA-DQA1*01:03-B1*06:01L
  source 1..12: note = Severe acute respiratory syndrome coronavirus 2
FVTNVNASSSEA

SEQ ID NO: 9901 - protein, 10 aa, Severe acute respiratory syndrome-related coronavirus
  REGION 1..10: note = Table B: HLA-DQA1*03:02-B1*03:03L HLA-DQA1*05:01-B1*03:01L HLA-DRB1*13:03L HLA-DQA1*01:02-B1*06:02L HLA-DRB1*08:77L HLA-DRB1*14:01L HLA-DRB1*14:02L HLA-DQA1*05:05-B1*03:19L HLA-DQA1*05:01-B1*02:01L HLA-DPA1*01:03-B1*04:01L
  REGION 1..10: note = CONT. FROM ABOVE: HLA-DPA1*02:01-B1*13:01L HLA-DPA1*03:01-B1*105 :01L HLA-DQA1*03:01-B1*03:02L HLA-DQA1*01:03-B1*06:01L HLA-DQA1* 02:01-B1*03:03L HLA-DRB1*15:03L
  source 1..10: note = Severe acute respiratory syndrome coronavirus 2
NVNASSSEAF

SEQ ID NO: 9902 - protein, 10 aa, Severe acute respiratory syndrome-related coronavirus
  REGION 1..10: note = Table B: HLA-DQA1*03:02-B1*03:03L HLA-DQA1*05:01-B1*02:01L HLA-DQA1*03:01-B1*03:02L HLA-DQA1*02:01-B1*03:03L
  source 1..10: note = Severe acute respiratory syndrome coronavirus 2
VNASSSEAFL

SEQ ID NO: 9903 - protein, 10 aa, Severe acute respiratory syndrome-related coronavirus
  REGION 1..10: note = Table B: HLA-DQA1*03:02-B1*03:03L HLA-DQA1*05:01-B1*03:01M HLA-DRB1*08:77M HLA-DPA1*01:03-B1*03:01L HLA-DPA1*03:01-B1*04:02L HLA-DRB1*03:01L HLA-DRB1*11:02L HLA-DQA1*01-B1*05L HLA-DQA1*05:05-B1*03:19M
  REGION 1..10: note = CONT. FROM ABOVE: HLA-DQA1*05:01-B1*02:01L HLA-DRB4*01:01M HLA-D PA1*01:03-B1*04:01M HLA-DPA1*01:03-B1*104:01L HLA-DPA1*01:02-B1* 04:01L HLA-DRB1*10:01L HLA-DRB1*16:01L HLA-DRB1*15:03L
  source 1..10: note = Severe acute respiratory syndrome coronavirus 2
SEAFLIGCNY

SEQ ID NO: 9904 - protein, 12 aa, Severe acute respiratory syndrome-related coronavirus
  REGION 1..12: note = Table B: HLA-DQA1*03:02-B1*03:03L HLA-DRB1*04:05L HLA-DRB1*08:04L HLA-DRB1*11:01L HLA-DQA1*05:05-B1*03:19L HLA-DRB1*12:01L HLA-DPA1*03:01-B1*105:01L HLA-DRB1*15:03L
  source 1..12: note = Severe acute respiratory syndrome coronavirus 2
NYLGKPREQIDG

SEQ ID NO: 9905 - protein, 10 aa, Severe acute respiratory syndrome-related coronavirus
  REGION 1..10: note = Table B: HLA-DQA1*03:02-B1*03:03L HLA-DRB1*13:03L HLA-DQA1*05:05-B1*03:19L HLA-DPA1*03:01-B1*105:01L HLA-DQA1*03:01-B1*03:02L HLA-DRB1*15:03L
  source 1..10: note = Severe acute respiratory syndrome coronavirus 2
EQIDGYVMHA

SEQ ID NO: 9906 - protein, 12 aa, Severe acute respiratory syndrome-related coronavirus
  REGION 1..12: note = Table B: HLA-DQA1*03:02-B1*03:03L HLA-DRB1*13:02L HLA-DRB1*08:04L HLA-DRB3*02:01L HLA-DPA1*01:03-B1*04:01L HLA-DRB1*09:01L HLA-DRB1*12:02L HLA-DQA1*03:01-B1*03:02L HLA-DQA1*05:05-B1*03:01L HLA-DRB1*07:01L
  source 1..12: note = Severe acute respiratory syndrome coronavirus 2
IDGYVMHANYIF

SEQ ID NO: 9907 - protein, 10 aa, Severe acute respiratory syndrome-related coronavirus
  REGION 1..10: note = Table B: HLA-DQA1*03:02-B1*03:03L HLA-DQA1*05:01-B1*03:01L HLA-DRB1*04:03L HLA-DRB1*13:02L HLA-DRB1*13:03L HLA-DRB1*01:03L HLA-DRB1*04:02L HLA-DRB1*04:05L HLA-DQA1*01:02-B1*06:02L HLA-DRB1*01:02L HLA-DRB4*03:01NL HLA-DRB1*08:04L HLA-DRB1*08:77L
  REGION 1..10: note = CONT. FROM ABOVE: HLA-DRB3*02:01L HLA-DPA1*01:03-B1*03:01L HLA-D PA1*03:01-B1*04:02L HLA-DRB1*14:01L HLA-DRB1*11:03L HLA-DRB1*08: 01L HLA-DQA1*01-B1*05L HLA-DQA1*05:05-B1*03:19L HLA-DQA1*05:01-B 1*02:01L HLA-DRB1*04:10L HLA-DRB1*12:01L HLA-DRB1*12:02L
  REGION 1..10: note = CONT. FROM ABOVE: HLA-DPA1*02:01-B1*13:01L HLA-DPA1*03:01-B1*105 :01L HLA-DQA1*03:01-B1*03:02L HLA-DRB1*14:54L HLA-DQA1*05:05-B1* 03:01L HLA-DRB1*14:17L HLA-DPA1*01:02-B1*04:01L HLA-DRB1*16:01L HLA-DQA1*01:03-B1*06:01L HLA-DRB1*04:08L
  REGION 1..10: note = CONT. FROM ABOVE: HLA-DQA1*02:01-B1*03:03L HLA-DRB1*15:03L
  source 1..10: note = Severe acute respiratory syndrome coronavirus 2
IFWRNTNPIQ

SEQ ID NO: 9908 - protein, 10 aa, Severe acute respiratory syndrome-related coronavirus
  REGION 1..10: note = Table B: HLA-DQA1*03:02-B1*03:03L HLA-DQA1*05:01-B1*03:01L HLA-DRB1*04:03L HLA-DRB1*13:02L HLA-DRB1*13:03L HLA-DRB1*01:03L HLA-DRB1*04:02L HLA-DRB1*04:05L HLA-DRB1*01:02L HLA-DRB4*03:01NL HLA-DRB1*08:77L HLA-DRB3*02:01L HLA-DPA1*03:01-B1*04:02L
  REGION 1..10: note = CONT. FROM ABOVE: HLA-DRB1*14:01L HLA-DRB1*11:03L HLA-DRB1*14:02 L HLA-DRB1*08:01L HLA-DQA1*01-B1*05L HLA-DQA1*05:05-B1*03:19L HL A-DQA1*05:01-B1*02:01L HLA-DPA1*01:03-B1*04:01L HLA-DRB1*09:01L HLA-DRB1*12:01L HLA-DPA1*02:01-B1*13:01L
  REGION 1..10: note = CONT. FROM ABOVE: HLA-DPA1*03:01-B1*105:01L HLA-DQA1*03:01-B1*03 :02L HLA-DPA1*01:02-B1*04:01L HLA-DRB1*07:01L HLA-DRB1*16:01L HL A-DQA1*01:03-B1*06:01L HLA-DQA1*02:01-B1*03:03L HLA-DRB1*15:03L
  source 1..10: note = Severe acute respiratory syndrome coronavirus 2
FWRNTNPIQL

SEQ ID NO: 9909 - protein, 10 aa, Severe acute respiratory syndrome-related coronavirus
  REGION 1..10: note = Table B: HLA-DQA1*03:02-B1*03:03L HLA-DQA1*05:01-B1*03:01M HLA-DRB1*14:04L HLA-DRB1*04:01L HLA-DRB1*04:03L HLA-DRB1*13:02M HLA-DRB1*13:03M HLA-DRB1*01:03M HLA-DRB1*04:02L HLA-DRB1*04:05L HLA-DQA1*01:02-B1*06:02H HLA-DRB1*01:01L HLA-DRB1*01:02L
  REGION 1..10: note = CONT. FROM ABOVE: HLA-DRB4*03:01NM HLA-DRB1*08:77M HLA-DPA1*01:0 3-B1*03:01M HLA-DPA1*03:01-B1*04:02M HLA-DRB1*03:01M HLA-DRB1*14 :01M HLA-DRB1*11:02M HLA-DRB1*11:03L HLA-DRB1*11:04L HLA-DRB1*14 :02M HLA-DRB1*08:01L HLA-DRB1*11:01L HLA-DRB5*01:01M
  REGION 1..10: note = CONT. FROM ABOVE: HLA-DQA1*01-B1*05M HLA-DQA1*05:05-B1*03:19M HL A-DRB4*02:01NL HLA-DQA1*05:01-B1*02:01H HLA-DRB4*01:01M HLA-DPA1 *01:03-B1*04:01M HLA-DQA1*05:05-B1*03:116M HLA-DRB1*09:01L HLA-D PA1*01:03-B1*04:02M HLA-DRB1*12:01M HLA-DRB1*12:02L
  REGION 1..10: note = CONT. FROM ABOVE: HLA-DPA1*02:01-B1*13:01L HLA-DPA1*03:01-B1*105 :01M HLA-DQA1*03:01-B1*03:02L HLA-DRB1*14:54L HLA-DPA1*01:03-B1* 104:01M HLA-DQA1*05:05-B1*03:01L HLA-DRB1*14:17L HLA-DPA1*01:02- B1*04:01L HLA-DRB1*10:01M HLA-DRB1*16:01M
  REGION 1..10: note = CONT. FROM ABOVE: HLA-DQA1*01:03-B1*06:01L HLA-DRB1*08:02M HLA -DRB1*08:03L HLA-DQA1*02:01-B1*03:03M HLA-DRB1*15:01L HLA-DRB1 *15:03M
  source 1..10: note = Severe acute respiratory syndrome coronavirus 2
NTNPIQLSSY

SEQ ID NO: 9910 - protein, 10 aa, Severe acute respiratory syndrome-related coronavirus
  REGION 1..10: note = Table B: HLA-DQA1*03:02-B1*03:03L HLA-DQA1*05:01-B1*03:01L HLA-DRB1*13:03L HLA-DQA1*01:02-B1*06:02L HLA-DQA1*01-B1*05L HLA-DPA1*03:01-B1*105:01L HLA-DQA1*03:01-B1*03:02L HLA-DPA1*01:02-B1*04:01L
  source 1..10: note = Severe acute respiratory syndrome coronavirus 2
NPIQLSSYSL

SEQ ID NO: 9911 - protein, 10 aa, Severe acute respiratory syndrome-related coronavirus
  REGION 1..10: note = Table B: HLA-DQA1*03:02-B1*03:03L HLA-DQA1*05:01-B1*03:01L HLA-DPA1*03:01-B1*04:02L HLA-DRB1*14:01L HLA-DQA1*05:05-B1*03:19L HLA-DPA1*03:01-B1*105:01L HLA-DQA1*03:01-B1*03:02L HLA-DPA1*01:02-B1*04:01L
  REGION 1..10: note = CONT. FROM ABOVE: HLA-DQA1*02:01-B1*03:03L HLA-DRB1*15:03L
  source 1..10: note = Severe acute respiratory syndrome coronavirus 2
SLFDMSKFPL

SEQ ID NO: 9912 - protein, 10 aa, Severe acute respiratory syndrome-related coronavirus
  REGION 1..10: note = Table B: HLA-DQA1*03:02-B1*03:03L HLA-DQA1*05:05-B1*03:19L HLA-DQA1*03:01-B1*03:02L HLA-DPA1*01:03-B1*104:01L HLA-DRB1*16:01L HLA-DQA1*02:01-B1*03:03L
  source 1..10: note = Severe acute respiratory syndrome coronavirus 2
FDMSKFPLKL

SEQ ID NO: 9913 - protein, 16 aa, Severe acute respiratory syndrome-related coronavirus
  REGION 1..16: note = Table B: HLA-DQA1*03:02-B1*03:03L HLA-DRB1*04:04L HLA-DRB3*02:01L HLA-DRB1*11:04L HLA-DRB1*11:01L HLA-DPA1*01:03-B1*04:02L HLA-DPA1*01:03-B1*02:01L HLA-DPA1*01:03-B1*104:01L
  source 1..16: note = Severe acute respiratory syndrome coronavirus 2
FPLKLRGTAVMSLKEG

SEQ ID NO: 9914 - protein, 13 aa, Severe acute respiratory syndrome-related coronavirus
  REGION 1..13: note = Table B: HLA-DQA1*03:02-B1*03:03L
  source 1..13: note = Severe acute respiratory syndrome coronavirus 2
LRGTAVMSLKEGQ

SEQ ID NO: 9915 - protein, 10 aa, Severe acute respiratory syndrome-related coronavirus
  REGION 1..10: note = Table B: HLA-DQA1*03:02-B1*03:03L HLA-DQA1*05:05-B1*03:19L HLA-DQA1*03:01-B1*03:02L HLA-DPA1*01:03-B1*104:01L
  source 1..10: note = Severe acute respiratory syndrome coronavirus 2
AVMSLKEGQI

SEQ ID NO: 9916 - protein, 10 aa, Severe acute respiratory syndrome-related coronavirus
  REGION 1..10: note = Table B: HLA-DQA1*03:02-B1*03:03L HLA-DQA1*05:01-B1*03:01L HLA-DRB1*04:03L HLA-DRB1*04:02L HLA-DQA1*01:02-B1*06:02L HLA-DRB1*14:01L HLA-DQA1*05:01-B1*02:01L HLA-DRB1*12:01L HLA-DPA1*03:01-B1*105:01L HLA-DQA1*03:01-B1*03:02L
  REGION 1..10: note = CONT. FROM ABOVE: HLA-DRB1*14:54L HLA-DRB1*14:17L HLA-DRB1*16:01 L HLA-DQA1*01:03-B1*06:01L HLA-DQA1*02:01-B1*03:03L HLA-DRB1*15: 03L
  source 1..10: note = Severe acute respiratory syndrome coronavirus 2
VMSLKEGQIN

SEQ ID NO: 9917 - protein, 10 aa, Severe acute respiratory syndrome-related coronavirus
  REGION 1..10: note = Table B: HLA-DQA1*03:02-B1*03:03L HLA-DQA1*05:01-B1*03:01L HLA-DRB1*04:03L HLA-DRB1*13:03L HLA-DRB1*01:03L HLA-DRB1*04:02L HLA-DQA1*01:02-B1*06:02L HLA-DPA1*03:01-B1*04:02L HLA-DRB1*14:01L HLA-DRB1*14:02L HLA-DQA1*01-B1*05L
  REGION 1..10: note = CONT. FROM ABOVE: HLA-DQA1*05:05-B1*03:19L HLA-DQA1*05:01-B1*02: 01L HLA-DQA1*05:05-B1*03:116L HLA-DPA1*01:03-B1*04:02L HLA-DRB1* 12:01L HLA-DPA1*03:01-B1*105:01L HLA-DQA1*03:01-B1*03:02L HLA-DP A1*01:02-B1*04:01L HLA-DRB1*16:01L HLA-DQA1*01:03-B1*06:01L
  REGION 1..10: note = CONT. FROM ABOVE: HLA-DQA1*02:01-B1*03:03L HLA-DRB1*15:03L
  source 1..10: note = Severe acute respiratory syndrome coronavirus 2
SLKEGQINDM

SEQ ID NO: 9918 - protein, 10 aa, Severe acute respiratory syndrome-related coronavirus
  REGION 1..10: note = Table B: HLA-DQA1*03:02-B1*03:03M HLA-DQA1*01-B1*05L HLA-DQA1*05:05-B1*03:19L HLA-DRB1*09:01L HLA-DQA1*03:01-B1*03:02L HLA-DPA1*01:03-B1*104:01L HLA-DQA1*02:01-B1*03:03L
  source 1..10: note = Severe acute respiratory syndrome coronavirus 2
KEGQINDMIL

SEQ ID NO: 9919 - protein, 10 aa, Severe acute respiratory syndrome-related coronavirus
  REGION 1..10: note = Table B: HLA-DQA1*03:02-B1*03:03M HLA-DQA1*05:01-B1*03:01L HLA-DRB1*13:03L HLA-DRB1*01:03L HLA-DQA1*01:02-B1*06:02L HLA-DRB1*01:02L HLA-DPA1*03:01-B1*04:02L HLA-DRB1*14:01L HLA-DRB1*14:02M HLA-DRB1*08:01L HLA-DQA1*05:05-B1*03:19L
  REGION 1..10: note = CONT. FROM ABOVE: HLA-DQA1*05:01-B1*02:01L HLA-DRB4*01:01L HLA-D PA1*01:03-B1*04:01L HLA-DQA1*05:05-B1*03:116M HLA-DRB1*09:01M HL A-DPA1*01:03-B1*04:02L HLA-DPA1*02:01-B1*13:01L HLA-DPA1*03:01-B 1*105:01L HLA-DQA1*03:01-B1*03:02M HLA-DPA1*01:03-B1*104:01L
  REGION 1..10: note = CONT. FROM ABOVE: HLA-DPA1*01:02-B1*04:01L HLA-DRB1*10:01L HLA-D RB1*16:01L HLA-DQA1*01:03-B1*06:01L HLA-DRB1*08:03L HLA-DQA1*02: 01-B1*03:03M HLA-DRB1*15:03M
  source 1..10: note = Severe acute respiratory syndrome coronavirus 2
GQINDMILSL

SEQ ID NO: 9920 - protein, 11 aa, Severe acute respiratory syndrome-related coronavirus
  REGION 1..11: note = Table B: HLA-DQA1*03:02-B1*03:03L HLA-DQA1*03:01-B1*03:02L
  source 1..11: note = Severe acute respiratory syndrome coronavirus 2
NNRVVISSDVL

SEQ ID NO: 9921 - protein, 11 aa, Severe acute respiratory syndrome-related coronavirus
  REGION 1..11: note = Table B: HLA-DQA1*03:02-B1*03:03L HLA-DQA1*05:01-B1*03:01L HLA-DRB1*14:04L HLA-DRB1*04:01L HLA-DRB1*13:02L HLA-DRB1*13:03L HLA-DRB1*01:03L HLA-DRB1*04:02M HLA-DRB1*04:04L HLA-DRB1*04:05L HLA-DQA1*01:02-B1*06:02L HLA-DRB1*01:01L HLA-DRB1*01:02L
  REGION 1..11: note = CONT. FROM ABOVE: HLA-DRB4*03:01NL HLA-DRB1*08:04L HLA-DRB1*08:7 7L HLA-DRB3*02:01L HLA-DPA1*01:03-B1*03:01L HLA-DPA1*03:01-B1*04 :02L HLA-DRB1*14:01L HLA-DRB1*11:03L HLA-DRB1*11:04L HLA-DRB1*14 :02L HLA-DQA1*01:01-B1*05:01L HLA-DRB1*11:01L HLA-DRB5*01:01L
  REGION 1..11: note = CONT. FROM ABOVE: HLA-DQA1*01-B1*05L HLA-DQA1*05:05-B1*03:19L HL A-DQA1*05:01-B1*02:01L HLA-DRB4*01:01L HLA-DPA1*01:03-B1*04:01L HLA-DRB1*04:10L HLA-DRB1*09:01L HLA-DPA1*01:03-B1*04:02L HLA-DRB 1*12:01L HLA-DRB1*12:02L HLA-DPA1*02:01-B1*13:01L
  REGION 1..11: note = CONT. FROM ABOVE: HLA-DPA1*03:01-B1*105:01L HLA-DQA1*03:01-B1*03 :02L HLA-DRB1*14:54L HLA-DPA1*01:03-B1*104:01L HLA-DQA1*05:05-B1 *03:01L HLA-DPA1*01:02-B1*04:01L HLA-DRB1*07:01L HLA-DRB1*10:01L HLA-DRB1*16:01L HLA-DQA1*01:03-B1*06:01L HLA-DRB1*04:08L
  REGION 1..11: note = CONT. FROM ABOVE: HLA-DRB1*08:03L HLA-DQA1*02:01-B1*03:03L HLA -DRB1*15:01L HLA-DRB1*15:03L
  source 1..11: note = Severe acute respiratory syndrome coronavirus 2
VVISSDVLVNN

SEQ ID NO: 9922 - protein, 14 aa, Severe acute respiratory syndrome-related coronavirus
  REGION 1..14: note = Table B: HLA-DQA1*03:02-B1*03:03L HLA-DQA1*05:01-B1*03:01L HLA-DRB1*04:03L HLA-DRB1*13:02L HLA-DRB1*01:03L HLA-DRB1*04:02L HLA-DRB1*04:04L HLA-DRB1*04:05L HLA-DRB1*01:02L HLA-DRB1*08:04L HLA-DPA1*01:03-B1*03:01L HLA-DRB1*14:01L HLA-DRB1*11:04L
  REGION 1..14: note = CONT. FROM ABOVE: HLA-DRB1*08:01L HLA-DRB1*11:01L HLA-DQA1*05:05 -B1*03:19L HLA-DPA1*01:03-B1*04:02L HLA-DRB1*12:01L HLA-DPA1*02: 01-B1*13:01L HLA-DQA1*03:01-B1*03:02L HLA-DPA1*01:03-B1*104:01L HLA-DQA1*05:05-B1*03:01L HLA-DRB1*14:17L HLA-DRB1*16:01L
  REGION 1..14: note = CONT. FROM ABOVE: HLA-DRB1*04:08L HLA-DRB1*15:03L
  source 1..14: note = Severe acute respiratory syndrome coronavirus 2
LPLVSSQCVNLTTR

SEQ ID NO: 9923 - protein, 10 aa, Severe acute respiratory syndrome-related coronavirus
  REGION 1..10: note = Table B: HLA-DQA1*03:02-B1*03:03L HLA-DQA1*05:01-B1*03:01L HLA-DRB1*04:01L HLA-DRB1*04:03L HLA-DRB1*13:02L HLA-DRB1*13:03L HLA-DRB1*01:03M HLA-DRB1*04:02L HLA-DQA1*01:02-B1*06:02M HLA-DRB4*03:01NL HLA-DRB1*08:77L HLA-DPA1*01:03-B1*03:01L
  REGION 1..10: note = CONT. FROM ABOVE: HLA-DPA1*03:01-B1*04:02L HLA-DRB1*03:01L HLA-D RB1*14:01L HLA-DRB1*14:02M HLA-DRB1*11:01L HLA-DQA1*01-B1*05L HL A-DQA1*05:05-B1*03:19L HLA-DQA1*05:01-B1*02:01L HLA-DRB4*01:01L HLA-DPA1*01:03-B1*04:01L HLA-DQA1*05:05-B1*03:116L
  REGION 1..10: note = CONT. FROM ABOVE: HLA-DPA1*01:03-B1*04:02L HLA-DRB1*12:01L HLA-D PA1*02:01-B1*13:01L HLA-DPA1*03:01-B1*105:01L HLA-DQA1*03:01-B1* 03:02L HLA-DPA1*01:03-B1*104:01L HLA-DQA1*05:05-B1*03:01L HLA-DP A1*01:02-B1*04:01L HLA-DRB1*10:01L HLA-DRB1*16:01L
  REGION 1..10: note = CONT. FROM ABOVE: HLA-DQA1*01:03-B1*06:01L HLA-DRB1*08:02L HLA-D QA1*02:01-B1*03:03M HLA-DRB1*15:03L
  source 1..10: note = Severe acute respiratory syndrome coronavirus 2
TTRTQLPPAY

SEQ ID NO: 9924 - protein, 11 aa, Severe acute respiratory syndrome-related coronavirus
  REGION 1..11: note = Table B: HLA-DQA1*03:02-B1*03:03L HLA-DQA1*05:01-B1*03:01L HLA-DRB1*04:03L HLA-DRB1*13:03L HLA-DRB1*01:03L HLA-DRB1*04:05L HLA-DRB1*08:77L HLA-DPA1*03:01-B1*04:02L HLA-DRB1*14:02L HLA-DQA1*05:05-B1*03:19L HLA-DQA1*05:01-B1*02:01L
  REGION 1..11: note = CONT. FROM ABOVE: HLA-DRB4*01:01L HLA-DPA1*01:03-B1*04:01L HLA-D QA1*05:05-B1*03:116L HLA-DPA1*01:03-B1*04:02L HLA-DRB1*16:01L HL A-DRB1*08:02L HLA-DRB1*15:03L
  source 1..11: note = Severe acute respiratory syndrome coronavirus 2
TQLPPAYTNSF

SEQ ID NO: 9925 - protein, 12 aa, Severe acute respiratory syndrome-related coronavirus
  REGION 1..12: note = Table B: HLA-DQA1*03:02-B1*03:03L HLA-DQA1*05:01-B1*03:01L HLA-DRB1*04:03L HLA-DRB1*04:02L HLA-DQA1*01:01-B1*05:01L HLA-DQA1*01-B1*05L HLA-DRB1*14:17L HLA-DRB1*16:01L HLA-DQA1*01:03-B1*06:01L HLA-DQA1*02:01-B1*03:03L
  source 1..12: note = Severe acute respiratory syndrome coronavirus 2
LPPAYTNSFTRG

SEQ ID NO: 9926 - protein, 10 aa, Severe acute respiratory syndrome-related coronavirus
  REGION 1..10: note = Table B: HLA-DQA1*03:02-B1*03:03L HLA-DQA1*05:01-B1*03:01L HLA-DRB1*13:03L HLA-DRB1*01:03L HLA-DQA1*01:02-B1*06:02L HLA-DRB1*08:77L HLA-DPA1*01:03-B1*03:01L HLA-DPA1*03:01-B1*04:02L HLA-DRB1*03:01L HLA-DRB1*11:02L
  REGION 1..10: note = CONT. FROM ABOVE: HLA-DRB1*14:02L HLA-DQA1*01-B1*05L HLA-DQA1*05 :05-B1*03:19M HLA-DQA1*05:01-B1*02:01L HLA-DRB4*01:01L HLA-DPA1* 01:03-B1*04:01L HLA-DQA1*05:05-B1*03:116L HLA-DPA1*01:03-B1*04:0 2L HLA-DRB1*12:01L HLA-DPA1*02:01-B1*13:01L
  REGION 1..10: note = CONT. FROM ABOVE: HLA-DPA1*03:01-B1*105:01L HLA-DPA1*01:03-B1*10 4:01L HLA-DPA1*01:02-B1*04:01L HLA-DRB1*10:01L HLA-DRB1*16:01L H LA-DQA1*01:03-B1*06:01L HLA-DRB1*08:02L HLA-DQA1*02:01-B1*03:03L HLA-DRB1*15:03L
  source 1..10: note = Severe acute respiratory syndrome coronavirus 2
YTNSFTRGVY

SEQ ID NO: 9927 - protein, 12 aa, Severe acute respiratory syndrome-related coronavirus
  REGION 1..12: note = Table B: HLA-DQA1*03:02-B1*03:03L HLA-DRB1*14:01L HLA-DQA1*05:05-B1*03:01L
  source 1..12: note = Severe acute respiratory syndrome coronavirus 2
NSFTRGVYYPDK

SEQ ID NO: 9928 - protein, 12 aa, Severe acute respiratory syndrome-related coronavirus
  REGION 1..12: note = Table B: HLA-DQA1*03:02-B1*03:03L HLA-DQA1*05:01-B1*03:01L HLA-DRB1*04:01L HLA-DRB1*04:04L HLA-DQA1*01:02-B1*06:02L HLA-DRB1*08:04L HLA-DRB1*08:77L HLA-DPA1*01:03-B1*03:01L HLA-DPA1*03:01-B1*04:02L HLA-DRB1*03:01L HLA-DRB1*11:03L
  REGION 1..12: note = CONT. FROM ABOVE: HLA-DRB1*14:02L HLA-DRB1*11:01L HLA-DQA1*05:05 -B1*03:19L HLA-DQA1*05:01-B1*02:01L HLA-DRB4*01:01L HLA-DRB1*04: 10L HLA-DRB3*01:01L HLA-DPA1*02:01-B1*13:01L HLA-DPA1*03:01-B1*1 05:01L HLA-DRB1*07:01L HLA-DRB1*10:01L HLA-DRB1*08:03L
  source 1..12: note = Severe acute respiratory syndrome coronavirus 2
GVYYPDKVFRSS

SEQ ID NO: 9929 - protein, 15 aa, Severe acute respiratory syndrome-related coronavirus
  REGION 1..15: note = Table B: HLA-DQA1*03:02-B1*03:03L HLA-DRB1*04:01L HLA-DRB1*04:04L HLA-DRB1*01:01L HLA-DRB4*03:01NL HLA-DRB1*08:04L HLA-DRB1*08:77L HLA-DRB3*02:01L HLA-DRB1*03:01L HLA-DRB1*11:03L HLA-DRB1*11:04L HLA-DRB1*14:02L HLA-DQA1*01:01-B1*05:01L
  REGION 1..15: note = CONT. FROM ABOVE: HLA-DQA1*05:05-B1*03:19L HLA-DQA1*05:01-B1*02: 01L HLA-DPA1*01:03-B1*04:01L HLA-DRB1*04:10L HLA-DRB1*09:01L HLA -DRB3*01:01L HLA-DRB1*14:54L HLA-DPA1*01:03-B1*104:01L HLA-DRB1* 14:17L HLA-DRB1*07:01L HLA-DRB1*10:01L HLA-DRB1*08:02L
  REGION 1..15: note = CONT. FROM ABOVE: HLA-DRB1*08:03L
  source 1..15: note = Severe acute respiratory syndrome coronavirus 2
YPDKVFRSSVLHSTQ

SEQ ID NO: 9930 - protein, 12 aa, Severe acute respiratory syndrome-related coronavirus
  REGION 1..12: note = Table B: HLA-DQA1*03:02-B1*03:03L HLA-DRB1*04:03L HLA-DRB1*04:02L HLA-DRB1*04:05L HLA-DRB1*01:02L HLA-DPA1*01:03-B1*03:01L HLA-DPA1*03:01-B1*04:02L HLA-DRB1*08:01L HLA-DRB1*11:01L HLA-DPA1*01:03-B1*04:01L
  REGION 1..12: note = CONT. FROM ABOVE: HLA-DPA1*01:03-B1*04:02L HLA-DRB1*12:01L HLA-D PA1*01:03-B1*02:01L HLA-DRB1*16:01L HLA-DRB1*15:03L
  source 1..12: note = Severe acute respiratory syndrome coronavirus 2
VFRSSVLHSTQD

SEQ ID NO: 9931 - protein, 10 aa, Severe acute respiratory syndrome-related coronavirus
  REGION 1..10: note = Table B: HLA-DQA1*03:02-B1*03:03L HLA-DQA1*03:01-B1*03:02L HLA-DQA1*01:03-B1*06:01L HLA-DQA1*02:01-B1*03:03L
  source 1..10: note = Severe acute respiratory syndrome coronavirus 2
SSVLHSTQDL

SEQ ID NO: 9932 - protein, 10 aa, Severe acute respiratory syndrome-related coronavirus
  REGION 1..10: note = Table B: HLA-DQA1*03:02-B1*03:03L HLA-DQA1*05:01-B1*03:01L HLA-DRB1*13:03L HLA-DRB1*01:03L HLA-DQA1*01:02-B1*06:02L HLA-DRB1*08:77L HLA-DPA1*01:03-B1*03:01L HLA-DPA1*03:01-B1*04:02L HLA-DRB1*14:01L HLA-DRB1*14:02L
  REGION 1..10: note = CONT. FROM ABOVE: HLA-DQA1*01-B1*05L HLA-DQA1*05:05-B1*03:19L HL A-DQA1*05:01-B1*02:01L HLA-DPA1*01:03-B1*04:01L HLA-DQA1*05:05-B 1*03:116L HLA-DPA1*01:03-B1*04:02L HLA-DRB1*12:01L HLA-DPA1*02:0 1-B1*13:01L HLA-DPA1*03:01-B1*105:01L HLA-DQA1*03:01-B1*03:02L
  REGION 1..10: note = CONT. FROM ABOVE: HLA-DPA1*01:02-B1*04:01L HLA-DRB1*16:01L HLA-D QA1*01:03-B1*06:01L HLA-DQA1*02:01-B1*03:03L HLA-DRB1*15:03L
  source 1..10: note = Severe acute respiratory syndrome coronavirus 2
SVLHSTQDLF

SEQ ID NO: 9933 - protein, 10 aa, Severe acute respiratory syndrome-related coronavirus
  REGION 1..10: note = Table B: HLA-DQA1*03:02-B1*03:03L HLA-DQA1*01:02-B1*06:02L HLA-DRB1*14:02L HLA-DQA1*05:05-B1*03:19L HLA-DQA1*05:01-B1*02:01L HLA-DPA1*01:03-B1*04:01L HLA-DPA1*02:01-B1*13:01L HLA-DPA1*03:01-B1*105:01L
  REGION 1..10: note = CONT. FROM ABOVE: HLA-DQA1*01:03-B1*06:01L HLA-DQA1*02:01-B1*03: 03L HLA-DRB1*15:03L
  source 1..10: note = Severe acute respiratory syndrome coronavirus 2
STQDLFLPFF

SEQ ID NO: 9934 - protein, 10 aa, Severe acute respiratory syndrome-related coronavirus
  REGION 1..10: note = Table B: HLA-DQA1*03:02-B1*03:03L HLA-DQA1*05:01-B1*03:01L HLA-DQA1*01:02-B1*06:02L HLA-DRB1*01:02L HLA-DPA1*03:01-B1*04:02L HLA-DRB1*14:02L HLA-DQA1*05:05-B1*03:19L HLA-DQA1*05:01-B1*02:01L
  REGION 1..10: note = CONT. FROM ABOVE: HLA-DQA1*05:05-B1*03:116L HLA-DPA1*02:01-B1*13 :01L HLA-DPA1*03:01-B1*105:01L HLA-DQA1*03:01-B1*03:02L HLA-DPA1 *01:03-B1*104:01L HLA-DPA1*01:02-B1*04:01L HLA-DQA1*01:03-B1*06: 01L HLA-DQA1*02:01-B1*03:03L HLA-DRB1*15:03L
  source 1..10: note = Severe acute respiratory syndrome coronavirus 2
DLFLPFFSNV

SEQ ID NO: 9935 - protein, 14 aa, Severe acute respiratory syndrome-related coronavirus
  REGION 1..14: note = Table B: HLA-DQA1*03:02-B1*03:03L HLA-DQA1*05:01-B1*03:01L HLA-DRB1*13:02L HLA-DRB1*04:02L HLA-DRB1*04:04L HLA-DRB1*01:01L HLA-DRB1*01:02M HLA-DRB1*08:04L HLA-DRB3*02:01L HLA-DPA1*01:03-B1*03:01L HLA-DRB1*11:02L HLA-DRB1*11:03L
  REGION 1..14: note = CONT. FROM ABOVE: HLA-DRB1*11:04L HLA-DRB1*14:02L HLA-DRB1*08:01 L HLA-DRB1*11:01L HLA-DQA1*05:05-B1*03:19L HLA-DQA1*05:01-B1*02: 01L HLA-DRB3*01:01L HLA-DQA1*03:01-B1*03:02L HLA-DPA1*01:03-B1*1 04:01L HLA-DQA1*05:05-B1*03:01L HLA-DRB1*07:01L HLA-DRB1*10:01L
  REGION 1..14: note = CONT. FROM ABOVE: HLA-DRB1*08:02L HLA-DRB1*08:03L
  source 1..14: note = Severe acute respiratory syndrome coronavirus 2
LPFFSNVTWFHAIH

SEQ ID NO: 9936 - protein, 14 aa, Severe acute respiratory syndrome-related coronavirus
  REGION 1..14: note = Table B: HLA-DQA1*03:02-B1*03:03L HLA-DRB1*11:02L HLA-DRB1*11:04L HLA-DRB1*14:02L HLA-DRB1*11:01L HLA-DQA1*05:05-B1*03:19L HLA-DPA1*01:03-B1*04:01L HLA-DRB1*09:01L HLA-DRB1*08:03L
  source 1..14: note = Severe acute respiratory syndrome coronavirus 2
FSNVTWFHAIHVSG

SEQ ID NO: 9937 - protein, 13 aa, Severe acute respiratory syndrome-related coronavirus
  REGION 1..13: note = Table B: HLA-DQA1*03:02-B1*03:03L HLA-DRB1*13:02L HLA-DRB1*13:03L HLA-DRB1*08:04L HLA-DRB3*02:01L HLA-DPA1*01:03-B1*03:01L HLA-DRB1*14:02L HLA-DRB1*08:01L HLA-DRB1*11:01L HLA-DQA1*05:01-B1*02:01L
  REGION 1..13: note = CONT. FROM ABOVE: HLA-DPA1*01:03-B1*04:02L HLA-DPA1*02:01-B1*13: 01L HLA-DPA1*01:03-B1*02:01L HLA-DPA1*01:03-B1*104:01L HLA-DRB1* 10:01L HLA-DRB1*08:02L HLA-DRB1*08:03L
  source 1..13: note = Severe acute respiratory syndrome coronavirus 2
VTWFHAIHVSGTN

SEQ ID NO: 9938 - protein, 10 aa, Severe acute respiratory syndrome-related coronavirus
  REGION 1..10: note = Table B: HLA-DQA1*03:02-B1*03:03L HLA-DQA1*05:01-B1*03:01L HLA-DRB1*04:03L HLA-DQA1*01:01-B1*05:01L HLA-DQA1*01-B1*05L HLA-DQA1*05:05-B1*03:19L HLA-DQA1*05:01-B1*02:01L HLA-DQA1*03:01-B1*03:02L HLA-DQA1*05:05-B1*03:01L
  REGION 1..10: note = CONT. FROM ABOVE: HLA-DQA1*01:03-B1*06:01L HLA-DQA1*02:01-B1*03: 03L
  source 1..10: note = Severe acute respiratory syndrome coronavirus 2
DNPVLPFNDG

SEQ ID NO: 9939 - protein, 10 aa, Severe acute respiratory syndrome-related coronavirus
  REGION 1..10: note = Table B: HLA-DQA1*03:02-B1*03:03L HLA-DQA1*05:01-B1*03:01L HLA-DRB1*04:03L HLA-DRB1*13:03L HLA-DQA1*01:02-B1*06:02L HLA-DRB1*08:77L HLA-DPA1*01:03-B1*03:01L HLA-DPA1*03:01-B1*04:02L HLA-DRB1*03:01L HLA-DRB1*11:02L
  REGION 1..10: note = CONT. FROM ABOVE: HLA-DRB1*14:02L HLA-DQA1*01-B1*05L HLA-DQA1*05 :05-B1*03:19L HLA-DQA1*05:01-B1*02:01L HLA-DRB4*01:01L HLA-DPA1* 01:03-B1*04:01L HLA-DPA1*01:03-B1*04:02L HLA-DRB1*12:01L HLA-DPA 1*02:01-B1*13:01L HLA-DPA1*03:01-B1*105:01L
  REGION 1..10: note = CONT. FROM ABOVE: HLA-DQA1*03:01-B1*03:02L HLA-DPA1*01:03-B1*104 :01L HLA-DRB1*16:01L HLA-DQA1*01:03-B1*06:01L HLA-DQA1*02:01-B1* 03:03L HLA-DRB1*15:03L
  source 1..10: note = Severe acute respiratory syndrome coronavirus 2
PVLPFNDGVY

SEQ ID NO: 9940 - protein, 14 aa, Severe acute respiratory syndrome-related coronavirus
  REGION 1..14: note = Table B: HLA-DQA1*03:02-B1*03:03L HLA-DQA1*05:01-B1*03:01L HLA-DRB1*01:03L HLA-DRB1*01:02L HLA-DPA1*01:03-B1*03:01L HLA-DPA1*03:01-B1*04:02L HLA-DRB1*08:01L HLA-DQA1*05:05-B1*03:19L HLA-DQA1*05:01-B1*02:01L
  REGION 1..14: note = CONT. FROM ABOVE: HLA-DPA1*01:03-B1*04:02L HLA-DQA1*05:05-B1*03: 01L HLA-DPA1*01:02-B1*04:01L HLA-DRB1*16:01L HLA-DRB1*04:08L
  source 1..14: note = Severe acute respiratory syndrome coronavirus 2
LPFNDGVYFASTEK

SEQ ID NO: 9941 - protein, 12 aa, Severe acute respiratory syndrome-related coronavirus
  REGION 1..12: note = Table B: HLA-DQA1*03:02-B1*03:03L HLA-DQA1*05:01-B1*03:01L HLA-DRB1*04:03L HLA-DRB1*04:02L HLA-DQA1*01:02-B1*06:02L HLA-DQA1*05:05-B1*03:19L HLA-DQA1*05:01-B1*02:01L HLA-DQA1*05:05-B1*03:01L
  source 1..12: note = Severe acute respiratory syndrome coronavirus 2
NDGVYFASTEKS

SEQ ID NO: 9942 - protein, 10 aa, Severe acute respiratory syndrome-related coronavirus
  REGION 1..10: note = Table B: HLA-DQA1*03:02-B1*03:03L HLA-DQA1*05:01-B1*03:01L HLA-DRB1*04:03L HLA-DRB1*13:03L HLA-DRB1*01:03L HLA-DRB1*04:02L HLA-DRB1*04:05L HLA-DQA1*01:02-B1*06:02L HLA-DRB1*01:02L HLA-DRB4*03:01NL HLA-DRB3*02:01L HLA-DPA1*01:03-B1*03:01L
  REGION 1..10: note = CONT. FROM ABOVE: HLA-DPA1*03:01-B1*04:02L HLA-DRB1*14:01L HLA-D RB1*08:01L HLA-DQA1*01-B1*05L HLA-DQA1*05:05-B1*03:19L HLA-DQA1* 05:01-B1*02:01L HLA-DRB1*04:10L HLA-DPA1*01:03-B1*04:02L HLA-DRB 1*12:01L HLA-DPA1*03:01-B1*105:01L HLA-DQA1*03:01-B1*03:02L
  REGION 1..10: note = CONT. FROM ABOVE: HLA-DRB1*14:54L HLA-DQA1*05:05-B1*03:01L HLA-D RB1*14:17L HLA-DPA1*01:02-B1*04:01L HLA-DRB1*10:01L HLA-DRB1*16: 01L HLA-DQA1*01:03-B1*06:01L HLA-DRB1*04:08L HLA-DQA1*02:01-B1*0 3:03L HLA-DRB1*15:03L
  source 1..10: note = Severe acute respiratory syndrome coronavirus 2
VYFASTEKSN

SEQ ID NO: 9943 - protein, 10 aa, Severe acute respiratory syndrome-related coronavirus
  REGION 1..10: note = Table B: HLA-DQA1*03:02-B1*03:03L HLA-DQA1*05:05-B1*03:19L HLA-DQA1*03:01-B1*03:02L
  source 1..10: note = Severe acute respiratory syndrome coronavirus 2
FASTEKSNII

SEQ ID NO: 9944 - protein, 10 aa, Severe acute respiratory syndrome-related coronavirus
  REGION 1..10: note = Table B: HLA-DQA1*03:02-B1*03:03L HLA-DQA1*05:01-B1*03:01H HLA-DRB1*13:03L HLA-DRB1*01:03L HLA-DRB1*04:02L HLA-DRB1*04:05L HLA-DQA1*01:02-B1*06:02L HLA-DRB4*03:01NM HLA-DRB1*08:77H HLA-DPA1*01:03-B1*03:01L HLA-DPA1*03:01-B1*04:02M
  REGION 1..10: note = CONT. FROM ABOVE: HLA-DRB1*03:01M HLA-DRB1*14:01L HLA-DRB1*11:02 L HLA-DRB1*14:02L HLA-DQA1*01-B1*05M HLA-DQA1*05:05-B1*03:19M HL A-DQA1*05:01-B1*02:01L HLA-DRB4*01:01H HLA-DPA1*01:03-B1*04:01H HLA-DQA1*05:05-B1*03:116L HLA-DPA1*01:03-B1*04:02L
  REGION 1..10: note = CONT. FROM ABOVE: HLA-DRB1*12:01L HLA-DPA1*02:01-B1*13:01L HLA-D QA1*03:01-B1*03:02L HLA-DPA1*01:03-B1*104:01L HLA-DPA1*01:02-B1* 04:01M HLA-DRB1*10:01M HLA-DRB1*16:01L HLA-DQA1*01:03-B1*06:01L HLA-DQA1*02:01-B1*03:03L HLA-DRB1*15:03M
  source 1..10: note = Severe acute respiratory syndrome coronavirus 2
TEKSNIIRGW

SEQ ID NO: 9945 - protein, 12 aa, Severe acute respiratory syndrome-related coronavirus
  REGION 1..12: note = Table B: HLA-DQA1*03:02-B1*03:03L HLA-DQA1*05:01-B1*03:01L HLA-DRB1*04:03L HLA-DRB1*04:02L HLA-DRB1*01:02L HLA-DPA1*01:03-B1*03:01L HLA-DRB1*14:01L HLA-DQA1*01-B1*05L HLA-DQA1*05:05-B1*03:19L HLA-DQA1*05:01-B1*02:01L
  REGION 1..12: note = CONT. FROM ABOVE: HLA-DPA1*01:03-B1*04:01L HLA-DPA1*01:03-B1*04: 02L HLA-DRB1*12:01L HLA-DQA1*03:01-B1*03:02L HLA-DQA1*05:05-B1*0 3:01L HLA-DRB1*14:17L HLA-DRB1*16:01L HLA-DRB1*04:08L HLA-DRB1*1 5:03L
  source 1..12: note = Severe acute respiratory syndrome coronavirus 2
SNIIRGWIFGTT

SEQ ID NO: 9946 - protein, 11 aa, Severe acute respiratory syndrome-related coronavirus
  REGION 1..11: note = Table B: HLA-DQA1*03:02-B1*03:03L HLA-DQA1*01:02-B1*06:02L HLA-DPA1*03:01-B1*04:02L HLA-DQA1*01-B1*05L HLA-DPA1*03:01-B1*105:01L HLA-DQA1*02:01-B1*03:03L
  source 1..11: note = Severe acute respiratory syndrome coronavirus 2
IIRGWIFGTTL

SEQ ID NO: 9947 - protein, 13 aa, Severe acute respiratory syndrome-related coronavirus
  REGION 1..13: note = Table B: HLA-DQA1*03:02-B1*03:03L HLA-DRB1*01:03L HLA-DRB1*04:05L HLA-DRB1*01:02L HLA-DRB1*08:01L HLA-DQA1*01-B1*05L HLA-DRB1*04:10L HLA-DRB1*04:08L
  source 1..13: note = Severe acute respiratory syndrome coronavirus 2
IRGWIFGTTLDSK

SEQ ID NO: 9948 - protein, 11 aa, Severe acute respiratory syndrome-related coronavirus
  REGION 1..11: note = Table B: HLA-DQA1*03:02-B1*03:03L HLA-DRB1*01:03L HLA-DRB1*04:05L HLA-DQA1*05:05-B1*03:19L HLA-DQA1*05:01-B1*02:01L HLA-DRB1*04:10L HLA-DRB1*04:08L
  source 1..11: note = Severe acute respiratory syndrome coronavirus 2
WIFGTTLDSKT

SEQ ID NO: 9949 - protein, 10 aa, Severe acute respiratory syndrome-related coronavirus
  REGION 1..10: note = Table B: HLA-DQA1*03:02-B1*03:03L HLA-DQA1*05:01-B1*03:01L HLA-DRB1*04:03L HLA-DRB1*13:03L HLA-DRB1*01:03L HLA-DRB1*04:02L HLA-DRB1*04:05L HLA-DRB4*03:01NL HLA-DQA1*01-B1*05L HLA-DQA1*05:05-B1*03:19L HLA-DQA1*05:01-B1*02:01L
  REGION 1..10: note = CONT. FROM ABOVE: HLA-DRB1*04:10L HLA-DRB1*12:01L HLA-DQA1*03:01 -B1*03:02L HLA-DRB1*14:54L HLA-DQA1*05:05-B1*03:01L HLA-DRB1*14: 17L HLA-DRB1*16:01L HLA-DQA1*01:03-B1*06:01L HLA-DRB1*04:08L HLA -DQA1*02:01-B1*03:03L
  source 1..10: note = Severe acute respiratory syndrome coronavirus 2
FGTTLDSKTQ

SEQ ID NO: 9950 - protein, 10 aa, Severe acute respiratory syndrome-related coronavirus
  REGION 1..10: note = Table B: HLA-DQA1*03:02-B1*03:03H HLA-DQA1*05:01-B1*03:01M HLA-DRB1*04:01L HLA-DRB1*04:03L HLA-DRB1*13:02L HLA-DRB1*13:03M HLA-DRB1*01:03L HLA-DRB1*04:02L HLA-DRB1*04:04L HLA-DRB1*04:05L HLA-DQA1*01:02-B1*06:02M HLA-DRB1*01:01L HLA-DRB1*01:02M
  REGION 1..10: note = CONT. FROM ABOVE: HLA-DRB4*03:01NL HLA-DRB1*08:77L HLA-DRB3*02:0 1L HLA-DPA1*01:03-B1*03:01L HLA-DPA1*03:01-B1*04:02M HLA-DRB1*03 :01L HLA-DRB1*14:01M HLA-DRB1*11:03L HLA-DRB1*11:04L HLA-DRB1*14 :02M HLA-DQA1*01:01-B1*05:01L HLA-DRB1*08:01M HLA-DRB1*11:01L
  REGION 1..10: note = CONT. FROM ABOVE: HLA-DRB5*01:01L HLA-DQA1*01-B1*05L HLA-DQA1*05 :05-B1*03:19L HLA-DQA1*05:01-B1*02:01M HLA-DRB1*13:01L HLA-DRB4* 01:01L HLA-DPA1*01:03-B1*04:01M HLA-DQA1*05:05-B1*03:116M HLA-DR B1*09:01M HLA-DPA1*01:03-B1*04:02M HLA-DRB1*12:01L
  REGION 1..10: note = CONT. FROM ABOVE: HLA-DRB3*01:01L HLA-DPA1*02:01-B1*13:01L HLA-D PA1*03:01-B1*105:01M HLA-DQA1*03:01-B1*03:02M HLA-DPA1*01:03-B1* 104:01L HLA-DQA1*05:05-B1*03:01L HLA-DPA1*01:02-B1*04:01M HLA-DR B1*07:01L HLA-DRB1*10:01L HLA-DRB1*16:01L
  REGION 1..10: note = CONT. FROM ABOVE: HLA-DQA1*01:03-B1*06:01L HLA-DRB1*08:02L HLA -DRB1*08:03L HLA-DQA1*02:01-B1*03:03M HLA-DRB1*15:01L HLA-DRB1 *15:03M
  source 1..10: note = Severe acute respiratory syndrome coronavirus 2
TTLDSKTQSL

SEQ ID NO: 9951 - protein, 10 aa, Severe acute respiratory syndrome-related coronavirus
  REGION 1..10: note = Table B: HLA-DQA1*03:02-B1*03:03L HLA-DQA1*05:01-B1*03:01L HLA-DRB1*04:03L HLA-DRB1*13:03L HLA-DRB1*04:02L HLA-DPA1*01:03-B1*03:01L HLA-DPA1*03:01-B1*04:02L HLA-DRB1*14:01L HLA-DRB1*14:02L HLA-DQA1*01-B1*05L
  REGION 1..10: note = CONT. FROM ABOVE: HLA-DQA1*05:05-B1*03:19L HLA-DQA1*05:01-B1*02: 01L HLA-DPA1*03:01-B1*105:01L HLA-DQA1*03:01-B1*03:02L HLA-DPA1* 01:02-B1*04:01L HLA-DRB1*16:01L HLA-DQA1*02:01-B1*03:03L HLA-DRB 1*15:03L
  source 1..10: note = Severe acute respiratory syndrome coronavirus 2
TLDSKTQSLL

SEQ ID NO: 9952 - protein, 12 aa, Severe acute respiratory syndrome-related coronavirus
  REGION 1..12: note = Table B: HLA-DQA1*03:02-B1*03:03L HLA-DQA1*05:01-B1*03:01L HLA-DRB1*04:05L HLA-DQA1*01:02-B1*06:02L HLA-DPA1*01:03-B1*03:01L HLA-DQA1*01:01-B1*05:01L HLA-DQA1*05:05-B1*03:19L HLA-DQA1*05:01-B1*02:01L
  REGION 1..12: note = CONT. FROM ABOVE: HLA-DRB1*12:01L HLA-DPA1*02:01-B1*13:01L HLA-D PA1*03:01-B1*105:01L HLA-DQA1*05:05-B1*03:01L HLA-DRB1*16:01L
  source 1..12: note = Severe acute respiratory syndrome coronavirus 2
DSKTQSLLIVNN

SEQ ID NO: 9953 - protein, 12 aa, Severe acute respiratory syndrome-related coronavirus
  REGION 1..12: note = Table B: HLA-DQA1*03:02-B1*03:03L HLA-DQA1*05:01-B1*03:01L HLA-DRB1*13:03L HLA-DRB1*01:03L HLA-DRB1*04:02L HLA-DRB1*04:04L HLA-DRB1*04:05L HLA-DQA1*01:02-B1*06:02L HLA-DRB1*01:02L HLA-DRB4*03:01NL HLA-DPA1*01:03-B1*03:01L HLA-DRB1*11:04L
  REGION 1..12: note = CONT. FROM ABOVE: HLA-DQA1*01-B1*05L HLA-DQA1*05:05-B1*03:19L HL A-DQA1*05:01-B1*02:01L HLA-DRB1*04:10M HLA-DRB1*12:01L HLA-DRB1* 12:02L HLA-DPA1*03:01-B1*105:01L HLA-DRB1*14:54L HLA-DQA1*05:05- B1*03:01L HLA-DRB1*10:01L HLA-DRB1*16:01L
  REGION 1..12: note = CONT. FROM ABOVE: HLA-DQA1*01:03-B1*06:01L HLA-DRB1*04:08L HLA-D RB1*08:03L HLA-DQA1*02:01-B1*03:03L
  source 1..12: note = Severe acute respiratory syndrome coronavirus 2
TQSLLIVNNATN

SEQ ID NO: 9954 - protein, 10 aa, Severe acute respiratory syndrome-related coronavirus
  REGION 1..10: note = Table B: HLA-DQA1*03:02-B1*03:03L
  source 1..10: note = Severe acute respiratory syndrome coronavirus 2
LLIVNNATNV

SEQ ID NO: 9955 - protein, 10 aa, Severe acute respiratory syndrome-related coronavirus
  REGION 1..10: note = Table B: HLA-DQA1*03:02-B1*03:03L HLA-DQA1*05:01-B1*03:01L HLA-DRB1*04:03L HLA-DRB1*13:02L HLA-DRB1*13:03L HLA-DRB1*04:02L HLA-DRB1*01:02L HLA-DRB4*03:01NL HLA-DRB1*08:77L HLA-DRB3*02:01L HLA-DRB1*14:01L HLA-DQA1*05:05-B1*03:19L
  REGION 1..10: note = CONT. FROM ABOVE: HLA-DQA1*05:01-B1*02:01L HLA-DRB1*12:01L HLA-D PA1*03:01-B1*105:01L HLA-DQA1*03:01-B1*03:02L HLA-DRB1*14:17L HL A-DPA1*01:02-B1*04:01L HLA-DRB1*16:01L HLA-DQA1*02:01-B1*03:03L HLA-DRB1*15:03L
  source 1..10: note = Severe acute respiratory syndrome coronavirus 2
LIVNNATNVV

SEQ ID NO: 9956 - protein, 10 aa, Severe acute respiratory syndrome-related coronavirus
  REGION 1..10: note = Table B: HLA-DQA1*03:02-B1*03:03L HLA-DQA1*05:01-B1*03:01L HLA-DRB1*04:03L HLA-DRB1*13:03L HLA-DRB1*04:02L HLA-DRB1*01:02L HLA-DRB1*08:77L HLA-DPA1*03:01-B1*04:02L HLA-DRB1*14:01L HLA-DRB1*14:02L HLA-DQA1*05:05-B1*03:19L
  REGION 1..10: note = CONT. FROM ABOVE: HLA-DQA1*05:01-B1*02:01L HLA-DRB1*12:01L HLA-D PA1*02:01-B1*13:01L HLA-DPA1*03:01-B1*105:01L HLA-DQA1*03:01-B1* 03:02L HLA-DRB1*14:17L HLA-DPA1*01:02-B1*04:01L HLA-DRB1*16:01L HLA-DQA1*02:01-B1*03:03L HLA-DRB1*15:03L
  source 1..10: note = Severe acute respiratory syndrome coronavirus 2
IVNNATNVVI

SEQ ID NO: 9957 - protein, 10 aa, Severe acute respiratory syndrome-related coronavirus
  REGION 1..10: note = Table B: HLA-DQA1*03:02-B1*03:03L HLA-DQA1*05:01-B1*03:01L HLA-DRB1*04:01L HLA-DRB1*04:03L HLA-DRB1*13:02L HLA-DRB1*13:03L HLA-DRB1*01:03L HLA-DRB1*04:02L HLA-DRB1*04:04L HLA-DRB1*04:05L HLA-DQA1*01:02-B1*06:02L HLA-DRB1*01:01L HLA-DRB1*01:02L
  REGION 1..10: note = CONT. FROM ABOVE: HLA-DRB4*03:01NL HLA-DRB1*08:04L HLA-DRB1*08:7 7L HLA-DRB3*02:01L HLA-DRB1*14:01L HLA-DRB1*11:03L HLA-DRB1*11:0 4L HLA-DRB1*14:02L HLA-DRB1*08:01L HLA-DRB5*01:01L HLA-DQA1*05:0 5-B1*03:19L HLA-DQA1*05:01-B1*02:01L HLA-DRB1*04:10L
  REGION 1..10: note = CONT. FROM ABOVE: HLA-DRB1*12:01L HLA-DRB1*12:02L HLA-DPA1*03:01 -B1*105:01L HLA-DQA1*03:01-B1*03:02L HLA-DRB1*14:54L HLA-DQA1*05 :05-B1*03:01L HLA-DRB1*14:17L HLA-DRB1*07:01L HLA-DRB1*10:01L HL A-DRB1*16:01L HLA-DQA1*01:03-B1*06:01L HLA-DRB1*04:08L
  REGION 1..10: note = CONT. FROM ABOVE: HLA-DRB1*08:03L HLA-DQA1*02:01-B1*03:03L HLA-D RB1*15:03L
  source 1..10: note = Severe acute respiratory syndrome coronavirus 2
VNNATNVVIK

SEQ ID NO: 9958 - protein, 10 aa, Severe acute respiratory syndrome-related coronavirus
  REGION 1..10: note = Table B: HLA-DQA1*03:02-B1*03:03L HLA-DQA1*01:02-B1*06:02L HLA-DPA1*03:01-B1*105:01L HLA-DQA1*02:01-B1*03:03L
  source 1..10: note = Severe acute respiratory syndrome coronavirus 2
NNATNVVIKV

SEQ ID NO: 9959 - protein, 16 aa, Severe acute respiratory syndrome-related coronavirus
  REGION 1..16: note = Table B: HLA-DQA1*03:02-B1*03:03L HLA-DRB1*04:04L HLA-DRB1*04:05L HLA-DRB1*14:01L HLA-DRB1*11:02L HLA-DRB1*11:04L HLA-DRB1*14:02L HLA-DRB1*11:01L HLA-DRB3*01:01L HLA-DRB1*10:01L HLA-DRB1*08:02L HLA-DRB1*08:03L
  source 1..16: note = Severe acute respiratory syndrome coronavirus 2
NVVIKVCEFQFCNDPF

SEQ ID NO: 9960 - protein, 17 aa, Severe acute respiratory syndrome-related coronavirus
  REGION 1..17: note = Table B: HLA-DQA1*03:02-B1*03:03L HLA-DRB1*03:01L HLA-DRB1*13:01L
  source 1..17: note = Severe acute respiratory syndrome coronavirus 2
DPFLGVYYHKNNKSWME

SEQ ID NO: 9961 - protein, 10 aa, Severe acute respiratory syndrome-related coronavirus
  REGION 1..10: note = Table B: HLA-DQA1*03:02-B1*03:03L HLA-DQA1*05:01-B1*03:01L HLA-DRB1*01:03L HLA-DQA1*01:02-B1*06:02L HLA-DRB1*08:77L HLA-DPA1*01:03-B1*03:01L HLA-DPA1*03:01-B1*04:02L HLA-DRB1*03:01L HLA-DRB1*11:02L HLA-DRB1*14:02L
  REGION 1..10: note = CONT. FROM ABOVE: HLA-DQA1*01-B1*05L HLA-DQA1*05:05-B1*03:19M HL A-DQA1*05:01-B1*02:01L HLA-DRB4*01:01L HLA-DPA1*01:03-B1*04:01L HLA-DQA1*05:05-B1*03:116L HLA-DPA1*01:03-B1*04:02L HLA-DPA1*02:0 1-B1*13:01L HLA-DPA1*03:01-B1*105:01L HLA-DPA1*01:03-B1*104:01L
  REGION 1..10: note = CONT. FROM ABOVE: HLA-DPA1*01:02-B1*04:01L HLA-DRB1*10:01L HLA-D RB1*16:01L HLA-DQA1*01:03-B1*06:01L HLA-DQA1*02:01-B1*03:03L HLA -DRB1*15:03L
  source 1..10: note = Severe acute respiratory syndrome coronavirus 2
SWMESEFRVY

SEQ ID NO: 9962 - protein, 11 aa, Severe acute respiratory syndrome-related coronavirus
  REGION 1..11: note = Table B: HLA-DQA1*03:02-B1*03:03L HLA-DQA1*05:01-B1*03:01L HLA-DRB1*13:03L HLA-DRB1*01:03L HLA-DRB1*04:02L HLA-DRB1*04:05L HLA-DQA1*01:02-B1*06:02L HLA-DRB1*01:02L HLA-DRB4*03:01NL HLA-DPA1*01:03-B1*03:01L HLA-DPA1*03:01-B1*04:02L
  REGION 1..11: note = CONT. FROM ABOVE: HLA-DRB1*14:01L HLA-DQA1*01:01-B1*05:01L HLA-D QA1*05:01-B1*02:01L HLA-DRB1*04:10L HLA-DRB1*12:01L HLA-DPA1*03: 01-B1*105:01L HLA-DRB1*14:54L HLA-DQA1*05:05-B1*03:01L HLA-DRB1* 14:17L HLA-DPA1*01:02-B1*04:01L HLA-DRB1*16:01L
  REGION 1..11: note = CONT. FROM ABOVE: HLA-DQA1*01:03-B1*06:01L HLA-DRB1*04:08L HLA-D QA1*02:01-B1*03:03L HLA-DRB1*15:03L
  source 1..11: note = Severe acute respiratory syndrome coronavirus 2
SEFRVYSSANN

SEQ ID NO: 9963 - protein, 12 aa, Severe acute respiratory syndrome-related coronavirus
  REGION 1..12: note = Table B: HLA-DQA1*03:02-B1*03:03L HLA-DQA1*05:01-B1*03:01L HLA-DRB1*13:02L HLA-DRB1*01:02L HLA-DPA1*01:03-B1*03:01L HLA-DPA1*03:01-B1*04:02L HLA-DRB1*14:01L HLA-DQA1*05:01-B1*02:01L HLA-DRB1*12:01L
  REGION 1..12: note = CONT. FROM ABOVE: HLA-DQA1*03:01-B1*03:02L HLA-DPA1*01:03-B1*104 :01L HLA-DQA1*05:05-B1*03:01L HLA-DPA1*01:02-B1*04:01L HLA-DRB1* 04:08L
  source 1..12: note = Severe acute respiratory syndrome coronavirus 2
RVYSSANNCTFE

SEQ ID NO: 9964 - protein, 10 aa, Severe acute respiratory syndrome-related coronavirus
  REGION 1..10: note = Table B: HLA-DQA1*03:02-B1*03:03L HLA-DQA1*05:01-B1*03:01L HLA-DPA1*03:01-B1*04:02L HLA-DQA1*01-B1*05L HLA-DQA1*05:05-B1*03:19L HLA-DQA1*05:01-B1*02:01L HLA-DRB1*12:01L HLA-DPA1*02:01-B1*13:01L
  REGION 1..10: note = CONT. FROM ABOVE: HLA-DPA1*03:01-B1*105:01L HLA-DQA1*03:01-B1*03 :02L HLA-DPA1*01:02-B1*04:01L HLA-DRB1*16:01L HLA-DQA1*01:03-B1* 06:01L HLA-DQA1*02:01-B1*03:03L HLA-DRB1*15:03L
  source 1..10: note = Severe acute respiratory syndrome coronavirus 2
TFEYVSQPFL

SEQ ID NO: 9965 - protein, 10 aa, Severe acute respiratory syndrome-related coronavirus
  REGION 1..10: note = Table B: HLA-DQA1*03:02-B1*03:03L HLA-DRB1*11:02L HLA-DQA1*05:05-B1*03:19M HLA-DQA1*05:01-B1*02:01L HLA-DRB1*09:01L HLA-DPA1*02:01-B1*13:01L HLA-DQA1*03:01-B1*03:02L HLA-DPA1*01:03-B1*104:01L
  REGION 1..10: note = CONT. FROM ABOVE: HLA-DQA1*01:03-B1*06:01L HLA-DQA1*02:01-B1*03: 03L HLA-DRB1*15:03L
  source 1..10: note = Severe acute respiratory syndrome coronavirus 2
FEYVSQPFLM

SEQ ID NO: 9966 - protein, 10 aa, Severe acute respiratory syndrome-related coronavirus
  REGION 1..10: note = Table B: HLA-DQA1*03:02-B1*03:03L HLA-DQA1*01:02-B1*06:02L HLA-DRB1*01:02L HLA-DPA1*03:01-B1*04:02L HLA-DRB1*14:02L HLA-DQA1*01-B1*05L HLA-DQA1*05:05-B1*03:19L HLA-DQA1*05:01-B1*02:01L HLA-DPA1*01:03-B1*04:01L
  REGION 1..10: note = CONT. FROM ABOVE: HLA-DPA1*01:03-B1*04:02L HLA-DPA1*02:01-B1*13: 01L HLA-DPA1*03:01-B1*105:01L HLA-DQA1*03:01-B1*03:02L HLA-DPA1* 01:03-B1*104:01L HLA-DPA1*01:02-B1*04:01L HLA-DRB1*16:01L HLA-DQ A1*01:03-B1*06:01L HLA-DRB1*04:08L HLA-DQA1*02:01-B1*03:03L
  REGION 1..10: note = CONT. FROM ABOVE: HLA-DRB1*15:03L
  source 1..10: note = Severe acute respiratory syndrome coronavirus 2
YVSQPFLMDL

SEQ ID NO: 9967 - protein, 12 aa, Severe acute respiratory syndrome-related coronavirus
  REGION 1..12: note = Table B: HLA-DQA1*03:02-B1*03:03L HLA-DRB1*04:03L HLA-DRB1*13:03L HLA-DRB1*01:03L HLA-DRB1*04:02L HLA-DRB1*04:05L HLA-DRB4*03:01NL HLA-DRB1*08:01L HLA-DQA1*01-B1*05L HLA-DQA1*05:01-B1*02:01L HLA-DRB1*04:10L HLA-DRB1*12:01L
  REGION 1..12: note = CONT. FROM ABOVE: HLA-DRB1*14:54L HLA-DRB1*14:17L HLA-DRB1*16:01 L HLA-DRB1*04:08L HLA-DQA1*02:01-B1*03:03L
  source 1..12: note = Severe acute respiratory syndrome coronavirus 2
SQPFLMDLEGKQ

SEQ ID NO: 9968 - protein, 12 aa, Severe acute respiratory syndrome-related coronavirus
  REGION 1..12: note = Table B: HLA-DQA1*03:02-B1*03:03L HLA-DRB1*13:02L HLA-DRB1*01:03L HLA-DRB1*01:02L HLA-DRB4*03:01NL HLA-DRB1*08:04L HLA-DRB1*08:77L HLA-DPA1*01:03-B1*03:01L HLA-DRB1*03:01L HLA-DRB1*14:01L HLA-DRB1*11:04L HLA-DRB1*14:02L HLA-DRB1*08:01L
  REGION 1..12: note = CONT. FROM ABOVE: HLA-DQA1*01-B1*05L HLA-DQA1*05:01-B1*02:01L HL A-DRB1*04:10L HLA-DRB1*12:01L HLA-DRB1*12:02L HLA-DRB3*01:01L HL A-DPA1*03:01-B1*105:01L HLA-DRB1*14:54L HLA-DRB1*10:01L HLA-DRB1 *16:01L HLA-DRB1*04:08L HLA-DRB1*08:03L HLA-DQA1*02:01-B1*03:03L
  source 1..12: note = Severe acute respiratory syndrome coronavirus 2
QPFLMDLEGKQG

SEQ ID NO: 9969 - protein, 10 aa, Severe acute respiratory syndrome-related coronavirus
  REGION 1..10: note = Table B: HLA-DQA1*03:02-B1*03:03L HLA-DQA1*05:01-B1*03:01L HLA-DRB1*13:03L HLA-DRB1*01:03L HLA-DQA1*01:02-B1*06:02L HLA-DRB1*08:77L HLA-DPA1*01:03-B1*03:01L HLA-DPA1*03:01-B1*04:02L HLA-DRB1*03:01L HLA-DRB1*11:02L
  REGION 1..10: note = CONT. FROM ABOVE: HLA-DRB1*14:02L HLA-DQA1*01-B1*05L HLA-DQA1*05 :05-B1*03:19M HLA-DQA1*05:01-B1*02:01L HLA-DRB4*01:01L HLA-DPA1* 01:03-B1*04:01L HLA-DQA1*05:05-B1*03:116L HLA-DPA1*01:03-B1*04:0 2L HLA-DPA1*02:01-B1*13:01L HLA-DPA1*03:01-B1*105:01L
  REGION 1..10: note = CONT. FROM ABOVE: HLA-DPA1*01:03-B1*104:01L HLA-DRB1*10:01L HLA- DRB1*16:01L HLA-DQA1*01:03-B1*06:01L HLA-DQA1*02:01-B1*03:03L HL A-DRB1*15:03L
  source 1..10: note = Severe acute respiratory syndrome coronavirus 2
EFVFKNIDGY

SEQ ID NO: 9970 - protein, 10 aa, Severe acute respiratory syndrome-related coronavirus
  REGION 1..10: note = Table B: HLA-DQA1*03:02-B1*03:03L HLA-DQA1*05:01-B1*03:01L HLA-DRB1*04:03L HLA-DRB1*01:03L HLA-DRB1*04:05L HLA-DQA1*01:02-B1*06:02L HLA-DPA1*01:03-B1*03:01L HLA-DPA1*03:01-B1*04:02L HLA-DRB1*14:02L HLA-DQA1*01-B1*05L
  REGION 1..10: note = CONT. FROM ABOVE: HLA-DQA1*05:05-B1*03:19L HLA-DQA1*05:01-B1*02: 01L HLA-DPA1*01:03-B1*04:01L HLA-DPA1*01:03-B1*04:02L HLA-DPA1*0 2:01-B1*13:01L HLA-DPA1*03:01-B1*105:01L HLA-DPA1*01:02-B1*04:01 L HLA-DRB1*16:01L HLA-DQA1*01:03-B1*06:01L
  REGION 1..10: note = CONT. FROM ABOVE: HLA-DQA1*02:01-B1*03:03L HLA-DRB1*15:03L
  source 1..10: note = Severe acute respiratory syndrome coronavirus 2
FVFKNIDGYF

SEQ ID NO: 9971 - protein, 14 aa, Severe acute respiratory syndrome-related coronavirus
  REGION 1..14: note = Table B: HLA-DQA1*03:02-B1*03:03L HLA-DRB1*04:04L HLA-DRB1*01:01L HLA-DRB4*03:01NL HLA-DRB3*02:01L HLA-DPA1*01:03-B1*03:01L HLA-DPA1*01:03-B1*104:01L HLA-DRB1*07:01L HLA-DRB1*10:01L HLA-DQA1*01:03-B1*06:01L
  source 1..14: note = Severe acute respiratory syndrome coronavirus 2
DGYFKIYSKHTPIN

SEQ ID NO: 9972 - protein, 10 aa, Severe acute respiratory syndrome-related coronavirus
  REGION 1..10: note = Table B: HLA-DQA1*03:02-B1*03:03L HLA-DQA1*05:01-B1*03:01L HLA-DRB1*04:03L HLA-DRB1*13:02L HLA-DRB1*13:03L HLA-DRB1*01:03L HLA-DRB1*04:05L HLA-DQA1*01:02-B1*06:02L HLA-DRB1*01:01L HLA-DRB1*01:02L HLA-DRB4*03:01NL HLA-DRB1*08:77L
  REGION 1..10: note = CONT. FROM ABOVE: HLA-DPA1*03:01-B1*04:02L HLA-DRB1*14:01L HLA-D RB1*11:03L HLA-DRB1*14:02L HLA-DQA1*01:01-B1*05:01L HLA-DRB1*08: 01L HLA-DRB1*11:01L HLA-DQA1*01-B1*05L HLA-DQA1*05:05-B1*03:19L HLA-DQA1*05:01-B1*02:01L HLA-DPA1*01:03-B1*04:01L
  REGION 1..10: note = CONT. FROM ABOVE: HLA-DQA1*05:05-B1*03:116L HLA-DPA1*01:03-B1*04 :02L HLA-DRB1*12:01L HLA-DPA1*02:01-B1*13:01M HLA-DPA1*03:01-B1* 105:01L HLA-DQA1*03:01-B1*03:02L HLA-DPA1*01:02-B1*04:01L HLA-DR B1*07:01L HLA-DRB1*16:01L HLA-DQA1*01:03-B1*06:01M
  REGION 1..10: note = CONT. FROM ABOVE: HLA-DRB1*08:03L HLA-DQA1*02:01-B1*03:03L HLA-D RB1*15:03L
  source 1..10: note = Severe acute respiratory syndrome coronavirus 2
IYSKHTPINL

SEQ ID NO: 9973 - protein, 11 aa, Severe acute respiratory syndrome-related coronavirus
  REGION 1..11: note = Table B: HLA-DQA1*03:02-B1*03:03L HLA-DRB1*04:01L HLA-DQA1*01:02-B1*06:02L HLA-DRB1*01:02L HLA-DRB1*08:04L HLA-DRB1*08:01L HLA-DQA1*05:01-B1*02:01L HLA-DRB1*12:02L HLA-DRB1*10:01L HLA-DQA1*02:01-B1*03:03L HLA-DRB1*15:03L
  source 1..11: note = Severe acute respiratory syndrome coronavirus 2
PINLVRDLPQG

SEQ ID NO: 9974 - protein, 10 aa, Severe acute respiratory syndrome-related coronavirus
  REGION 1..10: note = Table B: HLA-DQA1*03:02-B1*03:03L HLA-DRB1*04:03L HLA-DRB1*13:03L HLA-DRB1*01:03L HLA-DRB1*04:02L HLA-DRB1*04:05L HLA-DQA1*01-B1*05L HLA-DQA1*03:01-B1*03:02L HLA-DRB1*16:01L
  source 1..10: note = Severe acute respiratory syndrome coronavirus 2
VRDLPQGFSA

SEQ ID NO: 9975 - protein, 10 aa, Severe acute respiratory syndrome-related coronavirus
  REGION 1..10: note = Table B: HLA-DQA1*03:02-B1*03:03L HLA-DQA1*05:05-B1*03:19L HLA-DQA1*03:01-B1*03:02L HLA-DRB1*16:01L
  source 1..10: note = Severe acute respiratory syndrome coronavirus 2
RDLPQGFSAL

SEQ ID NO: 9976 - protein, 12 aa, Severe acute respiratory syndrome-related coronavirus
  REGION 1..12: note = Table B: HLA-DQA1*03:02-B1*03:03L HLA-DQA1*01:02-B1*06:02L HLA-DQA1*05:05-B1*03:19L HLA-DQA1*03:01-B1*03:02L HLA-DQA1*05:05-B1*03:01L HLA-DQA1*01:03-B1*06:01L HLA-DQA1*02:01-B1*03:03L
  source 1..12: note = Severe acute respiratory syndrome coronavirus 2
PQGFSALEPLVD

SEQ ID NO: 9977 - protein, 10 aa, Severe acute respiratory syndrome-related coronavirus
  REGION 1..10: note = Table B: HLA-DQA1*03:02-B1*03:03L HLA-DRB1*04:03L HLA-DRB1*13:03L HLA-DRB1*04:02L HLA-DRB1*04:05L HLA-DRB4*03:01NL HLA-DQA1*01-B1*05L HLA-DQA1*05:01-B1*02:01L HLA-DRB1*04:10L HLA-DRB1*12:01L HLA-DPA1*03:01-B1*105:01L
  REGION 1..10: note = CONT. FROM ABOVE: HLA-DQA1*03:01-B1*03:02L HLA-DRB1*14:54L HLA-D RB1*14:17L HLA-DRB1*16:01L HLA-DQA1*02:01-B1*03:03L HLA-DRB1*15: 03L
  source 1..10: note = Severe acute respiratory syndrome coronavirus 2
LEPLVDLPIG

SEQ ID NO: 9978 - protein, 11 aa, Severe acute respiratory syndrome-related coronavirus
  REGION 1..11: note = Table B: HLA-DQA1*03:02-B1*03:03L HLA-DRB1*04:03L HLA-DQA1*01-B1*05L HLA-DQA1*05:01-B1*02:01L HLA-DQA1*03:01-B1*03:02L HLA-DQA1*01:03-B1*06:01L HLA-DQA1*02:01-B1*03:03L
  source 1..11: note = Severe acute respiratory syndrome coronavirus 2
EPLVDLPIGIN

SEQ ID NO: 9979 - protein, 10 aa, Severe acute respiratory syndrome-related coronavirus
  REGION 1..10: note = Table B: HLA-DQA1*03:02-B1*03:03L HLA-DQA1*05:05-B1*03:19L
  source 1..10: note = Severe acute respiratory syndrome coronavirus 2
LVDLPIGINI

SEQ ID NO: 9980 - protein, 10 aa, Severe acute respiratory syndrome-related coronavirus
  REGION 1..10: note = Table B: HLA-DQA1*03:02-B1*03:03L HLA-DQA1*05:01-B1*03:01M HLA-DRB1*13:03M HLA-DRB1*01:03L HLA-DRB1*04:05L HLA-DQA1*01:02-B1*06:02H HLA-DRB1*01:01L HLA-DRB1*01:02L HLA-DRB4*03:01NL HLA-DRB1*08:77L HLA-DPA1*01:03-B1*03:01L
  REGION 1..10: note = CONT. FROM ABOVE: HLA-DPA1*03:01-B1*04:02L HLA-DRB1*03:01L HLA-D RB1*14:01L HLA-DRB1*11:03L HLA-DRB1*14:02L HLA-DRB1*08:01L HLA-D RB5*01:01L HLA-DQA1*01-B1*05L HLA-DQA1*05:05-B1*03:19L HLA-DQA1* 05:01-B1*02:01L HLA-DPA1*01:03-B1*04:01L
  REGION 1..10: note = CONT. FROM ABOVE: HLA-DQA1*05:05-B1*03:116L HLA-DPA1*01:03-B1*04 :02L HLA-DRB1*12:01L HLA-DPA1*02:01-B1*13:01M HLA-DPA1*03:01-B1* 105:01M HLA-DQA1*03:01-B1*03:02L HLA-DPA1*01:02-B1*04:01L HLA-DR B1*10:01L HLA-DRB1*16:01L HLA-DQA1*01:03-B1*06:01L
  REGION 1..10: note = CONT. FROM ABOVE: HLA-DRB1*08:03L HLA-DQA1*02:01-B1*03:03L HLA-D RB1*15:03M
  source 1..10: note = Severe acute respiratory syndrome coronavirus 2
LPIGINITRF

SEQ ID NO: 9981 - protein, 10 aa, Severe acute respiratory syndrome-related coronavirus
  REGION 1..10: note = Table B: HLA-DQA1*03:02-B1*03:03L HLA-DQA1*05:01-B1*03:01L HLA-DRB1*01:03L HLA-DQA1*01:02-B1*06:02L HLA-DRB1*01:02L HLA-DRB1*08:77L HLA-DRB3*02:01L HLA-DPA1*01:03-B1*03:01L HLA-DPA1*03:01-B1*04:02M HLA-DRB1*14:01L HLA-DRB1*11:04L
  REGION 1..10: note = CONT. FROM ABOVE: HLA-DRB1*08:01L HLA-DRB1*11:01L HLA-DQA1*01-B1 *05L HLA-DQA1*05:05-B1*03:19L HLA-DQA1*05:01-B1*02:01L HLA-DPA1* 01:03-B1*04:01M HLA-DPA1*01:03-B1*04:02L HLA-DRB1*12:01L HLA-DPA 1*02:01-B1*13:01L HLA-DPA1*03:01-B1*105:01L
  REGION 1..10: note = CONT. FROM ABOVE: HLA-DQA1*03:01-B1*03:02L HLA-DPA1*01:03-B1*104 :01L HLA-DPA1*01:02-B1*04:01M HLA-DRB1*16:01L HLA-DQA1*01:03-B1* 06:01L HLA-DRB1*04:08L HLA-DQA1*02:01-B1*03:03L HLA-DRB1*15:03L
  source 1..10: note = Severe acute respiratory syndrome coronavirus 2
GINITRFQTL

SEQ ID NO: 9982 - protein, 13 aa, Severe acute respiratory syndrome-related coronavirus
  REGION 1..13: note = Table B: HLA-DQA1*03:02-B1*03:03L HLA-DQA1*05:01-B1*03:01L HLA-DRB1*13:02L HLA-DRB1*01:03L HLA-DRB1*04:02L HLA-DRB1*04:04L HLA-DRB1*14:01L HLA-DQA1*01:01-B1*05:01L HLA-DRB1*08:01L HLA-DQA1*05:01-B1*02:01L HLA-DRB1*04:10L
  REGION 1..13: note = CONT. FROM ABOVE: HLA-DPA1*03:01-B1*105:01L HLA-DQA1*05:05-B1*03 :01L HLA-DRB1*14:17L HLA-DPA1*01:02-B1*04:01L HLA-DRB1*04:08L HL A-DRB1*15:03L
  source 1..13: note = Severe acute respiratory syndrome coronavirus 2
LALHRSYLTPGDS

SEQ ID NO: 9983 - protein, 12 aa, Severe acute respiratory syndrome-related coronavirus
  REGION 1..12: note = Table B: HLA-DQA1*03:02-B1*03:03L HLA-DRB1*13:03L HLA-DRB1*04:02L HLA-DRB1*04:05L HLA-DRB4*03:01NL HLA-DQA1*01-B1*05L HLA-DQA1*05:01-B1*02:01L HLA-DRB1*04:10L HLA-DRB1*12:01L HLA-DQA1*03:01-B1*03:02L HLA-DRB1*14:54L
  REGION 1..12: note = CONT. FROM ABOVE: HLA-DRB1*16:01L HLA-DQA1*02:01-B1*03:03L
  source 1..12: note = Severe acute respiratory syndrome coronavirus 2
RSYLTPGDSSSG

SEQ ID NO: 9984 - protein, 12 aa, Severe acute respiratory syndrome-related coronavirus
  REGION 1..12: note = Table B: HLA-DQA1*03:02-B1*03:03L HLA-DRB1*04:05L HLA-DQA1*01:03-B1*06:01L
  source 1..12: note = Severe acute respiratory syndrome coronavirus 2
SYLTPGDSSSGW

SEQ ID NO: 9985 - protein, 14 aa, Severe acute respiratory syndrome-related coronavirus
  REGION 1..14: note = Table B: HLA-DQA1*03:02-B1*03:03L HLA-DQA1*05:01-B1*03:01L HLA-DRB1*01:03L HLA-DQA1*01:02-B1*06:02L HLA-DQA1*01:01-B1*05:01L HLA-DQA1*05:05-B1*03:19L HLA-DQA1*05:01-B1*02:01L HLA-DQA1*05:05-B1*03:116L
  REGION 1..14: note = CONT. FROM ABOVE: HLA-DQA1*03:01-B1*03:02L HLA-DQA1*05:05-B1*03: 01L HLA-DQA1*01:03-B1*06:01L HLA-DQA1*02:01-B1*03:03L
  source 1..14: note = Severe acute respiratory syndrome coronavirus 2
TPGDSSSGWTAGAA

SEQ ID NO: 9986 - protein, 12 aa, Severe acute respiratory syndrome-related coronavirus
  REGION 1..12: note = Table B: HLA-DQA1*03:02-B1*03:03L HLA-DQA1*05:01-B1*03:01L HLA-DQA1*01:02-B1*06:02L HLA-DQA1*03:01-B1*03:02L HLA-DQA1*05:05-B1*03:01L HLA-DQA1*01:03-B1*06:01L HLA-DQA1*02:01-B1*03:03L
  source 1..12: note = Severe acute respiratory syndrome coronavirus 2
DSSSGWTAGAAA

SEQ ID NO: 9987 - protein, 12 aa, Severe acute respiratory syndrome-related coronavirus
  REGION 1..12: note = Table B: HLA-DQA1*03:02-B1*03:03L HLA-DQA1*05:01-B1*03:01L HLA-DQA1*01-B1*05L HLA-DRB1*12:01L HLA-DPA1*03:01-B1*105:01L HLA-DQA1*05:05-B1*03:01L HLA-DRB1*10:01L
  source 1..12: note = Severe acute respiratory syndrome coronavirus 2
SSGWTAGAAAYY

SEQ ID NO: 9988 - protein, 11 aa, Severe acute respiratory syndrome-related coronavirus
  REGION 1..11: note = Table B: HLA-DQA1*03:02-B1*03:03L HLA-DQA1*05:01-B1*03:01L HLA-DQA1*01:02-B1*06:02L HLA-DQA1*05:05-B1*03:19L HLA-DPA1*03:01-B1*105:01L HLA-DQA1*03:01-B1*03:02L HLA-DQA1*05:05-B1*03:01L HLA-DQA1*02:01-B1*03:03L
  source 1..11: note = Severe acute respiratory syndrome coronavirus 2
WTAGAAAYYVG

SEQ ID NO: 9989 - protein, 12 aa, Severe acute respiratory syndrome-related coronavirus
  REGION 1..12: note = Table B: HLA-DQA1*03:02-B1*03:03L HLA-DQA1*05:01-B1*03:01L HLA-DQA1*05:05-B1*03:01L HLA-DQA1*02:01-B1*03:03L
  source 1..12: note = Severe acute respiratory syndrome coronavirus 2
TAGAAAYYVGYL

SEQ ID NO: 9990 - protein, 12 aa, Severe acute respiratory syndrome-related coronavirus
  REGION 1..12: note = Table B: HLA-DQA1*03:02-B1*03:03L HLA-DRB1*04:03L HLA-DQA1*01:02-B1*06:02L
  source 1..12: note = Severe acute respiratory syndrome coronavirus 2
AAAYYVGYLQPR

SEQ ID NO: 9991 - protein, 10 aa, Severe acute respiratory syndrome-related coronavirus
  REGION 1..10: note = Table B: HLA-DQA1*03:02-B1*03:03L HLA-DQA1*05:01-B1*03:01L HLA-DRB1*04:03L HLA-DRB1*13:03L HLA-DRB1*01:03L HLA-DRB1*04:02L HLA-DQA1*01:02-B1*06:02L HLA-DPA1*03:01-B1*04:02L HLA-DQA1*01-B1*05L HLA-DQA1*05:01-B1*02:01L
  REGION 1..10: note = CONT. FROM ABOVE: HLA-DPA1*01:03-B1*04:02L HLA-DPA1*03:01-B1*105 :01L HLA-DQA1*03:01-B1*03:02L HLA-DRB1*14:17L HLA-DPA1*01:02-B1* 04:01L HLA-DRB1*16:01L HLA-DQA1*01:03-B1*06:01L HLA-DRB1*04:08L HLA-DQA1*02:01-B1*03:03L HLA-DRB1*15:03L
  source 1..10: note = Severe acute respiratory syndrome coronavirus 2
YYVGYLQPRT

SEQ ID NO: 9992 - protein, 10 aa, Severe acute respiratory syndrome-related coronavirus
  REGION 1..10: note = Table B: HLA-DQA1*03:02-B1*03:03L HLA-DQA1*05:01-B1*03:01L HLA-DRB1*04:03L HLA-DRB1*13:02L HLA-DRB1*13:03L HLA-DRB1*01:03L HLA-DRB1*04:05L HLA-DQA1*01:02-B1*06:02L HLA-DRB1*01:01L HLA-DRB1*01:02L HLA-DRB4*03:01NL HLA-DRB1*08:77L HLA-DRB3*02:01L
  REGION 1..10: note = CONT. FROM ABOVE: HLA-DPA1*01:03-B1*03:01L HLA-DPA1*03:01-B1*04: 02L HLA-DRB1*14:01L HLA-DRB1*11:03L HLA-DRB1*14:02L HLA-DQA1*01: 01-B1*05:01L HLA-DQA1*01-B1*05L HLA-DQA1*05:05-B1*03:19L HLA-DQA 1*05:01-B1*02:01L HLA-DRB4*01:01L HLA-DPA1*01:03-B1*04:01L
  REGION 1..10: note = CONT. FROM ABOVE: HLA-DQA1*05:05-B1*03:116L HLA-DRB1*09:01L HLA- DPA1*01:03-B1*04:02L HLA-DRB1*12:01L HLA-DPA1*02:01-B1*13:01L HL A-DPA1*03:01-B1*105:01L HLA-DQA1*03:01-B1*03:02L HLA-DPA1*01:03- B1*104:01L HLA-DQA1*05:05-B1*03:01L HLA-DPA1*01:02-B1*04:01L
  REGION 1..10: note = CONT. FROM ABOVE: HLA-DRB1*07:01L HLA-DRB1*10:01L HLA-DRB1*16:01 L HLA-DQA1*01:03-B1*06:01M HLA-DRB1*08:03L HLA-DQA1*02:01-B1*03: 03L HLA-DRB1*15:03L
  source 1..10: note = Severe acute respiratory syndrome coronavirus 2
YVGYLQPRTF

SEQ ID NO: 9993 - protein, 10 aa, Severe acute respiratory syndrome-related coronavirus
  REGION 1..10: note = Table B: HLA-DQA1*03:02-B1*03:03L HLA-DQA1*05:01-B1*03:01L HLA-DRB1*04:03L HLA-DQA1*01:02-B1*06:02L HLA-DRB1*01:02L HLA-DRB1*14:01L HLA-DQA1*01-B1*05L HLA-DQA1*05:05-B1*03:19L HLA-DQA1*05:01-B1*02:01L HLA-DRB1*12:01L
  REGION 1..10: note = CONT. FROM ABOVE: HLA-DPA1*02:01-B1*13:01L HLA-DPA1*03:01-B1*105 :01L HLA-DQA1*03:01-B1*03:02L HLA-DQA1*05:05-B1*03:01L HLA-DPA1* 01:02-B1*04:01L HLA-DRB1*16:01L HLA-DQA1*01:03-B1*06:01L HLA-DQA 1*02:01-B1*03:03L HLA-DRB1*15:03L
  source 1..10: note = Severe acute respiratory syndrome coronavirus 2
VGYLQPRTFL

SEQ ID NO: 9994 - protein, 10 aa, Severe acute respiratory syndrome-related coronavirus
  REGION 1..10: note = Table B: HLA-DQA1*03:02-B1*03:03L HLA-DPA1*02:01-B1*13:01L HLA-DQA1*01:03-B1*06:01L HLA-DQA1*02:01-B1*03:03L
  source 1..10: note = Severe acute respiratory syndrome coronavirus 2
GYLQPRTFLL

SEQ ID NO: 9995 - protein, 13 aa, Severe acute respiratory syndrome-related coronavirus
  REGION 1..13: note = Table B: HLA-DQA1*03:02-B1*03:03L HLA-DQA1*05:01-B1*03:01L HLA-DRB1*13:03L HLA-DRB1*01:03L HLA-DRB1*04:05L HLA-DRB1*08:04L HLA-DRB3*02:01L HLA-DPA1*01:03-B1*03:01L HLA-DPA1*03:01-B1*04:02L HLA-DRB1*14:02L HLA-DRB1*08:01L
  REGION 1..13: note = CONT. FROM ABOVE: HLA-DQA1*05:05-B1*03:19L HLA-DRB1*12:02L HLA-D PA1*02:01-B1*13:01L HLA-DQA1*03:01-B1*03:02L HLA-DRB1*14:54L HLA -DQA1*05:05-B1*03:01L HLA-DPA1*01:02-B1*04:01L HLA-DQA1*01:03-B1 *06:01L HLA-DRB1*04:08L
  source 1..13: note = Severe acute respiratory syndrome coronavirus 2
TFLLKYNENGTIT

SEQ ID NO: 9996 - protein, 12 aa, Severe acute respiratory syndrome-related coronavirus
  REGION 1..12: note = Table B: HLA-DQA1*03:02-B1*03:03L HLA-DQA1*05:01-B1*03:01L HLA-DRB1*13:03L HLA-DRB1*01:03L HLA-DRB1*04:05L HLA-DRB1*01:02L HLA-DRB4*03:01NL HLA-DRB1*08:04L HLA-DRB1*08:77L HLA-DRB3*02:01L HLA-DRB1*11:03L HLA-DQA1*05:01-B1*02:01L HLA-DRB1*12:02L
  REGION 1..12: note = CONT. FROM ABOVE: HLA-DPA1*03:01-B1*105:01L HLA-DRB1*14:54L HLA- DQA1*05:05-B1*03:01L HLA-DRB1*07:01L
  source 1..12: note = Severe acute respiratory syndrome coronavirus 2
LLKYNENGTITD

SEQ ID NO: 9997 - protein, 12 aa, Severe acute respiratory syndrome-related coronavirus
  REGION 1..12: note = Table B: HLA-DQA1*03:02-B1*03:03L HLA-DQA1*05:01-B1*03:01L HLA-DRB1*13:03L HLA-DRB1*01:03L HLA-DRB1*04:05L HLA-DRB1*01:02L HLA-DRB4*03:01NL HLA-DRB1*08:04L HLA-DRB1*08:77L HLA-DRB3*02:01L HLA-DPA1*01:03-B1*03:01L HLA-DRB1*11:03L HLA-DRB1*14:02L
  REGION 1..12: note = CONT. FROM ABOVE: HLA-DQA1*05:05-B1*03:19L HLA-DQA1*05:01-B1*02: 01L HLA-DRB1*04:10L HLA-DRB1*12:02L HLA-DPA1*03:01-B1*105:01L HL A-DRB1*14:54L HLA-DQA1*05:05-B1*03:01L HLA-DRB1*15:03L
  source 1..12: note = Severe acute respiratory syndrome coronavirus 2
LKYNENGTITDA

SEQ ID NO: 9998 - protein, 10 aa, Severe acute respiratory syndrome-related coronavirus
  REGION 1..10: note = Table B: HLA-DQA1*03:02-B1*03:03L HLA-DQA1*05:05-B1*03:19L HLA-DQA1*03:01-B1*03:02L HLA-DPA1*01:03-B1*104:01L
  source 1..10: note = Severe acute respiratory syndrome coronavirus 2
NENGTITDAV

SEQ ID NO: 9999 - protein, 15 aa, Severe acute respiratory syndrome-related coronavirus
  REGION 1..15: note = Table B: HLA-DQA1*03:02-B1*03:03L HLA-DRB1*04:02L HLA-DRB1*04:05L HLA-DRB1*01:02L HLA-DRB1*14:02L HLA-DRB1*12:01L HLA-DQA1*05:05-B1*03:01L HLA-DRB1*16:01L HLA-DRB1*15:03L
  source 1..15: note = Severe acute respiratory syndrome coronavirus 2
NGTITDAVDCALDPL

SEQ ID NO: 10000 - protein, 14 aa, Severe acute respiratory syndrome-related coronavirus
  REGION 1..14: note = Table B: HLA-DQA1*03:02-B1*03:03L HLA-DPA1*03:01-B1*105:01L HLA-DQA1*05:05-B1*03:01L HLA-DRB1*16:01L HLA-DQA1*01:03-B1*06:01L HLA-DQA1*02:01-B1*03:03L
  source 1..14: note = Severe acute respiratory syndrome coronavirus 2
ITDAVDCALDPLSE

SEQ ID NO: 10001 - protein, 13 aa, Severe acute respiratory syndrome-related coronavirus
  REGION 1..13: note = Table B: HLA-DQA1*03:02-B1*03:03L HLA-DRB1*04:02L HLA-DRB1*04:05L HLA-DQA1*01:02-B1*06:02L HLA-DRB1*04:10L HLA-DPA1*03:01-B1*105:01L HLA-DQA1*03:01-B1*03:02L HLA-DQA1*05:05-B1*03:01L HLA-DQA1*01:03-B1*06:01L
  REGION 1..13: note = CONT. FROM ABOVE: HLA-DQA1*02:01-B1*03:03L
  source 1..13: note = Severe acute respiratory syndrome coronavirus 2
DAVDCALDPLSET

SEQ ID NO: 10002 - protein, 13 aa, Severe acute respiratory syndrome-related coronavirus
  REGION 1..13: note = Table B: HLA-DQA1*03:02-B1*03:03L HLA-DQA1*05:01-B1*03:01L HLA-DRB1*01:03L HLA-DRB1*04:02L HLA-DRB1*04:05L HLA-DRB1*01:02L HLA-DQA1*01-B1*05L HLA-DQA1*05:01-B1*02:01L HLA-DRB1*04:10L HLA-DQA1*05:05-B1*03:01L HLA-DRB1*16:01L HLA-DRB1*04:08L
  REGION 1..13: note = CONT. FROM ABOVE: HLA-DRB1*15:03L
  source 1..13: note = Severe acute respiratory syndrome coronavirus 2
AVDCALDPLSETK

SEQ ID NO: 10003 - protein, 10 aa, Severe acute respiratory syndrome-related coronavirus
  REGION 1..10: note = Table B: HLA-DQA1*03:02-B1*03:03L HLA-DQA1*05:05-B1*03:19L
  source 1..10: note = Severe acute respiratory syndrome coronavirus 2
ALDPLSETKC

SEQ ID NO: 10004 - protein, 12 aa, Severe acute respiratory syndrome-related coronavirus
  REGION 1..12: note = Table B: HLA-DQA1*03:02-B1*03:03L HLA-DRB1*13:02L HLA-DRB1*13:03L HLA-DRB1*04:04L HLA-DRB4*03:01NL HLA-DRB1*08:04L HLA-DPA1*01:03-B1*03:01L HLA-DPA1*03:01-B1*04:02L HLA-DRB1*14:01L HLA-DRB1*11:04L HLA-DRB1*08:01L
  REGION 1..12: note = CONT. FROM ABOVE: HLA-DQA1*01-B1*05L HLA-DRB1*04:10L HLA-DRB1*12 :01L HLA-DRB1*12:02L HLA-DPA1*02:01-B1*13:01L HLA-DPA1*03:01-B1* 105:01L HLA-DRB1*14:54L HLA-DQA1*05:05-B1*03:01L HLA-DPA1*01:02- B1*04:01L HLA-DRB1*10:01L HLA-DRB1*08:03L HLA-DRB1*15:03L
  source 1..12: note = Severe acute respiratory syndrome coronavirus 2
LKSFTVEKGIYQ

SEQ ID NO: 10005 - protein, 12 aa, Severe acute respiratory syndrome-related coronavirus
  REGION 1..12: note = Table B: HLA-DQA1*03:02-B1*03:03L HLA-DQA1*05:01-B1*03:01L HLA-DRB1*04:01L HLA-DRB1*13:02L HLA-DRB1*01:03L HLA-DRB1*04:04L HLA-DRB1*04:05L HLA-DQA1*01:02-B1*06:02L HLA-DRB1*01:01L HLA-DRB1*01:02L HLA-DRB4*03:01NL HLA-DRB1*08:04L
  REGION 1..12: note = CONT. FROM ABOVE: HLA-DPA1*01:03-B1*03:01L HLA-DPA1*03:01-B1*04: 02L HLA-DRB1*14:01L HLA-DRB1*11:03L HLA-DRB1*14:02L HLA-DRB1*11: 01L HLA-DQA1*01-B1*05L HLA-DQA1*05:05-B1*03:19L HLA-DQA1*05:01-B 1*02:01L HLA-DPA1*01:03-B1*04:02L HLA-DRB1*12:01L
  REGION 1..12: note = CONT. FROM ABOVE: HLA-DPA1*03:01-B1*105:01L HLA-DRB1*14:54L HLA- DQA1*05:05-B1*03:01L HLA-DRB1*10:01L HLA-DRB1*04:08L HLA-DRB1*15 :03L
  source 1..12: note = Severe acute respiratory syndrome coronavirus 2
FTVEKGIYQTSN

SEQ ID NO: 10006 - protein, 14 aa, Severe acute respiratory syndrome-related coronavirus
  REGION 1..14: note = Table B: HLA-DQA1*03:02-B1*03:03L HLA-DRB1*13:02L HLA-DRB1*04:05L HLA-DRB4*03:01NL HLA-DPA1*01:03-B1*03:01L HLA-DRB1*14:01L HLA-DRB1*11:03L HLA-DRB1*11:04L HLA-DQA1*01-B1*05L HLA-DPA1*01:03-B1*04:01L HLA-DRB1*04:10L
  REGION 1..14: note = CONT. FROM ABOVE: HLA-DRB1*09:01L HLA-DRB1*12:02L HLA-DRB3*01:01 L HLA-DPA1*02:01-B1*13:01L HLA-DQA1*03:01-B1*03:02L HLA-DRB1*14: 54L HLA-DQA1*05:05-B1*03:01L HLA-DRB1*14:17L HLA-DQA1*01:03-B1*0 6:01L
  source 1..14: note = Severe acute respiratory syndrome coronavirus 2
VEKGIYQTSNFRVQ

SEQ ID NO: 10007 - protein, 12 aa, Severe acute respiratory syndrome-related coronavirus
  REGION 1..12: note = Table B: HLA-DQA1*03:02-B1*03:03L HLA-DRB1*13:02L HLA-DRB1*13:03L HLA-DRB1*04:04L HLA-DRB1*04:05L HLA-DQA1*01:02-B1*06:02L HLA-DRB4*03:01NL HLA-DRB1*08:04L HLA-DPA1*01:03-B1*03:01L HLA-DRB1*11:03L HLA-DRB1*11:04L
  REGION 1..12: note = CONT. FROM ABOVE: HLA-DRB1*14:02L HLA-DRB1*08:01L HLA-DRB1*11:01 L HLA-DQA1*05:05-B1*03:19L HLA-DRB1*09:01L HLA-DPA1*01:03-B1*04: 02L HLA-DRB3*01:01L HLA-DPA1*02:01-B1*13:01L HLA-DQA1*03:01-B1*0 3:02L HLA-DRB1*14:54L HLA-DQA1*05:05-B1*03:01L HLA-DRB1*14:17L
  source 1..12: note = Severe acute respiratory syndrome coronavirus 2
GIYQTSNFRVQP

SEQ ID NO: 10008 - protein, 10 aa, Severe acute respiratory syndrome-related coronavirus
  REGION 1..10: note = Table B: HLA-DQA1*03:02-B1*03:03L HLA-DQA1*05:01-B1*03:01L HLA-DRB1*04:03L HLA-DRB1*13:03L HLA-DRB1*01:03L HLA-DRB1*04:02L HLA-DRB4*03:01NL HLA-DRB1*14:02L HLA-DQA1*01-B1*05L HLA-DRB1*12:01L HLA-DPA1*03:01-B1*105:01L
  REGION 1..10: note = CONT. FROM ABOVE: HLA-DQA1*03:01-B1*03:02L HLA-DRB1*14:17L HLA-D PA1*01:02-B1*04:01L HLA-DRB1*16:01L HLA-DQA1*01:03-B1*06:01L HLA -DQA1*02:01-B1*03:03L
  source 1..10: note = Severe acute respiratory syndrome coronavirus 2
QTSNFRVQPT

SEQ ID NO: 10009 - protein, 12 aa, Severe acute respiratory syndrome-related coronavirus
  REGION 1..12: note = Table B: HLA-DQA1*03:02-B1*03:03L HLA-DQA1*05:01-B1*03:01L HLA-DRB1*13:02L HLA-DRB1*13:03L HLA-DRB1*01:03L HLA-DRB1*04:02L HLA-DRB1*04:05L HLA-DRB1*01:02L HLA-DRB4*03:01NL HLA-DRB1*08:04L HLA-DRB3*02:01L HLA-DPA1*03:01-B1*04:02L HLA-DRB1*14:01L
  REGION 1..12: note = CONT. FROM ABOVE: HLA-DQA1*01-B1*05L HLA-DQA1*05:01-B1*02:01L HL A-DRB1*12:01L HLA-DRB1*12:02L HLA-DPA1*02:01-B1*13:01L HLA-DPA1* 03:01-B1*105:01L HLA-DRB1*14:54L HLA-DRB1*14:17L HLA-DPA1*01:02- B1*04:01L HLA-DQA1*01:03-B1*06:01L HLA-DRB1*15:03L
  source 1..12: note = Severe acute respiratory syndrome coronavirus 2
TSNFRVQPTESI

SEQ ID NO: 10010 - protein, 12 aa, Severe acute respiratory syndrome-related coronavirus
  REGION 1..12: note = Table B: HLA-DQA1*03:02-B1*03:03L HLA-DRB1*13:02L HLA-DRB1*04:02L HLA-DRB1*01:02L HLA-DRB3*02:01L HLA-DPA1*03:01-B1*04:02L HLA-DRB1*14:01L HLA-DQA1*01-B1*05L HLA-DQA1*05:01-B1*02:01L HLA-DRB1*12:01L
  REGION 1..12: note = CONT. FROM ABOVE: HLA-DPA1*03:01-B1*105:01L HLA-DRB1*04:08L HLA- DQA1*02:01-B1*03:03L HLA-DRB1*15:03L
  source 1..12: note = Severe acute respiratory syndrome coronavirus 2
SNFRVQPTESIV

SEQ ID NO: 10011 - protein, 12 aa, Severe acute respiratory syndrome-related coronavirus
  REGION 1..12: note = Table B: HLA-DQA1*03:02-B1*03:03L HLA-DPA1*03:01-B1*04:02L HLA-DRB1*09:01L
  source 1..12: note = Severe acute respiratory syndrome coronavirus 2
NFRVQPTESIVR

SEQ ID NO: 10012 - protein, 12 aa, Severe acute respiratory syndrome-related coronavirus
  REGION 1..12: note = Table B: HLA-DQA1*03:02-B1*03:03L HLA-DQA1*05:01-B1*03:01L HLA-DRB1*13:02L HLA-DRB1*13:03L HLA-DRB1*04:02L HLA-DRB1*04:05L HLA-DRB1*01:02L HLA-DRB4*03:01NL HLA-DPA1*01:03-B1*03:01L HLA-DRB1*14:01L HLA-DQA1*01:01-B1*05:01L HLA-DQA1*01-B1*05L
  REGION 1..12: note = CONT. FROM ABOVE: HLA-DQA1*05:05-B1*03:19L HLA-DQA1*05:01-B1*02: 01L HLA-DRB1*12:01L HLA-DRB1*14:54L HLA-DQA1*05:05-B1*03:01L HLA -DRB1*14:17L HLA-DRB1*16:01L HLA-DRB1*04:08L
  source 1..12: note = Severe acute respiratory syndrome coronavirus 2
VQPTESIVRFPN

SEQ ID NO: 10013 - protein, 10 aa, Severe acute respiratory syndrome-related coronavirus
  REGION 1..10: note = Table B: HLA-DQA1*03:02-B1*03:03L HLA-DRB1*11:02L HLA-DQA1*05:05-B1*03:19M HLA-DPA1*01:03-B1*104:01L
  source 1..10: note = Severe acute respiratory syndrome coronavirus 2
TESIVRFPNI

SEQ ID NO: 10014 - protein, 10 aa, Severe acute respiratory syndrome-related coronavirus
  REGION 1..10: note = Table B: HLA-DQA1*03:02-B1*03:03L HLA-DQA1*05:01-B1*03:01L HLA-DRB1*04:03L HLA-DRB1*13:03L HLA-DRB1*01:03L HLA-DRB1*04:02L HLA-DRB1*04:05L HLA-DQA1*01:02-B1*06:02L HLA-DRB1*01:02L HLA-DRB4*03:01NL HLA-DRB1*14:01L HLA-DQA1*01-B1*05L
  REGION 1..10: note = CONT. FROM ABOVE: HLA-DQA1*05:01-B1*02:01L HLA-DRB1*04:10L HLA-D RB1*12:01L HLA-DQA1*03:01-B1*03:02L HLA-DRB1*14:54L HLA-DRB1*14: 17L HLA-DPA1*01:02-B1*04:01L HLA-DRB1*16:01L HLA-DRB1*04:08L HLA -DQA1*02:01-B1*03:03L HLA-DRB1*15:03L
  source 1..10: note = Severe acute respiratory syndrome coronavirus 2
SIVRFPNITN

SEQ ID NO: 10015 - protein, 10 aa, Severe acute respiratory syndrome-related coronavirus
  REGION 1..10: note = Table B: HLA-DQA1*03:02-B1*03:03M HLA-DQA1*05:01-B1*03:01L HLA-DRB1*04:03L HLA-DRB1*13:02L HLA-DRB1*13:03L HLA-DRB1*01:03L HLA-DRB1*04:02L HLA-DRB1*04:04L HLA-DRB1*04:05L HLA-DQA1*01:02-B1*06:02L HLA-DRB1*01:02L HLA-DRB4*03:01NL
  REGION 1..10: note = CONT. FROM ABOVE: HLA-DRB3*02:01L HLA-DPA1*01:03-B1*03:01L HLA-D PA1*03:01-B1*04:02L HLA-DRB1*14:01L HLA-DRB1*14:02L HLA-DQA1*01: 01-B1*05:01L HLA-DRB1*08:01L HLA-DQA1*01-B1*05L HLA-DQA1*05:05-B 1*03:19L HLA-DQA1*05:01-B1*02:01L HLA-DPA1*01:03-B1*04:01L
  REGION 1..10: note = CONT. FROM ABOVE: HLA-DQA1*05:05-B1*03:116L HLA-DRB1*09:01L HLA- DPA1*01:03-B1*04:02L HLA-DRB1*12:01L HLA-DPA1*02:01-B1*13:01L HL A-DPA1*03:01-B1*105:01L HLA-DQA1*03:01-B1*03:02L HLA-DRB1*14:17L HLA-DPA1*01:02-B1*04:01L HLA-DRB1*07:01L HLA-DRB1*10:01L
  REGION 1..10: note = CONT. FROM ABOVE: HLA-DRB1*16:01L HLA-DQA1*01:03-B1*06:01L HLA-D RB1*08:03L HLA-DQA1*02:01-B1*03:03L HLA-DRB1*15:03L
  source 1..10: note = Severe acute respiratory syndrome coronavirus 2
IVRFPNITNL

SEQ ID NO: 10016 - protein, 15 aa, Severe acute respiratory syndrome-related coronavirus
  REGION 1..15: note = Table B: HLA-DQA1*03:02-B1*03:03L HLA-DQA1*05:01-B1*03:01L HLA-DRB1*13:02L HLA-DRB1*04:05L HLA-DRB1*08:04L HLA-DRB3*02:01L HLA-DPA1*01:03-B1*03:01L HLA-DRB1*14:02L HLA-DQA1*05:05-B1*03:19L HLA-DPA1*01:03-B1*04:02L
  REGION 1..15: note = CONT. FROM ABOVE: HLA-DPA1*02:01-B1*13:01L HLA-DPA1*01:03-B1*104 :01L HLA-DRB1*16:01L HLA-DRB1*04:08L
  source 1..15: note = Severe acute respiratory syndrome coronavirus 2
FPNITNLCPFGEVFN

SEQ ID NO: 10017 - protein, 10 aa, Severe acute respiratory syndrome-related coronavirus
  REGION 1..10: note = Table B: HLA-DQA1*03:02-B1*03:03L
  source 1..10: note = Severe acute respiratory syndrome coronavirus 2
GEVFNATRFA

SEQ ID NO: 10018 - protein, 10 aa, Severe acute respiratory syndrome-related coronavirus
  REGION 1..10: note = Table B: HLA-DQA1*03:02-B1*03:03L HLA-DQA1*01:02-B1*06:02L HLA-DPA1*03:01-B1*04:02L HLA-DQA1*05:05-B1*03:19L HLA-DQA1*05:01-B1*02:01L HLA-DPA1*01:03-B1*04:01L HLA-DPA1*02:01-B1*13:01L HLA-DPA1*03:01-B1*105:01L
  REGION 1..10: note = CONT. FROM ABOVE: HLA-DPA1*01:03-B1*104:01L HLA-DPA1*01:02-B1*04 :01L HLA-DRB1*16:01L HLA-DQA1*01:03-B1*06:01L HLA-DQA1*02:01-B1* 03:03L HLA-DRB1*15:03L
  source 1..10: note = Severe acute respiratory syndrome coronavirus 2
VFNATRFASV

SEQ ID NO: 10019 - protein, 10 aa, Severe acute respiratory syndrome-related coronavirus
  REGION 1..10: note = Table B: HLA-DQA1*03:02-B1*03:03L HLA-DQA1*05:01-B1*03:01L HLA-DRB1*01:03L HLA-DQA1*01:02-B1*06:02L HLA-DPA1*01:03-B1*03:01L HLA-DPA1*03:01-B1*04:02L HLA-DRB1*14:02L HLA-DQA1*01-B1*05L HLA-DQA1*05:05-B1*03:19L
  REGION 1..10: note = CONT. FROM ABOVE: HLA-DQA1*05:01-B1*02:01L HLA-DPA1*01:03-B1*04: 01L HLA-DPA1*01:03-B1*04:02L HLA-DRB1*12:01L HLA-DPA1*02:01-B1*1 3:01L HLA-DPA1*03:01-B1*105:01L HLA-DPA1*01:03-B1*104:01L HLA-DQ A1*05:05-B1*03:01L HLA-DPA1*01:02-B1*04:01L HLA-DRB1*16:01L
  REGION 1..10: note = CONT. FROM ABOVE: HLA-DQA1*01:03-B1*06:01L HLA-DRB1*04:08L HLA-D QA1*02:01-B1*03:03L HLA-DRB1*15:03L
  source 1..10: note = Severe acute respiratory syndrome coronavirus 2
FNATRFASVY

SEQ ID NO: 10020 - protein, 12 aa, Severe acute respiratory syndrome-related coronavirus
  REGION 1..12: note = Table B: HLA-DQA1*03:02-B1*03:03L HLA-DQA1*05:01-B1*03:01L HLA-DRB1*04:03L HLA-DRB1*13:02L HLA-DRB1*01:03L HLA-DRB1*04:05L HLA-DRB1*01:02L HLA-DPA1*01:03-B1*03:01L HLA-DPA1*03:01-B1*04:02L HLA-DQA1*05:05-B1*03:19L
  REGION 1..12: note = CONT. FROM ABOVE: HLA-DQA1*05:01-B1*02:01L HLA-DPA1*01:03-B1*04: 01L HLA-DPA1*01:03-B1*04:02L HLA-DRB1*12:01L HLA-DPA1*02:01-B1*1 3:01L HLA-DPA1*03:01-B1*105:01L HLA-DQA1*03:01-B1*03:02L HLA-DPA 1*01:03-B1*104:01L HLA-DQA1*05:05-B1*03:01L
  REGION 1..12: note = CONT. FROM ABOVE: HLA-DPA1*01:02-B1*04:01L HLA-DRB1*16:01L HLA-D QA1*01:03-B1*06:01L HLA-DRB1*04:08L HLA-DRB1*15:03L
  source 1..12: note = Severe acute respiratory syndrome coronavirus 2
NATRFASVYAWN

SEQ ID NO: 10021 - protein, 12 aa, Severe acute respiratory syndrome-related coronavirus
  REGION 1..12: note = Table B: HLA-DQA1*03:02-B1*03:03L HLA-DQA1*05:01-B1*03:01L HLA-DRB1*04:01L HLA-DRB1*13:02L HLA-DRB1*13:03L HLA-DRB1*01:03L HLA-DRB1*04:02L HLA-DRB1*04:04L HLA-DRB1*04:05L HLA-DQA1*01:02-B1*06:02L HLA-DRB1*01:02L HLA-DRB4*03:01NL
  REGION 1..12: note = CONT. FROM ABOVE: HLA-DRB1*08:04L HLA-DRB1*08:77L HLA-DPA1*01:03 -B1*03:01L HLA-DPA1*03:01-B1*04:02L HLA-DRB1*14:01L HLA-DRB1*11: 03L HLA-DRB1*11:04L HLA-DRB5*01:01L HLA-DQA1*01-B1*05L HLA-DQA1* 05:05-B1*03:19L HLA-DQA1*05:01-B1*02:01L HLA-DRB1*04:10L
  REGION 1..12: note = CONT. FROM ABOVE: HLA-DRB1*12:01L HLA-DRB1*12:02L HLA-DPA1*03:01 -B1*105:01L HLA-DQA1*03:01-B1*03:02L HLA-DRB1*14:54L HLA-DQA1*05 :05-B1*03:01L HLA-DRB1*10:01L HLA-DRB1*16:01L HLA-DQA1*01:03-B1* 06:01L HLA-DRB1*04:08L HLA-DRB1*08:03L HLA-DQA1*02:01-B1*03:03L
  REGION 1..12: note = CONT. FROM ABOVE: HLA-DRB1*15:03L
  source 1..12: note = Severe acute respiratory syndrome coronavirus 2
VADYSVLYNSAS

SEQ ID NO: 10022 - protein, 13 aa, Severe acute respiratory syndrome-related coronavirus
  REGION 1..13: note = Table B: HLA-DQA1*03:02-B1*03:03L HLA-DQA1*05:01-B1*03:01L HLA-DRB1*13:02L HLA-DRB1*13:03L HLA-DRB1*08:04L HLA-DPA1*01:03-B1*03:01L HLA-DRB1*11:04L HLA-DQA1*02:01-B1*03:03L
  source 1..13: note = Severe acute respiratory syndrome coronavirus 2
DYSVLYNSASFST

SEQ ID NO: 10023 - protein, 11 aa, Severe acute respiratory syndrome-related coronavirus
  REGION 1..11: note = Table B: HLA-DQA1*03:02-B1*03:03L HLA-DQA1*05:01-B1*03:01L HLA-DRB1*13:03L HLA-DRB1*01:02L HLA-DPA1*01:03-B1*03:01L HLA-DPA1*03:01-B1*04:02L HLA-DRB1*03:01L HLA-DRB1*14:01L HLA-DRB1*11:03L HLA-DRB1*14:02L HLA-DRB1*11:01L
  REGION 1..11: note = CONT. FROM ABOVE: HLA-DQA1*01-B1*05L HLA-DQA1*05:05-B1*03:19L HL A-DQA1*05:01-B1*02:01L HLA-DRB4*01:01L HLA-DPA1*01:03-B1*04:01L HLA-DQA1*05:05-B1*03:116L HLA-DPA1*01:03-B1*04:02L HLA-DRB1*12:0 1L HLA-DQA1*03:01-B1*03:02L HLA-DPA1*01:03-B1*104:01L
  REGION 1..11: note = CONT. FROM ABOVE: HLA-DQA1*05:05-B1*03:01L HLA-DPA1*01:02-B1*04: 01L HLA-DRB1*10:01L
  source 1..11: note = Severe acute respiratory syndrome coronavirus 2
VLYNSASFSTF

SEQ ID NO: 10024 - protein, 10 aa, Severe acute respiratory syndrome-related coronavirus
  REGION 1..10: note = Table B: HLA-DQA1*03:02-B1*03:03L HLA-DQA1*05:01-B1*03:01L HLA-DRB1*04:03L HLA-DRB1*13:02L HLA-DRB1*13:03L HLA-DRB1*01:03L HLA-DRB1*04:02L HLA-DQA1*01:02-B1*06:02L HLA-DRB1*01:02L HLA-DRB4*03:01NL HLA-DRB3*02:01L HLA-DPA1*01:03-B1*03:01L
  REGION 1..10: note = CONT. FROM ABOVE: HLA-DPA1*03:01-B1*04:02L HLA-DRB1*14:01L HLA-D RB1*08:01L HLA-DQA1*01-B1*05L HLA-DQA1*05:05-B1*03:19L HLA-DQA1* 05:01-B1*02:01L HLA-DPA1*01:03-B1*04:01L HLA-DPA1*01:03-B1*04:02 L HLA-DRB1*12:01L HLA-DPA1*03:01-B1*105:01M
  REGION 1..10: note = CONT. FROM ABOVE: HLA-DQA1*03:01-B1*03:02L HLA-DPA1*01:03-B1*02: 01L HLA-DQA1*05:05-B1*03:01L HLA-DRB1*14:17L HLA-DPA1*01:02-B1*0 4:01M HLA-DRB1*16:01L HLA-DQA1*01:03-B1*06:01M HLA-DRB1*04:08L H LA-DQA1*02:01-B1*03:03L HLA-DRB1*15:03L
  source 1..10: note = Severe acute respiratory syndrome coronavirus 2
YNSASFSTFK

SEQ ID NO: 10025 - protein, 13 aa, Severe acute respiratory syndrome-related coronavirus
  REGION 1..13: note = Table B: HLA-DQA1*03:02-B1*03:03L HLA-DRB1*04:01L HLA-DPA1*01:03-B1*03:01L HLA-DPA1*03:01-B1*04:02L HLA-DRB1*11:03L HLA-DQA1*05:05-B1*03:19L HLA-DPA1*01:03-B1*04:01L HLA-DPA1*01:03-B1*04:02L
  REGION 1..13: note = CONT. FROM ABOVE: HLA-DQA1*05:05-B1*03:01L HLA-DRB1*07:01L
  source 1..13: note = Severe acute respiratory syndrome coronavirus 2
FSTFKCYGVSPTK

SEQ ID NO: 10026 - protein, 10 aa, Severe acute respiratory syndrome-related coronavirus
  REGION 1..10: note = Table B: HLA-DQA1*03:02-B1*03:03L HLA-DQA1*05:01-B1*03:01L HLA-DRB1*04:03L HLA-DRB1*13:03L HLA-DRB1*01:03L HLA-DRB1*04:02L HLA-DRB1*04:05L HLA-DQA1*01:02-B1*06:02L HLA-DRB1*01:02L HLA-DRB4*03:01NL HLA-DRB1*14:01L HLA-DQA1*01-B1*05L
  REGION 1..10: note = CONT. FROM ABOVE: HLA-DQA1*05:05-B1*03:19L HLA-DQA1*05:01-B1*02: 01L HLA-DRB1*12:01L HLA-DPA1*03:01-B1*105:01L HLA-DQA1*03:01-B1* 03:02L HLA-DQA1*05:05-B1*03:01L HLA-DRB1*14:17L HLA-DPA1*01:02-B 1*04:01L HLA-DRB1*16:01L HLA-DQA1*01:03-B1*06:01L
  REGION 1..10: note = CONT. FROM ABOVE: HLA-DQA1*02:01-B1*03:03L HLA-DRB1*15:03L
  source 1..10: note = Severe acute respiratory syndrome coronavirus 2
YGVSPTKLND

SEQ ID NO: 10027 - protein, 10 aa, Severe acute respiratory syndrome-related coronavirus
  REGION 1..10: note = Table B: HLA-DQA1*03:02-B1*03:03L HLA-DQA1*05:01-B1*03:01L HLA-DRB1*04:03L HLA-DRB1*13:03L HLA-DRB1*04:02L HLA-DQA1*01:02-B1*06:02L HLA-DRB3*02:01L HLA-DPA1*01:03-B1*03:01L HLA-DPA1*03:01-B1*04:02L
  REGION 1..10: note = CONT. FROM ABOVE: HLA-DRB1*14:01L HLA-DRB1*14:02L HLA-DQA1*01-B1 *05L HLA-DQA1*05:05-B1*03:19L HLA-DQA1*05:01-B1*02:01L HLA-DPA1* 01:03-B1*04:01L HLA-DQA1*05:05-B1*03:116L HLA-DRB1*09:01L HLA-DP A1*01:03-B1*04:02L HLA-DRB1*12:01L HLA-DPA1*03:01-B1*105:01L
  REGION 1..10: note = CONT. FROM ABOVE: HLA-DQA1*03:01-B1*03:02L HLA-DQA1*05:05-B1*03: 01L HLA-DPA1*01:02-B1*04:01L HLA-DRB1*07:01L HLA-DRB1*16:01L HLA -DQA1*01:03-B1*06:01L HLA-DQA1*02:01-B1*03:03L HLA-DRB1*15:03L
  source 1..10: note = Severe acute respiratory syndrome coronavirus 2
GVSPTKLNDL

SEQ ID NO: 10028 - protein, 10 aa, Severe acute respiratory syndrome-related coronavirus
  REGION 1..10: note = Table B: HLA-DQA1*03:02-B1*03:03L
  source 1..10: note = Severe acute respiratory syndrome coronavirus 2
KLNDLCFTNV

SEQ ID NO: 10029 - protein, 11 aa, Severe acute respiratory syndrome-related coronavirus
  REGION 1..11: note = Table B: HLA-DQA1*03:02-B1*03:03L HLA-DQA1*05:01-B1*03:01L HLA-DRB1*04:03L HLA-DQA1*01-B1*05L HLA-DQA1*05:01-B1*02:01L
  source 1..11: note = Severe acute respiratory syndrome coronavirus 2
TNVYADSFVIR

SEQ ID NO: 10030 - protein, 10 aa, Severe acute respiratory syndrome-related coronavirus
  REGION 1..10: note = Table B: HLA-DQA1*03:02-B1*03:03L HLA-DQA1*01-B1*05L HLA-DQA1*05:01-B1*02:01L HLA-DQA1*03:01-B1*03:02L HLA-DQA1*01:03-B1*06:01L HLA-DQA1*02:01-B1*03:03L
  source 1..10: note = Severe acute respiratory syndrome coronavirus 2
ADSFVIRGDE

SEQ ID NO: 10031 - protein, 11 aa, Severe acute respiratory syndrome-related coronavirus
  REGION 1..11: note = Table B: HLA-DQA1*03:02-B1*03:03L HLA-DQA1*05:05-B1*03:19L
  source 1..11: note = Severe acute respiratory syndrome coronavirus 2
FVIRGDEVRQI

SEQ ID NO: 10032 - protein, 13 aa, Severe acute respiratory syndrome-related coronavirus
  REGION 1..13: note = Table B: HLA-DQA1*03:02-B1*03:03L HLA-DRB1*04:01L HLA-DRB1*13:02L HLA-DRB1*13:03L HLA-DRB1*04:04L HLA-DRB1*04:05L HLA-DRB4*03:01NL HLA-DRB1*08:04L HLA-DRB1*08:77L HLA-DRB3*02:01L HLA-DPA1*01:03-B1*03:01L HLA-DPA1*03:01-B1*04:02L
  REGION 1..13: note = CONT. FROM ABOVE: HLA-DRB1*03:01L HLA-DRB1*11:03L HLA-DRB1*11:04 L HLA-DRB1*14:02L HLA-DQA1*01:01-B1*05:01L HLA-DRB1*08:01L HLA-D RB1*11:01L HLA-DQA1*05:05-B1*03:19L HLA-DQA1*05:01-B1*02:01L HLA -DRB1*04:10L HLA-DRB1*12:01L HLA-DRB3*01:01L
  REGION 1..13: note = CONT. FROM ABOVE: HLA-DPA1*02:01-B1*13:01L HLA-DRB1*14:54L HLA-D RB1*14:17L HLA-DPA1*01:02-B1*04:01L HLA-DRB1*10:01L HLA-DRB1*04: 08L HLA-DRB1*08:03L HLA-DRB1*15:03L
  source 1..13: note = Severe acute respiratory syndrome coronavirus 2
VIRGDEVRQIAPG

SEQ ID NO: 10033 - protein, 11 aa, Severe acute respiratory syndrome-related coronavirus
  REGION 1..11: note = Table B: HLA-DQA1*03:02-B1*03:03L HLA-DRB1*04:03L HLA-DRB1*04:02L HLA-DQA1*05:01-B1*02:01L HLA-DQA1*03:01-B1*03:02L HLA-DRB1*14:17L HLA-DQA1*02:01-B1*03:03L
  source 1..11: note = Severe acute respiratory syndrome coronavirus 2
DEVRQIAPGQT

SEQ ID NO: 10034 - protein, 11 aa, Severe acute respiratory syndrome-related coronavirus
  REGION 1..11: note = Table B: HLA-DQA1*03:02-B1*03:03L HLA-DRB1*04:02L HLA-DRB1*14:17L HLA-DQA1*02:01-B1*03:03L
  source 1..11: note = Severe acute respiratory syndrome coronavirus 2
EVRQIAPGQTG

SEQ ID NO: 10035 - protein, 10 aa, Severe acute respiratory syndrome-related coronavirus
  REGION 1..10: note = Table B: HLA-DQA1*03:02-B1*03:03L HLA-DQA1*05:01-B1*03:01L HLA-DRB1*04:03L HLA-DRB1*13:03L HLA-DQA1*01:02-B1*06:02L HLA-DRB1*01:02L HLA-DPA1*03:01-B1*04:02L HLA-DRB1*14:01L HLA-DRB1*14:02L HLA-DQA1*01-B1*05L HLA-DQA1*05:05-B1*03:19L
  REGION 1..10: note = CONT. FROM ABOVE: HLA-DQA1*05:01-B1*02:01L HLA-DPA1*01:03-B1*04: 01L HLA-DQA1*05:05-B1*03:116L HLA-DRB1*09:01L HLA-DPA1*01:03-B1* 04:02L HLA-DRB1*12:01L HLA-DPA1*02:01-B1*13:01L HLA-DPA1*03:01-B 1*105:01L HLA-DQA1*03:01-B1*03:02L HLA-DPA1*01:03-B1*104:01L
  REGION 1..10: note = CONT. FROM ABOVE: HLA-DPA1*01:02-B1*04:01L HLA-DRB1*10:01L HLA-D RB1*16:01L HLA-DQA1*01:03-B1*06:01L HLA-DRB1*08:03L HLA-DQA1*02: 01-B1*03:03L HLA-DRB1*15:03L
  source 1..10: note = Severe acute respiratory syndrome coronavirus 2
QIAPGQTGKI

SEQ ID NO: 10036 - protein, 10 aa, Severe acute respiratory syndrome-related coronavirus
  REGION 1..10: note = Table B: HLA-DQA1*03:02-B1*03:03L HLA-DQA1*05:01-B1*03:01L HLA-DRB1*04:03L HLA-DRB1*13:03L HLA-DRB1*04:02L HLA-DQA1*05:05-B1*03:19L HLA-DQA1*03:01-B1*03:02L HLA-DQA1*05:05-B1*03:01L HLA-DQA1*01:03-B1*06:01L
  REGION 1..10: note = CONT. FROM ABOVE: HLA-DQA1*02:01-B1*03:03L
  source 1..10: note = Severe acute respiratory syndrome coronavirus 2
IAPGQTGKIA

SEQ ID NO: 10037 - protein, 12 aa, Severe acute respiratory syndrome-related coronavirus
  REGION 1..12: note = Table B: HLA-DQA1*03:02-B1*03:03L HLA-DRB1*04:03L HLA-DRB1*04:02L HLA-DRB1*01:02L HLA-DPA1*01:03-B1*03:01L HLA-DQA1*01:01-B1*05:01L HLA-DRB1*08:01L HLA-DRB1*12:01L HLA-DRB1*16:01L HLA-DRB1*04:08L
  source 1..12: note = Severe acute respiratory syndrome coronavirus 2
APGQTGKIADYN

SEQ ID NO: 10038 - protein, 10 aa, Severe acute respiratory syndrome-related coronavirus
  REGION 1..10: note = Table B: HLA-DQA1*03:02-B1*03:03L HLA-DRB1*04:03L HLA-DRB1*04:02L HLA-DQA1*01-B1*05L HLA-DQA1*05:01-B1*02:01L HLA-DQA1*03:01-B1*03:02L HLA-DPA1*01:02-B1*04:01L HLA-DRB1*16:01L HLA-DQA1*02:01-B1*03:03L
  source 1..10: note = Severe acute respiratory syndrome coronavirus 2
ADYNYKLPDD

SEQ ID NO: 10039 - protein, 10 aa, Severe acute respiratory syndrome-related coronavirus
  REGION 1..10: note = Table B: HLA-DQA1*03:02-B1*03:03L HLA-DRB1*04:03L HLA-DRB1*04:05L HLA-DQA1*01:02-B1*06:02L HLA-DQA1*01-B1*05L HLA-DQA1*05:05-B1*03:19L HLA-DQA1*05:01-B1*02:01L HLA-DPA1*02:01-B1*13:01L HLA-DPA1*03:01-B1*105:01L
  REGION 1..10: note = CONT. FROM ABOVE: HLA-DQA1*01:03-B1*06:01L HLA-DQA1*02:01-B1*03: 03L HLA-DRB1*15:03L
  source 1..10: note = Severe acute respiratory syndrome coronavirus 2
DYNYKLPDDF

SEQ ID NO: 10040 - protein, 11 aa, Severe acute respiratory syndrome-related coronavirus
  REGION 1..11: note = Table B: HLA-DQA1*03:02-B1*03:03L HLA-DRB1*04:02L HLA-DQA1*05:01-B1*02:01L HLA-DQA1*02:01-B1*03:03L
  source 1..11: note = Severe acute respiratory syndrome coronavirus 2
YNYKLPDDFTG

SEQ ID NO: 10041 - protein, 15 aa, Severe acute respiratory syndrome-related coronavirus
  REGION 1..15: note = Table B: HLA-DQA1*03:02-B1*03:03L HLA-DRB1*04:03L HLA-DRB1*01:03L HLA-DRB1*04:05L HLA-DRB1*01:02L HLA-DPA1*01:03-B1*03:01L HLA-DRB1*08:01L HLA-DQA1*05:01-B1*02:01L HLA-DPA1*01:03-B1*04:02L
  REGION 1..15: note = CONT. FROM ABOVE: HLA-DRB1*12:01L HLA-DPA1*02:01-B1*13:01L HLA-D QA1*03:01-B1*03:02L HLA-DPA1*01:03-B1*104:01L HLA-DRB1*16:01L HL A-DRB1*04:08L HLA-DRB1*15:03L
  source 1..15: note = Severe acute respiratory syndrome coronavirus 2
LPDDFTGCVIAWNSN

SEQ ID NO: 10042 - protein, 13 aa, Severe acute respiratory syndrome-related coronavirus
  REGION 1..13: note = Table B: HLA-DQA1*03:02-B1*03:03L
  source 1..13: note = Severe acute respiratory syndrome coronavirus 2
DFTGCVIAWNSNN

SEQ ID NO: 10043 - protein, 10 aa, Severe acute respiratory syndrome-related coronavirus
  REGION 1..10: note = Table B: HLA-DQA1*03:02-B1*03:03L HLA-DRB1*04:03L HLA-DRB1*04:02L HLA-DRB1*04:05L HLA-DQA1*01:02-B1*06:02L HLA-DRB1*01:02L HLA-DRB4*03:01NL HLA-DPA1*03:01-B1*04:02L HLA-DQA1*01-B1*05L HLA-DQA1*05:01-B1*02:01L HLA-DRB1*04:10L
  REGION 1..10: note = CONT. FROM ABOVE: HLA-DRB1*12:01L HLA-DPA1*03:01-B1*105:01L HLA- DQA1*03:01-B1*03:02L HLA-DRB1*14:17L HLA-DRB1*16:01L HLA-DQA1*01 :03-B1*06:01L HLA-DQA1*02:01-B1*03:03L HLA-DRB1*15:03L
  source 1..10: note = Severe acute respiratory syndrome coronavirus 2
VIAWNSNNLD

SEQ ID NO: 10044 - protein, 11 aa, Severe acute respiratory syndrome-related coronavirus
  REGION 1..11: note = Table B: HLA-DQA1*03:02-B1*03:03L HLA-DQA1*05:01-B1*03:01L HLA-DRB1*04:01L HLA-DRB1*13:02L HLA-DRB1*13:03L HLA-DRB1*01:03L HLA-DRB1*04:04L HLA-DQA1*01:02-B1*06:02L HLA-DRB1*01:02L HLA-DRB4*03:01NL HLA-DRB1*08:04L HLA-DRB1*08:77L HLA-DRB1*14:01L
  REGION 1..11: note = CONT. FROM ABOVE: HLA-DRB1*11:03L HLA-DRB1*11:04L HLA-DRB1*08:01 L HLA-DQA1*05:01-B1*02:01L HLA-DRB1*12:01L HLA-DRB1*12:02L HLA-D PA1*03:01-B1*105:01L HLA-DRB1*14:54L HLA-DQA1*05:05-B1*03:01L HL A-DRB1*10:01L HLA-DRB1*16:01L HLA-DQA1*01:03-B1*06:01L
  REGION 1..11: note = CONT. FROM ABOVE: HLA-DRB1*04:08L HLA-DRB1*08:03L HLA-DQA1*02:01 -B1*03:03L HLA-DRB1*15:03L
  source 1..11: note = Severe acute respiratory syndrome coronavirus 2
IAWNSNNLDSK

SEQ ID NO: 10045 - protein, 12 aa, Severe acute respiratory syndrome-related coronavirus
  REGION 1..12: note = Table B: HLA-DQA1*03:02-B1*03:03L HLA-DQA1*05:01-B1*03:01L HLA-DQA1*05:01-B1*02:01L HLA-DQA1*01:03-B1*06:01L
  source 1..12: note = Severe acute respiratory syndrome coronavirus 2
NSNNLDSKVGGN

SEQ ID NO: 10046 - protein, 10 aa, Severe acute respiratory syndrome-related coronavirus
  REGION 1..10: note = Table B: HLA-DQA1*03:02-B1*03:03L HLA-DQA1*05:01-B1*03:01L HLA-DRB1*04:01L HLA-DRB1*04:03L HLA-DRB1*13:02L HLA-DRB1*13:03M HLA-DRB1*01:03M HLA-DRB1*04:02L HLA-DRB1*04:05L HLA-DQA1*01:02-B1*06:02M HLA-DRB1*01:01L HLA-DRB4*03:01NL
  REGION 1..10: note = CONT. FROM ABOVE: HLA-DRB1*08:77M HLA-DPA1*01:03-B1*03:01M HLA-D PA1*03:01-B1*04:02L HLA-DRB1*03:01M HLA-DRB1*14:01L HLA-DRB1*11: 02M HLA-DRB1*11:03M HLA-DRB1*11:04L HLA-DRB1*14:02M HLA-DRB1*11: 01L HLA-DRB5*01:01L HLA-DQA1*01-B1*05M HLA-DQA1*05:05-B1*03:19H
  REGION 1..10: note = CONT. FROM ABOVE: HLA-DQA1*05:01-B1*02:01H HLA-DRB4*01:01M HLA-D PA1*01:03-B1*04:01M HLA-DQA1*05:05-B1*03:116L HLA-DPA1*01:03-B1* 04:02M HLA-DRB1*12:01M HLA-DPA1*02:01-B1*13:01L HLA-DPA1*03:01-B 1*105:01L HLA-DQA1*03:01-B1*03:02L HLA-DRB1*14:54L
  REGION 1..10: note = CONT. FROM ABOVE: HLA-DPA1*01:03-B1*104:01M HLA-DQA1*05:05-B1*03 :01L HLA-DRB1*14:17L HLA-DPA1*01:02-B1*04:01L HLA-DRB1*10:01M HL A-DRB1*16:01M HLA-DQA1*01:03-B1*06:01L HLA-DRB1*08:02L HLA-DQA1* 02:01-B1*03:03L HLA-DRB1*15:03L
  source 1..10: note = Severe acute respiratory syndrome coronavirus 2
NLDSKVGGNY

SEQ ID NO: 10047 - protein, 10 aa, Severe acute respiratory syndrome-related coronavirus
  REGION 1..10: note = Table B: HLA-DQA1*03:02-B1*03:03L HLA-DQA1*05:01-B1*03:01L HLA-DRB1*04:03L HLA-DRB1*13:03L HLA-DRB1*04:02L HLA-DQA1*01-B1*05L HLA-DQA1*05:05-B1*03:19L HLA-DQA1*05:01-B1*02:01L HLA-DQA1*03:01-B1*03:02L
  REGION 1..10: note = CONT. FROM ABOVE: HLA-DRB1*14:17L HLA-DPA1*01:02-B1*04:01L HLA-D RB1*16:01L HLA-DQA1*01:03-B1*06:01L HLA-DQA1*02:01-B1*03:03L
  source 1..10: note = Severe acute respiratory syndrome coronavirus 2
LDSKVGGNYN

SEQ ID NO: 10048 - protein, 10 aa, Severe acute respiratory syndrome-related coronavirus
  REGION 1..10: note = Table B: HLA-DQA1*03:02-B1*03:03L HLA-DQA1*05:01-B1*03:01L HLA-DRB1*04:03L HLA-DRB1*13:02L HLA-DRB1*13:03M HLA-DRB1*01:03L HLA-DQA1*01:02-B1*06:02M HLA-DRB4*03:01NL HLA-DRB1*08:77L HLA-DPA1*01:03-B1*03:01L HLA-DPA1*03:01-B1*04:02L
  REGION 1..10: note = CONT. FROM ABOVE: HLA-DRB1*03:01L HLA-DRB1*14:01L HLA-DRB1*14:02 L HLA-DRB1*11:01L HLA-DRB5*01:01L HLA-DQA1*01-B1*05L HLA-DQA1*05 :05-B1*03:19M HLA-DQA1*05:01-B1*02:01M HLA-DRB4*01:01L HLA-DPA1* 01:03-B1*04:01M HLA-DQA1*05:05-B1*03:116L
  REGION 1..10: note = CONT. FROM ABOVE: HLA-DPA1*01:03-B1*04:02L HLA-DRB1*12:01L HLA-D PA1*02:01-B1*13:01L HLA-DPA1*03:01-B1*105:01M HLA-DPA1*01:03-B1* 104:01L HLA-DQA1*05:05-B1*03:01L HLA-DPA1*01:02-B1*04:01L HLA-DR B1*10:01L HLA-DRB1*16:01L HLA-DQA1*01:03-B1*06:01L
  REGION 1..10: note = CONT. FROM ABOVE: HLA-DRB1*08:02L HLA-DQA1*02:01-B1*03:03L HLA-D RB1*15:03L
  source 1..10: note = Severe acute respiratory syndrome coronavirus 2
DSKVGGNYNY

SEQ ID NO: 10049 - protein, 10 aa, Severe acute respiratory syndrome-related coronavirus
  REGION 1..10: note = Table B: HLA-DQA1*03:02-B1*03:03L HLA-DQA1*05:05-B1*03:19L HLA-DQA1*01:03-B1*06:01L
  source 1..10: note = Severe acute respiratory syndrome coronavirus 2
PFERDISTEI

SEQ ID NO: 10050 - protein, 10 aa, Severe acute respiratory syndrome-related coronavirus
  REGION 1..10: note = Table B: HLA-DQA1*03:02-B1*03:03L
  source 1..10: note = Severe acute respiratory syndrome coronavirus 2
RDISTEIYQA

SEQ ID NO: 10051 - protein, 13 aa, Severe acute respiratory syndrome-related coronavirus
  REGION 1..13: note = Table B: HLA-DQA1*03:02-B1*03:03L HLA-DQA1*05:01-B1*03:01L HLA-DRB1*04:03L HLA-DQA1*01:02-B1*06:02L HLA-DQA1*01-B1*05L HLA-DQA1*05:05-B1*03:19L HLA-DQA1*05:01-B1*02:01L HLA-DPA1*03:01-B1*105:01L HLA-DQA1*05:05-B1*03:01L
  REGION 1..13: note = CONT. FROM ABOVE: HLA-DQA1*02:01-B1*03:03L
  source 1..13: note = Severe acute respiratory syndrome coronavirus 2
DISTEIYQAGSTP

SEQ ID NO: 10052 - protein, 11 aa, Severe acute respiratory syndrome-related coronavirus
  REGION 1..11: note = Table B: HLA-DQA1*03:02-B1*03:03L HLA-DQA1*05:01-B1*03:01L HLA-DRB1*04:03L HLA-DRB1*04:02L HLA-DQA1*05:05-B1*03:19L HLA-DQA1*03:01-B1*03:02L HLA-DQA1*05:05-B1*03:01L HLA-DQA1*02:01-B1*03:03L
  source 1..11: note = Severe acute respiratory syndrome coronavirus 2
EIYQAGSTPCN

SEQ ID NO: 10053 - protein, 12 aa, Severe acute respiratory syndrome-related coronavirus
  REGION 1..12: note = Table B: HLA-DQA1*03:02-B1*03:03L HLA-DQA1*05:01-B1*03:01L HLA-DQA1*01:02-B1*06:02L HLA-DQA1*05:05-B1*03:19L HLA-DQA1*05:05-B1*03:01L HLA-DQA1*01:03-B1*06:01L HLA-DQA1*02:01-B1*03:03L
  source 1..12: note = Severe acute respiratory syndrome coronavirus 2
YQAGSTPCNGVE

SEQ ID NO: 10054 - protein, 14 aa, Severe acute respiratory syndrome-related coronavirus
  REGION 1..14: note = Table B: HLA-DQA1*03:02-B1*03:03L HLA-DPA1*03:01-B1*105:01L HLA-DQA1*02:01-B1*03:03L
  source 1..14: note = Severe acute respiratory syndrome coronavirus 2
QAGSTPCNGVEGFN

SEQ ID NO: 10055 - protein, 13 aa, Severe acute respiratory syndrome-related coronavirus
  REGION 1..13: note = Table B: HLA-DQA1*03:02-B1*03:03L HLA-DQA1*05:01-B1*03:01L HLA-DRB1*01:03L HLA-DRB1*04:02L HLA-DRB1*04:05L HLA-DQA1*01:02-B1*06:02L HLA-DRB4*03:01NL HLA-DQA1*05:05-B1*03:19L HLA-DQA1*05:01-B1*02:01L
  REGION 1..13: note = CONT. FROM ABOVE: HLA-DPA1*01:03-B1*04:02L HLA-DRB1*12:01L HLA-D PA1*01:03-B1*02:01L HLA-DQA1*05:05-B1*03:01L HLA-DRB1*14:17L HLA -DRB1*16:01L HLA-DQA1*01:03-B1*06:01L HLA-DRB1*04:08L
  source 1..13: note = Severe acute respiratory syndrome coronavirus 2
FPLQSYGFQPTNG

SEQ ID NO: 10056 - protein, 11 aa, Severe acute respiratory syndrome-related coronavirus
  REGION 1..11: note = Table B: HLA-DQA1*03:02-B1*03:03L
  source 1..11: note = Severe acute respiratory syndrome coronavirus 2
SYGFQPTNGVG

SEQ ID NO: 10057 - protein, 10 aa, Severe acute respiratory syndrome-related coronavirus
  REGION 1..10: note = Table B: HLA-DQA1*03:02-B1*03:03L HLA-DQA1*05:01-B1*03:01L HLA-DRB1*04:01L HLA-DRB1*04:03L HLA-DRB1*13:02L HLA-DRB1*13:03L HLA-DRB1*01:03L HLA-DRB1*04:05L HLA-DQA1*01:02-B1*06:02M HLA-DRB1*01:01L HLA-DRB4*03:01NL HLA-DRB1*08:77L
  REGION 1..10: note = CONT. FROM ABOVE: HLA-DPA1*01:03-B1*03:01L HLA-DPA1*03:01-B1*04: 02L HLA-DRB1*03:01L HLA-DRB1*14:01L HLA-DRB1*11:02L HLA-DRB1*14: 02L HLA-DRB1*11:01L HLA-DQA1*01-B1*05L HLA-DQA1*05:05-B1*03:19L HLA-DQA1*05:01-B1*02:01L HLA-DRB4*01:01L
  REGION 1..10: note = CONT. FROM ABOVE: HLA-DPA1*01:03-B1*04:01L HLA-DQA1*05:05-B1*03: 116L HLA-DPA1*01:03-B1*04:02L HLA-DRB1*12:01L HLA-DPA1*02:01-B1* 13:01L HLA-DPA1*03:01-B1*105:01L HLA-DQA1*03:01-B1*03:02L HLA-DP A1*01:03-B1*104:01L HLA-DQA1*05:05-B1*03:01L
  REGION 1..10: note = CONT. FROM ABOVE: HLA-DPA1*01:02-B1*04:01L HLA-DRB1*10:01L HLA-D RB1*16:01L HLA-DQA1*01:03-B1*06:01L HLA-DRB1*08:02L HLA-DQA1*02: 01-B1*03:03L HLA-DRB1*15:03L
  source 1..10: note = Severe acute respiratory syndrome coronavirus 2
GFQPTNGVGY

SEQ ID NO: 10058 - protein, 12 aa, Severe acute respiratory syndrome-related coronavirus
  REGION 1..12: note = Table B: HLA-DQA1*03:02-B1*03:03L HLA-DQA1*05:01-B1*03:01L HLA-DRB1*04:03L HLA-DPA1*01:03-B1*03:01L HLA-DRB1*12:01L HLA-DPA1*03:01-B1*105:01L HLA-DQA1*03:01-B1*03:02L HLA-DQA1*05:05-B1*03:01L HLA-DRB1*16:01L
  REGION 1..12: note = CONT. FROM ABOVE: HLA-DQA1*01:03-B1*06:01L HLA-DQA1*02:01-B1*03: 03L HLA-DRB1*15:03L
  source 1..12: note = Severe acute respiratory syndrome coronavirus 2
FQPTNGVGYQPY

SEQ ID NO: 10059 - protein, 11 aa, Severe acute respiratory syndrome-related coronavirus
  REGION 1..11: note = Table B: HLA-DQA1*03:02-B1*03:03L HLA-DQA1*05:01-B1*03:01L HLA-DRB1*04:03L HLA-DRB1*01:03L HLA-DRB1*12:01L HLA-DPA1*03:01-B1*105:01L HLA-DQA1*05:05-B1*03:01L HLA-DPA1*01:02-B1*04:01L HLA-DQA1*01:03-B1*06:01L
  REGION 1..11: note = CONT. FROM ABOVE: HLA-DQA1*02:01-B1*03:03L
  source 1..11: note = Severe acute respiratory syndrome coronavirus 2
PTNGVGYQPYR

SEQ ID NO: 10060 - protein, 10 aa, Severe acute respiratory syndrome-related coronavirus
  REGION 1..10: note = Table B: HLA-DQA1*03:02-B1*03:03L HLA-DQA1*01-B1*05L HLA-DPA1*02:01-B1*13:01L HLA-DQA1*03:01-B1*03:02L HLA-DPA1*01:02-B1*04:01L HLA-DRB1*16:01L HLA-DQA1*01:03-B1*06:01L HLA-DQA1*02:01-B1*03:03L
  REGION 1..10: note = CONT. FROM ABOVE: HLA-DRB1*15:03L
  source 1..10: note = Severe acute respiratory syndrome coronavirus 2
VGYQPYRVVV

SEQ ID NO: 10061 - protein, 10 aa, Severe acute respiratory syndrome-related coronavirus
  REGION 1..10: note = Table B: HLA-DQA1*03:02-B1*03:03L HLA-DQA1*05:01-B1*03:01L HLA-DRB1*04:03L HLA-DRB1*04:05L HLA-DQA1*01:02-B1*06:02L HLA-DPA1*03:01-B1*04:02L HLA-DQA1*01-B1*05L HLA-DQA1*05:05-B1*03:19L HLA-DQA1*05:01-B1*02:01L
  REGION 1..10: note = CONT. FROM ABOVE: HLA-DPA1*02:01-B1*13:01L HLA-DPA1*03:01-B1*105 :01L HLA-DQA1*03:01-B1*03:02L HLA-DPA1*01:02-B1*04:01L HLA-DRB1* 16:01L HLA-DQA1*01:03-B1*06:01L HLA-DQA1*02:01-B1*03:03L HLA-DRB 1*15:03L
  source 1..10: note = Severe acute respiratory syndrome coronavirus 2
GYQPYRVVVL

SEQ ID NO: 10062 - protein, 10 aa, Severe acute respiratory syndrome-related coronavirus
  REGION 1..10: note = Table B: HLA-DQA1*03:02-B1*03:03L HLA-DQA1*05:01-B1*03:01L HLA-DRB1*04:03L HLA-DRB1*04:02L HLA-DRB1*04:05L HLA-DRB4*03:01NL HLA-DQA1*01-B1*05L HLA-DQA1*05:01-B1*02:01L HLA-DRB1*12:01L HLA-DPA1*03:01-B1*105:01L HLA-DQA1*03:01-B1*03:02L
  REGION 1..10: note = CONT. FROM ABOVE: HLA-DRB1*14:17L HLA-DPA1*01:02-B1*04:01L HLA-D RB1*16:01L HLA-DQA1*02:01-B1*03:03L HLA-DRB1*15:03L
  source 1..10: note = Severe acute respiratory syndrome coronavirus 2
SFELLHAPAT

SEQ ID NO: 10063 - protein, 10 aa, Severe acute respiratory syndrome-related coronavirus
  REGION 1..10: note = Table B: HLA-DQA1*03:02-B1*03:03M HLA-DQA1*05:01-B1*03:01L HLA-DRB1*13:02L HLA-DQA1*01:02-B1*06:02L HLA-DRB1*01:02L HLA-DRB1*08:77L HLA-DPA1*03:01-B1*04:02L HLA-DRB1*11:02M HLA-DRB1*14:02L HLA-DRB1*11:01L HLA-DQA1*05:05-B1*03:19H
  REGION 1..10: note = CONT. FROM ABOVE: HLA-DQA1*05:01-B1*02:01L HLA-DRB4*01:01L HLA-D PA1*01:03-B1*04:01L HLA-DQA1*05:05-B1*03:116L HLA-DRB1*09:01L HL A-DPA1*01:03-B1*04:02L HLA-DRB1*12:01L HLA-DPA1*02:01-B1*13:01L HLA-DPA1*03:01-B1*105:01L HLA-DQA1*03:01-B1*03:02L
  REGION 1..10: note = CONT. FROM ABOVE: HLA-DPA1*01:03-B1*104:01M HLA-DPA1*01:02-B1*04 :01L HLA-DRB1*07:01L HLA-DRB1*10:01L HLA-DRB1*16:01L HLA-DQA1*01 :03-B1*06:01L HLA-DRB1*08:03L HLA-DQA1*02:01-B1*03:03L HLA-DRB1* 15:03L
  source 1..10: note = Severe acute respiratory syndrome coronavirus 2
FELLHAPATV

SEQ ID NO: 10064 - protein, 10 aa, Severe acute respiratory syndrome-related coronavirus
  REGION 1..10: note = Table B: HLA-DQA1*03:02-B1*03:03L HLA-DQA1*05:05-B1*03:19L
  source 1..10: note = Severe acute respiratory syndrome coronavirus 2
NFNGLTGTGV

SEQ ID NO: 10065 - protein, 12 aa, Severe acute respiratory syndrome-related coronavirus
  REGION 1..12: note = Table B: HLA-DQA1*03:02-B1*03:03L HLA-DQA1*05:01-B1*03:01L HLA-DQA1*05:05-B1*03:19L HLA-DPA1*03:01-B1*105:01L HLA-DQA1*03:01-B1*03:02L
  source 1..12: note = Severe acute respiratory syndrome coronavirus 2
GLTGTGVLTESN

SEQ ID NO: 10066 - protein, 11 aa, Severe acute respiratory syndrome-related coronavirus
  REGION 1..11: note = Table B: HLA-DQA1*03:02-B1*03:03L HLA-DRB1*04:03L HLA-DRB1*01:03L HLA-DRB1*04:02L HLA-DQA1*01:01-B1*05:01L HLA-DQA1*05:05-B1*03:19L HLA-DRB1*12:01L HLA-DPA1*03:01-B1*105:01L
  source 1..11: note = Severe acute respiratory syndrome coronavirus 2
TGTGVLTESNK

SEQ ID NO: 10067 - protein, 10 aa, Severe acute respiratory syndrome-related coronavirus
  REGION 1..10: note = Table B: HLA-DQA1*03:02-B1*03:03L HLA-DQA1*05:01-B1*03:01L HLA-DRB1*04:03L HLA-DRB1*13:02L HLA-DRB1*13:03L HLA-DRB1*01:03L HLA-DQA1*01:02-B1*06:02M HLA-DRB1*08:77L HLA-DPA1*01:03-B1*03:01L HLA-DPA1*03:01-B1*04:02L
  REGION 1..10: note = CONT. FROM ABOVE: HLA-DRB1*03:01L HLA-DRB1*14:01L HLA-DRB1*14:02 L HLA-DQA1*01-B1*05L HLA-DQA1*05:05-B1*03:19L HLA-DQA1*05:01-B1* 02:01L HLA-DRB4*01:01L HLA-DPA1*01:03-B1*04:01L HLA-DQA1*05:05-B 1*03:116L HLA-DPA1*01:03-B1*04:02L HLA-DRB1*12:01L
  REGION 1..10: note = CONT. FROM ABOVE: HLA-DPA1*02:01-B1*13:01L HLA-DPA1*03:01-B1*105 :01L HLA-DQA1*03:01-B1*03:02L HLA-DPA1*01:02-B1*04:01L HLA-DRB1* 10:01L HLA-DRB1*16:01L HLA-DQA1*01:03-B1*06:01L HLA-DRB1*08:02L HLA-DQA1*02:01-B1*03:03M HLA-DRB1*15:03L
  source 1..10: note = Severe acute respiratory syndrome coronavirus 2
GVLTESNKKF

SEQ ID NO: 10068 - protein, 10 aa, Severe acute respiratory syndrome-related coronavirus
  REGION 1..10: note = Table B: HLA-DQA1*03:02-B1*03:03L HLA-DQA1*05:05-B1*03:19L
  source 1..10: note = Severe acute respiratory syndrome coronavirus 2
TESNKKFLPF

SEQ ID NO: 10069 - protein, 15 aa, Severe acute respiratory syndrome-related coronavirus
  REGION 1..15: note = Table B: HLA-DQA1*03:02-B1*03:03L HLA-DQA1*05:05-B1*03:01L
  source 1..15: note = Severe acute respiratory syndrome coronavirus 2
ESNKKFLPFQQFGRD

SEQ ID NO: 10070 - protein, 18 aa, Severe acute respiratory syndrome-related coronavirus
  REGION 1..18: note = Table B: HLA-DQA1*03:02-B1*03:03L
  source 1..18: note = Severe acute respiratory syndrome coronavirus 2
SNKKFLPFQQFGRDIADT

SEQ ID NO: 10071 - protein, 14 aa, Severe acute respiratory syndrome-related coronavirus
  REGION 1..14: note = Table B: HLA-DQA1*03:02-B1*03:03L HLA-DQA1*05:01-B1*03:01L HLA-DRB1*13:02L HLA-DPA1*03:01-B1*04:02L HLA-DRB1*14:02L HLA-DQA1*05:05-B1*03:19L HLA-DQA1*05:01-B1*02:01L HLA-DPA1*01:03-B1*04:02L HLA-DRB3*01:01L
  REGION 1..14: note = CONT. FROM ABOVE: HLA-DPA1*02:01-B1*13:01L HLA-DPA1*03:01-B1*105 :01L HLA-DQA1*05:05-B1*03:01L HLA-DQA1*01:03-B1*06:01L HLA-DRB1* 08:02L
  source 1..14: note = Severe acute respiratory syndrome coronavirus 2
LPFQQFGRDIADTT

SEQ ID NO: 10072 - protein, 13 aa, Severe acute respiratory syndrome-related coronavirus
  REGION 1..13: note = Table B: HLA-DQA1*03:02-B1*03:03L HLA-DQA1*02:01-B1*03:03L
  source 1..13: note = Severe acute respiratory syndrome coronavirus 2
QQFGRDIADTTDA

SEQ ID NO: 10073 - protein, 10 aa, Severe acute respiratory syndrome-related coronavirus
  REGION 1..10: note = Table B: HLA-DQA1*03:02-B1*03:03L HLA-DQA1*05:05-B1*03:19L
  source 1..10: note = Severe acute respiratory syndrome coronavirus 2
RDIADTTDAV

SEQ ID NO: 10074 - protein, 11 aa, Severe acute respiratory syndrome-related coronavirus
  REGION 1..11: note = Table B: HLA-DQA1*03:02-B1*03:03L HLA-DRB1*04:03L HLA-DQA1*01-B1*05L HLA-DQA1*05:01-B1*02:01L HLA-DQA1*03:01-B1*03:02L HLA-DRB1*16:01L HLA-DQA1*01:03-B1*06:01L HLA-DQA1*02:01-B1*03:03L
  source 1..11: note = Severe acute respiratory syndrome coronavirus 2
IADTTDAVRDP

SEQ ID NO: 10075 - protein, 10 aa, Severe acute respiratory syndrome-related coronavirus
  REGION 1..10: note = Table B: HLA-DQA1*03:02-B1*03:03L HLA-DQA1*05:01-B1*03:01L HLA-DRB1*04:03L HLA-DRB1*04:02L HLA-DRB4*03:01NL HLA-DQA1*01:01-B1*05:01L HLA-DQA1*01-B1*05L HLA-DQA1*05:01-B1*02:01L HLA-DQA1*03:01-B1*03:02L
  REGION 1..10: note = CONT. FROM ABOVE: HLA-DQA1*05:05-B1*03:01L HLA-DRB1*14:17L HLA-D RB1*16:01L HLA-DQA1*01:03-B1*06:01L HLA-DQA1*02:01-B1*03:03L
  source 1..10: note = Severe acute respiratory syndrome coronavirus 2
DTTDAVRDPQ

SEQ ID NO: 10076 - protein, 10 aa, Severe acute respiratory syndrome-related coronavirus
  REGION 1..10: note = Table B: HLA-DQA1*03:02-B1*03:03L HLA-DQA1*05:01-B1*03:01L HLA-DRB1*04:03L HLA-DRB1*13:03L HLA-DRB1*01:03L HLA-DRB1*04:02L HLA-DRB1*04:05L HLA-DRB4*03:01NL HLA-DRB1*14:02L HLA-DQA1*01-B1*05L HLA-DQA1*05:01-B1*02:01L HLA-DRB1*12:01L
  REGION 1..10: note = CONT. FROM ABOVE: HLA-DQA1*03:01-B1*03:02L HLA-DRB1*14:54L HLA-D RB1*14:17L HLA-DRB1*16:01L HLA-DQA1*01:03-B1*06:01L HLA-DQA1*02: 01-B1*03:03L
  source 1..10: note = Severe acute respiratory syndrome coronavirus 2
TTDAVRDPQT

SEQ ID NO: 10077 - protein, 10 aa, Severe acute respiratory syndrome-related coronavirus
  REGION 1..10: note = Table B: HLA-DQA1*03:02-B1*03:03M HLA-DQA1*05:01-B1*03:01L HLA-DRB1*13:02L HLA-DRB1*13:03L HLA-DRB1*04:02L HLA-DRB1*08:77L HLA-DPA1*03:01-B1*04:02L HLA-DRB1*14:01L HLA-DRB1*08:01L HLA-DQA1*01-B1*05L HLA-DQA1*05:05-B1*03:19L
  REGION 1..10: note = CONT. FROM ABOVE: HLA-DQA1*05:01-B1*02:01L HLA-DPA1*01:03-B1*04: 01L HLA-DQA1*05:05-B1*03:116L HLA-DRB1*09:01L HLA-DPA1*01:03-B1* 04:02L HLA-DQA1*03:01-B1*03:02M HLA-DPA1*01:03-B1*104:01L HLA-DP A1*01:02-B1*04:01L HLA-DRB1*10:01L HLA-DRB1*16:01L
  REGION 1..10: note = CONT. FROM ABOVE: HLA-DQA1*02:01-B1*03:03L
  source 1..10: note = Severe acute respiratory syndrome coronavirus 2
TDAVRDPQTL

SEQ ID NO: 10078 - protein, 10 aa, Severe acute respiratory syndrome-related coronavirus
  REGION 1..10: note = Table B: HLA-DQA1*03:02-B1*03:03L HLA-DQA1*05:01-B1*03:01L HLA-DQA1*01:02-B1*06:02L HLA-DRB1*01:02L HLA-DPA1*03:01-B1*04:02L HLA-DRB1*14:01L HLA-DQA1*05:05-B1*03:19L HLA-DQA1*05:01-B1*02:01L
  REGION 1..10: note = CONT. FROM ABOVE: HLA-DQA1*05:05-B1*03:116L HLA-DPA1*02:01-B1*13 :01L HLA-DPA1*03:01-B1*105:01L HLA-DQA1*03:01-B1*03:02L HLA-DPA1 *01:03-B1*104:01L HLA-DPA1*01:02-B1*04:01L HLA-DRB1*16:01L HLA-D QA1*01:03-B1*06:01L HLA-DQA1*02:01-B1*03:03L HLA-DRB1*15:03L
  source 1..10: note = Severe acute respiratory syndrome coronavirus 2
AVRDPQTLEI

SEQ ID NO: 10079 - protein, 10 aa, Severe acute respiratory syndrome-related coronavirus
  REGION 1..10: note = Table B: HLA-DQA1*03:02-B1*03:03L HLA-DQA1*03:01-B1*03:02L
  source 1..10: note = Severe acute respiratory syndrome coronavirus 2
VRDPQTLEIL

SEQ ID NO: 10080 - protein, 12 aa, Severe acute respiratory syndrome-related coronavirus
  REGION 1..12: note = Table B: HLA-DQA1*03:02-B1*03:03L HLA-DQA1*01-B1*05L HLA-DQA1*05:01-B1*02:01L HLA-DQA1*03:01-B1*03:02L HLA-DQA1*01:03-B1*06:01L
  source 1..12: note = Severe acute respiratory syndrome coronavirus 2
DPQTLEILDITP

SEQ ID NO: 10081 - protein, 10 aa, Severe acute respiratory syndrome-related coronavirus
  REGION 1..10: note = Table B: HLA-DQA1*03:02-B1*03:03L HLA-DQA1*05:01-B1*03:01L HLA-DRB1*13:03L HLA-DQA1*01:02-B1*06:02M HLA-DRB1*01:02L HLA-DPA1*03:01-B1*04:02L HLA-DRB1*14:02L HLA-DQA1*05:05-B1*03:19L HLA-DQA1*05:01-B1*02:01L
  REGION 1..10: note = CONT. FROM ABOVE: HLA-DRB4*01:01L HLA-DPA1*01:03-B1*04:01L HLA-D QA1*05:05-B1*03:116L HLA-DPA1*02:01-B1*13:01L HLA-DPA1*03:01-B1* 105:01M HLA-DQA1*01:03-B1*06:01L HLA-DQA1*02:01-B1*03:03L HLA-DR B1*15:03L
  source 1..10: note = Severe acute respiratory syndrome coronavirus 2
EILDITPCSF

SEQ ID NO: 10082 - protein, 15 aa, Severe acute respiratory syndrome-related coronavirus
  REGION 1..15: note = Table B: HLA-DQA1*03:02-B1*03:03L HLA-DQA1*05:01-B1*03:01L HLA-DQA1*01:02-B1*06:02L HLA-DQA1*01:03-B1*06:01L
  source 1..15: note = Severe acute respiratory syndrome coronavirus 2
ITPCSFGGVSVITPG

SEQ ID NO: 10083 - protein, 10 aa, Severe acute respiratory syndrome-related coronavirus
  REGION 1..10: note = Table B: HLA-DQA1*03:02-B1*03:03L HLA-DQA1*03:01-B1*03:02L HLA-DQA1*01:03-B1*06:01L HLA-DQA1*02:01-B1*03:03L
  source 1..10: note = Severe acute respiratory syndrome coronavirus 2
GVSVITPGTN

SEQ ID NO: 10084 - protein, 13 aa, Severe acute respiratory syndrome-related coronavirus
  REGION 1..13: note = Table B: HLA-DQA1*03:02-B1*03:03L HLA-DRB1*04:05L HLA-DRB4*03:01NL HLA-DRB1*04:10L HLA-DRB1*14:54L HLA-DQA1*05:05-B1*03:01L HLA-DQA1*02:01-B1*03:03L
  source 1..13: note = Severe acute respiratory syndrome coronavirus 2
VSVITPGTNTSNQ

SEQ ID NO: 10085 - protein, 12 aa, Severe acute respiratory syndrome-related coronavirus
  REGION 1..12: note = Table B: HLA-DQA1*03:02-B1*03:03L HLA-DRB4*03:01NL HLA-DQA1*02:01-B1*03:03L
  source 1..12: note = Severe acute respiratory syndrome coronavirus 2
VITPGTNTSNQV

SEQ ID NO: 10086 - protein, 12 aa, Severe acute respiratory syndrome-related coronavirus
  REGION 1..12: note = Table B: HLA-DQA1*03:02-B1*03:03L HLA-DRB1*04:03L HLA-DQA1*05:01-B1*02:01L HLA-DQA1*03:01-B1*03:02L HLA-DQA1*02:01-B1*03:03L
  source 1..12: note = Severe acute respiratory syndrome coronavirus 2
ITPGTNTSNQVA

SEQ ID NO: 10087 - protein, 13 aa, Severe acute respiratory syndrome-related coronavirus
  REGION 1..13: note = Table B: HLA-DQA1*03:02-B1*03:03L HLA-DQA1*05:01-B1*03:01L HLA-DQA1*01:02-B1*06:02L HLA-DQA1*05:05-B1*03:19L HLA-DQA1*05:01-B1*02:01L HLA-DQA1*03:01-B1*03:02L HLA-DQA1*05:05-B1*03:01L HLA-DQA1*01:03-B1*06:01L
  REGION 1..13: note = CONT. FROM ABOVE: HLA-DQA1*02:01-B1*03:03L
  source 1..13: note = Severe acute respiratory syndrome coronavirus 2
TPGTNTSNQVAVL

SEQ ID NO: 10088 - protein, 10 aa, Severe acute respiratory syndrome-related coronavirus
  REGION 1..10: note = Table B: HLA-DQA1*03:02-B1*03:03L HLA-DQA1*01:02-B1*06:02L HLA-DQA1*01-B1*05L HLA-DQA1*05:01-B1*02:01L HLA-DPA1*03:01-B1*105:01L HLA-DQA1*03:01-B1*03:02L HLA-DPA1*01:02-B1*04:01L HLA-DQA1*01:03-B1*06:01L
  REGION 1..10: note = CONT. FROM ABOVE: HLA-DQA1*02:01-B1*03:03L
  source 1..10: note = Severe acute respiratory syndrome coronavirus 2
QVAVLYQDVN

SEQ ID NO: 10089 - protein, 15 aa, Severe acute respiratory syndrome-related coronavirus
  REGION 1..15: note = Table B: HLA-DQA1*03:02-B1*03:03L HLA-DRB1*04:01L HLA-DRB1*13:03L HLA-DRB1*04:04L HLA-DRB1*08:77L HLA-DRB1*03:01L HLA-DRB1*11:03L HLA-DQA1*05:05-B1*03:19L HLA-DRB1*04:10L HLA-DRB3*01:01L HLA-DQA1*05:05-B1*03:01L HLA-DRB1*10:01L
  source 1..15: note = Severe acute respiratory syndrome coronavirus 2
VAVLYQDVNCTEVPV

SEQ ID NO: 10090 - protein, 12 aa, Severe acute respiratory syndrome-related coronavirus
  REGION 1..12: note = Table B: HLA-DQA1*03:02-B1*03:03L HLA-DRB1*04:03L HLA-DQA1*05:05-B1*03:19L HLA-DQA1*05:01-B1*02:01L
  source 1..12: note = Severe acute respiratory syndrome coronavirus 2
DVNCTEVPVAIH

SEQ ID NO: 10091 - protein, 10 aa, Severe acute respiratory syndrome-related coronavirus
  REGION 1..10: note = Table B: HLA-DQA1*03:02-B1*03:03L HLA-DQA1*05:05-B1*03:19L HLA-DQA1*03:01-B1*03:02L
  source 1..10: note = Severe acute respiratory syndrome coronavirus 2
TEVPVAIHAD

SEQ ID NO: 10092 - protein, 10 aa, Severe acute respiratory syndrome-related coronavirus
  REGION 1..10: note = Table B: HLA-DQA1*03:02-B1*03:03L HLA-DQA1*03:01-B1*03:02L HLA-DQA1*01:03-B1*06:01L HLA-DQA1*02:01-B1*03:03L
  source 1..10: note = Severe acute respiratory syndrome coronavirus 2
EVPVAIHADQ

SEQ ID NO: 10093 - protein, 10 aa, Severe acute respiratory syndrome-related coronavirus
  REGION 1..10: note = Table B: HLA-DQA1*03:02-B1*03:03L HLA-DQA1*05:01-B1*03:01L HLA-DRB1*13:03L HLA-DPA1*03:01-B1*04:02L HLA-DRB1*14:01L HLA-DQA1*01-B1*05L HLA-DQA1*05:01-B1*02:01L HLA-DQA1*03:01-B1*03:02L HLA-DPA1*01:02-B1*04:01L
  source 1..10: note = Severe acute respiratory syndrome coronavirus 2
VPVAIHADQL

SEQ ID NO: 10094 - protein, 10 aa, Severe acute respiratory syndrome-related coronavirus
  REGION 1..10: note = Table B: HLA-DQA1*03:02-B1*03:03L HLA-DQA1*05:01-B1*03:01L HLA-DRB1*04:03L HLA-DRB1*13:03L HLA-DRB1*01:03L HLA-DRB1*04:05L HLA-DQA1*01:02-B1*06:02M HLA-DRB1*08:77L HLA-DPA1*01:03-B1*03:01L HLA-DPA1*03:01-B1*04:02L
  REGION 1..10: note = CONT. FROM ABOVE: HLA-DRB1*03:01L HLA-DRB1*14:01L HLA-DRB1*14:02 L HLA-DQA1*01-B1*05L HLA-DQA1*05:05-B1*03:19L HLA-DQA1*05:01-B1* 02:01L HLA-DRB4*01:01L HLA-DPA1*01:03-B1*04:01L HLA-DQA1*05:05-B 1*03:116L HLA-DPA1*01:03-B1*04:02L HLA-DPA1*02:01-B1*13:01L
  REGION 1..10: note = CONT. FROM ABOVE: HLA-DPA1*03:01-B1*105:01L HLA-DQA1*03:01-B1*03 :02L HLA-DPA1*01:03-B1*104:01L HLA-DPA1*01:02-B1*04:01L HLA-DRB1 *10:01L HLA-DRB1*16:01L HLA-DQA1*01:03-B1*06:01L HLA-DRB1*08:02L HLA-DQA1*02:01-B1*03:03L HLA-DRB1*15:03L
  source 1..10: note = Severe acute respiratory syndrome coronavirus 2
IHADQLTPTW

SEQ ID NO: 10095 - protein, 12 aa, Severe acute respiratory syndrome-related coronavirus
  REGION 1..12: note = Table B: HLA-DQA1*03:02-B1*03:03L HLA-DQA1*05:01-B1*03:01L HLA-DRB1*04:03L HLA-DRB1*13:02L HLA-DRB1*13:03L HLA-DRB1*01:03L HLA-DRB1*04:02L HLA-DRB1*04:04L HLA-DRB1*04:05L HLA-DQA1*01:02-B1*06:02L HLA-DRB1*01:02L HLA-DRB4*03:01NL
  REGION 1..12: note = CONT. FROM ABOVE: HLA-DRB1*08:04L HLA-DRB1*08:77L HLA-DRB3*02:01 L HLA-DPA1*01:03-B1*03:01L HLA-DPA1*03:01-B1*04:02L HLA-DRB1*14: 01L HLA-DRB1*11:03L HLA-DRB1*11:04L HLA-DQA1*01:01-B1*05:01L HLA -DRB1*08:01L HLA-DRB1*11:01L HLA-DQA1*01-B1*05L
  REGION 1..12: note = CONT. FROM ABOVE: HLA-DQA1*05:05-B1*03:19L HLA-DQA1*05:01-B1*02: 01L HLA-DRB1*04:10L HLA-DRB1*09:01L HLA-DPA1*01:03-B1*04:02L HLA -DRB1*12:01L HLA-DRB1*12:02L HLA-DPA1*02:01-B1*13:01L HLA-DPA1*0 3:01-B1*105:01L HLA-DQA1*03:01-B1*03:02L HLA-DRB1*14:54L
  REGION 1..12: note = CONT. FROM ABOVE: HLA-DQA1*05:05-B1*03:01L HLA-DRB1*14:17L HLA-D PA1*01:02-B1*04:01L HLA-DRB1*10:01L HLA-DRB1*16:01L HLA-DQA1*01: 03-B1*06:01L HLA-DRB1*04:08L HLA-DRB1*08:03L HLA-DQA1*02:01-B1*0 3:03L HLA-DRB1*15:03L
  source 1..12: note = Severe acute respiratory syndrome coronavirus 2
TPTWRVYSTGSN

SEQ ID NO: 10096 - protein, 10 aa, Severe acute respiratory syndrome-related coronavirus
  REGION 1..10: note = Table B: HLA-DQA1*03:02-B1*03:03L HLA-DQA1*05:01-B1*03:01L HLA-DRB1*04:01L HLA-DRB1*04:03L HLA-DRB1*13:02L HLA-DRB1*13:03M HLA-DRB1*01:03M HLA-DRB1*04:02L HLA-DRB1*04:05L HLA-DQA1*01:02-B1*06:02M HLA-DRB1*01:01L HLA-DRB1*01:02L
  REGION 1..10: note = CONT. FROM ABOVE: HLA-DRB4*03:01NL HLA-DRB1*08:77M HLA-DRB3*02:0 1L HLA-DPA1*01:03-B1*03:01L HLA-DPA1*03:01-B1*04:02L HLA-DRB1*03 :01L HLA-DRB1*14:01L HLA-DRB1*11:03L HLA-DRB1*11:04L HLA-DRB1*14 :02M HLA-DQA1*01:01-B1*05:01L HLA-DRB1*08:01L HLA-DRB1*11:01L
  REGION 1..10: note = CONT. FROM ABOVE: HLA-DRB5*01:01L HLA-DQA1*01-B1*05L HLA-DQA1*05 :05-B1*03:19L HLA-DQA1*05:01-B1*02:01L HLA-DRB1*13:01L HLA-DRB4* 01:01L HLA-DPA1*01:03-B1*04:01M HLA-DQA1*05:05-B1*03:116L HLA-DR B1*09:01L HLA-DPA1*01:03-B1*04:02M HLA-DRB1*12:01L
  REGION 1..10: note = CONT. FROM ABOVE: HLA-DPA1*02:01-B1*13:01M HLA-DPA1*03:01-B1*105 :01M HLA-DQA1*03:01-B1*03:02L HLA-DPA1*01:03-B1*104:01L HLA-DQA1 *05:05-B1*03:01L HLA-DRB1*14:17L HLA-DPA1*01:02-B1*04:01L HLA-DR B1*07:01L HLA-DRB1*10:01L HLA-DRB1*16:01L
  REGION 1..10: note = CONT. FROM ABOVE: HLA-DQA1*01:03-B1*06:01M HLA-DRB1*04:08L HLA -DRB1*08:02L HLA-DRB1*08:03L HLA-DQA1*02:01-B1*03:03M HLA-DRB1 *15:03L
  source 1..10: note = Severe acute respiratory syndrome coronavirus 2
RVYSTGSNVF

SEQ ID NO: 10097 - protein, 11 aa, Severe acute respiratory syndrome-related coronavirus
  REGION 1..11: note = Table B: HLA-DQA1*03:02-B1*03:03L HLA-DRB1*04:03L HLA-DRB1*08:04L
  source 1..11: note = Severe acute respiratory syndrome coronavirus 2
YSTGSNVFQTR

SEQ ID NO: 10098 - protein, 10 aa, Severe acute respiratory syndrome-related coronavirus
  REGION 1..10: note = Table B: HLA-DQA1*03:02-B1*03:03L HLA-DQA1*05:01-B1*03:01L HLA-DRB1*04:03L HLA-DRB1*04:02L HLA-DQA1*03:01-B1*03:02L HLA-DQA1*01:03-B1*06:01L HLA-DQA1*02:01-B1*03:03L
  source 1..10: note = Severe acute respiratory syndrome coronavirus 2
GSNVFQTRAG

SEQ ID NO: 10099 - protein, 14 aa, Severe acute respiratory syndrome-related coronavirus
  REGION 1..14: note = Table B: HLA-DQA1*03:02-B1*03:03L HLA-DRB1*04:03L HLA-DRB1*01:03L HLA-DRB1*04:04L HLA-DRB1*08:01L HLA-DRB1*11:01L HLA-DRB1*16:01L HLA-DRB1*15:03L
  source 1..14: note = Severe acute respiratory syndrome coronavirus 2
VFQTRAGCLIGAEH

SEQ ID NO: 10100 - protein, 15 aa, Severe acute respiratory syndrome-related coronavirus
  REGION 1..15: note = Table B: HLA-DQA1*03:02-B1*03:03L HLA-DRB1*15:03L
  source 1..15: note = Severe acute respiratory syndrome coronavirus 2
FQTRAGCLIGAEHVN

SEQ ID NO: 10101 - protein, 11 aa, Severe acute respiratory syndrome-related coronavirus
  REGION 1..11: note = Table B: HLA-DQA1*03:02-B1*03:03L HLA-DRB1*04:01L HLA-DRB1*04:02L HLA-DRB1*04:04L HLA-DRB1*04:05L HLA-DRB1*01:02L HLA-DRB1*11:04L HLA-DQA1*01:01-B1*05:01L HLA-DRB1*04:10L HLA-DRB1*14:54L HLA-DQA1*05:05-B1*03:01L HLA-DRB1*14:17L
  REGION 1..11: note = CONT. FROM ABOVE: HLA-DRB1*04:08L
  source 1..11: note = Severe acute respiratory syndrome coronavirus 2
IGAEHVNNSYE

SEQ ID NO: 10102 - protein, 12 aa, Severe acute respiratory syndrome-related coronavirus
  REGION 1..12: note = Table B: HLA-DQA1*03:02-B1*03:03L HLA-DQA1*05:01-B1*03:01L HLA-DRB1*04:03L HLA-DRB1*01:03L HLA-DRB1*04:02L HLA-DRB1*04:05L HLA-DRB1*01:02L HLA-DRB4*03:01NL HLA-DRB1*14:01L HLA-DQA1*01-B1*05L HLA-DQA1*05:05-B1*03:19L
  REGION 1..12: note = CONT. FROM ABOVE: HLA-DQA1*05:01-B1*02:01L HLA-DRB1*04:10L HLA-D RB1*12:01L HLA-DPA1*03:01-B1*105:01L HLA-DQA1*03:01-B1*03:02L HL A-DQA1*05:05-B1*03:01L HLA-DRB1*14:17L HLA-DRB1*16:01L HLA-DRB1* 04:08L HLA-DQA1*02:01-B1*03:03L HLA-DRB1*15:03L
  source 1..12: note = Severe acute respiratory syndrome coronavirus 2
NSYECDIPIGAG

SEQ ID NO: 10103 - protein, 11 aa, Severe acute respiratory syndrome-related coronavirus
  REGION 1..11: note = Table B: HLA-DQA1*03:02-B1*03:03L HLA-DQA1*05:05-B1*03:19L HLA-DPA1*01:03-B1*104:01L
  source 1..11: note = Severe acute respiratory syndrome coronavirus 2
YECDIPIGAGI

SEQ ID NO: 10104 - protein, 12 aa, Severe acute respiratory syndrome-related coronavirus
  REGION 1..12: note = Table B: HLA-DQA1*03:02-B1*03:03L HLA-DQA1*03:01-B1*03:02L HLA-DQA1*05:05-B1*03:01L HLA-DQA1*01:03-B1*06:01L
  source 1..12: note = Severe acute respiratory syndrome coronavirus 2
IPIGAGICASYQ

SEQ ID NO: 10105 - protein, 11 aa, Severe acute respiratory syndrome-related coronavirus
  REGION 1..11: note = Table B: HLA-DQA1*03:02-B1*03:03L HLA-DRB1*04:04L HLA-DRB1*01:02L HLA-DRB1*08:77L HLA-DRB3*02:01L HLA-DRB1*14:01L HLA-DRB1*14:02L HLA-DRB1*11:01L HLA-DQA1*05:01-B1*02:01L
  source 1..11: note = Severe acute respiratory syndrome coronavirus 2
ASYQTQTNSPR

SEQ ID NO: 10106 - protein, 15 aa, Severe acute respiratory syndrome-related coronavirus
  REGION 1..15: note = Table B: HLA-DQA1*03:02-B1*03:03L HLA-DRB1*04:03L HLA-DRB1*13:03L HLA-DRB1*01:01L HLA-DRB1*03:01L HLA-DRB1*14:01L HLA-DQA1*01:01-B1*05:01L HLA-DRB1*11:01L HLA-DQA1*05:05-B1*03:19L HLA-DRB1*04:10L HLA-DRB3*01:01L
  REGION 1..15: note = CONT. FROM ABOVE: HLA-DPA1*03:01-B1*105:01L HLA-DQA1*05:05-B1*03 :01L
  source 1..15: note = Severe acute respiratory syndrome coronavirus 2
SPRRARSVASQSIIA

SEQ ID NO: 10107 - protein, 10 aa, Severe acute respiratory syndrome-related coronavirus
  REGION 1..10: note = Table B: HLA-DQA1*03:02-B1*03:03L HLA-DQA1*05:01-B1*03:01L HLA-DRB1*04:01L HLA-DRB1*04:03L HLA-DRB1*13:02L HLA-DRB1*13:03M HLA-DRB1*01:03L HLA-DQA1*01:02-B1*06:02M HLA-DRB1*01:01L HLA-DRB4*03:01NL HLA-DRB1*08:77L HLA-DPA1*01:03-B1*03:01L
  REGION 1..10: note = CONT. FROM ABOVE: HLA-DPA1*03:01-B1*04:02L HLA-DRB1*03:01L HLA-D RB1*14:01L HLA-DRB1*14:02L HLA-DRB1*11:01L HLA-DRB5*01:01L HLA-D QA1*01-B1*05L HLA-DQA1*05:05-B1*03:19L HLA-DQA1*05:01-B1*02:01L HLA-DRB4*01:01L HLA-DPA1*01:03-B1*04:01M
  REGION 1..10: note = CONT. FROM ABOVE: HLA-DQA1*05:05-B1*03:116L HLA-DPA1*01:03-B1*04 :02L HLA-DRB1*12:01L HLA-DPA1*02:01-B1*13:01L HLA-DPA1*03:01-B1* 105:01M HLA-DPA1*01:03-B1*104:01L HLA-DQA1*05:05-B1*03:01L HLA-D RB1*14:17L HLA-DPA1*01:02-B1*04:01L HLA-DRB1*10:01L
  REGION 1..10: note = CONT. FROM ABOVE: HLA-DRB1*16:01L HLA-DQA1*01:03-B1*06:01L HLA-D RB1*08:02L HLA-DQA1*02:01-B1*03:03L HLA-DRB1*15:03L
  source 1..10: note = Severe acute respiratory syndrome coronavirus 2
SVASQSIIAY

SEQ ID NO: 10108 - protein, 10 aa, Severe acute respiratory syndrome-related coronavirus
  REGION 1..10: note = Table B: HLA-DQA1*03:02-B1*03:03L
  source 1..10: note = Severe acute respiratory syndrome coronavirus 2
ASQSIIAYTM

SEQ ID NO: 10109 - protein, 12 aa, Severe acute respiratory syndrome-related coronavirus
  REGION 1..12: note = Table B: HLA-DQA1*03:02-B1*03:03L HLA-DQA1*05:01-B1*03:01L HLA-DRB1*01:03L HLA-DRB1*04:04L HLA-DQA1*01:02-B1*06:02L HLA-DRB1*01:02L HLA-DPA1*01:03-B1*03:01L HLA-DRB1*14:01L HLA-DQA1*01-B1*05L HLA-DQA1*05:05-B1*03:19L
  REGION 1..12: note = CONT. FROM ABOVE: HLA-DQA1*05:01-B1*02:01L HLA-DRB1*12:01L HLA-D PA1*03:01-B1*105:01L HLA-DRB1*14:54L HLA-DQA1*05:05-B1*03:01L HL A-DRB1*10:01L HLA-DRB1*16:01L HLA-DQA1*01:03-B1*06:01L HLA-DRB1* 04:08L HLA-DRB1*15:03L
  source 1..12: note = Severe acute respiratory syndrome coronavirus 2
IIAYTMSLGAEN

SEQ ID NO: 10110 - protein, 11 aa, Severe acute respiratory syndrome-related coronavirus
  REGION 1..11: note = Table B: HLA-DQA1*03:02-B1*03:03L HLA-DQA1*05:05-B1*03:19L
  source 1..11: note = Severe acute respiratory syndrome coronavirus 2
YTMSLGAENSV

SEQ ID NO: 10111 - protein, 12 aa, Severe acute respiratory syndrome-related coronavirus
  REGION 1..12: note = Table B: HLA-DQA1*03:02-B1*03:03L HLA-DRB1*04:03L HLA-DRB1*12:01L HLA-DPA1*02:01-B1*13:01L HLA-DQA1*03:01-B1*03:02L HLA-DQA1*05:05-B1*03:01L HLA-DQA1*01:03-B1*06:01L
  source 1..12: note = Severe acute respiratory syndrome coronavirus 2
TMSLGAENSVAY

SEQ ID NO: 10112 - protein, 12 aa, Severe acute respiratory syndrome-related coronavirus
  REGION 1..12: note = Table B: HLA-DQA1*03:02-B1*03:03L HLA-DQA1*05:01-B1*03:01L HLA-DQA1*05:05-B1*03:19L HLA-DQA1*03:01-B1*03:02L HLA-DQA1*05:05-B1*03:01L HLA-DQA1*01:03-B1*06:01L HLA-DQA1*02:01-B1*03:03L
  source 1..12: note = Severe acute respiratory syndrome coronavirus 2
LGAENSVAYSNN

SEQ ID NO: 10113 - protein, 12 aa, Severe acute respiratory syndrome-related coronavirus
  REGION 1..12: note = Table B: HLA-DQA1*03:02-B1*03:03L HLA-DRB1*04:02L HLA-DRB1*04:05L HLA-DRB4*03:01NL HLA-DRB1*14:01L HLA-DQA1*01-B1*05L HLA-DQA1*05:01-B1*02:01L HLA-DRB1*04:10L HLA-DRB1*12:01L HLA-DRB1*12:02L HLA-DQA1*03:01-B1*03:02L
  REGION 1..12: note = CONT. FROM ABOVE: HLA-DRB1*14:54L HLA-DRB1*16:01L HLA-DQA1*02:01 -B1*03:03L
  source 1..12: note = Severe acute respiratory syndrome coronavirus 2
ENSVAYSNNSIA

SEQ ID NO: 10114 - protein, 14 aa, Severe acute respiratory syndrome-related coronavirus
  REGION 1..14: note = Table B: HLA-DQA1*03:02-B1*03:03L HLA-DQA1*05:01-B1*03:01L HLA-DRB1*14:04L HLA-DRB1*04:01L HLA-DRB1*13:02L HLA-DRB1*13:03L HLA-DRB1*01:03L HLA-DRB1*04:04L HLA-DQA1*01:02-B1*06:02L HLA-DRB1*01:01L HLA-DRB1*01:02L HLA-DRB1*08:04L HLA-DRB1*08:77L
  REGION 1..14: note = CONT. FROM ABOVE: HLA-DRB3*02:01L HLA-DPA1*01:03-B1*03:01L HLA-D RB1*14:01L HLA-DRB1*11:03L HLA-DRB1*11:04L HLA-DRB1*14:02L HLA-D RB1*11:01L HLA-DRB5*01:01L HLA-DQA1*05:05-B1*03:19L HLA-DRB4*01: 01L HLA-DRB1*09:01L HLA-DRB1*12:02L HLA-DPA1*03:01-B1*105:01L
  REGION 1..14: note = CONT. FROM ABOVE: HLA-DQA1*05:05-B1*03:01L HLA-DRB1*07:01L HLA-D RB1*10:01L HLA-DRB1*08:03L HLA-DRB1*15:01L HLA-DRB1*15:03L
  source 1..14: note = Severe acute respiratory syndrome coronavirus 2
NSVAYSNNSIAIPT

SEQ ID NO: 10115 - protein, 10 aa, Severe acute respiratory syndrome-related coronavirus
  REGION 1..10: note = Table B: HLA-DQA1*03:02-B1*03:03L HLA-DQA1*05:01-B1*02:01L HLA-DQA1*03:01-B1*03:02L HLA-DQA1*01:03-B1*06:01L HLA-DQA1*02:01-B1*03:03L
  source 1..10: note = Severe acute respiratory syndrome coronavirus 2
SNNSIAIPTN

SEQ ID NO: 10116 - protein, 11 aa, Severe acute respiratory syndrome-related coronavirus
  REGION 1..11: note = Table B: HLA-DQA1*03:02-B1*03:03L HLA-DQA1*01:02-B1*06:02L
  source 1..11: note = Severe acute respiratory syndrome coronavirus 2
NNSIAIPTNFT

SEQ ID NO: 10117 - protein, 10 aa, Severe acute respiratory syndrome-related coronavirus
  REGION 1..10: note = Table B: HLA-DQA1*03:02-B1*03:03L HLA-DQA1*01:02-B1*06:02L HLA-DQA1*05:05-B1*03:19L HLA-DQA1*05:05-B1*03:116L HLA-DPA1*02:01-B1*13:01L HLA-DPA1*03:01-B1*105:01L HLA-DQA1*03:01-B1*03:02L HLA-DPA1*01:03-B1*104:01L
  REGION 1..10: note = CONT. FROM ABOVE: HLA-DQA1*02:01-B1*03:03L HLA-DRB1*15:03L
  source 1..10: note = Severe acute respiratory syndrome coronavirus 2
SIAIPTNFTI

SEQ ID NO: 10118 - protein, 16 aa, Severe acute respiratory syndrome-related coronavirus
  REGION 1..16: note = Table B: HLA-DQA1*03:02-B1*03:03L HLA-DQA1*05:01-B1*03:01L HLA-DRB1*13:03L HLA-DRB1*01:03L HLA-DRB1*04:02L HLA-DRB1*04:04L HLA-DRB1*04:05L HLA-DRB4*03:01NL HLA-DRB1*08:04L HLA-DRB1*08:77L HLA-DRB3*02:01L HLA-DPA1*01:03-B1*03:01L HLA-DRB1*11:03L
  REGION 1..16: note = CONT. FROM ABOVE: HLA-DRB1*11:04L HLA-DRB1*14:02L HLA-DQA1*01-B1 *05L HLA-DQA1*05:05-B1*03:19L HLA-DRB4*01:01L HLA-DRB1*04:10L HL A-DRB1*09:01L HLA-DPA1*01:03-B1*04:02L HLA-DRB1*12:02L HLA-DPA1* 02:01-B1*13:01L HLA-DQA1*03:01-B1*03:02L HLA-DRB1*14:54L
  REGION 1..16: note = CONT. FROM ABOVE: HLA-DPA1*01:03-B1*104:01L HLA-DRB1*14:17L HLA- DRB1*07:01L HLA-DRB1*10:01L HLA-DQA1*01:03-B1*06:01L HLA-DRB1*04 :08L HLA-DRB1*08:03L HLA-DQA1*02:01-B1*03:03L
  source 1..16: note = Severe acute respiratory syndrome coronavirus 2
IPTNFTISVTTEILPV

SEQ ID NO: 10119 - protein, 11 aa, Severe acute respiratory syndrome-related coronavirus
  REGION 1..11: note = Table B: HLA-DQA1*03:02-B1*03:03L HLA-DQA1*05:01-B1*03:01L HLA-DRB1*04:03L HLA-DQA1*01:02-B1*06:02L HLA-DQA1*01-B1*05L HLA-DQA1*05:05-B1*03:19L HLA-DQA1*05:01-B1*02:01L HLA-DRB1*12:01L HLA-DPA1*03:01-B1*105:01L
  REGION 1..11: note = CONT. FROM ABOVE: HLA-DQA1*05:05-B1*03:01L HLA-DPA1*01:02-B1*04: 01L HLA-DRB1*16:01L
  source 1..11: note = Severe acute respiratory syndrome coronavirus 2
ISVTTEILPVS

SEQ ID NO: 10120 - protein, 10 aa, Severe acute respiratory syndrome-related coronavirus
  REGION 1..10: note = Table B: HLA-DQA1*03:02-B1*03:03M HLA-DQA1*05:01-B1*03:01L HLA-DRB1*13:03L HLA-DQA1*01:02-B1*06:02L HLA-DRB1*01:02L HLA-DPA1*03:01-B1*04:02L HLA-DRB1*14:01L HLA-DRB1*14:02L HLA-DQA1*01-B1*05L HLA-DQA1*05:05-B1*03:19L
  REGION 1..10: note = CONT. FROM ABOVE: HLA-DQA1*05:01-B1*02:01L HLA-DPA1*01:03-B1*04: 01L HLA-DQA1*05:05-B1*03:116L HLA-DRB1*09:01L HLA-DPA1*01:03-B1* 04:02L HLA-DRB1*12:01L HLA-DPA1*02:01-B1*13:01L HLA-DPA1*03:01-B 1*105:01L HLA-DQA1*03:01-B1*03:02L HLA-DQA1*05:05-B1*03:01L
  REGION 1..10: note = CONT. FROM ABOVE: HLA-DPA1*01:02-B1*04:01L HLA-DRB1*16:01L HLA-D QA1*01:03-B1*06:01L HLA-DQA1*02:01-B1*03:03L HLA-DRB1*15:03L
  source 1..10: note = Severe acute respiratory syndrome coronavirus 2
VTTEILPVSM

SEQ ID NO: 10121 - protein, 10 aa, Severe acute respiratory syndrome-related coronavirus
  REGION 1..10: note = Table B: HLA-DQA1*03:02-B1*03:03L HLA-DRB1*13:02L HLA-DRB1*13:03L HLA-DRB4*03:01NL HLA-DPA1*01:03-B1*04:02L HLA-DRB1*12:01L HLA-DQA1*03:01-B1*03:02L HLA-DQA1*05:05-B1*03:01L HLA-DRB1*14:17L
  REGION 1..10: note = CONT. FROM ABOVE: HLA-DQA1*02:01-B1*03:03L
  source 1..10: note = Severe acute respiratory syndrome coronavirus 2
TEILPVSMTK

SEQ ID NO: 10122 - protein, 10 aa, Severe acute respiratory syndrome-related coronavirus
  REGION 1..10: note = Table B: HLA-DQA1*03:02-B1*03:03L HLA-DQA1*05:01-B1*03:01L HLA-DRB1*04:03L HLA-DQA1*01:02-B1*06:02L HLA-DQA1*05:01-B1*02:01L HLA-DPA1*03:01-B1*105:01L HLA-DQA1*03:01-B1*03:02L HLA-DRB1*14:17L
  REGION 1..10: note = CONT. FROM ABOVE: HLA-DQA1*01:03-B1*06:01L HLA-DQA1*02:01-B1*03: 03L
  source 1..10: note = Severe acute respiratory syndrome coronavirus 2
EILPVSMTKT

SEQ ID NO: 10123 - protein, 10 aa, Severe acute respiratory syndrome-related coronavirus
  REGION 1..10: note = Table B: HLA-DQA1*03:02-B1*03:03L HLA-DQA1*05:01-B1*03:01L HLA-DRB1*04:03L HLA-DRB1*13:03L HLA-DRB1*04:02L HLA-DRB4*03:01NL HLA-DQA1*01-B1*05L HLA-DQA1*05:01-B1*02:01L HLA-DQA1*03:01-B1*03:02L HLA-DRB1*14:17L HLA-DRB1*16:01L
  REGION 1..10: note = CONT. FROM ABOVE: HLA-DQA1*01:03-B1*06:01L HLA-DQA1*02:01-B1*03: 03L
  source 1..10: note = Severe acute respiratory syndrome coronavirus 2
PVSMTKTSVD

SEQ ID NO: 10124 - protein, 10 aa, Severe acute respiratory syndrome-related coronavirus
  REGION 1..10: note = Table B: HLA-DQA1*03:02-B1*03:03L HLA-DQA1*05:05-B1*03:19L HLA-DPA1*01:03-B1*104:01L HLA-DQA1*02:01-B1*03:03L
  source 1..10: note = Severe acute respiratory syndrome coronavirus 2
TQLNRALTGI

SEQ ID NO: 10125 - protein, 11 aa, Severe acute respiratory syndrome-related coronavirus
  REGION 1..11: note = Table B: HLA-DQA1*03:02-B1*03:03L HLA-DQA1*05:01-B1*03:01L HLA-DRB1*04:02L HLA-DRB1*04:05L HLA-DQA1*01:02-B1*06:02L HLA-DRB4*03:01NL HLA-DPA1*01:03-B1*03:01L HLA-DQA1*01-B1*05L HLA-DQA1*05:05-B1*03:19L HLA-DQA1*05:01-B1*02:01L
  REGION 1..11: note = CONT. FROM ABOVE: HLA-DRB1*04:10L HLA-DRB1*12:01L HLA-DPA1*03:01 -B1*105:01L HLA-DRB1*14:54L HLA-DQA1*05:05-B1*03:01L HLA-DRB1*10 :01L HLA-DRB1*04:08L HLA-DRB1*15:03L
  source 1..11: note = Severe acute respiratory syndrome coronavirus 2
RALTGIAVEQD

SEQ ID NO: 10126 - protein, 10 aa, Severe acute respiratory syndrome-related coronavirus
  REGION 1..10: note = Table B: HLA-DQA1*03:02-B1*03:03L HLA-DQA1*05:01-B1*03:01L HLA-DRB1*04:03L HLA-DRB1*04:02L HLA-DRB1*04:05L HLA-DQA1*01:02-B1*06:02L HLA-DQA1*01:01-B1*05:01L HLA-DQA1*05:05-B1*03:19L HLA-DQA1*05:01-B1*02:01L
  REGION 1..10: note = CONT. FROM ABOVE: HLA-DRB1*04:10L HLA-DQA1*03:01-B1*03:02L HLA-D QA1*05:05-B1*03:01L HLA-DRB1*16:01L HLA-DQA1*01:03-B1*06:01L HLA -DQA1*02:01-B1*03:03L
  source 1..10: note = Severe acute respiratory syndrome coronavirus 2
LTGIAVEQDK

SEQ ID NO: 10127 - protein, 10 aa, Severe acute respiratory syndrome-related coronavirus
  REGION 1..10: note = Table B: HLA-DQA1*03:02-B1*03:03L HLA-DQA1*05:01-B1*03:01L HLA-DRB1*04:03L HLA-DRB1*04:02L HLA-DQA1*01:02-B1*06:02L HLA-DQA1*01:01-B1*05:01L HLA-DQA1*05:05-B1*03:19L HLA-DQA1*05:01-B1*02:01L HLA-DQA1*03:01-B1*03:02L
  REGION 1..10: note = CONT. FROM ABOVE: HLA-DQA1*05:05-B1*03:01L HLA-DRB1*14:17L HLA-D RB1*16:01L HLA-DQA1*01:03-B1*06:01L HLA-DQA1*02:01-B1*03:03L
  source 1..10: note = Severe acute respiratory syndrome coronavirus 2
TGIAVEQDKN

SEQ ID NO: 10128 - protein, 11 aa, Severe acute respiratory syndrome-related coronavirus
  REGION 1..11: note = Table B: HLA-DQA1*03:02-B1*03:03L HLA-DRB1*13:02L HLA-DRB1*13:03L HLA-DRB1*01:03L HLA-DRB1*04:04L HLA-DRB1*08:77L HLA-DRB1*14:01L HLA-DRB1*11:04L HLA-DRB1*12:01L HLA-DRB1*10:01L HLA-DRB1*16:01L HLA-DRB1*04:08L
  source 1..11: note = Severe acute respiratory syndrome coronavirus 2
IAVEQDKNTQE

SEQ ID NO: 10129 - protein, 10 aa, Severe acute respiratory syndrome-related coronavirus
  REGION 1..10: note = Table B: HLA-DQA1*03:02-B1*03:03M HLA-DQA1*05:01-B1*03:01L HLA-DRB1*13:02L HLA-DRB1*13:03L HLA-DRB1*08:77L HLA-DPA1*03:01-B1*04:02L HLA-DRB1*14:01L HLA-DRB1*11:02M HLA-DRB1*11:01L HLA-DQA1*01-B1*05L HLA-DQA1*05:05-B1*03:19H
  REGION 1..10: note = CONT. FROM ABOVE: HLA-DQA1*05:01-B1*02:01L HLA-DRB4*01:01L HLA-D PA1*01:03-B1*04:01L HLA-DQA1*05:05-B1*03:116L HLA-DRB1*09:01L HL A-DPA1*01:03-B1*04:02L HLA-DQA1*03:01-B1*03:02L HLA-DPA1*01:03-B 1*104:01M HLA-DPA1*01:02-B1*04:01L HLA-DRB1*10:01L
  REGION 1..10: note = CONT. FROM ABOVE: HLA-DRB1*16:01L HLA-DQA1*01:03-B1*06:01L HLA-D QA1*02:01-B1*03:03L HLA-DRB1*15:03L
  source 1..10: note = Severe acute respiratory syndrome coronavirus 2
VEQDKNTQEV

SEQ ID NO: 10130 - protein, 10 aa, Severe acute respiratory syndrome-related coronavirus
  REGION 1..10: note = Table B: HLA-DQA1*03:02-B1*03:03L HLA-DQA1*05:01-B1*03:01L HLA-DRB1*13:03L HLA-DRB1*01:03L HLA-DQA1*01:02-B1*06:02L HLA-DRB4*03:01NL HLA-DRB1*08:77L HLA-DPA1*01:03-B1*03:01L HLA-DPA1*03:01-B1*04:02L HLA-DRB1*03:01L HLA-DRB1*11:02L
  REGION 1..10: note = CONT. FROM ABOVE: HLA-DRB1*14:02L HLA-DQA1*01-B1*05L HLA-DQA1*05 :05-B1*03:19M HLA-DQA1*05:01-B1*02:01L HLA-DRB4*01:01L HLA-DPA1* 01:03-B1*04:01L HLA-DQA1*05:05-B1*03:116L HLA-DPA1*01:03-B1*04:0 2L HLA-DRB1*12:01L HLA-DPA1*03:01-B1*105:01L
  REGION 1..10: note = CONT. FROM ABOVE: HLA-DQA1*03:01-B1*03:02L HLA-DPA1*01:03-B1*104 :01L HLA-DPA1*01:02-B1*04:01L HLA-DRB1*10:01L HLA-DRB1*16:01L HL A-DRB1*08:02L HLA-DQA1*02:01-B1*03:03L HLA-DRB1*15:03L
  source 1..10: note = Severe acute respiratory syndrome coronavirus 2
EQDKNTQEVF

SEQ ID NO: 10131 - protein, 10 aa, Severe acute respiratory syndrome-related coronavirus
  REGION 1..10: note = Table B: HLA-DQA1*03:02-B1*03:03L HLA-DRB1*04:03L HLA-DQA1*01-B1*05L HLA-DQA1*05:01-B1*02:01L HLA-DPA1*03:01-B1*105:01L HLA-DQA1*03:01-B1*03:02L HLA-DPA1*01:02-B1*04:01L HLA-DQA1*01:03-B1*06:01L
  REGION 1..10: note = CONT. FROM ABOVE: HLA-DQA1*02:01-B1*03:03L
  source 1..10: note = Severe acute respiratory syndrome coronavirus 2
TQEVFAQVKQ

SEQ ID NO: 10132 - protein, 10 aa, Severe acute respiratory syndrome-related coronavirus
  REGION 1..10: note = Table B: HLA-DQA1*03:02-B1*03:03M HLA-DRB1*08:77L HLA-DRB1*11:02M HLA-DQA1*05:05-B1*03:19H HLA-DQA1*05:01-B1*02:01L HLA-DRB4*01:01L HLA-DPA1*01:03-B1*04:01L HLA-DRB1*09:01L
  REGION 1..10: note = CONT. FROM ABOVE: HLA-DQA1*03:01-B1*03:02L HLA-DPA1*01:03-B1*104 :01H HLA-DRB1*16:01L
  source 1..10: note = Severe acute respiratory syndrome coronavirus 2
QEVFAQVKQI

SEQ ID NO: 10133 - protein, 10 aa, Severe acute respiratory syndrome-related coronavirus
  REGION 1..10: note = Table B: HLA-DQA1*03:02-B1*03:03L HLA-DQA1*05:01-B1*03:01L HLA-DRB1*13:02L HLA-DRB1*13:03H HLA-DRB1*01:03L HLA-DQA1*01:02-B1*06:02H HLA-DRB1*01:01L HLA-DRB1*01:02L HLA-DRB4*03:01NL HLA-DRB1*08:77L HLA-DPA1*01:03-B1*03:01L
  REGION 1..10: note = CONT. FROM ABOVE: HLA-DPA1*03:01-B1*04:02L HLA-DRB1*03:01M HLA-D RB1*14:01L HLA-DRB1*11:04L HLA-DRB1*14:02L HLA-DRB1*08:01L HLA-D RB5*01:01L HLA-DQA1*01-B1*05L HLA-DQA1*05:05-B1*03:19L HLA-DRB4* 02:01NL HLA-DQA1*05:01-B1*02:01M HLA-DRB4*01:01L
  REGION 1..10: note = CONT. FROM ABOVE: HLA-DPA1*01:03-B1*04:01M HLA-DQA1*05:05-B1*03: 116L HLA-DRB1*09:01L HLA-DPA1*01:03-B1*04:02L HLA-DRB1*12:01L HL A-DPA1*02:01-B1*13:01M HLA-DPA1*03:01-B1*105:01M HLA-DQA1*05:05- B1*03:01L HLA-DPA1*01:02-B1*04:01L HLA-DRB1*10:01L
  REGION 1..10: note = CONT. FROM ABOVE: HLA-DRB1*16:01L HLA-DQA1*01:03-B1*06:01L HLA-D RB1*08:02L HLA-DQA1*02:01-B1*03:03L HLA-DRB1*15:01L HLA-DRB1*15: 03M
  source 1..10: note = Severe acute respiratory syndrome coronavirus 2
EVFAQVKQIY

SEQ ID NO: 10134 - protein, 14 aa, Severe acute respiratory syndrome-related coronavirus
  REGION 1..14: note = Table B: HLA-DQA1*03:02-B1*03:03L HLA-DRB1*04:01L HLA-DRB1*08:04L HLA-DRB3*02:01L HLA-DPA1*01:03-B1*03:01L HLA-DPA1*03:01-B1*04:02L HLA-DRB1*03:01L HLA-DRB1*11:03L HLA-DRB1*11:04L HLA-DQA1*05:01-B1*02:01L
  REGION 1..14: note = CONT. FROM ABOVE: HLA-DPA1*01:03-B1*04:02L HLA-DRB3*01:01L HLA-D PA1*01:03-B1*104:01L HLA-DRB1*07:01L HLA-DRB1*10:01L HLA-DRB1*08 :03L
  source 1..14: note = Severe acute respiratory syndrome coronavirus 2
VKQIYKTPPIKDFG

SEQ ID NO: 10135 - protein, 11 aa, Severe acute respiratory syndrome-related coronavirus
  REGION 1..11: note = Table B: HLA-DQA1*03:02-B1*03:03L HLA-DRB1*04:03L HLA-DRB1*04:02L HLA-DQA1*01-B1*05L HLA-DQA1*05:01-B1*02:01L HLA-DQA1*03:01-B1*03:02L HLA-DRB1*14:17L HLA-DQA1*02:01-B1*03:03L
  source 1..11: note = Severe acute respiratory syndrome coronavirus 2
TPPIKDFGGFN

SEQ ID NO: 10136 - protein, 12 aa, Severe acute respiratory syndrome-related coronavirus
  REGION 1..12: note = Table B: HLA-DQA1*03:02-B1*03:03L HLA-DQA1*01:02-B1*06:02L HLA-DPA1*03:01-B1*04:02L HLA-DQA1*01-B1*05L HLA-DQA1*05:01-B1*02:01L HLA-DPA1*01:03-B1*04:01L HLA-DPA1*01:03-B1*04:02L HLA-DQA1*03:01-B1*03:02L
  REGION 1..12: note = CONT. FROM ABOVE: HLA-DPA1*01:02-B1*04:01L HLA-DQA1*01:03-B1*06: 01L
  source 1..12: note = Severe acute respiratory syndrome coronavirus 2
GGFNFSQILPDP

SEQ ID NO: 10137 - protein, 11 aa, Severe acute respiratory syndrome-related coronavirus
  REGION 1..11: note = Table B: HLA-DQA1*03:02-B1*03:03L HLA-DQA1*05:01-B1*03:01L HLA-DRB1*04:03L HLA-DRB1*01:03L HLA-DQA1*01:02-B1*06:02L HLA-DPA1*03:01-B1*04:02L HLA-DQA1*01-B1*05L HLA-DQA1*05:05-B1*03:19L HLA-DQA1*05:01-B1*02:01L
  REGION 1..11: note = CONT. FROM ABOVE: HLA-DPA1*01:03-B1*04:01L HLA-DPA1*01:03-B1*04: 02L HLA-DPA1*03:01-B1*105:01L HLA-DQA1*03:01-B1*03:02L HLA-DQA1* 05:05-B1*03:01L HLA-DPA1*01:02-B1*04:01L HLA-DRB1*16:01L HLA-DQA 1*01:03-B1*06:01L HLA-DRB1*04:08L HLA-DQA1*02:01-B1*03:03L
  source 1..11: note = Severe acute respiratory syndrome coronavirus 2
FNFSQILPDPS

SEQ ID NO: 10138 - protein, 10 aa, Severe acute respiratory syndrome-related coronavirus
  REGION 1..10: note = Table B: HLA-DQA1*03:02-B1*03:03L HLA-DRB1*04:03L HLA-DQA1*01-B1*05L HLA-DQA1*03:01-B1*03:02L HLA-DQA1*02:01-B1*03:03L
  source 1..10: note = Severe acute respiratory syndrome coronavirus 2
SQILPDPSKP

SEQ ID NO: 10139 - protein, 10 aa, Severe acute respiratory syndrome-related coronavirus
  REGION 1..10: note = Table B: HLA-DQA1*03:02-B1*03:03L HLA-DQA1*05:01-B1*03:01L HLA-DRB1*04:03L HLA-DRB1*13:02L HLA-DRB1*13:03L HLA-DRB1*01:03L HLA-DRB1*04:02L HLA-DRB1*04:05L HLA-DRB1*01:02L HLA-DRB4*03:01NL HLA-DRB1*08:77L HLA-DRB1*14:01L HLA-DRB1*11:03L HLA-DRB1*11:04L
  REGION 1..10: note = CONT. FROM ABOVE: HLA-DQA1*01-B1*05L HLA-DQA1*05:01-B1*02:01L HL A-DRB1*04:10L HLA-DRB1*12:01L HLA-DRB1*12:02L HLA-DQA1*03:01-B1* 03:02L HLA-DRB1*14:54L HLA-DRB1*14:17L HLA-DRB1*10:01L HLA-DRB1* 16:01L HLA-DRB1*04:08L HLA-DQA1*02:01-B1*03:03L HLA-DRB1*15:03L
  source 1..10: note = Severe acute respiratory syndrome coronavirus 2
QILPDPSKPS

SEQ ID NO: 10140 - protein, 10 aa, Severe acute respiratory syndrome-related coronavirus
  REGION 1..10: note = Table B: HLA-DQA1*03:02-B1*03:03L HLA-DQA1*05:01-B1*03:01L HLA-DRB1*04:01L HLA-DRB1*04:03M HLA-DRB1*13:02L HLA-DRB1*13:03L HLA-DRB1*01:03L HLA-DRB1*04:02M HLA-DRB1*04:04L HLA-DRB1*04:05L HLA-DQA1*01:02-B1*06:02L HLA-DRB1*01:01L HLA-DRB1*01:02L
  REGION 1..10: note = CONT. FROM ABOVE: HLA-DRB4*03:01NL HLA-DRB1*08:04L HLA-DRB1*08:7 7L HLA-DRB3*02:01L HLA-DPA1*01:03-B1*03:01L HLA-DRB1*03:01L HLA- DRB1*14:01L HLA-DRB1*11:03L HLA-DRB1*11:04L HLA-DRB1*14:02L HLA- DRB1*08:01L HLA-DRB1*11:01L HLA-DRB5*01:01L HLA-DQA1*01-B1*05L
  REGION 1..10: note = CONT. FROM ABOVE: HLA-DQA1*05:05-B1*03:19L HLA-DQA1*05:01-B1*02: 01L HLA-DRB1*13:01L HLA-DRB1*04:10L HLA-DPA1*01:03-B1*04:02L HLA -DRB1*12:01L HLA-DRB1*12:02L HLA-DRB3*01:01L HLA-DPA1*02:01-B1*1 3:01L HLA-DPA1*03:01-B1*105:01L HLA-DQA1*03:01-B1*03:02L
  REGION 1..10: note = CONT. FROM ABOVE: HLA-DRB1*14:54L HLA-DQA1*05:05-B1*03:01L HLA-D RB1*14:17M HLA-DPA1*01:02-B1*04:01L HLA-DRB1*07:01L HLA-DRB1*10: 01L HLA-DRB1*16:01L HLA-DRB1*04:08L HLA-DRB1*08:03L HLA-DQA1*02: 01-B1*03:03L HLA-DRB1*15:01L HLA-DRB1*15:03L
  source 1..10: note = Severe acute respiratory syndrome coronavirus 2
ILPDPSKPSK

SEQ ID NO: 10141 - protein, 19 aa, Severe acute respiratory syndrome-related coronavirus
  REGION 1..19: note = Table B: HLA-DQA1*03:02-B1*03:03L HLA-DQA1*05:01-B1*03:01L HLA-DRB1*04:03L HLA-DRB1*08:04L HLA-DPA1*01:03-B1*03:01L HLA-DPA1*03:01-B1*04:02L HLA-DRB1*14:01L HLA-DRB1*14:02L HLA-DQA1*01:01-B1*05:01L HLA-DQA1*05:01-B1*02:01L
  REGION 1..19: note = CONT. FROM ABOVE: HLA-DRB3*01:01L HLA-DPA1*01:03-B1*104:01L HLA- DRB1*07:01L HLA-DQA1*01:03-B1*06:01L
  source 1..19: note = Severe acute respiratory syndrome coronavirus 2
PDPSKPSKRSFIEDLLFNK

SEQ ID NO: 10142 - protein, 10 aa, Severe acute respiratory syndrome-related coronavirus
  REGION 1..10: note = Table B: HLA-DQA1*03:02-B1*03:03M HLA-DQA1*05:01-B1*03:01L HLA-DQA1*01:02-B1*06:02L HLA-DRB1*01:02L HLA-DPA1*03:01-B1*04:02L HLA-DRB1*11:02L HLA-DRB1*14:02L HLA-DQA1*05:05-B1*03:19M HLA-DQA1*05:01-B1*02:01L
  REGION 1..10: note = CONT. FROM ABOVE: HLA-DPA1*01:03-B1*04:01L HLA-DQA1*05:05-B1*03: 116L HLA-DRB1*09:01L HLA-DPA1*01:03-B1*04:02L HLA-DPA1*02:01-B1* 13:01L HLA-DPA1*03:01-B1*105:01L HLA-DQA1*03:01-B1*03:02L HLA-DP A1*01:03-B1*104:01L HLA-DPA1*01:02-B1*04:01L HLA-DRB1*16:01L
  REGION 1..10: note = CONT. FROM ABOVE: HLA-DQA1*01:03-B1*06:01L HLA-DRB1*08:03L HLA-D QA1*02:01-B1*03:03L HLA-DRB1*15:03L
  source 1..10: note = Severe acute respiratory syndrome coronavirus 2
FIEDLLFNKV

SEQ ID NO: 10143 - protein, 10 aa, Severe acute respiratory syndrome-related coronavirus
  REGION 1..10: note = Table B: HLA-DQA1*03:02-B1*03:03L HLA-DRB1*01:03L HLA-DPA1*03:01-B1*04:02L HLA-DQA1*01-B1*05L HLA-DQA1*05:01-B1*02:01L HLA-DPA1*01:03-B1*04:01L HLA-DPA1*01:03-B1*04:02L HLA-DRB1*12:01L
  REGION 1..10: note = CONT. FROM ABOVE: HLA-DPA1*03:01-B1*105:01L HLA-DPA1*01:02-B1*04 :01L HLA-DRB1*16:01L HLA-DQA1*01:03-B1*06:01L HLA-DRB1*04:08L HL A-DQA1*02:01-B1*03:03L HLA-DRB1*15:03L
  source 1..10: note = Severe acute respiratory syndrome coronavirus 2
IEDLLFNKVT

SEQ ID NO: 10144 - protein, 10 aa, Severe acute respiratory syndrome-related coronavirus
  REGION 1..10: note = Table B: HLA-DQA1*03:02-B1*03:03L HLA-DQA1*05:05-B1*03:19L HLA-DQA1*03:01-B1*03:02L HLA-DPA1*01:03-B1*104:01L
  source 1..10: note = Severe acute respiratory syndrome coronavirus 2
EDLLFNKVTL

SEQ ID NO: 10145 - protein, 12 aa, Severe acute respiratory syndrome-related coronavirus
  REGION 1..12: note = Table B: HLA-DQA1*03:02-B1*03:03L HLA-DQA1*05:01-B1*03:01L HLA-DRB1*13:02L HLA-DRB1*13:03L HLA-DRB1*01:03L HLA-DRB1*04:02L HLA-DRB1*04:04L HLA-DRB1*04:05L HLA-DQA1*01:02-B1*06:02L HLA-DRB1*01:02L HLA-DRB4*03:01NL HLA-DRB1*08:04L
  REGION 1..12: note = CONT. FROM ABOVE: HLA-DPA1*01:03-B1*03:01L HLA-DPA1*03:01-B1*04: 02L HLA-DRB1*11:04L HLA-DRB1*08:01L HLA-DQA1*01-B1*05L HLA-DQA1* 05:01-B1*02:01L HLA-DRB1*04:10L HLA-DRB1*12:01L HLA-DPA1*02:01-B 1*13:01L HLA-DPA1*03:01-B1*105:01L HLA-DRB1*14:54L
  REGION 1..12: note = CONT. FROM ABOVE: HLA-DQA1*05:05-B1*03:01L HLA-DRB1*14:17L HLA-D PA1*01:02-B1*04:01L HLA-DRB1*16:01L HLA-DQA1*01:03-B1*06:01L HLA -DRB1*04:08L HLA-DRB1*08:03L HLA-DQA1*02:01-B1*03:03L HLA-DRB1*1 5:03L
  source 1..12: note = Severe acute respiratory syndrome coronavirus 2
LLFNKVTLADAG

SEQ ID NO: 10146 - protein, 10 aa, Severe acute respiratory syndrome-related coronavirus
  REGION 1..10: note = Table B: HLA-DQA1*03:02-B1*03:03L HLA-DQA1*05:01-B1*03:01L HLA-DRB1*04:03L HLA-DRB1*13:02L HLA-DRB1*13:03L HLA-DRB1*01:03L HLA-DRB1*04:02L HLA-DRB1*04:05L HLA-DQA1*01:02-B1*06:02L HLA-DRB1*01:02L HLA-DRB4*03:01NL HLA-DRB1*14:01L
  REGION 1..10: note = CONT. FROM ABOVE: HLA-DQA1*05:05-B1*03:19L HLA-DQA1*05:01-B1*02: 01L HLA-DRB1*12:01L HLA-DRB1*12:02L HLA-DPA1*03:01-B1*105:01L HL A-DQA1*03:01-B1*03:02L HLA-DRB1*14:54L HLA-DQA1*05:05-B1*03:01L HLA-DRB1*14:17L HLA-DRB1*16:01L HLA-DQA1*01:03-B1*06:01L
  REGION 1..10: note = CONT. FROM ABOVE: HLA-DQA1*02:01-B1*03:03L
  source 1..10: note = Severe acute respiratory syndrome coronavirus 2
VTLADAGFIK

SEQ ID NO: 10147 - protein, 10 aa, Severe acute respiratory syndrome-related coronavirus
  REGION 1..10: note = Table B: HLA-DQA1*03:02-B1*03:03L HLA-DQA1*05:01-B1*03:01L HLA-DRB1*04:03L HLA-DRB1*13:02L HLA-DRB1*13:03L HLA-DRB1*04:02L HLA-DRB4*03:01NL HLA-DRB1*14:01L HLA-DQA1*05:01-B1*02:01L HLA-DRB1*12:01L HLA-DPA1*03:01-B1*105:01L
  REGION 1..10: note = CONT. FROM ABOVE: HLA-DQA1*03:01-B1*03:02L HLA-DQA1*05:05-B1*03: 01L HLA-DRB1*14:17L HLA-DRB1*16:01L HLA-DQA1*02:01-B1*03:03L
  source 1..10: note = Severe acute respiratory syndrome coronavirus 2
TLADAGFIKQ

SEQ ID NO: 10148 - protein, 12 aa, Severe acute respiratory syndrome-related coronavirus
  REGION 1..12: note = Table B: HLA-DQA1*03:02-B1*03:03L
  source 1..12: note = Severe acute respiratory syndrome coronavirus 2
LADAGFIKQYGD

SEQ ID NO: 10149 - protein, 13 aa, Severe acute respiratory syndrome-related coronavirus
  REGION 1..13: note = Table B: HLA-DQA1*03:02-B1*03:03L HLA-DRB1*13:02L HLA-DRB1*01:03L HLA-DPA1*03:01-B1*04:02L HLA-DQA1*05:05-B1*03:19L HLA-DPA1*01:03-B1*104:01L HLA-DQA1*05:05-B1*03:01L
  source 1..13: note = Severe acute respiratory syndrome coronavirus 2
FIKQYGDCLGDIA

SEQ ID NO: 10150 - protein, 13 aa, Severe acute respiratory syndrome-related coronavirus
  REGION 1..13: note = Table B: HLA-DQA1*03:02-B1*03:03L HLA-DRB1*04:03L HLA-DRB1*04:05L HLA-DRB1*01:02L HLA-DPA1*01:03-B1*03:01L HLA-DQA1*01-B1*05L HLA-DQA1*05:01-B1*02:01L HLA-DRB1*12:01L HLA-DPA1*02:01-B1*13:01L HLA-DPA1*03:01-B1*105:01L
  REGION 1..13: note = CONT. FROM ABOVE: HLA-DPA1*01:03-B1*104:01L HLA-DQA1*05:05-B1*03 :01L HLA-DQA1*01:03-B1*06:01L HLA-DQA1*02:01-B1*03:03L
  source 1..13: note = Severe acute respiratory syndrome coronavirus 2
YGDCLGDIAARDL

SEQ ID NO: 10151 - protein, 10 aa, Severe acute respiratory syndrome-related coronavirus
  REGION 1..10: note = Table B: HLA-DQA1*03:02-B1*03:03L HLA-DQA1*03:01-B1*03:02L HLA-DQA1*02:01-B1*03:03L HLA-DRB1*15:03L
  source 1..10: note = Severe acute respiratory syndrome coronavirus 2
VLPPLLTDEM

SEQ ID NO: 10152 - protein, 14 aa, Severe acute respiratory syndrome-related coronavirus
  REGION 1..14: note = Table B: HLA-DQA1*03:02-B1*03:03L HLA-DRB1*13:02L HLA-DRB1*04:02L HLA-DRB1*04:05L HLA-DRB1*01:02L HLA-DRB1*08:04L HLA-DRB1*14:01L HLA-DRB3*01:01L HLA-DQA1*05:05-B1*03:01L HLA-DPA1*01:02-B1*04:01L HLA-DRB1*04:08L
  REGION 1..14: note = CONT. FROM ABOVE: HLA-DQA1*02:01-B1*03:03L
  source 1..14: note = Severe acute respiratory syndrome coronavirus 2
LPPLLTDEMIAQYT

SEQ ID NO: 10153 - protein, 10 aa, Severe acute respiratory syndrome-related coronavirus
  REGION 1..10: note = Table B: HLA-DQA1*03:02-B1*03:03L
  source 1..10: note = Severe acute respiratory syndrome coronavirus 2
DEMIAQYTSA

SEQ ID NO: 10154 - protein, 10 aa, Severe acute respiratory syndrome-related coronavirus
  REGION 1..10: note = Table B: HLA-DQA1*03:02-B1*03:03L
  source 1..10: note = Severe acute respiratory syndrome coronavirus 2
EMIAQYTSAL

SEQ ID NO: 10155 - protein, 12 aa, Severe acute respiratory syndrome-related coronavirus
  REGION 1..12: note = Table B: HLA-DQA1*03:02-B1*03:03L HLA-DQA1*05:01-B1*03:01L HLA-DRB1*01:03L HLA-DQA1*01:02-B1*06:02L HLA-DRB3*02:01L HLA-DPA1*03:01-B1*04:02L HLA-DQA1*05:05-B1*03:19L HLA-DPA1*03:01-B1*105:01L HLA-DQA1*05:05-B1*03:01L
  source 1..12: note = Severe acute respiratory syndrome coronavirus 2
IAQYTSALLAGT

SEQ ID NO: 10156 - protein, 12 aa, Severe acute respiratory syndrome-related coronavirus
  REGION 1..12: note = Table B: HLA-DQA1*03:02-B1*03:03L HLA-DQA1*05:01-B1*03:01L HLA-DQA1*01:02-B1*06:02L HLA-DQA1*05:05-B1*03:19L HLA-DPA1*03:01-B1*105:01L HLA-DQA1*05:05-B1*03:01L HLA-DQA1*01:03-B1*06:01L HLA-DQA1*02:01-B1*03:03L
  source 1..12: note = Severe acute respiratory syndrome coronavirus 2
AQYTSALLAGTI

SEQ ID NO: 10157 - protein, 11 aa, Severe acute respiratory syndrome-related coronavirus
  REGION 1..11: note = Table B: HLA-DQA1*03:02-B1*03:03L HLA-DQA1*05:01-B1*03:01L HLA-DQA1*01:02-B1*06:02L HLA-DQA1*05:05-B1*03:19L HLA-DPA1*03:01-B1*105:01L HLA-DQA1*03:01-B1*03:02L HLA-DQA1*05:05-B1*03:01L HLA-DQA1*02:01-B1*03:03L
  source 1..11: note = Severe acute respiratory syndrome coronavirus 2
YTSALLAGTIT

SEQ ID NO: 10158 - protein, 12 aa, Severe acute respiratory syndrome-related coronavirus
  REGION 1..12: note = Table B: HLA-DQA1*03:02-B1*03:03L
  source 1..12: note = Severe acute respiratory syndrome coronavirus 2
ALLAGTITSGWT

SEQ ID NO: 10159 - protein, 12 aa, Severe acute respiratory syndrome-related coronavirus
  REGION 1..12: note = Table B: HLA-DQA1*03:02-B1*03:03L HLA-DQA1*05:01-B1*03:01L HLA-DRB1*04:03L HLA-DRB1*04:02L HLA-DQA1*05:05-B1*03:19L HLA-DPA1*03:01-B1*105:01L HLA-DQA1*03:01-B1*03:02L HLA-DQA1*05:05-B1*03:01L HLA-DRB1*14:17L
  REGION 1..12: note = CONT. FROM ABOVE: HLA-DQA1*02:01-B1*03:03L
  source 1..12: note = Severe acute respiratory syndrome coronavirus 2
GTITSGWTFGAG

SEQ ID NO: 10160 - protein, 12 aa, Severe acute respiratory syndrome-related coronavirus
  REGION 1..12: note = Table B: HLA-DQA1*03:02-B1*03:03L HLA-DQA1*05:01-B1*03:01L HLA-DQA1*01:02-B1*06:02L HLA-DQA1*05:05-B1*03:19L HLA-DQA1*03:01-B1*03:02L HLA-DQA1*05:05-B1*03:01L HLA-DQA1*02:01-B1*03:03L
  source 1..12: note = Severe acute respiratory syndrome coronavirus 2
ITSGWTFGAGAA

SEQ ID NO: 10161 - protein, 12 aa, Severe acute respiratory syndrome-related coronavirus
  REGION 1..12: note = Table B: HLA-DQA1*03:02-B1*03:03L HLA-DQA1*05:01-B1*03:01L HLA-DQA1*05:05-B1*03:19L HLA-DQA1*05:01-B1*02:01L HLA-DQA1*03:01-B1*03:02L HLA-DQA1*05:05-B1*03:01L HLA-DQA1*02:01-B1*03:03L
  source 1..12: note = Severe acute respiratory syndrome coronavirus 2
SGWTFGAGAALQ

SEQ ID NO: 10162 - protein, 12 aa, Severe acute respiratory syndrome-related coronavirus
  REGION 1..12: note = Table B: HLA-DQA1*03:02-B1*03:03L HLA-DQA1*05:01-B1*03:01L HLA-DQA1*01:02-B1*06:02L HLA-DQA1*05:05-B1*03:19L HLA-DQA1*05:01-B1*02:01L HLA-DPA1*03:01-B1*105:01L HLA-DQA1*05:05-B1*03:01L HLA-DQA1*01:03-B1*06:01L
  REGION 1..12: note = CONT. FROM ABOVE: HLA-DQA1*02:01-B1*03:03L
  source 1..12: note = Severe acute respiratory syndrome coronavirus 2
WTFGAGAALQIP

SEQ ID NO: 10163 - protein, 12 aa, Severe acute respiratory syndrome-related coronavirus
  REGION 1..12: note = Table B: HLA-DQA1*03:02-B1*03:03L HLA-DQA1*05:01-B1*03:01L
  source 1..12: note = Severe acute respiratory syndrome coronavirus 2
TFGAGAALQIPF

SEQ ID NO: 10164 - protein, 10 aa, Severe acute respiratory syndrome-related coronavirus
  REGION 1..10: note = Table B: HLA-DQA1*03:02-B1*03:03L HLA-DQA1*05:01-B1*03:01L HLA-DQA1*05:05-B1*03:19L HLA-DQA1*03:01-B1*03:02L HLA-DQA1*05:05-B1*03:01L HLA-DQA1*01:03-B1*06:01L HLA-DQA1*02:01-B1*03:03L
  source 1..10: note = Severe acute respiratory syndrome coronavirus 2
AGAALQIPFA

SEQ ID NO: 10165 - protein, 10 aa, Severe acute respiratory syndrome-related coronavirus
  REGION 1..10: note = Table B: HLA-DQA1*03:02-B1*03:03L HLA-DQA1*05:05-B1*03:19L HLA-DQA1*02:01-B1*03:03L HLA-DRB1*15:03L
  source 1..10: note = Severe acute respiratory syndrome coronavirus 2
ALQIPFAMQM

SEQ ID NO: 10166 - protein, 10 aa, Severe acute respiratory syndrome-related coronavirus
  REGION 1..10: note = Table B: HLA-DQA1*03:02-B1*03:03L HLA-DQA1*05:05-B1*03:19L HLA-DQA1*01:03-B1*06:01L
  source 1..10: note = Severe acute respiratory syndrome coronavirus 2
MAYRFNGIGV

SEQ ID NO: 10167 - protein, 12 aa, Severe acute respiratory syndrome-related coronavirus
  REGION 1..12: note = Table B: HLA-DQA1*03:02-B1*03:03L HLA-DQA1*01:02-B1*06:02L HLA-DRB1*01:02L HLA-DRB1*14:01L HLA-DRB1*08:01L HLA-DQA1*05:05-B1*03:19L HLA-DRB1*12:01L HLA-DQA1*05:05-B1*03:01L HLA-DQA1*01:03-B1*06:01L
  REGION 1..12: note = CONT. FROM ABOVE: HLA-DRB1*15:03L
  source 1..12: note = Severe acute respiratory syndrome coronavirus 2
AYRFNGIGVTQN

SEQ ID NO: 10168 - protein, 10 aa, Severe acute respiratory syndrome-related coronavirus
  REGION 1..10: note = Table B: HLA-DQA1*03:02-B1*03:03L HLA-DQA1*05:01-B1*03:01L HLA-DQA1*05:01-B1*02:01L HLA-DQA1*03:01-B1*03:02L HLA-DQA1*01:03-B1*06:01L HLA-DQA1*02:01-B1*03:03L
  source 1..10: note = Severe acute respiratory syndrome coronavirus 2
NGIGVTQNVL

SEQ ID NO: 10169 - protein, 12 aa, Severe acute respiratory syndrome-related coronavirus
  REGION 1..12: note = Table B: HLA-DQA1*03:02-B1*03:03L HLA-DRB1*04:03L HLA-DQA1*03:01-B1*03:02L HLA-DQA1*05:05-B1*03:01L HLA-DRB1*14:17L HLA-DQA1*01:03-B1*06:01L
  source 1..12: note = Severe acute respiratory syndrome coronavirus 2
GIGVTQNVLYEN

SEQ ID NO: 10170 - protein, 11 aa, Severe acute respiratory syndrome-related coronavirus
  REGION 1..11: note = Table B: HLA-DQA1*03:02-B1*03:03L HLA-DQA1*05:01-B1*03:01L HLA-DRB1*04:03L HLA-DRB1*04:02L HLA-DQA1*01:02-B1*06:02L HLA-DRB4*03:01NL HLA-DQA1*01-B1*05L HLA-DRB1*14:17L HLA-DQA1*01:03-B1*06:01L
  source 1..11: note = Severe acute respiratory syndrome coronavirus 2
VTQNVLYENQK

SEQ ID NO: 10171 - protein, 11 aa, Severe acute respiratory syndrome-related coronavirus
  REGION 1..11: note = Table B: HLA-DQA1*03:02-B1*03:03L
  source 1..11: note = Severe acute respiratory syndrome coronavirus 2
TQNVLYENQKL

SEQ ID NO: 10172 - protein, 10 aa, Severe acute respiratory syndrome-related coronavirus
  REGION 1..10: note = Table B: HLA-DQA1*03:02-B1*03:03L HLA-DQA1*05:05-B1*03:19L HLA-DPA1*01:03-B1*104:01L
  source 1..10: note = Severe acute respiratory syndrome coronavirus 2
NVLYENQKLI

SEQ ID NO: 10173 - protein, 11 aa, Severe acute respiratory syndrome-related coronavirus
  REGION 1..11: note = Table B: HLA-DQA1*03:02-B1*03:03L HLA-DQA1*05:01-B1*03:01L HLA-DRB1*13:02L HLA-DRB1*13:03L HLA-DRB1*01:03L HLA-DRB1*04:05L HLA-DQA1*01:02-B1*06:02L HLA-DRB4*03:01NL HLA-DPA1*03:01-B1*04:02L HLA-DQA1*05:01-B1*02:01L
  REGION 1..11: note = CONT. FROM ABOVE: HLA-DRB1*12:01L HLA-DPA1*03:01-B1*105:01L HLA- DRB1*14:54L HLA-DRB1*14:17L HLA-DPA1*01:02-B1*04:01L HLA-DQA1*01 :03-B1*06:01L HLA-DRB1*04:08L
  source 1..11: note = Severe acute respiratory syndrome coronavirus 2
VLYENQKLIAN

SEQ ID NO: 10174 - protein, 10 aa, Severe acute respiratory syndrome-related coronavirus
  REGION 1..10: note = Table B: HLA-DQA1*03:02-B1*03:03L HLA-DRB1*04:03L HLA-DQA1*03:01-B1*03:02L HLA-DRB1*14:17L
  source 1..10: note = Severe acute respiratory syndrome coronavirus 2
YENQKLIANQ

SEQ ID NO: 10175 - protein, 10 aa, Severe acute respiratory syndrome-related coronavirus
  REGION 1..10: note = Table B: HLA-DQA1*03:02-B1*03:03L HLA-DQA1*05:01-B1*03:01L HLA-DRB1*13:03L HLA-DRB1*01:03L HLA-DQA1*01:02-B1*06:02M HLA-DRB1*08:77L HLA-DPA1*01:03-B1*03:01L HLA-DRB1*14:02L HLA-DQA1*05:05-B1*03:19L HLA-DQA1*05:01-B1*02:01L
  REGION 1..10: note = CONT. FROM ABOVE: HLA-DPA1*01:03-B1*04:01L HLA-DPA1*02:01-B1*13: 01L HLA-DPA1*03:01-B1*105:01L HLA-DQA1*01:03-B1*06:01L HLA-DQA1* 02:01-B1*03:03L HLA-DRB1*15:03L
  source 1..10: note = Severe acute respiratory syndrome coronavirus 2
ENQKLIANQF

SEQ ID NO: 10176 - protein, 10 aa, Severe acute respiratory syndrome-related coronavirus
  REGION 1..10: note = Table B: HLA-DQA1*03:02-B1*03:03L HLA-DQA1*05:01-B1*03:01L HLA-DRB1*04:03L HLA-DPA1*03:01-B1*04:02L HLA-DRB1*14:01L HLA-DRB1*14:02L HLA-DQA1*05:05-B1*03:19L HLA-DQA1*05:05-B1*03:116L HLA-DPA1*03:01-B1*105:01L
  REGION 1..10: note = CONT. FROM ABOVE: HLA-DQA1*03:01-B1*03:02L HLA-DPA1*01:02-B1*04: 01L HLA-DRB1*16:01L HLA-DQA1*02:01-B1*03:03L HLA-DRB1*15:03L
  source 1..10: note = Severe acute respiratory syndrome coronavirus 2
KLIANQFNSA

SEQ ID NO: 10177 - protein, 12 aa, Severe acute respiratory syndrome-related coronavirus
  REGION 1..12: note = Table B: HLA-DQA1*03:02-B1*03:03L HLA-DQA1*05:01-B1*03:01L HLA-DRB1*13:02L HLA-DRB1*04:04L HLA-DRB1*04:05L HLA-DRB1*01:02L HLA-DRB1*08:04L HLA-DPA1*01:03-B1*03:01L HLA-DRB1*14:01L HLA-DRB1*11:03L HLA-DRB1*11:04L HLA-DRB1*08:01L HLA-DRB1*11:01L
  REGION 1..12: note = CONT. FROM ABOVE: HLA-DQA1*05:05-B1*03:19L HLA-DRB1*04:10L HLA-D RB3*01:01L HLA-DPA1*02:01-B1*13:01L HLA-DPA1*01:03-B1*02:01L HLA -DRB1*10:01L HLA-DRB1*15:03L
  source 1..12: note = Severe acute respiratory syndrome coronavirus 2
LIANQFNSAIGK

SEQ ID NO: 10178 - protein, 10 aa, Severe acute respiratory syndrome-related coronavirus
  REGION 1..10: note = Table B: HLA-DQA1*03:02-B1*03:03L HLA-DQA1*05:05-B1*03:19L HLA-DPA1*03:01-B1*105:01L HLA-DQA1*03:01-B1*03:02L HLA-DPA1*01:03-B1*104:01L HLA-DRB1*16:01L HLA-DQA1*01:03-B1*06:01L HLA-DQA1*02:01-B1*03:03L
  REGION 1..10: note = CONT. FROM ABOVE: HLA-DRB1*15:03L
  source 1..10: note = Severe acute respiratory syndrome coronavirus 2
NQFNSAIGKI

SEQ ID NO: 10179 - protein, 10 aa, Severe acute respiratory syndrome-related coronavirus
  REGION 1..10: note = Table B: HLA-DQA1*03:02-B1*03:03L HLA-DQA1*05:01-B1*03:01L HLA-DRB1*04:03L HLA-DRB1*13:03L HLA-DRB1*01:03L HLA-DRB1*04:02L HLA-DQA1*01:02-B1*06:02L HLA-DRB4*03:01NL HLA-DQA1*05:05-B1*03:19L HLA-DQA1*05:01-B1*02:01L
  REGION 1..10: note = CONT. FROM ABOVE: HLA-DRB1*12:01L HLA-DPA1*03:01-B1*105:01L HLA- DQA1*03:01-B1*03:02L HLA-DQA1*05:05-B1*03:01L HLA-DRB1*14:17L HL A-DRB1*16:01L HLA-DQA1*01:03-B1*06:01L HLA-DQA1*02:01-B1*03:03L
  source 1..10: note = Severe acute respiratory syndrome coronavirus 2
FNSAIGKIQD

SEQ ID NO: 10180 - protein, 10 aa, Severe acute respiratory syndrome-related coronavirus
  REGION 1..10: note = Table B: HLA-DQA1*03:02-B1*03:03L HLA-DQA1*05:01-B1*03:01L HLA-DRB1*04:03L HLA-DRB1*04:02L HLA-DQA1*03:01-B1*03:02L HLA-DQA1*05:05-B1*03:01L HLA-DRB1*14:17L HLA-DQA1*01:03-B1*06:01L HLA-DQA1*02:01-B1*03:03L
  source 1..10: note = Severe acute respiratory syndrome coronavirus 2
NSAIGKIQDS

SEQ ID NO: 10181 - protein, 10 aa, Severe acute respiratory syndrome-related coronavirus
  REGION 1..10: note = Table B: HLA-DQA1*03:02-B1*03:03M HLA-DQA1*05:01-B1*03:01L HLA-DRB1*04:03L HLA-DRB1*13:03L HLA-DRB1*01:03L HLA-DRB1*04:02L HLA-DRB1*04:05L HLA-DQA1*01:02-B1*06:02M HLA-DRB1*01:02L HLA-DRB4*03:01NL HLA-DRB1*08:77L HLA-DRB3*02:01L
  REGION 1..10: note = CONT. FROM ABOVE: HLA-DPA1*01:03-B1*03:01L HLA-DPA1*03:01-B1*04: 02L HLA-DRB1*14:01L HLA-DRB1*14:02L HLA-DQA1*01:01-B1*05:01L HLA -DRB1*08:01L HLA-DQA1*01-B1*05L HLA-DQA1*05:05-B1*03:19L HLA-DQA 1*05:01-B1*02:01L HLA-DPA1*01:03-B1*04:01L
  REGION 1..10: note = CONT. FROM ABOVE: HLA-DQA1*05:05-B1*03:116L HLA-DRB1*09:01L HLA- DPA1*01:03-B1*04:02L HLA-DRB1*12:01L HLA-DPA1*02:01-B1*13:01L HL A-DPA1*03:01-B1*105:01L HLA-DQA1*03:01-B1*03:02L HLA-DPA1*01:03- B1*104:01L HLA-DQA1*05:05-B1*03:01L HLA-DRB1*14:17L
  REGION 1..10: note = CONT. FROM ABOVE: HLA-DPA1*01:02-B1*04:01L HLA-DRB1*07:01L HLA-D RB1*16:01L HLA-DQA1*01:03-B1*06:01L HLA-DRB1*08:03L HLA-DQA1*02: 01-B1*03:03L HLA-DRB1*15:03L
  source 1..10: note = Severe acute respiratory syndrome coronavirus 2
SAIGKIQDSL

SEQ ID NO: 10182 - protein, 10 aa, Severe acute respiratory syndrome-related coronavirus
  REGION 1..10: note = Table B: HLA-DQA1*03:02-B1*03:03L HLA-DRB1*14:17L
  source 1..10: note = Severe acute respiratory syndrome coronavirus 2
KIQDSLSSTA

SEQ ID NO: 10183 - protein, 12 aa, Severe acute respiratory syndrome-related coronavirus
  REGION 1..12: note = Table B: HLA-DQA1*03:02-B1*03:03L HLA-DQA1*03:01-B1*03:02L
  source 1..12: note = Severe acute respiratory syndrome coronavirus 2
IQDSLSSTASAL

SEQ ID NO: 10184 - protein, 12 aa, Severe acute respiratory syndrome-related coronavirus
  REGION 1..12: note = Table B: HLA-DQA1*03:02-B1*03:03L HLA-DRB1*04:04L HLA-DQA1*01:02-B1*06:02L HLA-DRB1*01:02L HLA-DRB1*08:77L HLA-DPA1*01:03-B1*03:01L HLA-DRB1*14:01L HLA-DRB1*11:04L HLA-DQA1*01:01-B1*05:01L HLA-DRB5*01:01L HLA-DQA1*01-B1*05L
  REGION 1..12: note = CONT. FROM ABOVE: HLA-DQA1*05:01-B1*02:01L HLA-DRB1*04:10L HLA-D RB1*10:01L HLA-DRB1*04:08L HLA-DRB1*15:03L
  source 1..12: note = Severe acute respiratory syndrome coronavirus 2
DSLSSTASALGK

SEQ ID NO: 10185 - protein, 10 aa, Severe acute respiratory syndrome-related coronavirus
  REGION 1..10: note = Table B: HLA-DQA1*03:02-B1*03:03L HLA-DQA1*05:01-B1*03:01L HLA-DRB1*04:03L HLA-DQA1*01:02-B1*06:02L HLA-DQA1*05:05-B1*03:19L HLA-DQA1*05:01-B1*02:01L HLA-DPA1*03:01-B1*105:01L HLA-DQA1*03:01-B1*03:02L
  REGION 1..10: note = CONT. FROM ABOVE: HLA-DQA1*05:05-B1*03:01L HLA-DQA1*01:03-B1*06: 01L HLA-DQA1*02:01-B1*03:03L
  source 1..10: note = Severe acute respiratory syndrome coronavirus 2
SSTASALGKL

SEQ ID NO: 10186 - protein, 10 aa, Severe acute respiratory syndrome-related coronavirus
  REGION 1..10: note = Table B: HLA-DQA1*03:02-B1*03:03L HLA-DQA1*05:01-B1*03:01L HLA-DRB1*04:03L HLA-DRB1*04:02L HLA-DQA1*01:02-B1*06:02L HLA-DRB4*03:01NL HLA-DQA1*05:05-B1*03:19L HLA-DQA1*05:01-B1*02:01L HLA-DRB1*12:01L
  REGION 1..10: note = CONT. FROM ABOVE: HLA-DPA1*03:01-B1*105:01L HLA-DQA1*03:01-B1*03 :02L HLA-DQA1*05:05-B1*03:01L HLA-DRB1*14:17L HLA-DRB1*16:01L HL A-DQA1*01:03-B1*06:01L HLA-DQA1*02:01-B1*03:03L
  source 1..10: note = Severe acute respiratory syndrome coronavirus 2
STASALGKLQ

SEQ ID NO: 10187 - protein, 10 aa, Severe acute respiratory syndrome-related coronavirus
  REGION 1..10: note = Table B: HLA-DQA1*03:02-B1*03:03L HLA-DQA1*05:01-B1*03:01L HLA-DRB1*04:03L HLA-DRB1*04:02L HLA-DQA1*01:02-B1*06:02L HLA-DRB4*03:01NL HLA-DQA1*05:05-B1*03:19L HLA-DQA1*05:01-B1*02:01L HLA-DPA1*03:01-B1*105:01L
  REGION 1..10: note = CONT. FROM ABOVE: HLA-DQA1*03:01-B1*03:02L HLA-DQA1*05:05-B1*03: 01L HLA-DRB1*14:17L HLA-DQA1*01:03-B1*06:01L HLA-DQA1*02:01-B1*0 3:03L
  source 1..10: note = Severe acute respiratory syndrome coronavirus 2
TASALGKLQD

SEQ ID NO: 10188 - protein, 10 aa, Severe acute respiratory syndrome-related coronavirus
  REGION 1..10: note = Table B: HLA-DQA1*03:02-B1*03:03L HLA-DQA1*05:01-B1*03:01L HLA-DRB1*04:03L HLA-DQA1*01:02-B1*06:02L HLA-DQA1*05:05-B1*03:19L HLA-DQA1*05:01-B1*02:01L HLA-DQA1*03:01-B1*03:02L HLA-DQA1*05:05-B1*03:01L
  REGION 1..10: note = CONT. FROM ABOVE: HLA-DQA1*01:03-B1*06:01L HLA-DQA1*02:01-B1*03: 03L
  source 1..10: note = Severe acute respiratory syndrome coronavirus 2
ALGKLQDVVN

SEQ ID NO: 10189 - protein, 10 aa, Severe acute respiratory syndrome-related coronavirus
  REGION 1..10: note = Table B: HLA-DQA1*03:02-B1*03:03L HLA-DRB1*13:03L HLA-DRB1*01:03L HLA-DQA1*05:05-B1*03:19L HLA-DQA1*03:01-B1*03:02L HLA-DRB1*16:01L HLA-DQA1*02:01-B1*03:03L
  source 1..10: note = Severe acute respiratory syndrome coronavirus 2
KLQDVVNQNA

SEQ ID NO: 10190 - protein, 11 aa, Severe acute respiratory syndrome-related coronavirus
  REGION 1..11: note = Table B: HLA-DQA1*03:02-B1*03:03L HLA-DRB1*13:03L HLA-DRB4*03:01NL HLA-DQA1*01-B1*05L HLA-DRB1*16:01L HLA-DQA1*02:01-B1*03:03L
  source 1..11: note = Severe acute respiratory syndrome coronavirus 2
LQDVVNQNAQA

SEQ ID NO: 10191 - protein, 10 aa, Severe acute respiratory syndrome-related coronavirus
  REGION 1..10: note = Table B: HLA-DQA1*03:02-B1*03:03L HLA-DQA1*05:01-B1*03:01L HLA-DRB1*13:03L HLA-DQA1*01:02-B1*06:02M HLA-DRB1*01:02L HLA-DRB4*03:01NL HLA-DPA1*01:03-B1*03:01L HLA-DPA1*03:01-B1*04:02L HLA-DRB1*14:01L HLA-DRB1*14:02L
  REGION 1..10: note = CONT. FROM ABOVE: HLA-DRB1*08:01L HLA-DRB5*01:01L HLA-DQA1*01-B1 *05L HLA-DQA1*05:01-B1*02:01L HLA-DPA1*01:03-B1*04:01L HLA-DQA1* 05:05-B1*03:116L HLA-DRB1*09:01L HLA-DRB1*12:01L HLA-DPA1*02:01- B1*13:01L HLA-DPA1*03:01-B1*105:01M HLA-DQA1*03:01-B1*03:02L
  REGION 1..10: note = CONT. FROM ABOVE: HLA-DQA1*05:05-B1*03:01L HLA-DPA1*01:02-B1*04: 01L HLA-DQA1*02:01-B1*03:03L HLA-DRB1*15:03L
  source 1..10: note = Severe acute respiratory syndrome coronavirus 2
DVVNQNAQAL

SEQ ID NO: 10192 - protein, 10 aa, Severe acute respiratory syndrome-related coronavirus
  REGION 1..10: note = Table B: HLA-DQA1*03:02-B1*03:03L HLA-DQA1*05:01-B1*03:01L HLA-DQA1*01:02-B1*06:02L HLA-DPA1*03:01-B1*04:02L HLA-DRB1*14:01L HLA-DQA1*05:05-B1*03:19L HLA-DQA1*05:01-B1*02:01L HLA-DQA1*05:05-B1*03:116L
  REGION 1..10: note = CONT. FROM ABOVE: HLA-DPA1*03:01-B1*105:01L HLA-DQA1*03:01-B1*03 :02L HLA-DPA1*01:02-B1*04:01L HLA-DQA1*01:03-B1*06:01L HLA-DQA1* 02:01-B1*03:03L HLA-DRB1*15:03L
  source 1..10: note = Severe acute respiratory syndrome coronavirus 2
NQNAQALNTL

SEQ ID NO: 10193 - protein, 11 aa, Severe acute respiratory syndrome-related coronavirus
  REGION 1..11: note = Table B: HLA-DQA1*03:02-B1*03:03L HLA-DQA1*01:02-B1*06:02L
  source 1..11: note = Severe acute respiratory syndrome coronavirus 2
NAQALNTLVKQ

SEQ ID NO: 10194 - protein, 10 aa, Severe acute respiratory syndrome-related coronavirus
  REGION 1..10: note = Table B: HLA-DQA1*03:02-B1*03:03L HLA-DQA1*05:01-B1*03:01L HLA-DQA1*03:01-B1*03:02L HLA-DQA1*02:01-B1*03:03L
  source 1..10: note = Severe acute respiratory syndrome coronavirus 2
QALNTLVKQL

SEQ ID NO: 10195 - protein, 12 aa, Severe acute respiratory syndrome-related coronavirus
  REGION 1..12: note = Table B: HLA-DQA1*03:02-B1*03:03L HLA-DRB1*14:04L HLA-DRB1*13:02L HLA-DRB1*13:03L HLA-DRB1*01:03L HLA-DRB1*04:04L HLA-DRB1*08:04L HLA-DRB1*08:77L HLA-DRB3*02:01L HLA-DPA1*01:03-B1*03:01L HLA-DPA1*03:01-B1*04:02L
  REGION 1..12: note = CONT. FROM ABOVE: HLA-DRB1*11:03L HLA-DRB1*11:04L HLA-DRB1*08:01 L HLA-DQA1*01-B1*05L HLA-DQA1*05:05-B1*03:19L HLA-DRB1*12:02L HL A-DPA1*02:01-B1*13:01L HLA-DPA1*03:01-B1*105:01L HLA-DQA1*05:05- B1*03:01L HLA-DPA1*01:02-B1*04:01L HLA-DRB1*10:01L
  REGION 1..12: note = CONT. FROM ABOVE: HLA-DRB1*04:08L HLA-DRB1*08:03L
  source 1..12: note = Severe acute respiratory syndrome coronavirus 2
NTLVKQLSSNFG

SEQ ID NO: 10196 - protein, 12 aa, Severe acute respiratory syndrome-related coronavirus
  REGION 1..12: note = Table B: HLA-DQA1*03:02-B1*03:03L HLA-DQA1*05:01-B1*03:01L HLA-DRB1*13:02L HLA-DRB1*13:03L HLA-DRB1*01:03L HLA-DRB1*04:02L HLA-DRB1*04:04L HLA-DRB1*04:05L HLA-DQA1*01:02-B1*06:02L HLA-DRB1*01:02L HLA-DRB4*03:01NL HLA-DPA1*01:03-B1*03:01L
  REGION 1..12: note = CONT. FROM ABOVE: HLA-DRB1*14:01L HLA-DRB1*11:04L HLA-DQA1*01-B1 *05L HLA-DQA1*05:05-B1*03:19L HLA-DQA1*05:01-B1*02:01L HLA-DRB1* 04:10L HLA-DRB1*12:01L HLA-DRB1*12:02L HLA-DPA1*03:01-B1*105:01L HLA-DQA1*03:01-B1*03:02L HLA-DRB1*14:54L
  REGION 1..12: note = CONT. FROM ABOVE: HLA-DQA1*05:05-B1*03:01L HLA-DRB1*14:17L HLA-D RB1*10:01L HLA-DRB1*16:01L HLA-DQA1*01:03-B1*06:01L HLA-DRB1*04: 08L HLA-DQA1*02:01-B1*03:03L HLA-DRB1*15:03L
  source 1..12: note = Severe acute respiratory syndrome coronavirus 2
VKQLSSNFGAIS

SEQ ID NO: 10197 - protein, 10 aa, Severe acute respiratory syndrome-related coronavirus
  REGION 1..10: note = Table B: HLA-DQA1*03:02-B1*03:03L
  source 1..10: note = Severe acute respiratory syndrome coronavirus 2
SSNFGAISSV

SEQ ID NO: 10198 - protein, 10 aa, Severe acute respiratory syndrome-related coronavirus
  REGION 1..10: note = Table B: HLA-DQA1*03:02-B1*03:03L
  source 1..10: note = Severe acute respiratory syndrome coronavirus 2
SNFGAISSVL

SEQ ID NO: 10199 - protein, 10 aa, Severe acute respiratory syndrome-related coronavirus
  REGION 1..10: note = Table B: HLA-DQA1*03:02-B1*03:03L HLA-DQA1*01:02-B1*06:02L HLA-DQA1*01-B1*05L HLA-DQA1*05:01-B1*02:01L HLA-DPA1*03:01-B1*105:01L HLA-DQA1*03:01-B1*03:02L HLA-DQA1*01:03-B1*06:01L HLA-DQA1*02:01-B1*03:03L
  source 1..10: note = Severe acute respiratory syndrome coronavirus 2
AISSVLNDIL

SEQ ID NO: 10200 - protein, 10 aa, Severe acute respiratory syndrome-related coronavirus
  REGION 1..10: note = Table B: HLA-DQA1*03:02-B1*03:03H HLA-DQA1*05:01-B1*03:01M HLA-DRB1*04:01L HLA-DRB1*13:02L HLA-DRB1*13:03L HLA-DRB1*01:03L HLA-DRB1*04:02L HLA-DRB1*04:04L HLA-DQA1*01:02-B1*06:02M HLA-DRB1*01:01L HLA-DRB1*01:02L HLA-DRB1*08:77L HLA-DRB3*02:01L
  REGION 1..10: note = CONT. FROM ABOVE: HLA-DPA1*01:03-B1*03:01L HLA-DPA1*03:01-B1*04: 02M HLA-DRB1*03:01L HLA-DRB1*14:01L HLA-DRB1*14:02M HLA-DRB1*08: 01L HLA-DRB1*11:01L HLA-DQA1*05:05-B1*03:19L HLA-DQA1*05:01-B1*0 2:01L HLA-DRB4*01:01L HLA-DPA1*01:03-B1*04:01L
  REGION 1..10: note = CONT. FROM ABOVE: HLA-DQA1*05:05-B1*03:116M HLA-DRB1*09:01M HLA- DPA1*01:03-B1*04:02M HLA-DRB1*12:01L HLA-DPA1*02:01-B1*13:01L HL A-DPA1*03:01-B1*105:01M HLA-DQA1*03:01-B1*03:02M HLA-DPA1*01:03- B1*104:01L HLA-DPA1*01:02-B1*04:01M HLA-DRB1*07:01L
  REGION 1..10: note = CONT. FROM ABOVE: HLA-DRB1*10:01L HLA-DRB1*16:01L HLA-DQA1*01:03 -B1*06:01L HLA-DRB1*08:03M HLA-DQA1*02:01-B1*03:03M HLA-DRB1*15: 01L HLA-DRB1*15:03M
  source 1..10: note = Severe acute respiratory syndrome coronavirus 2
SVLNDILSRL

SEQ ID NO: 10201 - protein, 13 aa, Severe acute respiratory syndrome-related coronavirus
  REGION 1..13: note = Table B: HLA-DQA1*03:02-B1*03:03L HLA-DQA1*05:01-B1*03:01L HLA-DRB1*13:02L HLA-DRB1*13:03L HLA-DRB1*01:03L HLA-DRB1*04:04L HLA-DRB1*01:02L HLA-DRB1*08:04L HLA-DQA1*01:01-B1*05:01L HLA-DQA1*05:01-B1*02:01L HLA-DRB1*04:10L HLA-DRB1*12:01L
  REGION 1..13: note = CONT. FROM ABOVE: HLA-DPA1*02:01-B1*13:01L HLA-DPA1*03:01-B1*105 :01L HLA-DRB1*14:54L HLA-DQA1*01:03-B1*06:01L HLA-DRB1*04:08L HL A-DRB1*08:03L HLA-DRB1*15:03L
  source 1..13: note = Severe acute respiratory syndrome coronavirus 2
ILSRLDKVEAEVQ

SEQ ID NO: 10202 - protein, 11 aa, Severe acute respiratory syndrome-related coronavirus
  REGION 1..11: note = Table B: HLA-DQA1*03:02-B1*03:03L HLA-DQA1*05:01-B1*03:01L HLA-DRB1*04:03L HLA-DRB1*13:03L HLA-DQA1*01:01-B1*05:01L HLA-DRB1*08:01L HLA-DRB1*12:01L HLA-DRB1*16:01L HLA-DQA1*01:03-B1*06:01L
  source 1..11: note = Severe acute respiratory syndrome coronavirus 2
DKVEAEVQIDR

SEQ ID NO: 10203 - protein, 10 aa, Severe acute respiratory syndrome-related coronavirus
  REGION 1..10: note = Table B: HLA-DQA1*03:02-B1*03:03H HLA-DQA1*05:01-B1*03:01M HLA-DRB1*04:01L HLA-DRB1*13:02L HLA-DRB1*13:03L HLA-DRB1*01:03L HLA-DRB1*04:02L HLA-DQA1*01:02-B1*06:02L HLA-DRB4*03:01NL HLA-DRB1*08:77M HLA-DPA1*03:01-B1*04:02L HLA-DRB1*03:01L
  REGION 1..10: note = CONT. FROM ABOVE: HLA-DRB1*14:01L HLA-DRB1*11:02L HLA-DRB1*11:04 L HLA-DRB1*14:02L HLA-DRB1*11:01L HLA-DQA1*01-B1*05L HLA-DQA1*05 :05-B1*03:19M HLA-DQA1*05:01-B1*02:01L HLA-DRB4*01:01L HLA-DPA1* 01:03-B1*04:01L HLA-DQA1*05:05-B1*03:116M HLA-DRB1*09:01M
  REGION 1..10: note = CONT. FROM ABOVE: HLA-DPA1*01:03-B1*04:02M HLA-DRB1*12:01L HLA-D PA1*02:01-B1*13:01L HLA-DPA1*03:01-B1*105:01L HLA-DQA1*03:01-B1* 03:02M HLA-DPA1*01:03-B1*104:01M HLA-DPA1*01:02-B1*04:01L HLA-DR B1*07:01L HLA-DRB1*10:01L HLA-DRB1*16:01L
  REGION 1..10: note = CONT. FROM ABOVE: HLA-DQA1*01:03-B1*06:01L HLA-DQA1*02:01-B1*03: 03L HLA-DRB1*15:03L
  source 1..10: note = Severe acute respiratory syndrome coronavirus 2
VEAEVQIDRL

SEQ ID NO: 10204 - protein, 11 aa, Severe acute respiratory syndrome-related coronavirus
  REGION 1..11: note = Table B: HLA-DQA1*03:02-B1*03:03L HLA-DRB1*04:03L HLA-DRB1*13:03L HLA-DRB1*04:02L HLA-DRB4*03:01NL HLA-DRB1*14:01L HLA-DQA1*01-B1*05L HLA-DQA1*05:01-B1*02:01L HLA-DRB1*14:54L HLA-DRB1*14:17L HLA-DPA1*01:02-B1*04:01L HLA-DRB1*16:01L
  REGION 1..11: note = CONT. FROM ABOVE: HLA-DQA1*01:03-B1*06:01L
  source 1..11: note = Severe acute respiratory syndrome coronavirus 2
AEVQIDRLITG

SEQ ID NO: 10205 - protein, 11 aa, Severe acute respiratory syndrome-related coronavirus
  REGION 1..11: note = Table B: HLA-DQA1*03:02-B1*03:03L HLA-DQA1*05:01-B1*03:01L HLA-DQA1*05:05-B1*03:19L HLA-DPA1*01:02-B1*04:01L HLA-DQA1*01:03-B1*06:01L HLA-DRB1*15:03L
  source 1..11: note = Severe acute respiratory syndrome coronavirus 2
VQIDRLITGRL

SEQ ID NO: 10206 - protein, 10 aa, Severe acute respiratory syndrome-related coronavirus
  REGION 1..10: note = Table B: HLA-DQA1*03:02-B1*03:03M HLA-DQA1*05:01-B1*03:01M HLA-DRB1*13:02L HLA-DRB1*13:03L HLA-DRB1*01:03L HLA-DRB1*04:02L HLA-DRB1*04:04L HLA-DRB1*04:05L HLA-DQA1*01:02-B1*06:02M HLA-DRB1*01:02L HLA-DRB3*02:01L HLA-DPA1*01:03-B1*03:01L
  REGION 1..10: note = CONT. FROM ABOVE: HLA-DPA1*03:01-B1*04:02M HLA-DRB1*03:01L HLA-D RB1*14:01L HLA-DRB1*14:02M HLA-DQA1*01:01-B1*05:01L HLA-DRB1*08: 01M HLA-DRB1*11:01L HLA-DQA1*01-B1*05L HLA-DQA1*05:05-B1*03:19L HLA-DQA1*05:01-B1*02:01L HLA-DRB4*01:01L
  REGION 1..10: note = CONT. FROM ABOVE: HLA-DPA1*01:03-B1*04:01L HLA-DQA1*05:05-B1*03: 116M HLA-DRB1*09:01L HLA-DPA1*01:03-B1*04:02L HLA-DRB1*12:01L HL A-DPA1*02:01-B1*13:01L HLA-DPA1*03:01-B1*105:01L HLA-DQA1*03:01- B1*03:02M HLA-DPA1*01:03-B1*104:01L HLA-DPA1*01:02-B1*04:01L
  REGION 1..10: note = CONT. FROM ABOVE: HLA-DRB1*07:01L HLA-DRB1*10:01L HLA-DRB1*16:01 L HLA-DQA1*01:03-B1*06:01L HLA-DRB1*08:03L HLA-DQA1*02:01-B1*03: 03M HLA-DRB1*15:03L
  source 1..10: note = Severe acute respiratory syndrome coronavirus 2
RLITGRLQSL

SEQ ID NO: 10207 - protein, 10 aa, Severe acute respiratory syndrome-related coronavirus
  REGION 1..10: note = Table B: HLA-DQA1*03:02-B1*03:03L HLA-DQA1*05:01-B1*03:01L HLA-DRB1*04:03L HLA-DQA1*01:02-B1*06:02L HLA-DRB1*01:02L HLA-DPA1*03:01-B1*04:02L HLA-DQA1*05:05-B1*03:19L HLA-DPA1*01:03-B1*04:02L HLA-DPA1*03:01-B1*105:01L
  REGION 1..10: note = CONT. FROM ABOVE: HLA-DQA1*03:01-B1*03:02L HLA-DQA1*05:05-B1*03: 01L HLA-DPA1*01:02-B1*04:01L HLA-DRB1*16:01L HLA-DQA1*01:03-B1*0 6:01M HLA-DRB1*04:08L HLA-DQA1*02:01-B1*03:03L
  source 1..10: note = Severe acute respiratory syndrome coronavirus 2
LITGRLQSLQ

SEQ ID NO: 10208 - protein, 14 aa, Severe acute respiratory syndrome-related coronavirus
  REGION 1..14: note = Table B: HLA-DQA1*03:02-B1*03:03L HLA-DPA1*03:01-B1*04:02L HLA-DRB1*08:01L HLA-DPA1*02:01-B1*13:01L HLA-DPA1*01:03-B1*104:01L HLA-DRB1*07:01L
  source 1..14: note = Severe acute respiratory syndrome coronavirus 2
ITGRLQSLQTYVTQ

SEQ ID NO: 10209 - protein, 14 aa, Severe acute respiratory syndrome-related coronavirus
  REGION 1..14: note = Table B: HLA-DQA1*03:02-B1*03:03L HLA-DRB3*02:01L HLA-DRB1*14:02L HLA-DRB1*08:01L HLA-DRB1*11:01L HLA-DQA1*05:05-B1*03:19L HLA-DRB1*09:01L HLA-DRB3*01:01L HLA-DPA1*02:01-B1*13:01L HLA-DPA1*01:03-B1*104:01L
  REGION 1..14: note = CONT. FROM ABOVE: HLA-DRB1*07:01L HLA-DQA1*01:03-B1*06:01L HLA-D RB1*15:01L
  source 1..14: note = Severe acute respiratory syndrome coronavirus 2
TGRLQSLQTYVTQQ

SEQ ID NO: 10210 - protein, 10 aa, Severe acute respiratory syndrome-related coronavirus
  REGION 1..10: note = Table B: HLA-DQA1*03:02-B1*03:03M HLA-DQA1*05:01-B1*03:01L HLA-DQA1*01:02-B1*06:02L HLA-DPA1*03:01-B1*04:02L HLA-DRB1*14:01L HLA-DRB1*14:02L HLA-DQA1*01-B1*05L HLA-DQA1*05:05-B1*03:19L HLA-DQA1*05:01-B1*02:01L
  REGION 1..10: note = CONT. FROM ABOVE: HLA-DQA1*05:05-B1*03:116L HLA-DRB1*09:01L HLA- DPA1*02:01-B1*13:01L HLA-DPA1*03:01-B1*105:01L HLA-DQA1*03:01-B1 *03:02L HLA-DPA1*01:03-B1*104:01L HLA-DPA1*01:02-B1*04:01L HLA-D RB1*16:01L HLA-DQA1*01:03-B1*06:01L HLA-DQA1*02:01-B1*03:03L
  REGION 1..10: note = CONT. FROM ABOVE: HLA-DRB1*15:03L
  source 1..10: note = Severe acute respiratory syndrome coronavirus 2
SLQTYVTQQL

SEQ ID NO: 10211 - protein, 10 aa, Severe acute respiratory syndrome-related coronavirus
  REGION 1..10: note = Table B: HLA-DQA1*03:02-B1*03:03L HLA-DQA1*05:01-B1*03:01L HLA-DRB1*04:03L HLA-DRB1*01:03L HLA-DRB1*04:05L HLA-DQA1*01:02-B1*06:02L HLA-DRB1*01:02L HLA-DPA1*03:01-B1*04:02L HLA-DQA1*01-B1*05L
  REGION 1..10: note = CONT. FROM ABOVE: HLA-DQA1*05:05-B1*03:19L HLA-DQA1*05:01-B1*02: 01L HLA-DRB1*12:01L HLA-DPA1*03:01-B1*105:01L HLA-DQA1*03:01-B1* 03:02L HLA-DPA1*01:02-B1*04:01L HLA-DRB1*16:01L HLA-DQA1*01:03-B 1*06:01L HLA-DQA1*02:01-B1*03:03L HLA-DRB1*15:03L
  source 1..10: note = Severe acute respiratory syndrome coronavirus 2
TYVTQQLIRA

SEQ ID NO: 10212 - protein, 11 aa, Severe acute respiratory syndrome-related coronavirus
  REGION 1..11: note = Table B: HLA-DQA1*03:02-B1*03:03L HLA-DRB1*13:03L HLA-DRB1*01:03L HLA-DRB1*04:02L HLA-DRB1*04:04L HLA-DRB1*04:05L HLA-DRB1*01:02L HLA-DRB4*03:01NL HLA-DPA1*01:03-B1*03:01L HLA-DRB1*14:01L HLA-DQA1*05:05-B1*03:19L
  REGION 1..11: note = CONT. FROM ABOVE: HLA-DQA1*05:01-B1*02:01L HLA-DPA1*01:03-B1*04: 02L HLA-DRB1*12:01L HLA-DRB1*14:54L HLA-DQA1*05:05-B1*03:01L HLA -DRB1*14:17L HLA-DRB1*16:01L HLA-DRB1*04:08L HLA-DRB1*15:03L
  source 1..11: note = Severe acute respiratory syndrome coronavirus 2
YVTQQLIRAAE

SEQ ID NO: 10213 - protein, 12 aa, Severe acute respiratory syndrome-related coronavirus
  REGION 1..12: note = Table B: HLA-DQA1*03:02-B1*03:03L HLA-DRB1*04:02L HLA-DRB1*01:02L HLA-DQA1*01:01-B1*05:01L HLA-DRB1*08:01L HLA-DQA1*05:05-B1*03:01L
  source 1..12: note = Severe acute respiratory syndrome coronavirus 2
VTQQLIRAAEIR

SEQ ID NO: 10214 - protein, 14 aa, Severe acute respiratory syndrome-related coronavirus
  REGION 1..14: note = Table B: HLA-DQA1*03:02-B1*03:03L HLA-DRB1*04:04L HLA-DRB1*08:04L HLA-DRB1*11:04L HLA-DRB1*08:01L
  source 1..14: note = Severe acute respiratory syndrome coronavirus 2
TQQLIRAAEIRASA

SEQ ID NO: 10215 - protein, 10 aa, Severe acute respiratory syndrome-related coronavirus
  REGION 1..10: note = Table B: HLA-DQA1*03:02-B1*03:03L HLA-DQA1*05:01-B1*03:01L HLA-DQA1*01:02-B1*06:02L HLA-DQA1*05:05-B1*03:19L HLA-DPA1*03:01-B1*105:01L HLA-DQA1*03:01-B1*03:02L HLA-DQA1*05:05-B1*03:01L HLA-DQA1*01:03-B1*06:01M
  REGION 1..10: note = CONT. FROM ABOVE: HLA-DQA1*02:01-B1*03:03L
  source 1..10: note = Severe acute respiratory syndrome coronavirus 2
RAAEIRASAN

SEQ ID NO: 10216 - protein, 10 aa, Severe acute respiratory syndrome-related coronavirus
  REGION 1..10: note = Table B: HLA-DQA1*03:02-B1*03:03L HLA-DQA1*05:01-B1*03:01L HLA-DQA1*03:01-B1*03:02L HLA-DQA1*01:03-B1*06:01L HLA-DQA1*02:01-B1*03:03L
  source 1..10: note = Severe acute respiratory syndrome coronavirus 2
AAEIRASANL

SEQ ID NO: 10217 - protein, 10 aa, Severe acute respiratory syndrome-related coronavirus
  REGION 1..10: note = Table B: HLA-DQA1*03:02-B1*03:03L HLA-DQA1*05:05-B1*03:19L HLA-DQA1*03:01-B1*03:02L
  source 1..10: note = Severe acute respiratory syndrome coronavirus 2
AEIRASANLA

SEQ ID NO: 10218 - protein, 12 aa, Severe acute respiratory syndrome-related coronavirus
  REGION 1..12: note = Table B: HLA-DQA1*03:02-B1*03:03L HLA-DRB1*14:04L HLA-DRB1*08:77L HLA-DPA1*01:03-B1*03:01L HLA-DRB1*14:02L HLA-DQA1*01:01-B1*05:01L HLA-DRB5*01:01L HLA-DQA1*01-B1*05L HLA-DQA1*05:01-B1*02:01L HLA-DRB1*09:01L HLA-DRB3*01:01L
  REGION 1..12: note = CONT. FROM ABOVE: HLA-DPA1*01:03-B1*104:01L HLA-DRB1*07:01L
  source 1..12: note = Severe acute respiratory syndrome coronavirus 2
EIRASANLAATK

SEQ ID NO: 10219 - protein, 10 aa, Severe acute respiratory syndrome-related coronavirus
  REGION 1..10: note = Table B: HLA-DQA1*03:02-B1*03:03L HLA-DQA1*05:01-B1*03:01L HLA-DRB1*04:03L HLA-DRB1*13:03L HLA-DRB1*04:02L HLA-DQA1*01:02-B1*06:02L HLA-DRB1*01:02L HLA-DRB4*03:01NL HLA-DRB1*14:01L HLA-DRB1*14:02L HLA-DQA1*01-B1*05L
  REGION 1..10: note = CONT. FROM ABOVE: HLA-DQA1*05:05-B1*03:19L HLA-DQA1*05:01-B1*02: 01L HLA-DRB1*12:01L HLA-DPA1*03:01-B1*105:01L HLA-DQA1*03:01-B1* 03:02L HLA-DQA1*05:05-B1*03:01L HLA-DPA1*01:02-B1*04:01L HLA-DRB 1*16:01L HLA-DQA1*01:03-B1*06:01L HLA-DQA1*02:01-B1*03:03L
  REGION 1..10: note = CONT. FROM ABOVE: HLA-DRB1*15:03L
  source 1..10: note = Severe acute respiratory syndrome coronavirus 2
ASANLAATKM

SEQ ID NO: 10220 - protein, 10 aa, Severe acute respiratory syndrome-related coronavirus
  REGION 1..10: note = Table B: HLA-DQA1*03:02-B1*03:03L HLA-DQA1*05:01-B1*03:01L HLA-DRB1*04:03L HLA-DRB1*13:03L HLA-DRB1*01:03L HLA-DRB1*04:02L HLA-DRB4*03:01NL HLA-DRB1*14:01L HLA-DQA1*01-B1*05L HLA-DQA1*05:05-B1*03:19L HLA-DQA1*05:01-B1*02:01L
  REGION 1..10: note = CONT. FROM ABOVE: HLA-DRB1*12:01L HLA-DPA1*03:01-B1*105:01L HLA- DQA1*03:01-B1*03:02L HLA-DRB1*14:54L HLA-DQA1*05:05-B1*03:01L HL A-DRB1*14:17L HLA-DPA1*01:02-B1*04:01L HLA-DRB1*16:01L HLA-DQA1* 01:03-B1*06:01L HLA-DQA1*02:01-B1*03:03L
  source 1..10: note = Severe acute respiratory syndrome coronavirus 2
ANLAATKMSE

SEQ ID NO: 10221 - protein, 13 aa, Severe acute respiratory syndrome-related coronavirus
  REGION 1..13: note = Table B: HLA-DQA1*03:02-B1*03:03L HLA-DRB1*11:01L HLA-DQA1*01-B1*05L HLA-DQA1*05:05-B1*03:19L HLA-DPA1*01:02-B1*04:01L HLA-DRB1*08:03L
  source 1..13: note = Severe acute respiratory syndrome coronavirus 2
GYHLMSFPQSAPH

SEQ ID NO: 10222 - protein, 10 aa, Severe acute respiratory syndrome-related coronavirus
  REGION 1..10: note = Table B: HLA-DQA1*03:02-B1*03:03L HLA-DQA1*05:01-B1*03:01L HLA-DRB1*04:03L HLA-DRB1*13:03L HLA-DRB1*04:02L HLA-DRB4*03:01NL HLA-DQA1*05:01-B1*02:01L HLA-DQA1*03:01-B1*03:02L HLA-DQA1*05:05-B1*03:01L HLA-DRB1*14:17L
  REGION 1..10: note = CONT. FROM ABOVE: HLA-DQA1*01:03-B1*06:01L HLA-DQA1*02:01-B1*03: 03L
  source 1..10: note = Severe acute respiratory syndrome coronavirus 2
MSFPQSAPHG

SEQ ID NO: 10223 - protein, 10 aa, Severe acute respiratory syndrome-related coronavirus
  REGION 1..10: note = Table B: HLA-DQA1*03:02-B1*03:03L HLA-DQA1*05:01-B1*03:01L HLA-DRB1*01:03L HLA-DRB1*04:05L HLA-DQA1*01:02-B1*06:02L HLA-DRB1*01:01L HLA-DRB1*01:02L HLA-DPA1*03:01-B1*04:02L HLA-DRB1*14:01L HLA-DQA1*01-B1*05L HLA-DQA1*05:05-B1*03:19L
  REGION 1..10: note = CONT. FROM ABOVE: HLA-DQA1*05:01-B1*02:01L HLA-DQA1*05:05-B1*03: 116L HLA-DPA1*02:01-B1*13:01M HLA-DPA1*03:01-B1*105:01L HLA-DQA1 *03:01-B1*03:02L HLA-DPA1*01:03-B1*104:01L HLA-DPA1*01:02-B1*04: 01L HLA-DRB1*16:01L HLA-DQA1*01:03-B1*06:01L HLA-DRB1*08:03L
  REGION 1..10: note = CONT. FROM ABOVE: HLA-DQA1*02:01-B1*03:03L HLA-DRB1*15:03L
  source 1..10: note = Severe acute respiratory syndrome coronavirus 2
SFPQSAPHGV

SEQ ID NO: 10224 - protein, 10 aa, Severe acute respiratory syndrome-related coronavirus
  REGION 1..10: note = Table B: HLA-DQA1*03:02-B1*03:03L HLA-DQA1*05:01-B1*03:01L HLA-DRB1*13:03L HLA-DRB1*04:02L HLA-DRB1*04:05L HLA-DQA1*01:02-B1*06:02L HLA-DRB4*03:01NL HLA-DPA1*03:01-B1*04:02L HLA-DRB1*14:01L HLA-DQA1*01-B1*05L
  REGION 1..10: note = CONT. FROM ABOVE: HLA-DQA1*05:01-B1*02:01L HLA-DQA1*05:05-B1*03: 116L HLA-DPA1*02:01-B1*13:01L HLA-DPA1*03:01-B1*105:01L HLA-DQA1 *03:01-B1*03:02L HLA-DPA1*01:02-B1*04:01L HLA-DRB1*16:01L HLA-DR B1*15:03L
  source 1..10: note = Severe acute respiratory syndrome coronavirus 2
FPQSAPHGVV

SEQ ID NO: 10225 - protein, 10 aa, Severe acute respiratory syndrome-related coronavirus
  REGION 1..10: note = Table B: HLA-DQA1*03:02-B1*03:03L HLA-DQA1*05:01-B1*03:01L HLA-DRB1*04:03L HLA-DRB1*13:03L HLA-DRB1*01:03L HLA-DRB1*04:05L HLA-DQA1*01:02-B1*06:02L HLA-DRB1*08:77L HLA-DRB1*14:02L HLA-DQA1*05:05-B1*03:19L HLA-DQA1*05:01-B1*02:01L
  REGION 1..10: note = CONT. FROM ABOVE: HLA-DPA1*02:01-B1*13:01L HLA-DPA1*03:01-B1*105 :01L HLA-DQA1*03:01-B1*03:02L HLA-DRB1*16:01L HLA-DQA1*01:03-B1* 06:01L HLA-DQA1*02:01-B1*03:03L HLA-DRB1*15:03L
  source 1..10: note = Severe acute respiratory syndrome coronavirus 2
PQSAPHGVVF

SEQ ID NO: 10226 - protein, 10 aa, Severe acute respiratory syndrome-related coronavirus
  REGION 1..10: note = Table B: HLA-DQA1*03:02-B1*03:03L
  source 1..10: note = Severe acute respiratory syndrome coronavirus 2
QSAPHGVVFL

SEQ ID NO: 10227 - protein, 15 aa, Severe acute respiratory syndrome-related coronavirus
  REGION 1..15: note = Table B: HLA-DQA1*03:02-B1*03:03L HLA-DRB1*13:02L HLA-DRB1*01:03L HLA-DRB1*04:02L HLA-DRB1*04:04L HLA-DRB1*04:05L HLA-DRB1*08:04L HLA-DRB3*02:01L HLA-DPA1*01:03-B1*03:01L HLA-DRB1*11:03L HLA-DRB1*08:01L HLA-DQA1*05:01-B1*02:01L
  REGION 1..15: note = CONT. FROM ABOVE: HLA-DRB1*04:10L HLA-DRB1*12:02L HLA-DPA1*02:01 -B1*13:01L HLA-DQA1*03:01-B1*03:02L HLA-DRB1*14:54L HLA-DQA1*05: 05-B1*03:01L HLA-DRB1*14:17L HLA-DRB1*07:01L HLA-DRB1*10:01L HLA -DRB1*16:01L HLA-DRB1*04:08L HLA-DQA1*02:01-B1*03:03L
  source 1..15: note = Severe acute respiratory syndrome coronavirus 2
APHGVVFLHVTYVPA

SEQ ID NO: 10228 - protein, 14 aa, Severe acute respiratory syndrome-related coronavirus
  REGION 1..14: note = Table B: HLA-DQA1*03:02-B1*03:03L HLA-DRB1*04:04L HLA-DRB1*11:04L HLA-DRB1*14:02L HLA-DRB1*11:01L HLA-DRB3*01:01L HLA-DRB1*10:01L HLA-DRB1*08:03L
  source 1..14: note = Severe acute respiratory syndrome coronavirus 2
GVVFLHVTYVPAQE

SEQ ID NO: 10229 - protein, 10 aa, Severe acute respiratory syndrome-related coronavirus
  REGION 1..10: note = Table B: HLA-DQA1*03:02-B1*03:03L HLA-DQA1*05:01-B1*03:01L HLA-DRB1*04:03L HLA-DRB1*13:03L HLA-DRB1*01:03L HLA-DRB1*04:02L HLA-DRB1*04:05L HLA-DQA1*01:02-B1*06:02L HLA-DRB1*01:02L HLA-DRB4*03:01NL HLA-DQA1*01:01-B1*05:01L HLA-DQA1*01-B1*05L
  REGION 1..10: note = CONT. FROM ABOVE: HLA-DQA1*05:05-B1*03:19L HLA-DQA1*05:01-B1*02: 01L HLA-DRB1*04:10L HLA-DRB1*12:01L HLA-DPA1*03:01-B1*105:01L HL A-DQA1*03:01-B1*03:02L HLA-DRB1*14:54L HLA-DQA1*05:05-B1*03:01L HLA-DRB1*14:17L HLA-DPA1*01:02-B1*04:01L HLA-DRB1*16:01L
  REGION 1..10: note = CONT. FROM ABOVE: HLA-DQA1*01:03-B1*06:01L HLA-DRB1*04:08L HLA-D QA1*02:01-B1*03:03L HLA-DRB1*15:03L
  source 1..10: note = Severe acute respiratory syndrome coronavirus 2
VTYVPAQEKN

SEQ ID NO: 10230 - protein, 10 aa, Severe acute respiratory syndrome-related coronavirus
  REGION 1..10: note = Table B: HLA-DQA1*03:02-B1*03:03L HLA-DRB1*04:03L HLA-DRB1*04:02L HLA-DQA1*05:01-B1*02:01L HLA-DRB1*12:01L HLA-DQA1*03:01-B1*03:02L HLA-DRB1*14:17L HLA-DRB1*16:01L HLA-DQA1*02:01-B1*03:03L
  source 1..10: note = Severe acute respiratory syndrome coronavirus 2
YVPAQEKNFT

SEQ ID NO: 10231 - protein, 13 aa, Severe acute respiratory syndrome-related coronavirus
  REGION 1..13: note = Table B: HLA-DQA1*03:02-B1*03:03L HLA-DRB1*04:03L HLA-DRB1*04:02L HLA-DQA1*05:01-B1*02:01L HLA-DQA1*03:01-B1*03:02L HLA-DRB1*14:17L HLA-DQA1*02:01-B1*03:03L
  source 1..13: note = Severe acute respiratory syndrome coronavirus 2
VPAQEKNFTTAPA

SEQ ID NO: 10232 - protein, 11 aa, Severe acute respiratory syndrome-related coronavirus
  REGION 1..11: note = Table B: HLA-DQA1*03:02-B1*03:03L HLA-DQA1*05:05-B1*03:19L HLA-DPA1*01:03-B1*104:01L
  source 1..11: note = Severe acute respiratory syndrome coronavirus 2
QEKNFTTAPAI

SEQ ID NO: 10233 - protein, 13 aa, Severe acute respiratory syndrome-related coronavirus
  REGION 1..13: note = Table B: HLA-DQA1*03:02-B1*03:03L HLA-DQA1*05:01-B1*03:01L HLA-DRB1*04:03L HLA-DRB1*01:03L HLA-DRB1*04:05L HLA-DRB1*01:02L HLA-DQA1*05:01-B1*02:01L HLA-DRB1*12:01L HLA-DPA1*02:01-B1*13:01L HLA-DPA1*03:01-B1*105:01L
  REGION 1..13: note = CONT. FROM ABOVE: HLA-DQA1*03:01-B1*03:02L HLA-DRB1*16:01L HLA-D RB1*04:08L HLA-DRB1*15:03L
  source 1..13: note = Severe acute respiratory syndrome coronavirus 2
EKNFTTAPAICHD

SEQ ID NO: 10234 - protein, 11 aa, Severe acute respiratory syndrome-related coronavirus
  REGION 1..11: note = Table B: HLA-DQA1*03:02-B1*03:03L HLA-DRB1*04:03L HLA-DPA1*03:01-B1*105:01L
  source 1..11: note = Severe acute respiratory syndrome coronavirus 2
FTTAPAICHDG

SEQ ID NO: 10235 - protein, 10 aa, Severe acute respiratory syndrome-related coronavirus
  REGION 1..10: note = Table B: HLA-DQA1*03:02-B1*03:03L HLA-DQA1*05:01-B1*03:01L HLA-DQA1*01:02-B1*06:02L HLA-DQA1*05:05-B1*03:19L HLA-DQA1*05:01-B1*02:01L HLA-DQA1*03:01-B1*03:02L HLA-DRB1*16:01L HLA-DQA1*01:03-B1*06:01L
  REGION 1..10: note = CONT. FROM ABOVE: HLA-DQA1*02:01-B1*03:03L
  source 1..10: note = Severe acute respiratory syndrome coronavirus 2
AHFPREGVFV

SEQ ID NO: 10236 - protein, 13 aa, Severe acute respiratory syndrome-related coronavirus
  REGION 1..13: note = Table B: HLA-DQA1*03:02-B1*03:03L HLA-DQA1*05:01-B1*03:01L HLA-DRB1*04:03L HLA-DRB1*04:05L HLA-DQA1*01:02-B1*06:02L HLA-DQA1*01:01-B1*05:01L HLA-DRB1*16:01L HLA-DQA1*01:03-B1*06:01L
  source 1..13: note = Severe acute respiratory syndrome coronavirus 2
FPREGVFVSNGTH

SEQ ID NO: 10237 - protein, 10 aa, Severe acute respiratory syndrome-related coronavirus
  REGION 1..10: note = Table B: HLA-DQA1*03:02-B1*03:03L HLA-DQA1*05:01-B1*03:01L HLA-DRB1*04:03L HLA-DRB1*13:02L HLA-DRB1*13:03L HLA-DRB1*01:03L HLA-DRB1*04:05L HLA-DQA1*01:02-B1*06:02M HLA-DRB1*01:01L HLA-DRB4*03:01NL HLA-DRB1*08:77L HLA-DPA1*01:03-B1*03:01L
  REGION 1..10: note = CONT. FROM ABOVE: HLA-DPA1*03:01-B1*04:02L HLA-DRB1*03:01L HLA-D RB1*14:01L HLA-DRB1*14:02L HLA-DQA1*01-B1*05L HLA-DQA1*05:05-B1* 03:19L HLA-DQA1*05:01-B1*02:01L HLA-DRB4*01:01L HLA-DPA1*01:03-B 1*04:01L HLA-DQA1*05:05-B1*03:116L HLA-DPA1*01:03-B1*04:02L
  REGION 1..10: note = CONT. FROM ABOVE: HLA-DRB1*12:01L HLA-DPA1*02:01-B1*13:01L HLA-D PA1*03:01-B1*105:01L HLA-DQA1*03:01-B1*03:02L HLA-DQA1*05:05-B1* 03:01L HLA-DPA1*01:02-B1*04:01L HLA-DRB1*07:01L HLA-DRB1*10:01L HLA-DRB1*16:01L HLA-DQA1*01:03-B1*06:01L HLA-DRB1*08:02L
  REGION 1..10: note = CONT. FROM ABOVE: HLA-DQA1*02:01-B1*03:03M HLA-DRB1*15:03L
  source 1..10: note = Severe acute respiratory syndrome coronavirus 2
GVFVSNGTHW

SEQ ID NO: 10238 - protein, 11 aa, Severe acute respiratory syndrome-related coronavirus
  REGION 1..11: note = Table B: HLA-DQA1*03:02-B1*03:03L HLA-DQA1*05:01-B1*03:01L HLA-DRB1*13:03L HLA-DRB1*01:03L HLA-DRB1*04:02L HLA-DRB1*04:04L HLA-DRB1*04:05L HLA-DQA1*01:02-B1*06:02L HLA-DRB1*01:02L HLA-DRB4*03:01NL HLA-DRB1*08:04L HLA-DRB1*14:01L HLA-DRB1*11:04L
  REGION 1..11: note = CONT. FROM ABOVE: HLA-DQA1*01:01-B1*05:01L HLA-DRB1*08:01L HLA-D QA1*01-B1*05L HLA-DQA1*05:01-B1*02:01L HLA-DRB1*04:10L HLA-DRB1* 12:01L HLA-DPA1*03:01-B1*105:01L HLA-DRB1*14:54L HLA-DPA1*01:02- B1*04:01L HLA-DRB1*10:01L HLA-DRB1*16:01L HLA-DRB1*04:08L
  REGION 1..11: note = CONT. FROM ABOVE: HLA-DRB1*08:03L HLA-DRB1*15:03L
  source 1..11: note = Severe acute respiratory syndrome coronavirus 2
FVTQRNFYEPQ

SEQ ID NO: 10239 - protein, 13 aa, Severe acute respiratory syndrome-related coronavirus
  REGION 1..13: note = Table B: HLA-DQA1*03:02-B1*03:03L HLA-DRB1*01:03L HLA-DRB1*04:02L HLA-DRB1*04:05L HLA-DQA1*01:02-B1*06:02L HLA-DRB1*01:02L HLA-DPA1*01:03-B1*03:01L HLA-DPA1*03:01-B1*04:02L HLA-DQA1*01:01-B1*05:01L
  REGION 1..13: note = CONT. FROM ABOVE: HLA-DRB1*12:01L HLA-DPA1*03:01-B1*105:01L HLA- DPA1*01:02-B1*04:01L HLA-DQA1*01:03-B1*06:01L HLA-DRB1*04:08L
  source 1..13: note = Severe acute respiratory syndrome coronavirus 2
VTQRNFYEPQIIT

SEQ ID NO: 10240 - protein, 12 aa, Severe acute respiratory syndrome-related coronavirus
  REGION 1..12: note = Table B: HLA-DQA1*03:02-B1*03:03L HLA-DQA1*01:02-B1*06:02L HLA-DQA1*05:01-B1*02:01L HLA-DPA1*03:01-B1*105:01L HLA-DQA1*03:01-B1*03:02L HLA-DQA1*01:03-B1*06:01L HLA-DQA1*02:01-B1*03:03L
  source 1..12: note = Severe acute respiratory syndrome coronavirus 2
RNFYEPQIITTD

SEQ ID NO: 10241 - protein, 11 aa, Severe acute respiratory syndrome-related coronavirus
  REGION 1..11: note = Table B: HLA-DQA1*03:02-B1*03:03L HLA-DRB1*04:03L HLA-DQA1*01-B1*05L HLA-DQA1*05:01-B1*02:01L HLA-DRB1*14:17L HLA-DQA1*01:03-B1*06:01L HLA-DQA1*02:01-B1*03:03L
  source 1..11: note = Severe acute respiratory syndrome coronavirus 2
FYEPQIITTDN

SEQ ID NO: 10242 - protein, 12 aa, Severe acute respiratory syndrome-related coronavirus
  REGION 1..12: note = Table B: HLA-DQA1*03:02-B1*03:03L HLA-DRB1*04:03L HLA-DQA1*01-B1*05L
  source 1..12: note = Severe acute respiratory syndrome coronavirus 2
YEPQIITTDNTF

SEQ ID NO: 10243 - protein, 12 aa, Severe acute respiratory syndrome-related coronavirus
  REGION 1..12: note = Table B: HLA-DQA1*03:02-B1*03:03L HLA-DRB1*04:03L HLA-DRB1*13:02L HLA-DRB1*04:02L HLA-DRB1*04:05L HLA-DRB4*03:01NL HLA-DRB1*08:77L HLA-DRB1*14:01L HLA-DQA1*01-B1*05L HLA-DRB1*04:10L HLA-DRB1*12:01L HLA-DRB1*12:02L
  REGION 1..12: note = CONT. FROM ABOVE: HLA-DQA1*03:01-B1*03:02L HLA-DRB1*14:54L HLA-D RB1*14:17L HLA-DRB1*16:01L HLA-DRB1*15:03L
  source 1..12: note = Severe acute respiratory syndrome coronavirus 2
EPQIITTDNTFV

SEQ ID NO: 10244 - protein, 12 aa, Severe acute respiratory syndrome-related coronavirus
  REGION 1..12: note = Table B: HLA-DQA1*03:02-B1*03:03L HLA-DRB1*13:02L HLA-DRB1*13:03L HLA-DRB1*04:02L HLA-DRB1*04:05L HLA-DRB4*03:01NL HLA-DRB1*08:77L HLA-DRB3*02:01L HLA-DRB1*14:01L HLA-DRB1*11:03L HLA-DRB1*11:04L HLA-DQA1*01-B1*05L HLA-DQA1*05:01-B1*02:01L
  REGION 1..12: note = CONT. FROM ABOVE: HLA-DRB1*04:10L HLA-DRB1*12:01L HLA-DRB1*12:02 L HLA-DQA1*03:01-B1*03:02L HLA-DRB1*14:54L HLA-DRB1*16:01L HLA-D QA1*02:01-B1*03:03L HLA-DRB1*15:03L
  source 1..12: note = Severe acute respiratory syndrome coronavirus 2
PQIITTDNTFVS

SEQ ID NO: 10245 - protein, 12 aa, Severe acute respiratory syndrome-related coronavirus
  REGION 1..12: note = Table B: HLA-DQA1*03:02-B1*03:03L HLA-DQA1*05:01-B1*03:01L HLA-DRB1*04:01L HLA-DRB1*01:03L HLA-DRB1*04:04L HLA-DRB1*04:05L HLA-DQA1*01:02-B1*06:02L HLA-DRB1*01:02L HLA-DRB1*08:04L HLA-DRB1*08:77L HLA-DRB3*02:01L HLA-DPA1*01:03-B1*03:01L
  REGION 1..12: note = CONT. FROM ABOVE: HLA-DRB1*11:03L HLA-DRB1*11:04L HLA-DRB1*14:02 L HLA-DQA1*01-B1*05L HLA-DQA1*05:05-B1*03:19L HLA-DRB4*01:01L HL A-DRB1*04:10L HLA-DRB1*12:02L HLA-DPA1*03:01-B1*105:01L HLA-DQA1 *03:01-B1*03:02L HLA-DQA1*05:05-B1*03:01L HLA-DRB1*10:01L
  REGION 1..12: note = CONT. FROM ABOVE: HLA-DRB1*04:08L HLA-DQA1*02:01-B1*03:03L HLA-D RB1*15:03L
  source 1..12: note = Severe acute respiratory syndrome coronavirus 2
IITTDNTFVSGN

SEQ ID NO: 10246 - protein, 12 aa, Severe acute respiratory syndrome-related coronavirus
  REGION 1..12: note = Table B: HLA-DQA1*03:02-B1*03:03L HLA-DQA1*05:01-B1*02:01L HLA-DQA1*03:01-B1*03:02L HLA-DQA1*01:03-B1*06:01L
  source 1..12: note = Severe acute respiratory syndrome coronavirus 2
DNTFVSGNCDVV

SEQ ID NO: 10247 - protein, 13 aa, Severe acute respiratory syndrome-related coronavirus
  REGION 1..13: note = Table B: HLA-DQA1*03:02-B1*03:03L HLA-DRB1*04:03L HLA-DQA1*05:01-B1*02:01L HLA-DQA1*03:01-B1*03:02L
  source 1..13: note = Severe acute respiratory syndrome coronavirus 2
NTFVSGNCDVVIG

SEQ ID NO: 10248 - protein, 10 aa, Severe acute respiratory syndrome-related coronavirus
  REGION 1..10: note = Table B: HLA-DQA1*03:02-B1*03:03M HLA-DQA1*05:01-B1*03:01L HLA-DRB1*13:03L HLA-DQA1*01:02-B1*06:02L HLA-DRB1*01:02L HLA-DPA1*03:01-B1*04:02L HLA-DRB1*14:01L HLA-DRB1*14:02L HLA-DRB1*08:01L HLA-DQA1*05:05-B1*03:19L
  REGION 1..10: note = CONT. FROM ABOVE: HLA-DQA1*05:01-B1*02:01L HLA-DPA1*01:03-B1*04: 01L HLA-DQA1*05:05-B1*03:116L HLA-DRB1*09:01L HLA-DPA1*01:03-B1* 04:02L HLA-DRB1*12:01L HLA-DPA1*02:01-B1*13:01L HLA-DPA1*03:01-B 1*105:01L HLA-DQA1*03:01-B1*03:02L HLA-DPA1*01:03-B1*104:01L
  REGION 1..10: note = CONT. FROM ABOVE: HLA-DPA1*01:02-B1*04:01L HLA-DRB1*10:01L HLA-D RB1*16:01L HLA-DQA1*01:03-B1*06:01L HLA-DRB1*08:03L HLA-DQA1*02: 01-B1*03:03L HLA-DRB1*15:03M
  source 1..10: note = Severe acute respiratory syndrome coronavirus 2
VVIGIVNNTV

SEQ ID NO: 10249 - protein, 12 aa, Severe acute respiratory syndrome-related coronavirus
  REGION 1..12: note = Table B: HLA-DQA1*03:02-B1*03:03L HLA-DQA1*05:01-B1*03:01L HLA-DRB1*04:03L HLA-DRB1*13:02L HLA-DRB1*04:02L HLA-DRB1*04:05L HLA-DRB1*01:02L HLA-DRB4*03:01NL HLA-DRB1*08:77L HLA-DRB3*02:01L HLA-DPA1*03:01-B1*04:02L HLA-DRB1*14:01L HLA-DQA1*01-B1*05L
  REGION 1..12: note = CONT. FROM ABOVE: HLA-DQA1*05:01-B1*02:01L HLA-DRB1*04:10L HLA-D RB1*12:01L HLA-DRB1*12:02L HLA-DPA1*03:01-B1*105:01L HLA-DQA1*03 :01-B1*03:02L HLA-DRB1*14:54L HLA-DRB1*14:17L HLA-DPA1*01:02-B1* 04:01L HLA-DRB1*16:01L HLA-DQA1*01:03-B1*06:01L
  REGION 1..12: note = CONT. FROM ABOVE: HLA-DQA1*02:01-B1*03:03L HLA-DRB1*15:03L
  source 1..12: note = Severe acute respiratory syndrome coronavirus 2
IGIVNNTVYDPL

SEQ ID NO: 10250 - protein, 12 aa, Severe acute respiratory syndrome-related coronavirus
  REGION 1..12: note = Table B: HLA-DQA1*03:02-B1*03:03L HLA-DRB1*04:03L HLA-DRB1*04:05L HLA-DQA1*01-B1*05L HLA-DPA1*02:01-B1*13:01L HLA-DQA1*03:01-B1*03:02L HLA-DRB1*16:01L HLA-DQA1*01:03-B1*06:01L HLA-DQA1*02:01-B1*03:03L
  source 1..12: note = Severe acute respiratory syndrome coronavirus 2
IVNNTVYDPLQP

SEQ ID NO: 10251 - protein, 12 aa, Severe acute respiratory syndrome-related coronavirus
  REGION 1..12: note = Table B: HLA-DQA1*03:02-B1*03:03L HLA-DRB1*04:03L HLA-DQA1*01-B1*05L HLA-DQA1*05:01-B1*02:01L HLA-DPA1*03:01-B1*105:01L HLA-DQA1*03:01-B1*03:02L HLA-DRB1*16:01L HLA-DQA1*01:03-B1*06:01L
  REGION 1..12: note = CONT. FROM ABOVE: HLA-DQA1*02:01-B1*03:03L
  source 1..12: note = Severe acute respiratory syndrome coronavirus 2
VNNTVYDPLQPE

SEQ ID NO: 10252 - protein, 10 aa, Severe acute respiratory syndrome-related coronavirus
  REGION 1..10: note = Table B: HLA-DQA1*03:02-B1*03:03H HLA-DQA1*05:01-B1*03:01M HLA-DRB1*04:01L HLA-DRB1*04:03L HLA-DRB1*13:02L HLA-DRB1*13:03L HLA-DRB1*01:03L HLA-DRB1*04:02L HLA-DRB1*04:05L HLA-DQA1*01:02-B1*06:02M HLA-DRB1*01:01L HLA-DRB1*01:02L
  REGION 1..10: note = CONT. FROM ABOVE: HLA-DRB1*08:77L HLA-DRB3*02:01L HLA-DPA1*01:03 -B1*03:01L HLA-DPA1*03:01-B1*04:02M HLA-DRB1*14:01L HLA-DRB1*14: 02M HLA-DRB1*08:01L HLA-DRB1*11:01L HLA-DQA1*01-B1*05L HLA-DQA1* 05:05-B1*03:19L HLA-DQA1*05:01-B1*02:01L HLA-DRB4*01:01L
  REGION 1..10: note = CONT. FROM ABOVE: HLA-DPA1*01:03-B1*04:01L HLA-DQA1*05:05-B1*03: 116M HLA-DRB1*09:01M HLA-DPA1*01:03-B1*04:02M HLA-DRB1*12:01L HL A-DPA1*02:01-B1*13:01M HLA-DPA1*03:01-B1*105:01M HLA-DQA1*03:01- B1*03:02M HLA-DPA1*01:03-B1*104:01L HLA-DPA1*01:02-B1*04:01L
  REGION 1..10: note = CONT. FROM ABOVE: HLA-DRB1*07:01L HLA-DRB1*10:01L HLA-DRB1*16:01 L HLA-DQA1*01:03-B1*06:01L HLA-DRB1*08:03L HLA-DQA1*02:01-B1*03: 03M HLA-DRB1*15:03M
  source 1..10: note = Severe acute respiratory syndrome coronavirus 2
TVYDPLQPEL

SEQ ID NO: 10253 - protein, 10 aa, Severe acute respiratory syndrome-related coronavirus
  REGION 1..10: note = Table B: HLA-DQA1*03:02-B1*03:03L HLA-DRB1*04:03L HLA-DRB1*04:05L HLA-DQA1*01-B1*05L HLA-DQA1*05:01-B1*02:01L HLA-DPA1*03:01-B1*105:01L HLA-DQA1*03:01-B1*03:02L HLA-DRB1*16:01L HLA-DQA1*01:03-B1*06:01L
  REGION 1..10: note = CONT. FROM ABOVE: HLA-DQA1*02:01-B1*03:03L HLA-DRB1*15:03L
  source 1..10: note = Severe acute respiratory syndrome coronavirus 2
VYDPLQPELD

SEQ ID NO: 10254 - protein, 13 aa, Severe acute respiratory syndrome-related coronavirus
  REGION 1..13: note = Table B: HLA-DQA1*03:02-B1*03:03L HLA-DRB1*04:02L HLA-DRB1*04:05L HLA-DQA1*01:01-B1*05:01L HLA-DRB1*04:10L HLA-DRB1*12:01L HLA-DRB1*14:17L HLA-DRB1*16:01L
  source 1..13: note = Severe acute respiratory syndrome coronavirus 2
DPLQPELDSFKEE

SEQ ID NO: 10255 - protein, 10 aa, Severe acute respiratory syndrome-related coronavirus
  REGION 1..10: note = Table B: HLA-DQA1*03:02-B1*03:03M HLA-DQA1*05:05-B1*03:19L HLA-DRB1*09:01L HLA-DQA1*03:01-B1*03:02L HLA-DPA1*01:03-B1*104:01L
  source 1..10: note = Severe acute respiratory syndrome coronavirus 2
PELDSFKEEL

SEQ ID NO: 10256 - protein, 10 aa, Severe acute respiratory syndrome-related coronavirus
  REGION 1..10: note = Table B: HLA-DQA1*03:02-B1*03:03L HLA-DQA1*05:01-B1*03:01L HLA-DRB1*04:03L HLA-DRB1*13:02L HLA-DRB1*13:03M HLA-DRB1*01:03L HLA-DQA1*01:02-B1*06:02M HLA-DRB4*03:01NL HLA-DRB1*08:77L HLA-DPA1*01:03-B1*03:01L HLA-DPA1*03:01-B1*04:02L
  REGION 1..10: note = CONT. FROM ABOVE: HLA-DRB1*03:01L HLA-DRB1*14:01L HLA-DRB1*14:02 L HLA-DRB5*01:01L HLA-DQA1*01-B1*05L HLA-DQA1*05:05-B1*03:19L HL A-DQA1*05:01-B1*02:01M HLA-DRB4*01:01L HLA-DPA1*01:03-B1*04:01L HLA-DQA1*05:05-B1*03:116L HLA-DPA1*01:03-B1*04:02L
  REGION 1..10: note = CONT. FROM ABOVE: HLA-DRB1*12:01L HLA-DPA1*02:01-B1*13:01L HLA-D PA1*03:01-B1*105:01M HLA-DPA1*01:03-B1*104:01L HLA-DQA1*05:05-B1 *03:01L HLA-DPA1*01:02-B1*04:01L HLA-DRB1*10:01L HLA-DRB1*16:01L HLA-DQA1*01:03-B1*06:01L HLA-DRB1*08:02L
  REGION 1..10: note = CONT. FROM ABOVE: HLA-DQA1*02:01-B1*03:03L HLA-DRB1*15:03L
  source 1..10: note = Severe acute respiratory syndrome coronavirus 2
DSFKEELDKY

SEQ ID NO: 10257 - protein, 11 aa, Severe acute respiratory syndrome-related coronavirus
  REGION 1..11: note = Table B: HLA-DQA1*03:02-B1*03:03L HLA-DQA1*05:01-B1*03:01L HLA-DRB1*13:02L HLA-DRB1*13:03L HLA-DRB1*01:03L HLA-DRB1*04:02L HLA-DRB1*04:05L HLA-DQA1*01:02-B1*06:02L HLA-DRB1*01:02L HLA-DRB4*03:01NL HLA-DRB1*08:04L HLA-DPA1*01:03-B1*03:01L
  REGION 1..11: note = CONT. FROM ABOVE: HLA-DRB1*14:01L HLA-DRB1*14:02L HLA-DQA1*01:01 -B1*05:01L HLA-DRB1*08:01L HLA-DQA1*01-B1*05L HLA-DQA1*05:05-B1* 03:19L HLA-DQA1*05:01-B1*02:01L HLA-DRB1*04:10L HLA-DRB1*12:01L HLA-DRB1*12:02L HLA-DPA1*02:01-B1*13:01L
  REGION 1..11: note = CONT. FROM ABOVE: HLA-DPA1*03:01-B1*105:01L HLA-DRB1*14:54L HLA- DQA1*05:05-B1*03:01L HLA-DRB1*14:17L HLA-DPA1*01:02-B1*04:01L HL A-DQA1*01:03-B1*06:01L HLA-DRB1*04:08L HLA-DRB1*15:03L
  source 1..11: note = Severe acute respiratory syndrome coronavirus 2
YFKNHTSPDVD

SEQ ID NO: 10258 - protein, 12 aa, Severe acute respiratory syndrome-related coronavirus
  REGION 1..12: note = Table B: HLA-DQA1*03:02-B1*03:03L HLA-DQA1*05:01-B1*02:01L HLA-DQA1*03:01-B1*03:02L HLA-DQA1*01:03-B1*06:01L HLA-DQA1*02:01-B1*03:03L
  source 1..12: note = Severe acute respiratory syndrome coronavirus 2
NHTSPDVDLGDI

SEQ ID NO: 10259 - protein, 12 aa, Severe acute respiratory syndrome-related coronavirus
  REGION 1..12: note = Table B: HLA-DQA1*03:02-B1*03:03L HLA-DQA1*03:01-B1*03:02L HLA-DQA1*01:03-B1*06:01L
  source 1..12: note = Severe acute respiratory syndrome coronavirus 2
PDVDLGDISGIN

SEQ ID NO: 10260 - protein, 12 aa, Severe acute respiratory syndrome-related coronavirus
  REGION 1..12: note = Table B: HLA-DQA1*03:02-B1*03:03L HLA-DRB1*04:03L HLA-DQA1*05:01-B1*02:01L HLA-DQA1*03:01-B1*03:02L HLA-DQA1*02:01-B1*03:03L
  source 1..12: note = Severe acute respiratory syndrome coronavirus 2
VDLGDISGINAS

SEQ ID NO: 10261 - protein, 10 aa, Severe acute respiratory syndrome-related coronavirus
  REGION 1..10: note = Table B: HLA-DQA1*03:02-B1*03:03L HLA-DRB1*11:02L HLA-DQA1*05:05-B1*03:19M HLA-DRB1*09:01L HLA-DQA1*03:01-B1*03:02L HLA-DPA1*01:03-B1*104:01L HLA-DQA1*02:01-B1*03:03L
  source 1..10: note = Severe acute respiratory syndrome coronavirus 2
GDISGINASV

SEQ ID NO: 10262 - protein, 10 aa, Severe acute respiratory syndrome-related coronavirus
  REGION 1..10: note = Table B: HLA-DQA1*03:02-B1*03:03L HLA-DQA1*05:01-B1*03:01L HLA-DQA1*05:05-B1*03:19L HLA-DQA1*03:01-B1*03:02L HLA-DQA1*05:05-B1*03:01L HLA-DQA1*02:01-B1*03:03L
  source 1..10: note = Severe acute respiratory syndrome coronavirus 2
ISGINASVVN

SEQ ID NO: 10263 - protein, 10 aa, Severe acute respiratory syndrome-related coronavirus
  REGION 1..10: note = Table B: HLA-DQA1*03:02-B1*03:03L HLA-DQA1*05:01-B1*03:01L HLA-DRB1*04:01L HLA-DRB1*04:03L HLA-DRB1*13:02L HLA-DRB1*13:03L HLA-DRB1*01:03L HLA-DRB1*04:02L HLA-DRB1*04:04L HLA-DRB1*04:05L HLA-DQA1*01:02-B1*06:02M HLA-DRB1*01:02L HLA-DRB4*03:01NL
  REGION 1..10: note = CONT. FROM ABOVE: HLA-DRB1*08:77L HLA-DRB1*14:01L HLA-DRB1*11:04 L HLA-DRB1*14:02L HLA-DQA1*01:01-B1*05:01L HLA-DRB1*08:01L HLA-D RB5*01:01L HLA-DQA1*05:05-B1*03:19L HLA-DRB4*02:01NL HLA-DQA1*05 :01-B1*02:01L HLA-DPA1*01:03-B1*04:02L HLA-DRB1*12:01L
  REGION 1..10: note = CONT. FROM ABOVE: HLA-DRB1*12:02L HLA-DPA1*03:01-B1*105:01L HLA- DQA1*03:01-B1*03:02M HLA-DRB1*14:54L HLA-DQA1*05:05-B1*03:01M HL A-DRB1*14:17L HLA-DRB1*16:01L HLA-DQA1*01:03-B1*06:01M HLA-DRB1* 04:08L HLA-DRB1*08:03L HLA-DQA1*02:01-B1*03:03M
  source 1..10: note = Severe acute respiratory syndrome coronavirus 2
INASVVNIQK

SEQ ID NO: 10264 - protein, 10 aa, Severe acute respiratory syndrome-related coronavirus
  REGION 1..10: note = Table B: HLA-DQA1*03:02-B1*03:03L HLA-DQA1*05:01-B1*03:01L HLA-DRB1*04:03L HLA-DRB1*04:02L HLA-DQA1*01:02-B1*06:02L HLA-DQA1*05:05-B1*03:19L HLA-DPA1*03:01-B1*105:01L HLA-DQA1*03:01-B1*03:02L HLA-DQA1*05:05-B1*03:01L
  REGION 1..10: note = CONT. FROM ABOVE: HLA-DQA1*01:03-B1*06:01L HLA-DQA1*02:01-B1*03: 03L
  source 1..10: note = Severe acute respiratory syndrome coronavirus 2
NASVVNIQKE

SEQ ID NO: 10265 - protein, 10 aa, Severe acute respiratory syndrome-related coronavirus
  REGION 1..10: note = Table B: HLA-DQA1*03:02-B1*03:03L HLA-DQA1*05:01-B1*03:01L HLA-DRB1*04:03L HLA-DRB1*04:02L HLA-DQA1*01:02-B1*06:02L HLA-DQA1*05:05-B1*03:19L HLA-DQA1*05:01-B1*02:01L HLA-DPA1*03:01-B1*105:01L HLA-DQA1*03:01-B1*03:02L
  REGION 1..10: note = CONT. FROM ABOVE: HLA-DQA1*05:05-B1*03:01L HLA-DRB1*14:17L HLA-D QA1*01:03-B1*06:01L HLA-DQA1*02:01-B1*03:03L
  source 1..10: note = Severe acute respiratory syndrome coronavirus 2
SVVNIQKEID

SEQ ID NO: 10266 - protein, 10 aa, Severe acute respiratory syndrome-related coronavirus
  REGION 1..10: note = Table B: HLA-DQA1*03:02-B1*03:03L HLA-DQA1*05:01-B1*03:01L HLA-DRB1*04:03L HLA-DRB1*13:02L HLA-DRB1*13:03M HLA-DRB1*01:03L HLA-DRB1*04:02M HLA-DRB1*04:04L HLA-DRB1*04:05L HLA-DQA1*01:02-B1*06:02L HLA-DRB1*01:02L HLA-DRB4*03:01NL
  REGION 1..10: note = CONT. FROM ABOVE: HLA-DRB1*08:04L HLA-DRB1*14:01L HLA-DRB1*11:04 L HLA-DQA1*01:01-B1*05:01L HLA-DRB1*08:01M HLA-DRB1*11:01L HLA-D RB1*04:10L HLA-DRB1*12:01L HLA-DRB3*01:01L HLA-DQA1*03:01-B1*03: 02L HLA-DRB1*14:54L HLA-DQA1*05:05-B1*03:01L HLA-DRB1*14:17L
  REGION 1..10: note = CONT. FROM ABOVE: HLA-DPA1*01:02-B1*04:01L HLA-DRB1*10:01L HLA-D RB1*16:01L HLA-DQA1*01:03-B1*06:01L HLA-DRB1*04:08L HLA-DRB1*08: 03L HLA-DQA1*02:01-B1*03:03L
  source 1..10: note = Severe acute respiratory syndrome coronavirus 2
VVNIQKEIDR

SEQ ID NO: 10267 - protein, 10 aa, Severe acute respiratory syndrome-related coronavirus
  REGION 1..10: note = Table B: HLA-DQA1*03:02-B1*03:03L HLA-DQA1*05:05-B1*03:19L HLA-DRB1*09:01L HLA-DPA1*01:03-B1*04:02L HLA-DQA1*03:01-B1*03:02L HLA-DPA1*01:03-B1*104:01L
  source 1..10: note = Severe acute respiratory syndrome coronavirus 2
KEIDRLNEVA

SEQ ID NO: 10268 - protein, 12 aa, Severe acute respiratory syndrome-related coronavirus
  REGION 1..12: note = Table B: HLA-DQA1*03:02-B1*03:03L HLA-DQA1*05:01-B1*03:01L HLA-DRB1*04:03L HLA-DRB1*13:02L HLA-DRB1*13:03L HLA-DRB1*04:05L HLA-DQA1*01:02-B1*06:02L HLA-DRB1*01:02L HLA-DPA1*01:03-B1*03:01L HLA-DRB1*14:01L HLA-DRB1*08:01L
  REGION 1..12: note = CONT. FROM ABOVE: HLA-DQA1*05:01-B1*02:01L HLA-DRB1*12:01L HLA-D PA1*02:01-B1*13:01L HLA-DPA1*03:01-B1*105:01L HLA-DRB1*14:54L HL A-DPA1*01:02-B1*04:01L HLA-DRB1*16:01L HLA-DQA1*01:03-B1*06:01L HLA-DQA1*02:01-B1*03:03L HLA-DRB1*15:03L
  source 1..12: note = Severe acute respiratory syndrome coronavirus 2
IDRLNEVAKNLN

SEQ ID NO: 10269 - protein, 10 aa, Severe acute respiratory syndrome-related coronavirus
  REGION 1..10: note = Table B: HLA-DQA1*03:02-B1*03:03L HLA-DQA1*03:01-B1*03:02L
  source 1..10: note = Severe acute respiratory syndrome coronavirus 2
NEVAKNLNES

SEQ ID NO: 10270 - protein, 10 aa, Severe acute respiratory syndrome-related coronavirus
  REGION 1..10: note = Table B: HLA-DQA1*03:02-B1*03:03M HLA-DQA1*05:01-B1*03:01L HLA-DRB1*13:02L HLA-DRB1*13:03M HLA-DRB1*01:03L HLA-DRB1*04:02L HLA-DRB1*04:05L HLA-DQA1*01:02-B1*06:02M HLA-DRB1*01:01L HLA-DRB1*01:02M HLA-DRB4*03:01NL HLA-DRB1*08:77L HLA-DRB3*02:01L
  REGION 1..10: note = CONT. FROM ABOVE: HLA-DPA1*01:03-B1*03:01L HLA-DPA1*03:01-B1*04: 02L HLA-DRB1*03:01L HLA-DRB1*14:01L HLA-DRB1*11:04L HLA-DRB1*14: 02L HLA-DRB1*08:01L HLA-DRB1*11:01L HLA-DRB5*01:01L HLA-DQA1*01- B1*05L HLA-DQA1*05:05-B1*03:19L HLA-DQA1*05:01-B1*02:01M
  REGION 1..10: note = CONT. FROM ABOVE: HLA-DRB4*01:01L HLA-DPA1*01:03-B1*04:01M HLA-D QA1*05:05-B1*03:116L HLA-DRB1*09:01L HLA-DPA1*01:03-B1*04:02L HL A-DRB1*12:01L HLA-DPA1*02:01-B1*13:01L HLA-DPA1*03:01-B1*105:01M HLA-DQA1*03:01-B1*03:02L HLA-DPA1*01:03-B1*104:01L
  REGION 1..10: note = CONT. FROM ABOVE: HLA-DQA1*05:05-B1*03:01L HLA-DPA1*01:02-B1*04: 01L HLA-DRB1*07:01L HLA-DRB1*10:01L HLA-DRB1*16:01L HLA-DQA1*01: 03-B1*06:01L HLA-DRB1*08:03L HLA-DQA1*02:01-B1*03:03L HLA-DRB1*1 5:01L HLA-DRB1*15:03M
  source 1..10: note = Severe acute respiratory syndrome coronavirus 2
EVAKNLNESL

SEQ ID NO: 10271 - protein, 10 aa, Severe acute respiratory syndrome-related coronavirus
  REGION 1..10: note = Table B: HLA-DQA1*03:02-B1*03:03L
  source 1..10: note = Severe acute respiratory syndrome coronavirus 2
KNLNESLIDL

SEQ ID NO: 10272 - protein, 10 aa, Severe acute respiratory syndrome-related coronavirus
  REGION 1..10: note = Table B: HLA-DQA1*03:02-B1*03:03M HLA-DRB1*11:02L HLA-DQA1*05:05-B1*03:19M HLA-DQA1*05:05-B1*03:116L HLA-DRB1*09:01L HLA-DQA1*03:01-B1*03:02M HLA-DPA1*01:03-B1*104:01L
  source 1..10: note = Severe acute respiratory syndrome coronavirus 2
NESLIDLQEL

SEQ ID NO: 10273 - protein, 11 aa, Severe acute respiratory syndrome-related coronavirus
  REGION 1..11: note = Table B: HLA-DQA1*03:02-B1*03:03L HLA-DRB1*04:01L HLA-DRB1*11:01L HLA-DRB1*09:01L HLA-DPA1*02:01-B1*13:01L HLA-DRB1*08:03L
  source 1..11: note = Severe acute respiratory syndrome coronavirus 2
SLIDLQELGKY

SEQ ID NO: 10274 - protein, 11 aa, Severe acute respiratory syndrome-related coronavirus
  REGION 1..11: note = Table B: HLA-DQA1*03:02-B1*03:03L HLA-DRB1*14:01L HLA-DPA1*03:01-B1*105:01L HLA-DRB1*14:17L HLA-DQA1*01:03-B1*06:01L
  source 1..11: note = Severe acute respiratory syndrome coronavirus 2
LIDLQELGKYE

SEQ ID NO: 10275 - protein, 12 aa, Severe acute respiratory syndrome-related coronavirus
  REGION 1..12: note = Table B: HLA-DQA1*03:02-B1*03:03L HLA-DPA1*02:01-B1*13:01L HLA-DQA1*05:05-B1*03:01L HLA-DPA1*01:02-B1*04:01L HLA-DQA1*01:03-B1*06:01L
  source 1..12: note = Severe acute respiratory syndrome coronavirus 2
IDLQELGKYEQY

SEQ ID NO: 10276 - protein, 10 aa, Severe acute respiratory syndrome-related coronavirus
  REGION 1..10: note = Table B: HLA-DQA1*03:02-B1*03:03L HLA-DRB1*11:02L HLA-DQA1*05:05-B1*03:19M HLA-DPA1*01:03-B1*104:01M
  source 1..10: note = Severe acute respiratory syndrome coronavirus 2
QELGKYEQYI

SEQ ID NO: 10277 - protein, 10 aa, Severe acute respiratory syndrome-related coronavirus
  REGION 1..10: note = Table B: HLA-DQA1*03:02-B1*03:03L HLA-DQA1*05:01-B1*03:01L HLA-DQA1*01:02-B1*06:02L HLA-DRB1*08:77L HLA-DPA1*01:03-B1*03:01L HLA-DPA1*03:01-B1*04:02L HLA-DRB1*03:01L HLA-DRB1*11:02L HLA-DQA1*01-B1*05L
  REGION 1..10: note = CONT. FROM ABOVE: HLA-DQA1*05:05-B1*03:19M HLA-DQA1*05:01-B1*02: 01L HLA-DRB4*01:01L HLA-DPA1*01:03-B1*04:01L HLA-DQA1*05:05-B1*0 3:116L HLA-DPA1*01:03-B1*04:02L HLA-DRB1*12:01L HLA-DPA1*02:01-B 1*13:01L HLA-DPA1*01:03-B1*104:01L HLA-DPA1*01:02-B1*04:01L
  REGION 1..10: note = CONT. FROM ABOVE: HLA-DRB1*10:01L HLA-DRB1*16:01L HLA-DQA1*01:03 -B1*06:01L HLA-DQA1*02:01-B1*03:03L HLA-DRB1*15:03L
  source 1..10: note = Severe acute respiratory syndrome coronavirus 2
YEQYIKWPWY

SEQ ID NO: 10278 - protein, 10 aa, Severe acute respiratory syndrome-related coronavirus
  REGION 1..10: note = Table B: HLA-DQA1*03:02-B1*03:03L HLA-DQA1*05:05-B1*03:19L
  source 1..10: note = Severe acute respiratory syndrome coronavirus 2
GLIAIVMVTI

SEQ ID NO: 10279 - protein, 10 aa, Severe acute respiratory syndrome-related coronavirus
  REGION 1..10: note = Table B: HLA-DQA1*03:02-B1*03:03L HLA-DQA1*01-B1*05L HLA-DQA1*05:01-B1*02:01L HLA-DQA1*03:01-B1*03:02L
  source 1..10: note = Severe acute respiratory syndrome coronavirus 2
FDEDDSEPVL

SEQ ID NO: 10280 - protein, 10 aa, Severe acute respiratory syndrome-related coronavirus
  REGION 1..10: note = Table B: HLA-DQA1*03:02-B1*03:03L HLA-DRB1*13:03L HLA-DQA1*01-B1*05L HLA-DQA1*05:01-B1*02:01L HLA-DQA1*03:01-B1*03:02L
  source 1..10: note = Severe acute respiratory syndrome coronavirus 2
DEDDSEPVLK

SEQ ID NO: 10281 - protein, 10 aa, Severe acute respiratory syndrome-related coronavirus
  REGION 1..10: note = Table B: HLA-DQA1*03:02-B1*03:03M HLA-DQA1*05:01-B1*03:01L HLA-DRB1*08:77L HLA-DQA1*05:05-B1*03:19M HLA-DRB4*01:01L HLA-DPA1*01:03-B1*04:01L HLA-DQA1*05:05-B1*03:116L HLA-DRB1*09:01L HLA-DPA1*01:03-B1*04:02L
  REGION 1..10: note = CONT. FROM ABOVE: HLA-DQA1*03:01-B1*03:02M HLA-DPA1*01:03-B1*104 :01L HLA-DPA1*01:02-B1*04:01L HLA-DRB1*10:01L HLA-DRB1*16:01L
  source 1..10: note = Severe acute respiratory syndrome coronavirus 2
SEPVLKGVKL

SEQ ID NO: 10282 - protein, 10 aa, Severe acute respiratory syndrome-related coronavirus
  REGION 1..10: note = Table B: HLA-DQA1*03:02-B1*03:03M HLA-DQA1*05:01-B1*03:01M HLA-DRB1*04:01L HLA-DRB1*04:03L HLA-DRB1*13:02L HLA-DRB1*13:03L HLA-DRB1*01:03L HLA-DRB1*04:02L HLA-DRB1*04:04L HLA-DRB1*04:05L HLA-DQA1*01:02-B1*06:02M HLA-DRB1*01:01L HLA-DRB1*01:02L
  REGION 1..10: note = CONT. FROM ABOVE: HLA-DRB1*08:77L HLA-DRB3*02:01L HLA-DPA1*01:03 -B1*03:01L HLA-DPA1*03:01-B1*04:02M HLA-DRB1*03:01L HLA-DRB1*14: 01M HLA-DRB1*14:02M HLA-DQA1*01:01-B1*05:01L HLA-DRB1*08:01M HLA -DRB1*11:01L HLA-DQA1*01-B1*05L HLA-DQA1*05:05-B1*03:19L
  REGION 1..10: note = CONT. FROM ABOVE: HLA-DQA1*05:01-B1*02:01L HLA-DRB4*01:01L HLA-D PA1*01:03-B1*04:01L HLA-DQA1*05:05-B1*03:116M HLA-DRB1*09:01M HL A-DPA1*01:03-B1*04:02M HLA-DRB1*12:01L HLA-DPA1*02:01-B1*13:01L HLA-DPA1*03:01-B1*105:01M HLA-DQA1*03:01-B1*03:02M
  REGION 1..10: note = CONT. FROM ABOVE: HLA-DPA1*01:03-B1*104:01L HLA-DPA1*01:02-B1*04 :01L HLA-DRB1*07:01L HLA-DRB1*10:01L HLA-DRB1*16:01L HLA-DQA1*01 :03-B1*06:01L HLA-DRB1*08:03L HLA-DQA1*02:01-B1*03:03M HLA-DRB1* 15:01L HLA-DRB1*15:03M
  source 1..10: note = Severe acute respiratory syndrome coronavirus 2
RIFTIGTVTL

SEQ ID NO: 10283 - protein, 12 aa, Severe acute respiratory syndrome-related coronavirus
  REGION 1..12: note = Table B: HLA-DQA1*03:02-B1*03:03L HLA-DQA1*05:01-B1*03:01L HLA-DQA1*05:05-B1*03:19L HLA-DPA1*03:01-B1*105:01L HLA-DQA1*05:05-B1*03:01L
  source 1..12: note = Severe acute respiratory syndrome coronavirus 2
TIGTVTLKQGEI

SEQ ID NO: 10284 - protein, 12 aa, Severe acute respiratory syndrome-related coronavirus
  REGION 1..12: note = Table B: HLA-DQA1*03:02-B1*03:03L HLA-DRB1*01:03L HLA-DRB1*04:02L HLA-DRB1*04:05L HLA-DRB1*01:02L HLA-DQA1*01:01-B1*05:01L HLA-DRB1*08:01L HLA-DQA1*05:05-B1*03:19L HLA-DQA1*05:01-B1*02:01L
  REGION 1..12: note = CONT. FROM ABOVE: HLA-DRB1*12:01L HLA-DPA1*03:01-B1*105:01L HLA- DQA1*05:05-B1*03:01L HLA-DRB1*14:17L HLA-DRB1*16:01L HLA-DRB1*04 :08L
  source 1..12: note = Severe acute respiratory syndrome coronavirus 2
IGTVTLKQGEIK

SEQ ID NO: 10285 - protein, 14 aa, Severe acute respiratory syndrome-related coronavirus
  REGION 1..14: note = Table B: HLA-DQA1*03:02-B1*03:03L HLA-DRB1*01:03L HLA-DRB1*04:02L HLA-DRB1*04:05L HLA-DRB1*01:02L HLA-DQA1*01:01-B1*05:01L HLA-DRB1*08:01L HLA-DQA1*05:05-B1*03:19L HLA-DQA1*05:01-B1*02:01L
  REGION 1..14: note = CONT. FROM ABOVE: HLA-DRB1*12:01L HLA-DPA1*03:01-B1*105:01L HLA- DRB1*14:17L HLA-DRB1*16:01L HLA-DRB1*04:08L HLA-DRB1*15:03L
  source 1..14: note = Severe acute respiratory syndrome coronavirus 2
VTLKQGEIKDATPS

SEQ ID NO: 10286 - protein, 10 aa, Severe acute respiratory syndrome-related coronavirus
  REGION 1..10: note = Table B: HLA-DQA1*03:02-B1*03:03L HLA-DQA1*01-B1*05L HLA-DQA1*05:05-B1*03:19L HLA-DQA1*03:01-B1*03:02L
  source 1..10: note = Severe acute respiratory syndrome coronavirus 2
GEIKDATPSD

SEQ ID NO: 10287 - protein, 10 aa, Severe acute respiratory syndrome-related coronavirus
  REGION 1..10: note = Table B: HLA-DQA1*03:02-B1*03:03L HLA-DQA1*05:01-B1*03:01L HLA-DRB1*13:02L HLA-DRB1*13:03M HLA-DRB1*01:03L HLA-DQA1*01:02-B1*06:02M HLA-DRB1*01:02L HLA-DRB4*03:01NL HLA-DRB1*08:77L HLA-DPA1*01:03-B1*03:01L
  REGION 1..10: note = CONT. FROM ABOVE: HLA-DPA1*03:01-B1*04:02L HLA-DRB1*03:01L HLA-D RB1*14:01L HLA-DRB1*14:02L HLA-DRB5*01:01L HLA-DQA1*01-B1*05L HL A-DQA1*05:05-B1*03:19L HLA-DQA1*05:01-B1*02:01L HLA-DPA1*01:03-B 1*04:01L HLA-DQA1*05:05-B1*03:116L HLA-DPA1*01:03-B1*04:02L
  REGION 1..10: note = CONT. FROM ABOVE: HLA-DRB1*12:01L HLA-DPA1*02:01-B1*13:01L HLA-D PA1*03:01-B1*105:01M HLA-DQA1*03:01-B1*03:02L HLA-DQA1*05:05-B1* 03:01L HLA-DPA1*01:02-B1*04:01L HLA-DRB1*16:01L HLA-DQA1*01:03-B 1*06:01L HLA-DQA1*02:01-B1*03:03L HLA-DRB1*15:03L
  source 1..10: note = Severe acute respiratory syndrome coronavirus 2
EIKDATPSDF

SEQ ID NO: 10288 - protein, 11 aa, Severe acute respiratory syndrome-related coronavirus
  REGION 1..11: note = Table B: HLA-DQA1*03:02-B1*03:03L HLA-DRB1*04:03L HLA-DQA1*01:01-B1*05:01L HLA-DQA1*01-B1*05L HLA-DQA1*05:01-B1*02:01L HLA-DRB1*14:17L HLA-DRB1*16:01L HLA-DQA1*01:03-B1*06:01L HLA-DQA1*02:01-B1*03:03L
  source 1..11: note = Severe acute respiratory syndrome coronavirus 2
IKDATPSDFVR

SEQ ID NO: 10289 - protein, 10 aa, Severe acute respiratory syndrome-related coronavirus
  REGION 1..10: note = Table B: HLA-DQA1*03:02-B1*03:03L HLA-DRB1*13:03L HLA-DPA1*03:01-B1*105:01L HLA-DQA1*03:01-B1*03:02L HLA-DQA1*02:01-B1*03:03L
  source 1..10: note = Severe acute respiratory syndrome coronavirus 2
DATPSDFVRA

SEQ ID NO: 10290 - protein, 11 aa, Severe acute respiratory syndrome-related coronavirus
  REGION 1..11: note = Table B: HLA-DQA1*03:02-B1*03:03L HLA-DRB1*04:03L HLA-DRB1*04:02L HLA-DQA1*01-B1*05L HLA-DQA1*03:01-B1*03:02L HLA-DRB1*14:17L HLA-DQA1*02:01-B1*03:03L
  source 1..11: note = Severe acute respiratory syndrome coronavirus 2
TPSDFVRATAT

SEQ ID NO: 10291 - protein, 10 aa, Severe acute respiratory syndrome-related coronavirus
  REGION 1..10: note = Table B: HLA-DQA1*03:02-B1*03:03L HLA-DQA1*05:01-B1*03:01L HLA-DRB1*04:03L HLA-DRB1*13:02L HLA-DRB1*13:03L HLA-DRB1*01:03L HLA-DRB1*04:02L HLA-DRB1*04:05L HLA-DQA1*01:02-B1*06:02L HLA-DRB1*01:02L HLA-DRB4*03:01NL HLA-DRB1*08:77L HLA-DRB3*02:01L
  REGION 1..10: note = CONT. FROM ABOVE: HLA-DPA1*01:03-B1*03:01L HLA-DPA1*03:01-B1*04: 02L HLA-DRB1*14:01L HLA-DRB1*11:03L HLA-DRB1*11:04L HLA-DRB5*01: 01L HLA-DQA1*01-B1*05L HLA-DQA1*05:05-B1*03:19L HLA-DQA1*05:01-B 1*02:01L HLA-DPA1*01:03-B1*04:01L HLA-DRB1*04:10L
  REGION 1..10: note = CONT. FROM ABOVE: HLA-DRB1*09:01L HLA-DRB1*12:01L HLA-DRB1*12:02 L HLA-DPA1*02:01-B1*13:01L HLA-DPA1*03:01-B1*105:01L HLA-DQA1*03 :01-B1*03:02L HLA-DRB1*14:54L HLA-DQA1*05:05-B1*03:01L HLA-DRB1* 14:17L HLA-DPA1*01:02-B1*04:01L HLA-DRB1*07:01L HLA-DRB1*16:01L
  REGION 1..10: note = CONT. FROM ABOVE: HLA-DQA1*01:03-B1*06:01L HLA-DRB1*04:08L HLA-D QA1*02:01-B1*03:03L HLA-DRB1*15:03L
  source 1..10: note = Severe acute respiratory syndrome coronavirus 2
VRATATIPIQ

SEQ ID NO: 10292 - protein, 10 aa, Severe acute respiratory syndrome-related coronavirus
  REGION 1..10: note = Table B: HLA-DQA1*03:02-B1*03:03L HLA-DQA1*05:01-B1*03:01L HLA-DRB1*04:03L HLA-DQA1*01:02-B1*06:02L HLA-DQA1*05:05-B1*03:19L HLA-DQA1*05:01-B1*02:01L HLA-DPA1*03:01-B1*105:01L HLA-DQA1*03:01-B1*03:02L
  REGION 1..10: note = CONT. FROM ABOVE: HLA-DQA1*05:05-B1*03:01L HLA-DQA1*01:03-B1*06: 01L HLA-DQA1*02:01-B1*03:03L
  source 1..10: note = Severe acute respiratory syndrome coronavirus 2
ATATIPIQAS

SEQ ID NO: 10293 - protein, 12 aa, Severe acute respiratory syndrome-related coronavirus
  REGION 1..12: note = Table B: HLA-DQA1*03:02-B1*03:03L HLA-DQA1*05:01-B1*03:01L HLA-DRB1*04:02L HLA-DQA1*05:05-B1*03:19L HLA-DQA1*05:01-B1*02:01L HLA-DRB1*04:10L HLA-DRB1*12:01L HLA-DPA1*03:01-B1*105:01L HLA-DQA1*05:05-B1*03:01L
  REGION 1..12: note = CONT. FROM ABOVE: HLA-DQA1*01:03-B1*06:01L HLA-DRB1*15:03L
  source 1..12: note = Severe acute respiratory syndrome coronavirus 2
ATIPIQASLPFG

SEQ ID NO: 10294 - protein, 11 aa, Severe acute respiratory syndrome-related coronavirus
  REGION 1..11: note = Table B: HLA-DQA1*03:02-B1*03:03L HLA-DQA1*05:01-B1*03:01L HLA-DRB1*04:03L HLA-DRB1*13:03L HLA-DRB1*01:03L HLA-DRB1*08:77L HLA-DPA1*01:03-B1*03:01L HLA-DPA1*03:01-B1*04:02L HLA-DRB1*14:01L HLA-DRB1*14:02L HLA-DQA1*01-B1*05L
  REGION 1..11: note = CONT. FROM ABOVE: HLA-DQA1*05:01-B1*02:01L HLA-DRB4*01:01L HLA-D PA1*01:03-B1*04:01L HLA-DQA1*05:05-B1*03:116L HLA-DPA1*01:03-B1* 04:02L HLA-DRB1*12:01L HLA-DPA1*01:03-B1*104:01L HLA-DQA1*05:05- B1*03:01L HLA-DPA1*01:02-B1*04:01L HLA-DRB1*10:01L
  REGION 1..11: note = CONT. FROM ABOVE: HLA-DRB1*16:01L
  source 1..11: note = Severe acute respiratory syndrome coronavirus 2
IPIQASLPFGW

SEQ ID NO: 10295 - protein, 10 aa, Severe acute respiratory syndrome-related coronavirus
  REGION 1..10: note = Table B: HLA-DQA1*03:02-B1*03:03L HLA-DQA1*05:01-B1*03:01L HLA-DRB1*04:05L HLA-DQA1*01:02-B1*06:02L HLA-DRB1*01:01L HLA-DRB1*01:02L HLA-DPA1*03:01-B1*04:02L HLA-DRB1*14:01L HLA-DQA1*01-B1*05L HLA-DQA1*05:05-B1*03:19L
  REGION 1..10: note = CONT. FROM ABOVE: HLA-DQA1*05:05-B1*03:116L HLA-DPA1*02:01-B1*13 :01M HLA-DPA1*03:01-B1*105:01M HLA-DPA1*01:02-B1*04:01L HLA-DRB1 *16:01L HLA-DQA1*01:03-B1*06:01L HLA-DRB1*08:03L HLA-DQA1*02:01- B1*03:03L HLA-DRB1*15:03L
  source 1..10: note = Severe acute respiratory syndrome coronavirus 2
LPFGWLIVGV

SEQ ID NO: 10296 - protein, 12 aa, Severe acute respiratory syndrome-related coronavirus
  REGION 1..12: note = Table B: HLA-DQA1*03:02-B1*03:03L HLA-DQA1*05:01-B1*03:01L HLA-DRB1*04:02L HLA-DRB1*04:04L HLA-DRB1*04:05L HLA-DQA1*01:02-B1*06:02L HLA-DRB1*01:02L HLA-DRB4*03:01NL HLA-DQA1*01-B1*05L HLA-DQA1*05:05-B1*03:19L HLA-DRB1*04:10L
  REGION 1..12: note = CONT. FROM ABOVE: HLA-DRB1*12:01L HLA-DPA1*03:01-B1*105:01L HLA- DQA1*03:01-B1*03:02L HLA-DQA1*05:05-B1*03:01L HLA-DRB1*16:01L HL A-DQA1*01:03-B1*06:01L HLA-DRB1*04:08L HLA-DQA1*02:01-B1*03:03L HLA-DRB1*15:03L
  source 1..12: note = Severe acute respiratory syndrome coronavirus 2
VALLAVFQSASK

SEQ ID NO: 10297 - protein, 10 aa, Severe acute respiratory syndrome-related coronavirus
  REGION 1..10: note = Table B: HLA-DQA1*03:02-B1*03:03L HLA-DQA1*05:01-B1*03:01L HLA-DRB1*04:03L HLA-DRB1*13:02L HLA-DRB1*13:03L HLA-DRB1*01:03L HLA-DRB1*04:02L HLA-DRB1*04:05L HLA-DRB1*01:02L HLA-DRB4*03:01NL HLA-DRB1*08:04L HLA-DRB1*08:77L HLA-DRB3*02:01L
  REGION 1..10: note = CONT. FROM ABOVE: HLA-DPA1*03:01-B1*04:02L HLA-DRB1*14:01L HLA-D RB1*11:03L HLA-DRB1*14:02L HLA-DRB1*08:01L HLA-DQA1*05:05-B1*03: 19L HLA-DQA1*05:01-B1*02:01L HLA-DRB1*09:01L HLA-DRB1*12:01L HLA -DRB1*12:02L HLA-DPA1*03:01-B1*105:01L HLA-DQA1*03:01-B1*03:02L
  REGION 1..10: note = CONT. FROM ABOVE: HLA-DRB1*14:54L HLA-DQA1*05:05-B1*03:01L HLA-D RB1*14:17L HLA-DPA1*01:02-B1*04:01L HLA-DRB1*07:01L HLA-DRB1*16: 01L HLA-DQA1*01:03-B1*06:01L HLA-DRB1*04:08L HLA-DQA1*02:01-B1*0 3:03L HLA-DRB1*15:03L
  source 1..10: note = Severe acute respiratory syndrome coronavirus 2
VFQSASKIIT

SEQ ID NO: 10298 - protein, 10 aa, Severe acute respiratory syndrome-related coronavirus
  REGION 1..10: note = Table B: HLA-DQA1*03:02-B1*03:03M HLA-DQA1*05:01-B1*03:01L HLA-DRB1*13:02L HLA-DRB1*13:03L HLA-DRB1*01:03L HLA-DRB1*04:02L HLA-DQA1*01:02-B1*06:02L HLA-DRB1*01:02L HLA-DRB1*08:77L HLA-DRB3*02:01L HLA-DPA1*03:01-B1*04:02L HLA-DRB1*14:01L
  REGION 1..10: note = CONT. FROM ABOVE: HLA-DRB1*14:02L HLA-DRB1*08:01L HLA-DQA1*01-B1 *05L HLA-DQA1*05:05-B1*03:19L HLA-DQA1*05:01-B1*02:01L HLA-DPA1* 01:03-B1*04:01L HLA-DQA1*05:05-B1*03:116L HLA-DRB1*09:01L HLA-DP A1*01:03-B1*04:02L HLA-DRB1*12:01L HLA-DPA1*02:01-B1*13:01L
  REGION 1..10: note = CONT. FROM ABOVE: HLA-DPA1*03:01-B1*105:01L HLA-DQA1*03:01-B1*03 :02L HLA-DPA1*01:03-B1*104:01L HLA-DPA1*01:02-B1*04:01L HLA-DRB1 *10:01L HLA-DRB1*16:01L HLA-DQA1*01:03-B1*06:01L HLA-DRB1*08:03L HLA-DQA1*02:01-B1*03:03L HLA-DRB1*15:03L
  source 1..10: note = Severe acute respiratory syndrome coronavirus 2
FQSASKIITL

SEQ ID NO: 10299 - protein, 10 aa, Severe acute respiratory syndrome-related coronavirus
  REGION 1..10: note = Table B: HLA-DQA1*03:02-B1*03:03L HLA-DQA1*05:01-B1*03:01L HLA-DRB1*04:03L HLA-DRB1*01:03L HLA-DRB1*04:02L HLA-DQA1*01:02-B1*06:02L HLA-DRB1*01:02L HLA-DQA1*05:01-B1*02:01L HLA-DRB1*12:01L
  REGION 1..10: note = CONT. FROM ABOVE: HLA-DPA1*03:01-B1*105:01L HLA-DQA1*03:01-B1*03 :02L HLA-DQA1*05:05-B1*03:01L HLA-DPA1*01:02-B1*04:01L HLA-DRB1* 07:01L HLA-DRB1*16:01L HLA-DQA1*01:03-B1*06:01L HLA-DRB1*04:08L HLA-DQA1*02:01-B1*03:03L HLA-DRB1*15:03L
  source 1..10: note = Severe acute respiratory syndrome coronavirus 2
WQLALSKGVH

SEQ ID NO: 10300 - protein, 10 aa, Severe acute respiratory syndrome-related coronavirus
  REGION 1..10: note = Table B: HLA-DQA1*03:02-B1*03:03L HLA-DQA1*05:01-B1*03:01L HLA-DRB1*04:03L HLA-DRB1*13:02L HLA-DRB1*13:03L HLA-DRB1*01:03L HLA-DRB1*04:05L HLA-DQA1*01:02-B1*06:02L HLA-DRB1*01:02L HLA-DRB1*08:77L HLA-DRB3*02:01L HLA-DPA1*01:03-B1*03:01L
  REGION 1..10: note = CONT. FROM ABOVE: HLA-DPA1*03:01-B1*04:02L HLA-DRB1*14:01L HLA-D RB1*14:02L HLA-DQA1*05:05-B1*03:19L HLA-DQA1*05:01-B1*02:01L HLA -DPA1*01:03-B1*04:01L HLA-DRB1*09:01L HLA-DRB1*12:01L HLA-DPA1*0 2:01-B1*13:01L HLA-DPA1*03:01-B1*105:01L
  REGION 1..10: note = CONT. FROM ABOVE: HLA-DQA1*03:01-B1*03:02L HLA-DQA1*05:05-B1*03: 01L HLA-DPA1*01:02-B1*04:01L HLA-DRB1*07:01L HLA-DRB1*16:01L HLA -DQA1*01:03-B1*06:01L HLA-DQA1*02:01-B1*03:03L HLA-DRB1*15:03L
  source 1..10: note = Severe acute respiratory syndrome coronavirus 2
QLALSKGVHF

SEQ ID NO: 10301 - protein, 10 aa, Severe acute respiratory syndrome-related coronavirus
  REGION 1..10: note = Table B: HLA-DQA1*03:02-B1*03:03L HLA-DQA1*05:01-B1*03:01L HLA-DQA1*01:02-B1*06:02L HLA-DQA1*05:05-B1*03:19L HLA-DQA1*05:01-B1*02:01L HLA-DPA1*03:01-B1*105:01L HLA-DQA1*03:01-B1*03:02L HLA-DQA1*05:05-B1*03:01L
  REGION 1..10: note = CONT. FROM ABOVE: HLA-DQA1*01:03-B1*06:01L HLA-DQA1*02:01-B1*03: 03L
  source 1..10: note = Severe acute respiratory syndrome coronavirus 2
VAAGLEAPFL

SEQ ID NO: 10302 - protein, 10 aa, Severe acute respiratory syndrome-related coronavirus
  REGION 1..10: note = Table B: HLA-DQA1*03:02-B1*03:03M HLA-DQA1*05:01-B1*03:01L HLA-DQA1*01:02-B1*06:02L HLA-DRB1*01:02L HLA-DPA1*03:01-B1*04:02L HLA-DRB1*14:01L HLA-DRB1*11:02L HLA-DRB1*14:02L HLA-DQA1*05:05-B1*03:19M
  REGION 1..10: note = CONT. FROM ABOVE: HLA-DQA1*05:01-B1*02:01L HLA-DPA1*01:03-B1*04: 01L HLA-DQA1*05:05-B1*03:116L HLA-DRB1*09:01L HLA-DPA1*01:03-B1* 04:02L HLA-DPA1*02:01-B1*13:01L HLA-DPA1*03:01-B1*105:01L HLA-DQ A1*03:01-B1*03:02L HLA-DPA1*01:03-B1*104:01L
  REGION 1..10: note = CONT. FROM ABOVE: HLA-DPA1*01:02-B1*04:01L HLA-DRB1*10:01L HLA-D RB1*16:01L HLA-DQA1*01:03-B1*06:01L HLA-DRB1*08:03L HLA-DQA1*02: 01-B1*03:03L HLA-DRB1*15:03L
  source 1..10: note = Severe acute respiratory syndrome coronavirus 2
FLQSINFVRI

SEQ ID NO: 10303 - protein, 11 aa, Severe acute respiratory syndrome-related coronavirus
  REGION 1..11: note = Table B: HLA-DQA1*03:02-B1*03:03L HLA-DRB1*04:03L HLA-DRB1*14:01L HLA-DQA1*01-B1*05L HLA-DQA1*05:01-B1*02:01L HLA-DQA1*03:01-B1*03:02L HLA-DRB1*16:01L HLA-DRB1*15:03L
  source 1..11: note = Severe acute respiratory syndrome coronavirus 2
NPLLYDANYFL

SEQ ID NO: 10304 - protein, 13 aa, Severe acute respiratory syndrome-related coronavirus
  REGION 1..13: note = Table B: HLA-DQA1*03:02-B1*03:03L HLA-DRB1*04:03L HLA-DRB1*13:02L HLA-DRB1*01:03L HLA-DRB1*04:02L HLA-DRB4*03:01NL HLA-DRB1*08:77L HLA-DRB3*02:01L HLA-DPA1*01:03-B1*03:01L HLA-DRB1*11:03L HLA-DRB1*14:02L HLA-DQA1*05:05-B1*03:19L
  REGION 1..13: note = CONT. FROM ABOVE: HLA-DRB1*09:01L HLA-DRB1*12:02L HLA-DQA1*03:01 -B1*03:02L HLA-DRB1*14:54L HLA-DQA1*05:05-B1*03:01L HLA-DRB1*14: 17L HLA-DRB1*07:01L HLA-DRB1*10:01L HLA-DQA1*01:03-B1*06:01L HLA -DRB1*04:08L HLA-DQA1*02:01-B1*03:03L
  source 1..13: note = Severe acute respiratory syndrome coronavirus 2
IPYNSVTSSIVIT

SEQ ID NO: 10305 - protein, 12 aa, Severe acute respiratory syndrome-related coronavirus
  REGION 1..12: note = Table B: HLA-DQA1*03:02-B1*03:03L HLA-DQA1*05:01-B1*03:01L HLA-DQA1*01:02-B1*06:02M HLA-DQA1*01:01-B1*05:01L HLA-DQA1*05:05-B1*03:19L HLA-DQA1*05:01-B1*02:01L HLA-DPA1*03:01-B1*105:01L HLA-DQA1*03:01-B1*03:02L
  REGION 1..12: note = CONT. FROM ABOVE: HLA-DQA1*05:05-B1*03:01L HLA-DQA1*01:03-B1*06: 01M HLA-DRB1*04:08L HLA-DQA1*02:01-B1*03:03M
  source 1..12: note = Severe acute respiratory syndrome coronavirus 2
VTSSIVITSGDG

SEQ ID NO: 10306 - protein, 12 aa, Severe acute respiratory syndrome-related coronavirus
  REGION 1..12: note = Table B: HLA-DQA1*03:02-B1*03:03L HLA-DRB1*04:03L HLA-DQA1*05:01-B1*02:01L HLA-DQA1*03:01-B1*03:02L HLA-DRB1*14:17L HLA-DQA1*02:01-B1*03:03L
  source 1..12: note = Severe acute respiratory syndrome coronavirus 2
IVITSGDGTTSP

SEQ ID NO: 10307 - protein, 13 aa, Severe acute respiratory syndrome-related coronavirus
  REGION 1..13: note = Table B: HLA-DQA1*03:02-B1*03:03L HLA-DQA1*05:01-B1*03:01L HLA-DQA1*05:05-B1*03:19L HLA-DQA1*03:01-B1*03:02L HLA-DQA1*05:05-B1*03:01L HLA-DQA1*02:01-B1*03:03L
  source 1..13: note = Severe acute respiratory syndrome coronavirus 2
VITSGDGTTSPIS

SEQ ID NO: 10308 - protein, 10 aa, Severe acute respiratory syndrome-related coronavirus
  REGION 1..10: note = Table B: HLA-DQA1*03:02-B1*03:03L HLA-DQA1*05:01-B1*03:01L HLA-DQA1*01:01-B1*05:01L HLA-DQA1*05:05-B1*03:19L HLA-DQA1*05:01-B1*02:01L HLA-DQA1*03:01-B1*03:02L HLA-DQA1*05:05-B1*03:01L HLA-DRB1*16:01L
  REGION 1..10: note = CONT. FROM ABOVE: HLA-DQA1*01:03-B1*06:01L HLA-DQA1*02:01-B1*03: 03L
  source 1..10: note = Severe acute respiratory syndrome coronavirus 2
DGTTSPISEH

SEQ ID NO: 10309 - protein, 10 aa, Severe acute respiratory syndrome-related coronavirus
  REGION 1..10: note = Table B: HLA-DQA1*03:02-B1*03:03L HLA-DQA1*05:01-B1*03:01L HLA-DRB1*04:03L HLA-DQA1*05:01-B1*02:01L HLA-DQA1*03:01-B1*03:02L HLA-DQA1*05:05-B1*03:01L HLA-DQA1*01:03-B1*06:01L HLA-DQA1*02:01-B1*03:03L
  source 1..10: note = Severe acute respiratory syndrome coronavirus 2
GTTSPISEHD

SEQ ID NO: 10310 - protein, 10 aa, Severe acute respiratory syndrome-related coronavirus
  REGION 1..10: note = Table B: HLA-DQA1*03:02-B1*03:03L HLA-DQA1*05:01-B1*03:01L HLA-DRB1*14:04L HLA-DRB1*04:01L HLA-DRB1*04:03L HLA-DRB1*13:02L HLA-DRB1*13:03M HLA-DRB1*01:03M HLA-DRB1*04:02L HLA-DRB1*04:05L HLA-DQA1*01:02-B1*06:02H HLA-DRB1*01:01L HLA-DRB4*03:01NM
  REGION 1..10: note = CONT. FROM ABOVE: HLA-DRB1*08:77M HLA-DPA1*01:03-B1*03:01M HLA-D PA1*03:01-B1*04:02L HLA-DRB1*03:01M HLA-DRB1*14:01L HLA-DRB1*11: 02M HLA-DRB1*11:03M HLA-DRB1*11:04L HLA-DRB1*14:02M HLA-DRB1*08: 01L HLA-DRB1*11:01L HLA-DRB5*01:01L HLA-DQA1*01-B1*05M
  REGION 1..10: note = CONT. FROM ABOVE: HLA-DQA1*05:05-B1*03:19H HLA-DRB4*02:01NL HLA- DQA1*05:01-B1*02:01M HLA-DRB4*01:01M HLA-DPA1*01:03-B1*04:01M HL A-DQA1*05:05-B1*03:116L HLA-DRB1*09:01L HLA-DPA1*01:03-B1*04:02M HLA-DRB1*12:01M HLA-DRB1*12:02L HLA-DPA1*02:01-B1*13:01L
  REGION 1..10: note = CONT. FROM ABOVE: HLA-DPA1*03:01-B1*105:01M HLA-DQA1*03:01-B1*03 :02L HLA-DRB1*14:54L HLA-DPA1*01:03-B1*104:01M HLA-DQA1*05:05-B1 *03:01L HLA-DRB1*14:17L HLA-DPA1*01:02-B1*04:01L HLA-DRB1*10:01M HLA-DRB1*16:01M HLA-DQA1*01:03-B1*06:01L HLA-DRB1*08:02L
  REGION 1..10: note = CONT. FROM ABOVE: HLA-DRB1*08:03L HLA-DQA1*02:01-B1*03:03L HLA -DRB1*15:01L HLA-DRB1*15:03M
  source 1..10: note = Severe acute respiratory syndrome coronavirus 2
TTSPISEHDY

SEQ ID NO: 10311 - protein, 10 aa, Severe acute respiratory syndrome-related coronavirus
  REGION 1..10: note = Table B: HLA-DQA1*03:02-B1*03:03L HLA-DQA1*01-B1*05L HLA-DQA1*05:01-B1*02:01L HLA-DQA1*03:01-B1*03:02L HLA-DQA1*01:03-B1*06:01L HLA-DQA1*02:01-B1*03:03L
  source 1..10: note = Severe acute respiratory syndrome coronavirus 2
TSPISEHDYQ

SEQ ID NO: 10312 - protein, 12 aa, Severe acute respiratory syndrome-related coronavirus
  REGION 1..12: note = Table B: HLA-DQA1*03:02-B1*03:03L HLA-DRB1*04:03L HLA-DRB1*04:02L HLA-DRB1*14:17L HLA-DRB1*16:01L HLA-DQA1*02:01-B1*03:03L
  source 1..12: note = Severe acute respiratory syndrome coronavirus 2
SPISEHDYQIGG

SEQ ID NO: 10313 - protein, 10 aa, Severe acute respiratory syndrome-related coronavirus
  REGION 1..10: note = Table B: HLA-DQA1*03:02-B1*03:03L HLA-DQA1*05:01-B1*03:01M HLA-DRB1*13:02L HLA-DRB1*13:03L HLA-DRB1*01:03L HLA-DRB1*04:02L HLA-DQA1*01:02-B1*06:02L HLA-DRB4*03:01NM HLA-DRB1*08:77M HLA-DPA1*01:03-B1*03:01L HLA-DPA1*03:01-B1*04:02M
  REGION 1..10: note = CONT. FROM ABOVE: HLA-DRB1*03:01M HLA-DRB1*11:02L HLA-DRB1*14:02 L HLA-DQA1*01-B1*05M HLA-DQA1*05:05-B1*03:19M HLA-DQA1*05:01-B1* 02:01L HLA-DRB4*01:01M HLA-DPA1*01:03-B1*04:01M HLA-DQA1*05:05-B 1*03:116L HLA-DPA1*01:03-B1*04:02L HLA-DRB1*12:01L
  REGION 1..10: note = CONT. FROM ABOVE: HLA-DQA1*03:01-B1*03:02L HLA-DRB1*14:54L HLA-D PA1*01:03-B1*104:01L HLA-DPA1*01:02-B1*04:01M HLA-DRB1*10:01M HL A-DRB1*16:01L HLA-DRB1*15:03M
  source 1..10: note = Severe acute respiratory syndrome coronavirus 2
SEHDYQIGGY

SEQ ID NO: 10314 - protein, 10 aa, Severe acute respiratory syndrome-related coronavirus
  REGION 1..10: note = Table B: HLA-DQA1*03:02-B1*03:03L HLA-DQA1*05:01-B1*03:01L HLA-DRB1*04:03L HLA-DRB1*13:03L HLA-DRB1*01:03L HLA-DRB1*04:05L HLA-DQA1*01:02-B1*06:02M HLA-DRB1*01:01L HLA-DRB1*08:77L HLA-DPA1*01:03-B1*03:01L HLA-DPA1*03:01-B1*04:02L
  REGION 1..10: note = CONT. FROM ABOVE: HLA-DRB1*03:01L HLA-DRB1*14:01L HLA-DRB1*14:02 L HLA-DQA1*01-B1*05L HLA-DQA1*05:05-B1*03:19L HLA-DQA1*05:01-B1* 02:01L HLA-DRB4*01:01L HLA-DPA1*01:03-B1*04:01L HLA-DQA1*05:05-B 1*03:116L HLA-DPA1*01:03-B1*04:02L HLA-DRB1*12:01L
  REGION 1..10: note = CONT. FROM ABOVE: HLA-DPA1*02:01-B1*13:01L HLA-DPA1*03:01-B1*105 :01L HLA-DPA1*01:03-B1*104:01L HLA-DQA1*05:05-B1*03:01L HLA-DPA1 *01:02-B1*04:01L HLA-DRB1*10:01L HLA-DRB1*16:01L HLA-DQA1*01:03- B1*06:01L HLA-DRB1*08:02L HLA-DQA1*02:01-B1*03:03M
  REGION 1..10: note = CONT. FROM ABOVE: HLA-DRB1*15:03L
  source 1..10: note = Severe acute respiratory syndrome coronavirus 2
YQIGGYTEKW

SEQ ID NO: 10315 - protein, 11 aa, Severe acute respiratory syndrome-related coronavirus
  REGION 1..11: note = Table B: HLA-DQA1*03:02-B1*03:03L HLA-DRB1*04:03L HLA-DRB1*04:02L HLA-DQA1*01-B1*05L HLA-DQA1*05:01-B1*02:01L HLA-DQA1*03:01-B1*03:02L HLA-DQA1*01:03-B1*06:01L HLA-DQA1*02:01-B1*03:03L
  source 1..11: note = Severe acute respiratory syndrome coronavirus 2
IGGYTEKWESG

SEQ ID NO: 10316 - protein, 10 aa, Severe acute respiratory syndrome-related coronavirus
  REGION 1..10: note = Table B: HLA-DQA1*03:02-B1*03:03L HLA-DQA1*03:01-B1*03:02L
  source 1..10: note = Severe acute respiratory syndrome coronavirus 2
TEKWESGVKD

SEQ ID NO: 10317 - protein, 10 aa, Severe acute respiratory syndrome-related coronavirus
  REGION 1..10: note = Table B: HLA-DQA1*03:02-B1*03:03L HLA-DRB1*04:05L HLA-DQA1*01:02-B1*06:02L HLA-DPA1*03:01-B1*04:02L HLA-DRB1*14:02L HLA-DQA1*05:05-B1*03:19L HLA-DQA1*05:01-B1*02:01L HLA-DPA1*02:01-B1*13:01L
  REGION 1..10: note = CONT. FROM ABOVE: HLA-DPA1*03:01-B1*105:01L HLA-DQA1*03:01-B1*03 :02L HLA-DPA1*01:02-B1*04:01L HLA-DQA1*01:03-B1*06:01L HLA-DQA1* 02:01-B1*03:03L HLA-DRB1*15:03L
  source 1..10: note = Severe acute respiratory syndrome coronavirus 2
SYFTSDYYQL

SEQ ID NO: 10318 - protein, 10 aa, Severe acute respiratory syndrome-related coronavirus
  REGION 1..10: note = Table B: HLA-DQA1*03:02-B1*03:03L HLA-DQA1*05:01-B1*03:01L HLA-DQA1*01:02-B1*06:02L HLA-DRB1*01:02L HLA-DPA1*03:01-B1*04:02L HLA-DQA1*01-B1*05L HLA-DQA1*05:05-B1*03:19L HLA-DQA1*05:01-B1*02:01L
  REGION 1..10: note = CONT. FROM ABOVE: HLA-DRB1*12:01L HLA-DPA1*02:01-B1*13:01L HLA-D PA1*03:01-B1*105:01L HLA-DQA1*03:01-B1*03:02L HLA-DPA1*01:02-B1* 04:01L HLA-DRB1*16:01L HLA-DQA1*01:03-B1*06:01L HLA-DQA1*02:01-B 1*03:03L HLA-DRB1*15:03L
  source 1..10: note = Severe acute respiratory syndrome coronavirus 2
DYYQLYSTQL

SEQ ID NO: 10319 - protein, 12 aa, Severe acute respiratory syndrome-related coronavirus
  REGION 1..12: note = Table B: HLA-DQA1*03:02-B1*03:03L HLA-DRB1*04:03L HLA-DRB1*04:05L HLA-DQA1*01:02-B1*06:02L HLA-DPA1*03:01-B1*105:01L HLA-DQA1*05:05-B1*03:01L HLA-DRB1*14:17L
  source 1..12: note = Severe acute respiratory syndrome coronavirus 2
QLYSTQLSTDTG

SEQ ID NO: 10320 - protein, 12 aa, Severe acute respiratory syndrome-related coronavirus
  REGION 1..12: note = Table B: HLA-DQA1*03:02-B1*03:03L HLA-DQA1*05:01-B1*02:01L HLA-DQA1*03:01-B1*03:02L
  source 1..12: note = Severe acute respiratory syndrome coronavirus 2
YSTQLSTDTGVE

SEQ ID NO: 10321 - protein, 11 aa, Severe acute respiratory syndrome-related coronavirus
  REGION 1..11: note = Table B: HLA-DQA1*03:02-B1*03:03L HLA-DQA1*05:01-B1*03:01L HLA-DRB1*13:02L HLA-DRB1*01:03L HLA-DRB1*04:05L HLA-DQA1*01:01-B1*05:01L HLA-DQA1*01-B1*05L HLA-DRB1*04:10L HLA-DRB1*14:54L HLA-DQA1*05:05-B1*03:01L
  source 1..11: note = Severe acute respiratory syndrome coronavirus 2
TQLSTDTGVEH

SEQ ID NO: 10322 - protein, 10 aa, Severe acute respiratory syndrome-related coronavirus
  REGION 1..10: note = Table B: HLA-DQA1*03:02-B1*03:03L HLA-DQA1*05:01-B1*03:01L HLA-DQA1*05:05-B1*03:19L HLA-DQA1*05:01-B1*02:01L HLA-DQA1*05:05-B1*03:116L HLA-DPA1*03:01-B1*105:01L HLA-DQA1*03:01-B1*03:02L HLA-DPA1*01:03-B1*104:01L
  REGION 1..10: note = CONT. FROM ABOVE: HLA-DRB1*16:01L HLA-DQA1*02:01-B1*03:03L HLA-D RB1*15:03L
  source 1..10: note = Severe acute respiratory syndrome coronavirus 2
LSTDTGVEHV

SEQ ID NO: 10323 - protein, 10 aa, Severe acute respiratory syndrome-related coronavirus
  REGION 1..10: note = Table B: HLA-DQA1*03:02-B1*03:03L HLA-DRB1*04:03L HLA-DQA1*01-B1*05L HLA-DQA1*05:01-B1*02:01L HLA-DQA1*03:01-B1*03:02L HLA-DRB1*16:01L HLA-DQA1*02:01-B1*03:03L
  source 1..10: note = Severe acute respiratory syndrome coronavirus 2
STDTGVEHVT

SEQ ID NO: 10324 - protein, 10 aa, Severe acute respiratory syndrome-related coronavirus
  REGION 1..10: note = Table B: HLA-DQA1*03:02-B1*03:03L HLA-DQA1*05:01-B1*03:01L HLA-DRB1*13:02L HLA-DRB1*13:03L HLA-DRB1*01:03L HLA-DRB1*04:05L HLA-DQA1*01:02-B1*06:02L HLA-DRB4*03:01NL HLA-DRB1*08:77M HLA-DPA1*01:03-B1*03:01L HLA-DPA1*03:01-B1*04:02L
  REGION 1..10: note = CONT. FROM ABOVE: HLA-DRB1*03:01L HLA-DRB1*14:01L HLA-DRB1*11:02 L HLA-DRB1*14:02L HLA-DQA1*01-B1*05L HLA-DQA1*05:05-B1*03:19M HL A-DQA1*05:01-B1*02:01L HLA-DRB4*01:01L HLA-DPA1*01:03-B1*04:01L HLA-DQA1*05:05-B1*03:116L HLA-DPA1*01:03-B1*04:02L
  REGION 1..10: note = CONT. FROM ABOVE: HLA-DRB1*12:01L HLA-DPA1*02:01-B1*13:01L HLA-D PA1*03:01-B1*105:01L HLA-DQA1*03:01-B1*03:02L HLA-DPA1*01:03-B1* 104:01L HLA-DPA1*01:02-B1*04:01L HLA-DRB1*10:01L HLA-DRB1*16:01L HLA-DQA1*01:03-B1*06:01L HLA-DRB1*08:02L
  REGION 1..10: note = CONT. FROM ABOVE: HLA-DQA1*02:01-B1*03:03L HLA-DRB1*15:03L
  source 1..10: note = Severe acute respiratory syndrome coronavirus 2
TDTGVEHVTF

SEQ ID NO: 10325 - protein, 10 aa, Severe acute respiratory syndrome-related coronavirus
  REGION 1..10: note = Table B: HLA-DQA1*03:02-B1*03:03L HLA-DQA1*05:01-B1*03:01L HLA-DRB1*13:03L HLA-DQA1*01:02-B1*06:02L HLA-DQA1*05:05-B1*03:19L HLA-DQA1*05:01-B1*02:01L HLA-DPA1*02:01-B1*13:01L HLA-DPA1*03:01-B1*105:01L
  REGION 1..10: note = CONT. FROM ABOVE: HLA-DQA1*01:03-B1*06:01L HLA-DQA1*02:01-B1*03: 03L HLA-DRB1*15:03L
  source 1..10: note = Severe acute respiratory syndrome coronavirus 2
DTGVEHVTFF

SEQ ID NO: 10326 - protein, 10 aa, Severe acute respiratory syndrome-related coronavirus
  REGION 1..10: note = Table B: HLA-DQA1*03:02-B1*03:03L HLA-DRB1*04:03L HLA-DRB1*13:03L HLA-DRB1*04:02L HLA-DRB1*04:05L HLA-DRB4*03:01NL HLA-DQA1*01-B1*05L HLA-DQA1*05:01-B1*02:01L HLA-DRB1*04:10L HLA-DQA1*03:01-B1*03:02L HLA-DRB1*14:17L HLA-DRB1*16:01L
  REGION 1..10: note = CONT. FROM ABOVE: HLA-DRB1*04:08L HLA-DQA1*02:01-B1*03:03L
  source 1..10: note = Severe acute respiratory syndrome coronavirus 2
IYNKIVDEPE

SEQ ID NO: 10327 - protein, 10 aa, Severe acute respiratory syndrome-related coronavirus
  REGION 1..10: note = Table B: HLA-DQA1*03:02-B1*03:03L HLA-DRB1*04:03L HLA-DRB1*04:02L HLA-DRB1*04:05L HLA-DQA1*01-B1*05L HLA-DQA1*05:01-B1*02:01L HLA-DRB1*04:10L HLA-DQA1*03:01-B1*03:02L HLA-DRB1*14:17L HLA-DRB1*16:01L
  REGION 1..10: note = CONT. FROM ABOVE: HLA-DRB1*04:08L
  source 1..10: note = Severe acute respiratory syndrome coronavirus 2
YNKIVDEPEE

SEQ ID NO: 10328 - protein, 10 aa, Severe acute respiratory syndrome-related coronavirus
  REGION 1..10: note = Table B: HLA-DQA1*03:02-B1*03:03L HLA-DRB1*04:03L HLA-DRB1*04:02L HLA-DQA1*01:01-B1*05:01L HLA-DQA1*01-B1*05L HLA-DQA1*05:01-B1*02:01L HLA-DQA1*03:01-B1*03:02L HLA-DRB1*16:01L HLA-DQA1*02:01-B1*03:03L
  source 1..10: note = Severe acute respiratory syndrome coronavirus 2
NKIVDEPEEH

SEQ ID NO: 10329 - protein, 10 aa, Severe acute respiratory syndrome-related coronavirus
  REGION 1..10: note = Table B: HLA-DQA1*03:02-B1*03:03M HLA-DQA1*05:01-B1*03:01L HLA-DQA1*01:02-B1*06:02L HLA-DRB1*01:02L HLA-DPA1*03:01-B1*04:02L HLA-DRB1*14:01L HLA-DRB1*11:02L HLA-DRB1*14:02L HLA-DQA1*05:05-B1*03:19L
  REGION 1..10: note = CONT. FROM ABOVE: HLA-DQA1*05:01-B1*02:01L HLA-DQA1*05:05-B1*03: 116L HLA-DRB1*09:01L HLA-DPA1*01:03-B1*04:02L HLA-DPA1*02:01-B1* 13:01L HLA-DPA1*03:01-B1*105:01L HLA-DQA1*03:01-B1*03:02L HLA-DP A1*01:03-B1*104:01L HLA-DPA1*01:02-B1*04:01L HLA-DRB1*10:01L
  REGION 1..10: note = CONT. FROM ABOVE: HLA-DRB1*16:01L HLA-DQA1*01:03-B1*06:01L HLA-D RB1*08:03L HLA-DQA1*02:01-B1*03:03L HLA-DRB1*15:03L
  source 1..10: note = Severe acute respiratory syndrome coronavirus 2
KIVDEPEEHV

SEQ ID NO: 10330 - protein, 10 aa, Severe acute respiratory syndrome-related coronavirus
  REGION 1..10: note = Table B: HLA-DQA1*03:02-B1*03:03L HLA-DQA1*05:01-B1*03:01L HLA-DRB1*04:01L HLA-DRB1*04:03L HLA-DRB1*13:02L HLA-DRB1*13:03L HLA-DRB1*01:03L HLA-DRB1*04:02L HLA-DRB1*04:04L HLA-DRB1*04:05L HLA-DQA1*01:02-B1*06:02L HLA-DRB1*01:02L HLA-DRB4*03:01NL
  REGION 1..10: note = CONT. FROM ABOVE: HLA-DRB1*08:04L HLA-DRB1*08:77L HLA-DRB3*02:01 L HLA-DPA1*01:03-B1*03:01L HLA-DPA1*03:01-B1*04:02L HLA-DRB1*14: 01L HLA-DRB1*11:03L HLA-DRB1*11:04L HLA-DRB1*14:02L HLA-DQA1*01: 01-B1*05:01L HLA-DRB5*01:01L HLA-DQA1*01-B1*05M
  REGION 1..10: note = CONT. FROM ABOVE: HLA-DQA1*05:05-B1*03:19L HLA-DQA1*05:01-B1*02: 01M HLA-DRB4*01:01L HLA-DRB1*04:10L HLA-DPA1*01:03-B1*04:02L HLA -DRB1*12:01L HLA-DRB1*12:02L HLA-DRB3*01:01L HLA-DPA1*02:01-B1*1 3:01L HLA-DPA1*03:01-B1*105:01L HLA-DQA1*03:01-B1*03:02L
  REGION 1..10: note = CONT. FROM ABOVE: HLA-DRB1*14:54L HLA-DQA1*05:05-B1*03:01L HLA-D RB1*14:17L HLA-DPA1*01:02-B1*04:01L HLA-DRB1*10:01L HLA-DRB1*16: 01L HLA-DQA1*01:03-B1*06:01L HLA-DRB1*04:08L HLA-DQA1*02:01-B1*0 3:03L HLA-DRB1*15:03L
  source 1..10: note = Severe acute respiratory syndrome coronavirus 2
IVDEPEEHVQ

SEQ ID NO: 10331 - protein, 10 aa, Severe acute respiratory syndrome-related coronavirus
  REGION 1..10: note = Table B: HLA-DQA1*03:02-B1*03:03L HLA-DRB1*11:02L HLA-DQA1*05:05-B1*03:19M HLA-DPA1*01:03-B1*104:01L
  source 1..10: note = Severe acute respiratory syndrome coronavirus 2
PEEHVQIHTI

SEQ ID NO: 10332 - protein, 11 aa, Severe acute respiratory syndrome-related coronavirus
  REGION 1..11: note = Table B: HLA-DQA1*03:02-B1*03:03L HLA-DRB1*04:01L HLA-DRB1*13:02L HLA-DRB1*13:03L HLA-DRB1*01:03L HLA-DRB1*04:02M HLA-DRB1*04:04L HLA-DRB1*04:05L HLA-DQA1*01:02-B1*06:02L HLA-DRB1*01:02L HLA-DRB4*03:01NL HLA-DRB1*08:77L HLA-DRB1*14:01L
  REGION 1..11: note = CONT. FROM ABOVE: HLA-DRB1*11:03L HLA-DRB1*11:04L HLA-DRB5*01:01 L HLA-DQA1*01-B1*05L HLA-DQA1*05:01-B1*02:01L HLA-DRB1*04:10M HL A-DRB1*12:01L HLA-DRB1*12:02L HLA-DQA1*03:01-B1*03:02L HLA-DRB1* 14:54L HLA-DRB1*10:01L HLA-DRB1*16:01L HLA-DRB1*04:08L
  REGION 1..11: note = CONT. FROM ABOVE: HLA-DRB1*08:03L HLA-DQA1*02:01-B1*03:03L HLA-D RB1*15:03L
  source 1..11: note = Severe acute respiratory syndrome coronavirus 2
VQIHTIDGSSG

SEQ ID NO: 10333 - protein, 10 aa, Severe acute respiratory syndrome-related coronavirus
  REGION 1..10: note = Table B: HLA-DQA1*03:02-B1*03:03L HLA-DQA1*05:01-B1*03:01L HLA-DRB1*13:03L HLA-DQA1*01:02-B1*06:02L HLA-DRB1*01:02L HLA-DRB1*14:02L HLA-DQA1*05:01-B1*02:01L HLA-DRB1*12:01L HLA-DPA1*03:01-B1*105:01L HLA-DQA1*03:01-B1*03:02L
  REGION 1..10: note = CONT. FROM ABOVE: HLA-DQA1*02:01-B1*03:03L HLA-DRB1*15:03L
  source 1..10: note = Severe acute respiratory syndrome coronavirus 2
HTIDGSSGVV

SEQ ID NO: 10334 - protein, 12 aa, Severe acute respiratory syndrome-related coronavirus
  REGION 1..12: note = Table B: HLA-DQA1*03:02-B1*03:03L HLA-DQA1*05:01-B1*03:01L HLA-DQA1*05:01-B1*02:01L HLA-DQA1*03:01-B1*03:02L HLA-DQA1*02:01-B1*03:03L
  source 1..12: note = Severe acute respiratory syndrome coronavirus 2
TIDGSSGVVNPV

SEQ ID NO: 10335 - protein, 10 aa, Severe acute respiratory syndrome-related coronavirus
  REGION 1..10: note = Table B: HLA-DQA1*03:02-B1*03:03L HLA-DQA1*05:01-B1*03:01L HLA-DQA1*01:02-B1*06:02L HLA-DQA1*05:05-B1*03:19L HLA-DQA1*05:01-B1*02:01L HLA-DPA1*03:01-B1*105:01L HLA-DQA1*03:01-B1*03:02L HLA-DQA1*05:05-B1*03:01L
  REGION 1..10: note = CONT. FROM ABOVE: HLA-DQA1*01:03-B1*06:01L HLA-DQA1*02:01-B1*03: 03L
  source 1..10: note = Severe acute respiratory syndrome coronavirus 2
GSSGVVNPVM

SEQ ID NO: 10336 - protein, 12 aa, Severe acute respiratory syndrome-related coronavirus
  REGION 1..12: note = Table B: HLA-DQA1*03:02-B1*03:03L HLA-DQA1*05:01-B1*02:01L HLA-DPA1*03:01-B1*105:01L
  source 1..12: note = Severe acute respiratory syndrome coronavirus 2
SSGVVNPVMEPI

SEQ ID NO: 10337 - protein, 13 aa, Severe acute respiratory syndrome-related coronavirus
  REGION 1..13: note = Table B: HLA-DQA1*03:02-B1*03:03L HLA-DRB1*04:02L HLA-DRB1*04:05L HLA-DRB1*01:02L HLA-DRB3*02:01L HLA-DRB1*04:10L HLA-DRB1*12:02L HLA-DRB1*14:54L HLA-DQA1*05:05-B1*03:01L HLA-DRB1*14:17L
  source 1..13: note = Severe acute respiratory syndrome coronavirus 2
SGVVNPVMEPIYD

SEQ ID NO: 10338 - protein, 13 aa, Severe acute respiratory syndrome-related coronavirus
  REGION 1..13: note = Table B: HLA-DQA1*03:02-B1*03:03L HLA-DRB1*13:03L HLA-DQA1*01:01-B1*05:01L HLA-DRB1*12:02L HLA-DRB1*04:08L
  source 1..13: note = Severe acute respiratory syndrome coronavirus 2
VNPVMEPIYDEPT

SEQ ID NO: 10339 - protein, 13 aa, Severe acute respiratory syndrome-related coronavirus
  REGION 1..13: note = Table B: HLA-DQA1*03:02-B1*03:03L HLA-DRB1*13:03L HLA-DRB1*01:03L HLA-DRB1*04:04L HLA-DRB1*01:02L HLA-DRB1*11:04L HLA-DRB1*12:02L HLA-DRB1*10:01L HLA-DRB1*04:08L HLA-DRB1*08:03L HLA-DRB1*15:03L
  source 1..13: note = Severe acute respiratory syndrome coronavirus 2
NPVMEPIYDEPTT

SEQ ID NO: 10340 - protein, 12 aa, Severe acute respiratory syndrome-related coronavirus
  REGION 1..12: note = Table B: HLA-DQA1*03:02-B1*03:03L HLA-DRB1*04:03L HLA-DQA1*05:01-B1*02:01L HLA-DQA1*03:01-B1*03:02L
  source 1..12: note = Severe acute respiratory syndrome coronavirus 2
EPIYDEPTTTTS

SEQ ID NO: 10341 - protein, 11 aa, Severe acute respiratory syndrome-related coronavirus
  REGION 1..11: note = Table B: HLA-DQA1*03:02-B1*03:03L HLA-DQA1*01-B1*05L HLA-DQA1*05:01-B1*02:01L HLA-DQA1*03:01-B1*03:02L
  source 1..11: note = Severe acute respiratory syndrome coronavirus 2
DEPTTTTSVPL

SEQ ID NO: 10342 - protein, 10 aa, Severe acute respiratory syndrome-related coronavirus
  REGION 1..10: note = Table B: HLA-DQA1*03:02-B1*03:03L HLA-DQA1*01-B1*05L HLA-DQA1*05:01-B1*02:01L HLA-DQA1*03:01-B1*03:02L
  source 1..10: note = Severe acute respiratory syndrome coronavirus 2
SFVSEETGTL

SEQ ID NO: 10343 - protein, 10 aa, Severe acute respiratory syndrome-related coronavirus
  REGION 1..10: note = Table B: HLA-DQA1*03:02-B1*03:03L HLA-DQA1*05:05-B1*03:19L HLA-DQA1*03:01-B1*03:02L HLA-DRB1*15:03L
  source 1..10: note = Severe acute respiratory syndrome coronavirus 2
FVSEETGTLI

SEQ ID NO: 10344 - protein, 11 aa, Severe acute respiratory syndrome-related coronavirus
  REGION 1..11: note = Table B: HLA-DQA1*03:02-B1*03:03L HLA-DRB1*04:03L HLA-DQA1*05:01-B1*02:01L HLA-DQA1*03:01-B1*03:02L HLA-DRB1*16:01L HLA-DQA1*01:03-B1*06:01L HLA-DQA1*02:01-B1*03:03L
  source 1..11: note = Severe acute respiratory syndrome coronavirus 2
VSEETGTLIVN

SEQ ID NO: 10345 - protein, 10 aa, Severe acute respiratory syndrome-related coronavirus
  REGION 1..10: note = Table B: HLA-DQA1*03:02-B1*03:03L HLA-DQA1*05:01-B1*03:01L HLA-DRB1*13:03L HLA-DQA1*01:02-B1*06:02M HLA-DRB1*01:02L HLA-DQA1*05:05-B1*03:19L HLA-DQA1*05:01-B1*02:01L HLA-DPA1*02:01-B1*13:01L HLA-DPA1*03:01-B1*105:01M
  REGION 1..10: note = CONT. FROM ABOVE: HLA-DQA1*05:05-B1*03:01L HLA-DQA1*01:03-B1*06: 01L HLA-DQA1*02:01-B1*03:03L HLA-DRB1*15:03L
  source 1..10: note = Severe acute respiratory syndrome coronavirus 2
ETGTLIVNSV

SEQ ID NO: 10346 - protein, 10 aa, Severe acute respiratory syndrome-related coronavirus
  REGION 1..10: note = Table B: HLA-DQA1*03:02-B1*03:03L HLA-DQA1*03:01-B1*03:02L HLA-DQA1*01:03-B1*06:01L HLA-DQA1*02:01-B1*03:03L
  source 1..10: note = Severe acute respiratory syndrome coronavirus 2
TGTLIVNSVL

SEQ ID NO: 10347 - protein, 10 aa, Severe acute respiratory syndrome-related coronavirus
  REGION 1..10: note = Table B: HLA-DQA1*03:02-B1*03:03L
  source 1..10: note = Severe acute respiratory syndrome coronavirus 2
GTLIVNSVLL

SEQ ID NO: 10348 - protein, 10 aa, Severe acute respiratory syndrome-related coronavirus
  REGION 1..10: note = Table B: HLA-DQA1*03:02-B1*03:03L HLA-DQA1*05:01-B1*03:01L HLA-DRB1*13:02L HLA-DRB1*01:02L HLA-DRB3*02:01L HLA-DPA1*03:01-B1*04:02L HLA-DRB1*14:01L HLA-DQA1*05:01-B1*02:01L HLA-DRB1*12:01L
  REGION 1..10: note = CONT. FROM ABOVE: HLA-DPA1*03:01-B1*105:01L HLA-DPA1*01:02-B1*04 :01L HLA-DRB1*07:01L HLA-DRB1*16:01L HLA-DQA1*02:01-B1*03:03L HL A-DRB1*15:03L
  source 1..10: note = Severe acute respiratory syndrome coronavirus 2
TLAILTALRL

SEQ ID NO: 10349 - protein, 10 aa, Severe acute respiratory syndrome-related coronavirus
  REGION 1..10: note = Table B: HLA-DQA1*03:02-B1*03:03L HLA-DQA1*05:01-B1*03:01L HLA-DRB1*04:03L HLA-DRB1*13:03L HLA-DRB1*01:03L HLA-DRB1*04:02L HLA-DRB1*04:05L HLA-DRB4*03:01NL HLA-DQA1*05:01-B1*02:01L HLA-DRB1*12:01L HLA-DPA1*03:01-B1*105:01L
  REGION 1..10: note = CONT. FROM ABOVE: HLA-DQA1*03:01-B1*03:02L HLA-DRB1*14:54L HLA-D RB1*14:17L HLA-DPA1*01:02-B1*04:01L HLA-DRB1*16:01L HLA-DQA1*01: 03-B1*06:01L HLA-DQA1*02:01-B1*03:03L
  source 1..10: note = Severe acute respiratory syndrome coronavirus 2
IVNVSLVKPS

SEQ ID NO: 10350 - protein, 10 aa, Severe acute respiratory syndrome-related coronavirus
  REGION 1..10: note = Table B: HLA-DQA1*03:02-B1*03:03L HLA-DQA1*05:01-B1*03:01L HLA-DRB1*13:03L HLA-DRB1*01:03L HLA-DQA1*01:02-B1*06:02M HLA-DRB4*03:01NL HLA-DRB1*08:77L HLA-DPA1*01:03-B1*03:01L HLA-DPA1*03:01-B1*04:02L HLA-DRB1*03:01L HLA-DRB1*14:01L
  REGION 1..10: note = CONT. FROM ABOVE: HLA-DRB1*11:02L HLA-DRB1*14:02L HLA-DQA1*01-B1 *05L HLA-DQA1*05:05-B1*03:19M HLA-DQA1*05:01-B1*02:01L HLA-DRB4* 01:01L HLA-DPA1*01:03-B1*04:01L HLA-DQA1*05:05-B1*03:116L HLA-DP A1*01:03-B1*04:02L HLA-DRB1*12:01L HLA-DPA1*02:01-B1*13:01L
  REGION 1..10: note = CONT. FROM ABOVE: HLA-DPA1*03:01-B1*105:01L HLA-DPA1*01:03-B1*10 4:01L HLA-DPA1*01:02-B1*04:01L HLA-DRB1*10:01L HLA-DRB1*16:01L H LA-DQA1*01:03-B1*06:01L HLA-DRB1*08:02L HLA-DQA1*02:01-B1*03:03L HLA-DRB1*15:03L
  source 1..10: note = Severe acute respiratory syndrome coronavirus 2
SLVKPSFYVY

SEQ ID NO: 10351 - protein, 15 aa, Severe acute respiratory syndrome-related coronavirus
  REGION 1..15: note = Table B: HLA-DQA1*03:02-B1*03:03L HLA-DRB1*03:01L HLA-DRB1*13:01L
  source 1..15: note = Severe acute respiratory syndrome coronavirus 2
VKPSFYVYSRVKNLN

SEQ ID NO: 10352 - protein, 19 aa, Severe acute respiratory syndrome-related coronavirus
  REGION 1..19: note = Table B: HLA-DQA1*03:02-B1*03:03L HLA-DRB1*03:01L HLA-DRB1*11:02L HLA-DRB1*14:02L HLA-DQA1*05:05-B1*03:19L HLA-DQA1*05:01-B1*02:01L HLA-DPA1*01:03-B1*104:01L HLA-DRB1*08:02L
  source 1..19: note = Severe acute respiratory syndrome coronavirus 2
PSFYVYSRVKNLNSSRVPD

SEQ ID NO: 10353 - protein, 10 aa, Severe acute respiratory syndrome-related coronavirus
  REGION 1..10: note = Table B: HLA-DQA1*03:02-B1*03:03L HLA-DQA1*05:01-B1*03:01L HLA-DRB1*04:03L HLA-DRB1*13:02L HLA-DRB1*13:03L HLA-DRB1*04:02L HLA-DQA1*01:02-B1*06:02L HLA-DPA1*03:01-B1*04:02L HLA-DRB1*14:01L HLA-DQA1*01-B1*05L HLA-DQA1*05:05-B1*03:19L
  REGION 1..10: note = CONT. FROM ABOVE: HLA-DQA1*05:01-B1*02:01L HLA-DRB1*12:01L HLA-D PA1*03:01-B1*105:01L HLA-DQA1*03:01-B1*03:02L HLA-DQA1*05:05-B1* 03:01L HLA-DPA1*01:02-B1*04:01L HLA-DRB1*16:01L HLA-DQA1*01:03-B 1*06:01L HLA-DQA1*02:01-B1*03:03L HLA-DRB1*15:03L
  source 1..10: note = Severe acute respiratory syndrome coronavirus 2
NLNSSRVPDL

SEQ ID NO: 10354 - protein, 10 aa, Severe acute respiratory syndrome-related coronavirus
  REGION 1..10: note = Table B: HLA-DQA1*03:02-B1*03:03L HLA-DQA1*05:01-B1*03:01L HLA-DQA1*01:02-B1*06:02L HLA-DQA1*05:05-B1*03:19L HLA-DQA1*05:01-B1*02:01L HLA-DPA1*03:01-B1*105:01L HLA-DQA1*03:01-B1*03:02L HLA-DQA1*05:05-B1*03:01L
  REGION 1..10: note = CONT. FROM ABOVE: HLA-DQA1*01:03-B1*06:01L HLA-DQA1*02:01-B1*03: 03L
  source 1..10: note = Severe acute respiratory syndrome coronavirus 2
LNSSRVPDLL

SEQ ID NO: 10355 - protein, 11 aa, Severe acute respiratory syndrome-related coronavirus
  REGION 1..11: note = Table B: HLA-DQA1*03:02-B1*03:03L HLA-DQA1*05:01-B1*02:01L HLA-DQA1*03:01-B1*03:02L
  source 1..11: note = Severe acute respiratory syndrome coronavirus 2
DSNGTITVEEL

SEQ ID NO: 10356 - protein, 10 aa, Severe acute respiratory syndrome-related coronavirus
  REGION 1..10: note = Table B: HLA-DQA1*03:02-B1*03:03L HLA-DQA1*05:01-B1*03:01L HLA-DQA1*01:02-B1*06:02L HLA-DQA1*01:01-B1*05:01L HLA-DQA1*05:05-B1*03:19L HLA-DQA1*05:01-B1*02:01L HLA-DPA1*03:01-B1*105:01L HLA-DQA1*03:01-B1*03:02L
  REGION 1..10: note = CONT. FROM ABOVE: HLA-DQA1*05:05-B1*03:01L HLA-DRB1*16:01L HLA-D QA1*01:03-B1*06:01M HLA-DQA1*02:01-B1*03:03L
  source 1..10: note = Severe acute respiratory syndrome coronavirus 2
NGTITVEELK

SEQ ID NO: 10357 - protein, 10 aa, Severe acute respiratory syndrome-related coronavirus
  REGION 1..10: note = Table B: HLA-DQA1*03:02-B1*03:03L HLA-DQA1*05:01-B1*03:01L HLA-DQA1*01:02-B1*06:02L HLA-DPA1*03:01-B1*04:02L HLA-DQA1*05:01-B1*02:01L HLA-DRB1*12:01L HLA-DPA1*03:01-B1*105:01L HLA-DQA1*03:01-B1*03:02L
  REGION 1..10: note = CONT. FROM ABOVE: HLA-DPA1*01:02-B1*04:01L HLA-DRB1*16:01L HLA-D QA1*01:03-B1*06:01L HLA-DQA1*02:01-B1*03:03L HLA-DRB1*15:03L
  source 1..10: note = Severe acute respiratory syndrome coronavirus 2
TITVEELKKL

SEQ ID NO: 10358 - protein, 10 aa, Severe acute respiratory syndrome-related coronavirus
  REGION 1..10: note = Table B: HLA-DQA1*03:02-B1*03:03L HLA-DQA1*05:01-B1*03:01M HLA-DRB1*13:03L HLA-DRB1*01:03L HLA-DQA1*01:02-B1*06:02L HLA-DRB4*03:01NL HLA-DRB1*08:77M HLA-DPA1*01:03-B1*03:01L HLA-DPA1*03:01-B1*04:02M HLA-DRB1*03:01M HLA-DRB1*14:02L
  REGION 1..10: note = CONT. FROM ABOVE: HLA-DQA1*01-B1*05L HLA-DQA1*05:05-B1*03:19L HL A-DQA1*05:01-B1*02:01L HLA-DRB4*01:01M HLA-DPA1*01:03-B1*04:01M HLA-DQA1*05:05-B1*03:116L HLA-DPA1*01:03-B1*04:02L HLA-DRB1*12:0 1L HLA-DQA1*03:01-B1*03:02L HLA-DPA1*01:03-B1*104:01L
  REGION 1..10: note = CONT. FROM ABOVE: HLA-DPA1*01:02-B1*04:01L HLA-DRB1*10:01L HLA-D RB1*16:01L HLA-DQA1*02:01-B1*03:03L HLA-DRB1*15:03M
  source 1..10: note = Severe acute respiratory syndrome coronavirus 2
EELKKLLEQW

SEQ ID NO: 10359 - protein, 10 aa, Severe acute respiratory syndrome-related coronavirus
  REGION 1..10: note = Table B: HLA-DQA1*03:02-B1*03:03L HLA-DQA1*05:05-B1*03:19L
  source 1..10: note = Severe acute respiratory syndrome coronavirus 2
KLLEQWNLVI

SEQ ID NO: 10360 - protein, 10 aa, Severe acute respiratory syndrome-related coronavirus
  REGION 1..10: note = Table B: HLA-DQA1*03:02-B1*03:03L HLA-DQA1*05:01-B1*03:01L HLA-DRB1*04:03L HLA-DRB1*13:02L HLA-DRB1*01:03L HLA-DQA1*01:02-B1*06:02L HLA-DRB1*01:02L HLA-DRB3*02:01L HLA-DPA1*01:03-B1*03:01L HLA-DPA1*03:01-B1*04:02L
  REGION 1..10: note = CONT. FROM ABOVE: HLA-DRB1*14:01L HLA-DQA1*05:05-B1*03:19L HLA-D QA1*05:01-B1*02:01L HLA-DPA1*01:03-B1*04:01L HLA-DRB1*12:01L HLA -DPA1*03:01-B1*105:01L HLA-DQA1*03:01-B1*03:02L HLA-DQA1*05:05-B 1*03:01L HLA-DPA1*01:02-B1*04:01L HLA-DRB1*07:01L
  REGION 1..10: note = CONT. FROM ABOVE: HLA-DRB1*16:01L HLA-DQA1*01:03-B1*06:01L HLA-D QA1*02:01-B1*03:03L HLA-DRB1*15:03L
  source 1..10: note = Severe acute respiratory syndrome coronavirus 2
FVLAAVYRIN

SEQ ID NO: 10361 - protein, 12 aa, Severe acute respiratory syndrome-related coronavirus
  REGION 1..12: note = Table B: HLA-DQA1*03:02-B1*03:03L HLA-DQA1*05:01-B1*03:01L HLA-DRB1*13:02L HLA-DRB1*01:03L HLA-DRB1*04:02L HLA-DRB1*04:05L HLA-DQA1*01:02-B1*06:02L HLA-DRB1*01:02L HLA-DRB1*08:04L HLA-DPA1*01:03-B1*03:01L HLA-DPA1*03:01-B1*04:02L
  REGION 1..12: note = CONT. FROM ABOVE: HLA-DRB1*14:01L HLA-DRB1*08:01L HLA-DQA1*01-B1 *05L HLA-DQA1*05:05-B1*03:19L HLA-DQA1*05:01-B1*02:01L HLA-DPA1* 01:03-B1*04:02L HLA-DRB1*12:01L HLA-DPA1*02:01-B1*13:01L HLA-DPA 1*03:01-B1*105:01L HLA-DQA1*05:05-B1*03:01L
  REGION 1..12: note = CONT. FROM ABOVE: HLA-DPA1*01:02-B1*04:01L HLA-DRB1*16:01L HLA-D QA1*01:03-B1*06:01L HLA-DRB1*04:08L HLA-DQA1*02:01-B1*03:03L HLA -DRB1*15:03L
  source 1..12: note = Severe acute respiratory syndrome coronavirus 2
VYRINWITGGIA

SEQ ID NO: 10362 - protein, 12 aa, Severe acute respiratory syndrome-related coronavirus
  REGION 1..12: note = Table B: HLA-DQA1*03:02-B1*03:03L HLA-DQA1*05:01-B1*03:01L HLA-DRB1*13:02L HLA-DRB1*01:03L HLA-DQA1*01:02-B1*06:02L HLA-DRB1*01:01L HLA-DRB1*01:02L HLA-DPA1*01:03-B1*03:01L HLA-DPA1*03:01-B1*04:02L HLA-DQA1*01-B1*05L
  REGION 1..12: note = CONT. FROM ABOVE: HLA-DQA1*05:01-B1*02:01L HLA-DRB1*12:01L HLA-D PA1*03:01-B1*105:01L HLA-DQA1*05:05-B1*03:01L HLA-DRB1*14:17L HL A-DRB1*07:01L HLA-DRB1*10:01L HLA-DRB1*16:01L HLA-DQA1*01:03-B1* 06:01L HLA-DRB1*04:08L HLA-DQA1*02:01-B1*03:03L HLA-DRB1*15:03L
  source 1..12: note = Severe acute respiratory syndrome coronavirus 2
RINWITGGIAIA

SEQ ID NO: 10363 - protein, 12 aa, Severe acute respiratory syndrome-related coronavirus
  REGION 1..12: note = Table B: HLA-DQA1*03:02-B1*03:03L HLA-DQA1*05:01-B1*03:01L HLA-DRB1*01:02L HLA-DQA1*05:01-B1*02:01L HLA-DRB1*12:01L HLA-DQA1*02:01-B1*03:03L HLA-DRB1*15:03L
  source 1..12: note = Severe acute respiratory syndrome coronavirus 2
INWITGGIAIAM

SEQ ID NO: 10364 - protein, 10 aa, Severe acute respiratory syndrome-related coronavirus
  REGION 1..10: note = Table B: HLA-DQA1*03:02-B1*03:03L HLA-DQA1*05:01-B1*03:01L HLA-DQA1*01:02-B1*06:02L HLA-DQA1*05:05-B1*03:19L HLA-DQA1*05:05-B1*03:01L HLA-DQA1*01:03-B1*06:01L HLA-DQA1*02:01-B1*03:03L
  source 1..10: note = Severe acute respiratory syndrome coronavirus 2
ITGGIAIAMA

SEQ ID NO: 10365 - protein, 12 aa, Severe acute respiratory syndrome-related coronavirus
  REGION 1..12: note = Table B: HLA-DQA1*03:02-B1*03:03L HLA-DRB1*04:03L HLA-DRB1*04:02L HLA-DRB1*04:05L HLA-DQA1*01:02-B1*06:02L HLA-DPA1*03:01-B1*105:01L HLA-DRB1*14:17L HLA-DRB1*16:01L HLA-DQA1*01:03-B1*06:01L
  source 1..12: note = Severe acute respiratory syndrome coronavirus 2
TRSMWSFNPETN

SEQ ID NO: 10366 - protein, 10 aa, Severe acute respiratory syndrome-related coronavirus
  REGION 1..10: note = Table B: HLA-DQA1*03:02-B1*03:03L HLA-DQA1*05:01-B1*03:01L HLA-DRB1*04:03L HLA-DRB1*13:02L HLA-DRB1*13:03L HLA-DRB1*04:02L HLA-DQA1*01:02-B1*06:02L HLA-DRB1*01:02L HLA-DRB1*08:77L HLA-DRB3*02:01L HLA-DPA1*03:01-B1*04:02L HLA-DRB1*14:01L
  REGION 1..10: note = CONT. FROM ABOVE: HLA-DRB1*14:02L HLA-DQA1*01-B1*05L HLA-DQA1*05 :05-B1*03:19L HLA-DQA1*05:01-B1*02:01L HLA-DPA1*01:03-B1*04:01L HLA-DQA1*05:05-B1*03:116L HLA-DRB1*09:01L HLA-DRB1*12:01L HLA-DP A1*02:01-B1*13:01L HLA-DPA1*03:01-B1*105:01L
  REGION 1..10: note = CONT. FROM ABOVE: HLA-DQA1*03:01-B1*03:02L HLA-DQA1*05:05-B1*03: 01L HLA-DPA1*01:02-B1*04:01L HLA-DRB1*07:01L HLA-DRB1*16:01L HLA -DQA1*01:03-B1*06:01L HLA-DQA1*02:01-B1*03:03L HLA-DRB1*15:03L
  source 1..10: note = Severe acute respiratory syndrome coronavirus 2
WSFNPETNIL

SEQ ID NO: 10367 - protein, 10 aa, Severe acute respiratory syndrome-related coronavirus
  REGION 1..10: note = Table B: HLA-DQA1*03:02-B1*03:03L HLA-DQA1*05:01-B1*03:01L HLA-DRB1*09:01L HLA-DPA1*02:01-B1*13:01L HLA-DQA1*03:01-B1*03:02L HLA-DRB1*16:01L HLA-DQA1*02:01-B1*03:03L HLA-DRB1*15:03L
  source 1..10: note = Severe acute respiratory syndrome coronavirus 2
SFNPETNILL

SEQ ID NO: 10368 - protein, 14 aa, Severe acute respiratory syndrome-related coronavirus
  REGION 1..14: note = Table B: HLA-DQA1*03:02-B1*03:03L HLA-DQA1*05:01-B1*03:01L HLA-DRB1*13:02L HLA-DRB1*13:03L HLA-DRB1*01:03L HLA-DRB1*04:05L HLA-DRB1*01:02L HLA-DRB4*03:01NL HLA-DRB1*08:04L HLA-DRB3*02:01L HLA-DPA1*01:03-B1*03:01L HLA-DPA1*03:01-B1*04:02L
  REGION 1..14: note = CONT. FROM ABOVE: HLA-DRB1*08:01L HLA-DQA1*01-B1*05L HLA-DQA1*05 :05-B1*03:19L HLA-DQA1*05:01-B1*02:01L HLA-DRB1*04:10L HLA-DRB1* 12:02L HLA-DPA1*02:01-B1*13:01L HLA-DPA1*03:01-B1*105:01L HLA-DQ A1*05:05-B1*03:01L HLA-DRB1*04:08L HLA-DRB1*15:03L
  source 1..14: note = Severe acute respiratory syndrome coronavirus 2
NPETNILLNVPLHG

SEQ ID NO: 10369 - protein, 10 aa, Severe acute respiratory syndrome-related coronavirus
  REGION 1..10: note = Table B: HLA-DQA1*03:02-B1*03:03L HLA-DQA1*05:01-B1*03:01L HLA-DRB1*04:03L HLA-DRB1*01:02L HLA-DRB1*14:01L HLA-DRB1*14:02L HLA-DRB1*12:01L HLA-DQA1*03:01-B1*03:02L HLA-DRB1*16:01L HLA-DQA1*02:01-B1*03:03L HLA-DRB1*15:03L
  source 1..10: note = Severe acute respiratory syndrome coronavirus 2
ILLNVPLHGT

SEQ ID NO: 10370 - protein, 10 aa, Severe acute respiratory syndrome-related coronavirus
  REGION 1..10: note = Table B: HLA-DQA1*03:02-B1*03:03L HLA-DQA1*05:05-B1*03:19L
  source 1..10: note = Severe acute respiratory syndrome coronavirus 2
LLNVPLHGTI

SEQ ID NO: 10371 - protein, 10 aa, Severe acute respiratory syndrome-related coronavirus
  REGION 1..10: note = Table B: HLA-DQA1*03:02-B1*03:03L HLA-DQA1*03:01-B1*03:02L HLA-DQA1*02:01-B1*03:03L
  source 1..10: note = Severe acute respiratory syndrome coronavirus 2
LTRPLLESEL

SEQ ID NO: 10372 - protein, 10 aa, Severe acute respiratory syndrome-related coronavirus
  REGION 1..10: note = Table B: HLA-DQA1*03:02-B1*03:03L HLA-DQA1*05:05-B1*03:19M HLA-DQA1*03:01-B1*03:02L HLA-DPA1*01:03-B1*104:01L
  source 1..10: note = Severe acute respiratory syndrome coronavirus 2
LESELVIGAV

SEQ ID NO: 10373 - protein, 10 aa, Severe acute respiratory syndrome-related coronavirus
  REGION 1..10: note = Table B: HLA-DQA1*03:02-B1*03:03M HLA-DQA1*05:05-B1*03:19L HLA-DRB1*09:01L HLA-DQA1*03:01-B1*03:02L HLA-DPA1*01:03-B1*104:01L
  source 1..10: note = Severe acute respiratory syndrome coronavirus 2
SELVIGAVIL

SEQ ID NO: 10374 - protein, 11 aa, Severe acute respiratory syndrome-related coronavirus
  REGION 1..11: note = Table B: HLA-DQA1*03:02-B1*03:03L
  source 1..11: note = Severe acute respiratory syndrome coronavirus 2
VIGAVILRGHL

SEQ ID NO: 10375 - protein, 11 aa, Severe acute respiratory syndrome-related coronavirus
  REGION 1..11: note = Table B: HLA-DQA1*03:02-B1*03:03L
  source 1..11: note = Severe acute respiratory syndrome coronavirus 2
DIKDLPKEITV

SEQ ID NO: 10376 - protein, 12 aa, Severe acute respiratory syndrome-related coronavirus
  REGION 1..12: note = Table B: HLA-DQA1*03:02-B1*03:03L HLA-DRB1*04:03L HLA-DRB1*04:02L HLA-DRB1*04:05L HLA-DQA1*01:02-B1*06:02L HLA-DQA1*01:01-B1*05:01L HLA-DRB1*04:10L HLA-DRB1*14:17L HLA-DRB1*16:01L HLA-DQA1*01:03-B1*06:01L
  REGION 1..12: note = CONT. FROM ABOVE: HLA-DQA1*02:01-B1*03:03L
  source 1..12: note = Severe acute respiratory syndrome coronavirus 2
LPKEITVATSRT

SEQ ID NO: 10377 - protein, 10 aa, Severe acute respiratory syndrome-related coronavirus
  REGION 1..10: note = Table B: HLA-DQA1*03:02-B1*03:03L HLA-DQA1*05:01-B1*03:01L HLA-DRB1*04:03L HLA-DRB1*13:02L HLA-DRB1*13:03L HLA-DRB1*01:03L HLA-DRB1*04:02L HLA-DRB1*04:05L HLA-DQA1*01:02-B1*06:02L HLA-DRB1*01:02L HLA-DRB4*03:01NL HLA-DRB1*08:77L HLA-DRB3*02:01L
  REGION 1..10: note = CONT. FROM ABOVE: HLA-DPA1*01:03-B1*03:01L HLA-DPA1*03:01-B1*04: 02L HLA-DRB1*14:01L HLA-DRB1*11:03L HLA-DRB1*11:04L HLA-DRB1*14: 02L HLA-DRB5*01:01L HLA-DQA1*01-B1*05L HLA-DQA1*05:05-B1*03:19L HLA-DQA1*05:01-B1*02:01L HLA-DPA1*01:03-B1*04:01L
  REGION 1..10: note = CONT. FROM ABOVE: HLA-DQA1*05:05-B1*03:116L HLA-DRB1*09:01L HLA- DPA1*01:03-B1*04:02L HLA-DRB1*12:01L HLA-DRB1*12:02L HLA-DPA1*02 :01-B1*13:01L HLA-DPA1*03:01-B1*105:01L HLA-DQA1*03:01-B1*03:02L HLA-DRB1*14:54L HLA-DQA1*05:05-B1*03:01L HLA-DRB1*14:17L
  REGION 1..10: note = CONT. FROM ABOVE: HLA-DPA1*01:02-B1*04:01L HLA-DRB1*07:01L HLA-D RB1*16:01L HLA-DQA1*01:03-B1*06:01L HLA-DQA1*02:01-B1*03:03L HLA -DRB1*15:03L
  source 1..10: note = Severe acute respiratory syndrome coronavirus 2
EITVATSRTL

SEQ ID NO: 10378 - protein, 10 aa, Severe acute respiratory syndrome-related coronavirus
  REGION 1..10: note = Table B: HLA-DQA1*03:02-B1*03:03L HLA-DQA1*05:01-B1*03:01L HLA-DRB1*04:01L HLA-DRB1*04:03L HLA-DRB1*13:02L HLA-DRB1*13:03M HLA-DRB1*01:03M HLA-DRB1*04:02L HLA-DQA1*01:02-B1*06:02M HLA-DRB1*01:01L HLA-DRB4*03:01NL HLA-DRB1*08:77M
  REGION 1..10: note = CONT. FROM ABOVE: HLA-DPA1*01:03-B1*03:01M HLA-DPA1*03:01-B1*04: 02L HLA-DRB1*03:01L HLA-DRB1*14:01L HLA-DRB1*11:02L HLA-DRB1*11: 03L HLA-DRB1*11:04L HLA-DRB1*14:02M HLA-DRB1*11:01L HLA-DRB5*01: 01L HLA-DQA1*01-B1*05L HLA-DQA1*05:05-B1*03:19M
  REGION 1..10: note = CONT. FROM ABOVE: HLA-DQA1*05:01-B1*02:01M HLA-DRB4*01:01L HLA-D PA1*01:03-B1*04:01M HLA-DQA1*05:05-B1*03:116L HLA-DPA1*01:03-B1* 04:02L HLA-DRB1*12:01L HLA-DRB1*12:02L HLA-DPA1*02:01-B1*13:01L HLA-DPA1*03:01-B1*105:01L HLA-DQA1*03:01-B1*03:02L
  REGION 1..10: note = CONT. FROM ABOVE: HLA-DRB1*14:54L HLA-DPA1*01:03-B1*104:01L HLA- DQA1*05:05-B1*03:01L HLA-DRB1*14:17L HLA-DPA1*01:02-B1*04:01L HL A-DRB1*10:01L HLA-DRB1*16:01M HLA-DQA1*01:03-B1*06:01L HLA-DRB1* 08:02L HLA-DQA1*02:01-B1*03:03M HLA-DRB1*15:03L
  source 1..10: note = Severe acute respiratory syndrome coronavirus 2
TVATSRTLSY

SEQ ID NO: 10379 - protein, 13 aa, Severe acute respiratory syndrome-related coronavirus
  REGION 1..13: note = Table B: HLA-DQA1*03:02-B1*03:03L HLA-DRB1*04:01L HLA-DRB1*04:03L HLA-DRB1*04:02L HLA-DRB1*04:04L HLA-DRB1*08:77L HLA-DRB3*02:01L HLA-DPA1*01:03-B1*03:01L HLA-DPA1*03:01-B1*04:02L HLA-DRB1*14:01L HLA-DRB1*11:03L
  REGION 1..13: note = CONT. FROM ABOVE: HLA-DRB1*11:01L HLA-DQA1*01-B1*05L HLA-DQA1*05 :01-B1*02:01L HLA-DRB1*09:01L HLA-DRB3*01:01L HLA-DPA1*02:01-B1* 13:01L HLA-DPA1*01:02-B1*04:01L
  source 1..13: note = Severe acute respiratory syndrome coronavirus 2
LSYYKLGASQRVA

SEQ ID NO: 10380 - protein, 11 aa, Severe acute respiratory syndrome-related coronavirus
  REGION 1..11: note = Table B: HLA-DQA1*03:02-B1*03:03L HLA-DQA1*05:01-B1*03:01L HLA-DRB1*04:03L HLA-DRB1*13:02L HLA-DRB1*13:03L HLA-DRB1*04:02L HLA-DRB1*04:05L HLA-DQA1*01:02-B1*06:02L HLA-DRB1*01:01L HLA-DRB4*03:01NL HLA-DRB1*08:04L HLA-DRB1*08:77L HLA-DRB1*14:01L
  REGION 1..11: note = CONT. FROM ABOVE: HLA-DRB1*11:03L HLA-DRB1*11:04L HLA-DRB1*14:02 L HLA-DRB1*08:01L HLA-DRB1*11:01L HLA-DQA1*05:05-B1*03:19L HLA-D RB1*12:01L HLA-DRB1*12:02L HLA-DPA1*03:01-B1*105:01L HLA-DQA1*03 :01-B1*03:02L HLA-DRB1*14:54L HLA-DQA1*05:05-B1*03:01L
  REGION 1..11: note = CONT. FROM ABOVE: HLA-DRB1*14:17L HLA-DPA1*01:02-B1*04:01L HLA-D RB1*07:01L HLA-DRB1*10:01L HLA-DQA1*01:03-B1*06:01L HLA-DRB1*04: 08L HLA-DRB1*15:03L
  source 1..11: note = Severe acute respiratory syndrome coronavirus 2
YKLGASQRVAG

SEQ ID NO: 10381 - protein, 11 aa, Severe acute respiratory syndrome-related coronavirus
  REGION 1..11: note = Table B: HLA-DQA1*03:02-B1*03:03L HLA-DRB1*04:03L HLA-DRB1*04:02L HLA-DRB1*14:17L HLA-DQA1*02:01-B1*03:03L
  source 1..11: note = Severe acute respiratory syndrome coronavirus 2
GASQRVAGDSG

SEQ ID NO: 10382 - protein, 12 aa, Severe acute respiratory syndrome-related coronavirus
  REGION 1..12: note = Table B: HLA-DQA1*03:02-B1*03:03L HLA-DRB1*04:03L HLA-DQA1*01-B1*05L HLA-DQA1*05:01-B1*02:01L
  source 1..12: note = Severe acute respiratory syndrome coronavirus 2
ASQRVAGDSGFA

SEQ ID NO: 10383 - protein, 10 aa, Severe acute respiratory syndrome-related coronavirus
  REGION 1..10: note = Table B: HLA-DQA1*03:02-B1*03:03L HLA-DRB1*13:03L
  source 1..10: note = Severe acute respiratory syndrome coronavirus 2
RVAGDSGFAA

SEQ ID NO: 10384 - protein, 12 aa, Severe acute respiratory syndrome-related coronavirus
  REGION 1..12: note = Table B: HLA-DQA1*03:02-B1*03:03L HLA-DQA1*05:01-B1*03:01L HLA-DRB1*04:03L HLA-DRB1*01:03L HLA-DRB1*04:02L HLA-DRB1*04:05L HLA-DRB1*01:02L HLA-DRB4*03:01NL HLA-DQA1*01:01-B1*05:01L HLA-DQA1*01-B1*05L HLA-DRB1*12:01L HLA-DRB1*14:17L
  REGION 1..12: note = CONT. FROM ABOVE: HLA-DRB1*04:08L
  source 1..12: note = Severe acute respiratory syndrome coronavirus 2
VAGDSGFAAYSR

SEQ ID NO: 10385 - protein, 12 aa, Severe acute respiratory syndrome-related coronavirus
  REGION 1..12: note = Table B: HLA-DQA1*03:02-B1*03:03L HLA-DRB1*08:77L HLA-DRB1*11:02L HLA-DQA1*01-B1*05L HLA-DRB1*12:01L
  source 1..12: note = Severe acute respiratory syndrome coronavirus 2
AGDSGFAAYSRY

SEQ ID NO: 10386 - protein, 12 aa, Severe acute respiratory syndrome-related coronavirus
  REGION 1..12: note = Table B: HLA-DQA1*03:02-B1*03:03L HLA-DQA1*01:01-B1*05:01L HLA-DRB1*04:08L
  source 1..12: note = Severe acute respiratory syndrome coronavirus 2
GDSGFAAYSRYR

SEQ ID NO: 10387 - protein, 12 aa, Severe acute respiratory syndrome-related coronavirus
  REGION 1..12: note = Table B: HLA-DQA1*03:02-B1*03:03L HLA-DQA1*05:01-B1*03:01L HLA-DRB1*04:01L HLA-DRB1*13:02L HLA-DRB1*04:04L HLA-DQA1*01:02-B1*06:02L HLA-DRB1*01:02L HLA-DRB1*08:04L HLA-DRB1*08:77L HLA-DRB3*02:01L HLA-DPA1*01:03-B1*03:01L
  REGION 1..12: note = CONT. FROM ABOVE: HLA-DPA1*03:01-B1*04:02L HLA-DRB1*14:01L HLA-D RB1*11:03L HLA-DRB1*11:04L HLA-DRB1*14:02L HLA-DQA1*01:01-B1*05: 01L HLA-DRB1*08:01L HLA-DRB1*11:01L HLA-DRB5*01:01L HLA-DQA1*05: 01-B1*02:01L HLA-DRB1*04:10L HLA-DRB1*09:01L HLA-DRB1*12:01L
  REGION 1..12: note = CONT. FROM ABOVE: HLA-DRB1*12:02L HLA-DRB3*01:01L HLA-DPA1*02:01 -B1*13:01L HLA-DPA1*03:01-B1*105:01L HLA-DQA1*05:05-B1*03:01L HL A-DPA1*01:02-B1*04:01L HLA-DRB1*07:01L HLA-DRB1*10:01L HLA-DRB1* 04:08L HLA-DRB1*08:03L HLA-DRB1*15:03L
  source 1..12: note = Severe acute respiratory syndrome coronavirus 2
IGNYKLNTDHSS

SEQ ID NO: 10388 - protein, 14 aa, Severe acute respiratory syndrome-related coronavirus
  REGION 1..14: note = Table B: HLA-DQA1*03:02-B1*03:03L HLA-DQA1*05:01-B1*03:01L HLA-DQA1*01:02-B1*06:02L HLA-DRB3*02:01L HLA-DPA1*01:03-B1*03:01L HLA-DPA1*03:01-B1*04:02L HLA-DRB1*11:02L HLA-DQA1*05:05-B1*03:19L
  REGION 1..14: note = CONT. FROM ABOVE: HLA-DPA1*01:03-B1*04:02L HLA-DPA1*02:01-B1*13: 01L HLA-DPA1*03:01-B1*105:01L HLA-DQA1*05:05-B1*03:01L HLA-DPA1* 01:02-B1*04:01L HLA-DRB1*08:02L
  source 1..14: note = Severe acute respiratory syndrome coronavirus 2
GNYKLNTDHSSSSD

SEQ ID NO: 10389 - protein, 11 aa, Severe acute respiratory syndrome-related coronavirus
  REGION 1..11: note = Table B: HLA-DQA1*03:02-B1*03:03L HLA-DRB1*04:02L HLA-DRB1*04:05L HLA-DRB4*03:01NL HLA-DQA1*05:01-B1*02:01L HLA-DRB1*14:17L HLA-DQA1*02:01-B1*03:03L
  source 1..11: note = Severe acute respiratory syndrome coronavirus 2
LNTDHSSSSDN

SEQ ID NO: 10390 - protein, 11 aa, Severe acute respiratory syndrome-related coronavirus
  REGION 1..11: note = Table B: HLA-DQA1*03:02-B1*03:03L HLA-DRB1*04:03L HLA-DQA1*01:01-B1*05:01L HLA-DRB1*16:01L HLA-DQA1*02:01-B1*03:03L
  source 1..11: note = Severe acute respiratory syndrome coronavirus 2
TDHSSSSDNIA

SEQ ID NO: 10391 - protein, 10 aa, Severe acute respiratory syndrome-related coronavirus
  REGION 1..10: note = Table B: HLA-DQA1*03:02-B1*03:03L HLA-DQA1*05:01-B1*03:01L HLA-DRB1*13:03L HLA-DRB1*04:02L HLA-DPA1*03:01-B1*04:02L HLA-DRB1*14:01L HLA-DQA1*01-B1*05L HLA-DQA1*05:01-B1*02:01L HLA-DQA1*05:05-B1*03:116L HLA-DRB1*09:01L
  REGION 1..10: note = CONT. FROM ABOVE: HLA-DPA1*03:01-B1*105:01L HLA-DQA1*03:01-B1*03 :02L HLA-DPA1*01:02-B1*04:01L HLA-DRB1*16:01L HLA-DQA1*02:01-B1* 03:03L HLA-DRB1*15:03L
  source 1..10: note = Severe acute respiratory syndrome coronavirus 2
HSSSSDNIAL

SEQ ID NO: 10392 - protein, 10 aa, Severe acute respiratory syndrome-related coronavirus
  REGION 1..10: note = Table B: HLA-DQA1*03:02-B1*03:03L HLA-DQA1*01:02-B1*06:02L HLA-DPA1*03:01-B1*04:02L HLA-DRB1*11:02L HLA-DRB1*14:02L HLA-DQA1*05:05-B1*03:19L HLA-DQA1*05:05-B1*03:116L HLA-DPA1*01:03-B1*04:02L HLA-DPA1*02:01-B1*13:01L
  REGION 1..10: note = CONT. FROM ABOVE: HLA-DPA1*03:01-B1*105:01L HLA-DQA1*03:01-B1*03 :02L HLA-DPA1*01:03-B1*104:01L HLA-DPA1*01:02-B1*04:01L HLA-DRB1 *16:01L HLA-DQA1*01:03-B1*06:01L HLA-DQA1*02:01-B1*03:03L HLA-DR B1*15:03L
  source 1..10: note = Severe acute respiratory syndrome coronavirus 2
FHLVDFQVTI

SEQ ID NO: 10393 - protein, 10 aa, Severe acute respiratory syndrome-related coronavirus
  REGION 1..10: note = Table B: HLA-DQA1*03:02-B1*03:03L HLA-DRB1*08:77L HLA-DRB3*02:01L HLA-DQA1*05:01-B1*02:01L HLA-DRB1*09:01L HLA-DRB1*12:01L HLA-DRB1*07:01L HLA-DRB1*16:01L HLA-DQA1*02:01-B1*03:03L HLA-DRB1*15:03L
  source 1..10: note = Severe acute respiratory syndrome coronavirus 2
DFQVTIAEIL

SEQ ID NO: 10394 - protein, 10 aa, Severe acute respiratory syndrome-related coronavirus
  REGION 1..10: note = Table B: HLA-DQA1*03:02-B1*03:03L HLA-DQA1*03:01-B1*03:02L HLA-DQA1*02:01-B1*03:03L
  source 1..10: note = Severe acute respiratory syndrome coronavirus 2
RTFKVSIWNL

SEQ ID NO: 10395 - protein, 10 aa, Severe acute respiratory syndrome-related coronavirus
  REGION 1..10: note = Table B: HLA-DQA1*03:02-B1*03:03L HLA-DRB1*04:03L HLA-DQA1*01-B1*05L HLA-DQA1*05:01-B1*02:01L HLA-DPA1*03:01-B1*105:01L HLA-DQA1*03:01-B1*03:02L HLA-DPA1*01:02-B1*04:01L HLA-DQA1*01:03-B1*06:01L
  REGION 1..10: note = CONT. FROM ABOVE: HLA-DQA1*02:01-B1*03:03L
  source 1..10: note = Severe acute respiratory syndrome coronavirus 2
DYIINLIIKN

SEQ ID NO: 10396 - protein, 10 aa, Severe acute respiratory syndrome-related coronavirus
  REGION 1..10: note = Table B: HLA-DQA1*03:02-B1*03:03L HLA-DQA1*05:01-B1*03:01L HLA-DRB1*13:02L HLA-DRB1*13:03L HLA-DRB1*01:03L HLA-DRB1*04:05L HLA-DQA1*01:02-B1*06:02L HLA-DRB1*01:02L HLA-DRB1*08:77L HLA-DRB3*02:01L HLA-DPA1*01:03-B1*03:01L
  REGION 1..10: note = CONT. FROM ABOVE: HLA-DPA1*03:01-B1*04:02L HLA-DRB1*14:01L HLA-D RB1*14:02L HLA-DQA1*05:05-B1*03:19L HLA-DQA1*05:01-B1*02:01L HLA -DRB4*01:01L HLA-DPA1*01:03-B1*04:01L HLA-DQA1*05:05-B1*03:116L HLA-DRB1*09:01L HLA-DPA1*01:03-B1*04:02L HLA-DRB1*12:01L
  REGION 1..10: note = CONT. FROM ABOVE: HLA-DPA1*02:01-B1*13:01L HLA-DPA1*03:01-B1*105 :01L HLA-DQA1*03:01-B1*03:02L HLA-DPA1*01:03-B1*104:01L HLA-DQA1 *05:05-B1*03:01L HLA-DPA1*01:02-B1*04:01L HLA-DRB1*16:01L HLA-DQ A1*01:03-B1*06:01L HLA-DRB1*08:03L HLA-DQA1*02:01-B1*03:03L
  REGION 1..10: note = CONT. FROM ABOVE: HLA-DRB1*15:03L
  source 1..10: note = Severe acute respiratory syndrome coronavirus 2
YIINLIIKNL

SEQ ID NO: 10397 - protein, 13 aa, Severe acute respiratory syndrome-related coronavirus
  REGION 1..13: note = Table B: HLA-DQA1*03:02-B1*03:03L HLA-DRB1*14:04L HLA-DRB1*04:04L HLA-DRB1*03:01L HLA-DRB1*11:02L HLA-DQA1*05:01-B1*02:01L HLA-DQA1*05:05-B1*03:116L HLA-DRB1*04:10L HLA-DPA1*01:03-B1*04:02L
  REGION 1..13: note = CONT. FROM ABOVE: HLA-DPA1*01:03-B1*02:01L HLA-DPA1*01:03-B1*104 :01L HLA-DRB1*07:01L HLA-DRB1*10:01L HLA-DQA1*01:03-B1*06:01L HL A-DRB1*08:02L
  source 1..13: note = Severe acute respiratory syndrome coronavirus 2
LIIKNLSKSLTEN

SEQ ID NO: 10398 - protein, 10 aa, Severe acute respiratory syndrome-related coronavirus
  REGION 1..10: note = Table B: HLA-DQA1*03:02-B1*03:03M HLA-DQA1*05:01-B1*03:01L HLA-DQA1*01:02-B1*06:02L HLA-DPA1*03:01-B1*04:02L HLA-DRB1*14:01L HLA-DRB1*14:02L HLA-DQA1*05:05-B1*03:19L HLA-DQA1*05:01-B1*02:01L HLA-DPA1*01:03-B1*04:01L
  REGION 1..10: note = CONT. FROM ABOVE: HLA-DQA1*05:05-B1*03:116L HLA-DRB1*09:01L HLA- DPA1*01:03-B1*04:02L HLA-DPA1*03:01-B1*105:01L HLA-DQA1*03:01-B1 *03:02L HLA-DPA1*01:03-B1*104:01L HLA-DPA1*01:02-B1*04:01L HLA-D RB1*16:01L HLA-DQA1*01:03-B1*06:01L HLA-DQA1*02:01-B1*03:03L
  REGION 1..10: note = CONT. FROM ABOVE: HLA-DRB1*15:03L
  source 1..10: note = Severe acute respiratory syndrome coronavirus 2
SLTENKYSQL

SEQ ID NO: 10399 - protein, 12 aa, Severe acute respiratory syndrome-related coronavirus
  REGION 1..12: note = Table B: HLA-DQA1*03:02-B1*03:03L HLA-DRB1*04:03L HLA-DQA1*01-B1*05L HLA-DQA1*05:01-B1*02:01L HLA-DQA1*03:01-B1*03:02L HLA-DPA1*01:02-B1*04:01L HLA-DQA1*01:03-B1*06:01L HLA-DQA1*02:01-B1*03:03L
  source 1..12: note = Severe acute respiratory syndrome coronavirus 2
LTENKYSQLDEE

SEQ ID NO: 10400 - protein, 12 aa, Severe acute respiratory syndrome-related coronavirus
  REGION 1..12: note = Table B: HLA-DQA1*03:02-B1*03:03L HLA-DRB1*04:03L HLA-DRB1*13:03L HLA-DRB1*04:02L HLA-DRB1*04:05L HLA-DQA1*01:02-B1*06:02L HLA-DQA1*01:01-B1*05:01L HLA-DQA1*05:01-B1*02:01L HLA-DRB1*04:10L
  REGION 1..12: note = CONT. FROM ABOVE: HLA-DPA1*02:01-B1*13:01L HLA-DRB1*16:01L HLA-D QA1*01:03-B1*06:01L HLA-DQA1*02:01-B1*03:03L
  source 1..12: note = Severe acute respiratory syndrome coronavirus 2
ENKYSQLDEEQP

SEQ ID NO: 10401 - protein, 10 aa, Severe acute respiratory syndrome-related coronavirus
  REGION 1..10: note = Table B: HLA-DQA1*03:02-B1*03:03L HLA-DQA1*01-B1*05L HLA-DQA1*05:01-B1*02:01L HLA-DQA1*03:01-B1*03:02L
  source 1..10: note = Severe acute respiratory syndrome coronavirus 2
SQLDEEQPME

SEQ ID NO: 10402 - protein, 10 aa, Severe acute respiratory syndrome-related coronavirus
  REGION 1..10: note = Table B: HLA-DQA1*03:02-B1*03:03L HLA-DQA1*05:01-B1*03:01L HLA-DQA1*05:05-B1*03:19L HLA-DQA1*05:05-B1*03:116L HLA-DRB1*09:01L HLA-DQA1*03:01-B1*03:02L HLA-DPA1*01:03-B1*104:01L HLA-DQA1*02:01-B1*03:03L
  REGION 1..10: note = CONT. FROM ABOVE: HLA-DRB1*15:03L
  source 1..10: note = Severe acute respiratory syndrome coronavirus 2
QLDEEQPMEI

SEQ ID NO: 10403 - protein, 11 aa, Severe acute respiratory syndrome-related coronavirus
  REGION 1..11: note = Table B: HLA-DQA1*03:02-B1*03:03L HLA-DQA1*05:01-B1*03:01L HLA-DRB1*04:03L HLA-DRB1*13:03L HLA-DRB1*04:02L HLA-DQA1*05:01-B1*02:01L HLA-DRB1*14:17L HLA-DRB1*16:01L HLA-DQA1*02:01-B1*03:03L
  source 1..11: note = Severe acute respiratory syndrome coronavirus 2
GTYEGNSPFHP

SEQ ID NO: 10404 - protein, 10 aa, Severe acute respiratory syndrome-related coronavirus
  REGION 1..10: note = Table B: HLA-DQA1*03:02-B1*03:03L HLA-DQA1*05:05-B1*03:19L HLA-DQA1*05:01-B1*02:01L HLA-DQA1*03:01-B1*03:02L HLA-DPA1*01:03-B1*104:01L HLA-DPA1*01:02-B1*04:01L HLA-DQA1*02:01-B1*03:03L
  source 1..10: note = Severe acute respiratory syndrome coronavirus 2
YEGNSPFHPL

SEQ ID NO: 10405 - protein, 11 aa, Severe acute respiratory syndrome-related coronavirus
  REGION 1..11: note = Table B: HLA-DQA1*03:02-B1*03:03L HLA-DQA1*01:03-B1*06:01L
  source 1..11: note = Severe acute respiratory syndrome coronavirus 2
GNSPFHPLADN

SEQ ID NO: 10406 - protein, 11 aa, Severe acute respiratory syndrome-related coronavirus
  REGION 1..11: note = Table B: HLA-DQA1*03:02-B1*03:03L HLA-DRB1*13:02L HLA-DRB1*04:04L HLA-DRB1*08:77L HLA-DRB3*02:01L HLA-DPA1*01:03-B1*03:01L HLA-DPA1*03:01-B1*04:02L HLA-DRB1*03:01L HLA-DRB1*14:01L HLA-DRB1*11:03L HLA-DRB1*11:04L
  REGION 1..11: note = CONT. FROM ABOVE: HLA-DRB1*14:02L HLA-DRB1*08:01L HLA-DRB1*11:01 L HLA-DQA1*05:05-B1*03:19L HLA-DRB4*01:01L HLA-DPA1*01:03-B1*04: 01L HLA-DQA1*05:05-B1*03:116L HLA-DRB1*04:10L HLA-DRB1*09:01L HL A-DPA1*01:03-B1*04:02L HLA-DRB1*12:02L HLA-DRB3*01:01L
  REGION 1..11: note = CONT. FROM ABOVE: HLA-DRB1*14:54L HLA-DPA1*01:03-B1*104:01L HLA- DQA1*05:05-B1*03:01L HLA-DRB1*07:01L HLA-DRB1*10:01L HLA-DRB1*04 :08L HLA-DRB1*08:02L HLA-DRB1*08:03L
  source 1..11: note = Severe acute respiratory syndrome coronavirus 2
SPFHPLADNKF

SEQ ID NO: 10407 - protein, 12 aa, Severe acute respiratory syndrome-related coronavirus
  REGION 1..12: note = Table B: HLA-DQA1*03:02-B1*03:03L HLA-DQA1*05:01-B1*03:01L HLA-DQA1*01:02-B1*06:02L HLA-DPA1*01:03-B1*03:01L HLA-DPA1*03:01-B1*04:02L HLA-DRB1*08:01L HLA-DQA1*05:05-B1*03:19L HLA-DPA1*01:03-B1*04:02L
  REGION 1..12: note = CONT. FROM ABOVE: HLA-DRB1*12:01L HLA-DPA1*02:01-B1*13:01L HLA-D PA1*03:01-B1*105:01L HLA-DQA1*03:01-B1*03:02L HLA-DQA1*05:05-B1* 03:01L HLA-DPA1*01:02-B1*04:01L HLA-DRB1*16:01L HLA-DQA1*01:03-B 1*06:01L HLA-DRB1*04:08L HLA-DQA1*02:01-B1*03:03L
  source 1..12: note = Severe acute respiratory syndrome coronavirus 2
DNKFALTCFSTQ

SEQ ID NO: 10408 - protein, 12 aa, Severe acute respiratory syndrome-related coronavirus
  REGION 1..12: note = Table B: HLA-DQA1*03:02-B1*03:03L HLA-DQA1*05:01-B1*03:01L HLA-DQA1*01:02-B1*06:02L HLA-DRB1*01:02L HLA-DQA1*05:05-B1*03:19L HLA-DQA1*05:01-B1*02:01L HLA-DRB1*12:01L HLA-DPA1*03:01-B1*105:01L
  REGION 1..12: note = CONT. FROM ABOVE: HLA-DQA1*03:01-B1*03:02L HLA-DQA1*05:05-B1*03: 01L HLA-DRB1*16:01L HLA-DRB1*04:08L HLA-DQA1*02:01-B1*03:03L HLA -DRB1*15:03L
  source 1..12: note = Severe acute respiratory syndrome coronavirus 2
TQFAFACPDGVK

SEQ ID NO: 10409 - protein, 10 aa, Severe acute respiratory syndrome-related coronavirus
  REGION 1..10: note = Table B: HLA-DQA1*03:02-B1*03:03L HLA-DQA1*05:01-B1*03:01L HLA-DQA1*01:02-B1*06:02L HLA-DQA1*05:05-B1*03:19L HLA-DQA1*03:01-B1*03:02L HLA-DPA1*01:03-B1*104:01L HLA-DRB1*16:01L HLA-DQA1*02:01-B1*03:03L HLA-DRB1*15:03L
  source 1..10: note = Severe acute respiratory syndrome coronavirus 2
FACPDGVKHV

SEQ ID NO: 10410 - protein, 16 aa, Severe acute respiratory syndrome-related coronavirus
  REGION 1..16: note = Table B: HLA-DQA1*03:02-B1*03:03L HLA-DRB1*08:77L
  source 1..16: note = Severe acute respiratory syndrome coronavirus 2
GVKHVYQLRARSVSPK

SEQ ID NO: 10411 - protein, 13 aa, Severe acute respiratory syndrome-related coronavirus
  REGION 1..13: note = Table B: HLA-DQA1*03:02-B1*03:03L HLA-DQA1*05:01-B1*03:01L HLA-DRB1*04:03L HLA-DRB1*13:02L HLA-DRB1*13:03L HLA-DRB1*01:03L HLA-DRB1*04:02L HLA-DRB1*04:05L HLA-DRB1*01:02L HLA-DRB1*08:04L HLA-DPA1*01:03-B1*03:01L HLA-DPA1*03:01-B1*04:02L
  REGION 1..13: note = CONT. FROM ABOVE: HLA-DRB1*14:01L HLA-DQA1*01:01-B1*05:01L HLA-D RB1*04:10L HLA-DRB1*12:01L HLA-DPA1*02:01-B1*13:01L HLA-DPA1*03: 01-B1*105:01L HLA-DQA1*05:05-B1*03:01L HLA-DPA1*01:02-B1*04:01L HLA-DRB1*16:01L HLA-DQA1*01:03-B1*06:01L HLA-DRB1*04:08L
  REGION 1..13: note = CONT. FROM ABOVE: HLA-DRB1*15:03L
  source 1..13: note = Severe acute respiratory syndrome coronavirus 2
VSPKLFIRQEEVQ

SEQ ID NO: 10412 - protein, 10 aa, Severe acute respiratory syndrome-related coronavirus
  REGION 1..10: note = Table B: HLA-DQA1*03:02-B1*03:03L HLA-DRB1*04:03L HLA-DRB1*04:02L HLA-DQA1*01-B1*05L HLA-DQA1*03:01-B1*03:02L HLA-DPA1*01:02-B1*04:01L HLA-DRB1*16:01L HLA-DQA1*02:01-B1*03:03L
  source 1..10: note = Severe acute respiratory syndrome coronavirus 2
LFIRQEEVQE

SEQ ID NO: 10413 - protein, 10 aa, Severe acute respiratory syndrome-related coronavirus
  REGION 1..10: note = Table B: HLA-DQA1*03:02-B1*03:03L HLA-DQA1*05:01-B1*03:01L HLA-DQA1*01:02-B1*06:02L HLA-DPA1*03:01-B1*04:02L HLA-DRB1*14:01L HLA-DRB1*14:02L HLA-DQA1*01-B1*05L HLA-DQA1*05:01-B1*02:01L HLA-DQA1*05:05-B1*03:116L
  REGION 1..10: note = CONT. FROM ABOVE: HLA-DPA1*03:01-B1*105:01L HLA-DQA1*03:01-B1*03 :02L HLA-DPA1*01:02-B1*04:01L HLA-DRB1*16:01L HLA-DQA1*01:03-B1* 06:01L HLA-DQA1*02:01-B1*03:03L HLA-DRB1*15:03L
  source 1..10: note = Severe acute respiratory syndrome coronavirus 2
FIRQEEVQEL

SEQ ID NO: 10414 - protein, 10 aa, Severe acute respiratory syndrome-related coronavirus
  REGION 1..10: note = Table B: HLA-DQA1*03:02-B1*03:03L HLA-DQA1*05:05-B1*03:19L
  source 1..10: note = Severe acute respiratory syndrome coronavirus 2
EEVQELYSPI

SEQ ID NO: 10415 - protein, 10 aa, Severe acute respiratory syndrome-related coronavirus
  REGION 1..10: note = Table B: HLA-DQA1*03:02-B1*03:03L HLA-DQA1*05:01-B1*03:01L HLA-DRB1*13:03L HLA-DQA1*01:02-B1*06:02M HLA-DRB1*01:02L HLA-DPA1*03:01-B1*04:02L HLA-DRB1*14:01L HLA-DRB1*14:02L HLA-DQA1*05:01-B1*02:01L HLA-DPA1*01:03-B1*04:01L
  REGION 1..10: note = CONT. FROM ABOVE: HLA-DRB1*12:01L HLA-DPA1*02:01-B1*13:01L HLA-D PA1*03:01-B1*105:01L HLA-DPA1*01:02-B1*04:01L HLA-DQA1*01:03-B1* 06:01L HLA-DQA1*02:01-B1*03:03L HLA-DRB1*15:03L
  source 1..10: note = Severe acute respiratory syndrome coronavirus 2
EVQELYSPIF

SEQ ID NO: 10416 - protein, 10 aa, Severe acute respiratory syndrome-related coronavirus
  REGION 1..10: note = Table B: HLA-DQA1*03:02-B1*03:03L HLA-DQA1*01-B1*05L HLA-DQA1*05:01-B1*02:01L HLA-DQA1*03:01-B1*03:02L
  source 1..10: note = Severe acute respiratory syndrome coronavirus 2
VQELYSPIFL

SEQ ID NO: 10417 - protein, 10 aa, Severe acute respiratory syndrome-related coronavirus
  REGION 1..10: note = Table B: HLA-DQA1*03:02-B1*03:03L HLA-DRB1*11:02M HLA-DQA1*05:05-B1*03:19H HLA-DQA1*05:01-B1*02:01L HLA-DQA1*03:01-B1*03:02L HLA-DPA1*01:03-B1*104:01M
  source 1..10: note = Severe acute respiratory syndrome coronavirus 2
QELYSPIFLI

SEQ ID NO: 10418 - protein, 10 aa, Severe acute respiratory syndrome-related coronavirus
  REGION 1..10: note = Table B: HLA-DQA1*03:02-B1*03:03L HLA-DQA1*01:02-B1*06:02L HLA-DQA1*05:05-B1*03:19L HLA-DPA1*02:01-B1*13:01L HLA-DPA1*03:01-B1*105:01L HLA-DRB1*15:03L
  source 1..10: note = Severe acute respiratory syndrome coronavirus 2
ELYSPIFLIV

SEQ ID NO: 10419 - protein, 10 aa, Severe acute respiratory syndrome-related coronavirus
  REGION 1..10: note = Table B: HLA-DQA1*03:02-B1*03:03L HLA-DQA1*05:05-B1*03:19L HLA-DQA1*03:01-B1*03:02L HLA-DPA1*01:03-B1*104:01L
  source 1..10: note = Severe acute respiratory syndrome coronavirus 2
IELSLIDFYL

SEQ ID NO: 10420 - protein, 11 aa, Severe acute respiratory syndrome-related coronavirus
  REGION 1..11: note = Table B: HLA-DQA1*03:02-B1*03:03L HLA-DRB1*13:03L HLA-DRB1*01:03L HLA-DRB1*04:02L HLA-DRB1*04:05L HLA-DRB4*03:01NL HLA-DQA1*01-B1*05L HLA-DQA1*05:01-B1*02:01L HLA-DRB1*04:10L HLA-DRB1*12:01L HLA-DRB1*14:54L HLA-DRB1*14:17L HLA-DRB1*16:01L
  REGION 1..11: note = CONT. FROM ABOVE: HLA-DRB1*04:08L HLA-DQA1*02:01-B1*03:03L
  source 1..11: note = Severe acute respiratory syndrome coronavirus 2
FSLELQDHNET

SEQ ID NO: 10421 - protein, 10 aa, Severe acute respiratory syndrome-related coronavirus
  REGION 1..10: note = Table B: HLA-DQA1*03:02-B1*03:03L HLA-DQA1*05:01-B1*03:01L HLA-DRB1*04:03L HLA-DRB1*13:02L HLA-DRB1*13:03L HLA-DRB1*01:03L HLA-DRB1*04:02L HLA-DRB1*04:05L HLA-DQA1*01:02-B1*06:02L HLA-DRB1*01:02L HLA-DRB4*03:01NL HLA-DPA1*01:03-B1*03:01L
  REGION 1..10: note = CONT. FROM ABOVE: HLA-DRB1*14:01L HLA-DQA1*01:01-B1*05:01L HLA-D QA1*01-B1*05L HLA-DQA1*05:05-B1*03:19L HLA-DQA1*05:01-B1*02:01L HLA-DRB1*04:10L HLA-DRB1*12:01L HLA-DPA1*03:01-B1*105:01L HLA-DQ A1*03:01-B1*03:02L HLA-DRB1*14:54L HLA-DQA1*05:05-B1*03:01L
  REGION 1..10: note = CONT. FROM ABOVE: HLA-DRB1*14:17L HLA-DPA1*01:02-B1*04:01L HLA-D RB1*16:01L HLA-DQA1*01:03-B1*06:01L HLA-DRB1*04:08L HLA-DQA1*02: 01-B1*03:03L HLA-DRB1*15:03L
  source 1..10: note = Severe acute respiratory syndrome coronavirus 2
ITTVAAFHQE

SEQ ID NO: 10422 - protein, 11 aa, Severe acute respiratory syndrome-related coronavirus
  REGION 1..11: note = Table B: HLA-DQA1*03:02-B1*03:03L HLA-DQA1*05:01-B1*03:01L HLA-DRB1*04:01L HLA-DRB1*04:04L HLA-DQA1*01:02-B1*06:02L HLA-DRB1*01:01L HLA-DRB1*03:01L HLA-DQA1*01:01-B1*05:01L HLA-DRB1*08:01L HLA-DRB1*11:01L HLA-DRB5*01:01L
  REGION 1..11: note = CONT. FROM ABOVE: HLA-DQA1*05:05-B1*03:19L HLA-DRB1*13:01L HLA-D RB4*01:01L HLA-DPA1*01:03-B1*04:01L HLA-DRB1*04:10L HLA-DRB1*09: 01L HLA-DPA1*01:03-B1*04:02L HLA-DPA1*02:01-B1*13:01L HLA-DPA1*0 1:03-B1*02:01L HLA-DPA1*01:03-B1*104:01L
  REGION 1..11: note = CONT. FROM ABOVE: HLA-DQA1*05:05-B1*03:01L HLA-DRB1*07:01L HLA-D RB1*10:01L HLA-DQA1*01:03-B1*06:01L HLA-DRB1*08:03L
  source 1..11: note = Severe acute respiratory syndrome coronavirus 2
PYVVDDPCPIH

SEQ ID NO: 10423 - protein, 10 aa, Severe acute respiratory syndrome-related coronavirus
  REGION 1..10: note = Table B: HLA-DQA1*03:02-B1*03:03L HLA-DQA1*05:01-B1*03:01L HLA-DRB1*04:03L HLA-DRB1*13:02L HLA-DRB1*13:03L HLA-DRB1*01:03L HLA-DRB1*04:05L HLA-DQA1*01:02-B1*06:02M HLA-DRB1*01:01L HLA-DRB1*08:77L HLA-DPA1*01:03-B1*03:01L
  REGION 1..10: note = CONT. FROM ABOVE: HLA-DPA1*03:01-B1*04:02L HLA-DRB1*03:01L HLA-D RB1*14:01L HLA-DRB1*11:02L HLA-DRB1*14:02L HLA-DRB1*11:01L HLA-D QA1*01-B1*05L HLA-DQA1*05:05-B1*03:19M HLA-DQA1*05:01-B1*02:01L HLA-DRB4*01:01L HLA-DPA1*01:03-B1*04:01L
  REGION 1..10: note = CONT. FROM ABOVE: HLA-DQA1*05:05-B1*03:116L HLA-DPA1*01:03-B1*04 :02L HLA-DRB1*12:01L HLA-DPA1*02:01-B1*13:01L HLA-DPA1*03:01-B1* 105:01L HLA-DQA1*03:01-B1*03:02L HLA-DPA1*01:03-B1*104:01L HLA-D PA1*01:02-B1*04:01L HLA-DRB1*10:01L HLA-DRB1*16:01L
  REGION 1..10: note = CONT. FROM ABOVE: HLA-DQA1*01:03-B1*06:01L HLA-DRB1*08:02L HLA-D QA1*02:01-B1*03:03L HLA-DRB1*15:03L
  source 1..10: note = Severe acute respiratory syndrome coronavirus 2
VVDDPCPIHF

SEQ ID NO: 10424 - protein, 18 aa, Severe acute respiratory syndrome-related coronavirus
  REGION 1..18: note = Table B: HLA-DQA1*03:02-B1*03:03L HLA-DQA1*05:05-B1*03:116L
  source 1..18: note = Severe acute respiratory syndrome coronavirus 2
YSKWYIRVGARKSAPLIE

SEQ ID NO: 10425 - protein, 10 aa, Severe acute respiratory syndrome-related coronavirus
  REGION 1..10: note = Table B: HLA-DQA1*03:02-B1*03:03L HLA-DQA1*05:05-B1*03:19L HLA-DQA1*03:01-B1*03:02L
  source 1..10: note = Severe acute respiratory syndrome coronavirus 2
VDEAGSKSPI

SEQ ID NO: 10426 - protein, 10 aa, Severe acute respiratory syndrome-related coronavirus
  REGION 1..10: note = Table B: HLA-DQA1*03:02-B1*03:03L HLA-DQA1*05:01-B1*03:01L HLA-DQA1*05:05-B1*03:19L HLA-DQA1*05:01-B1*02:01L HLA-DQA1*03:01-B1*03:02L HLA-DQA1*05:05-B1*03:01L HLA-DQA1*02:01-B1*03:03L
  source 1..10: note = Severe acute respiratory syndrome coronavirus 2
DEAGSKSPIQ

SEQ ID NO: 10427 - protein, 12 aa, Severe acute respiratory syndrome-related coronavirus
  REGION 1..12: note = Table B: HLA-DQA1*03:02-B1*03:03L HLA-DQA1*03:01-B1*03:02L
  source 1..12: note = Severe acute respiratory syndrome coronavirus 2
EAGSKSPIQYID

SEQ ID NO: 10428 - protein, 13 aa, Severe acute respiratory syndrome-related coronavirus
  REGION 1..13: note = Table B: HLA-DQA1*03:02-B1*03:03L HLA-DRB1*04:03L HLA-DRB1*04:05L HLA-DQA1*01:02-B1*06:02L HLA-DQA1*05:01-B1*02:01L HLA-DPA1*02:01-B1*13:01L HLA-DQA1*01:03-B1*06:01L
  source 1..13: note = Severe acute respiratory syndrome coronavirus 2
GSKSPIQYIDIGN

SEQ ID NO: 10429 - protein, 11 aa, Severe acute respiratory syndrome-related coronavirus
  REGION 1..11: note = Table B: HLA-DQA1*03:02-B1*03:03L HLA-DQA1*05:01-B1*03:01L HLA-DRB1*04:03L HLA-DRB1*13:03L HLA-DRB1*01:03L HLA-DRB4*03:01NL HLA-DRB1*08:77L HLA-DPA1*03:01-B1*04:02L HLA-DRB1*03:01L HLA-DRB1*14:01L HLA-DRB1*11:02L HLA-DRB4*01:01L
  REGION 1..11: note = CONT. FROM ABOVE: HLA-DPA1*01:03-B1*04:01L HLA-DQA1*05:05-B1*03: 116L HLA-DPA1*01:03-B1*04:02L HLA-DRB1*12:01L HLA-DPA1*02:01-B1* 13:01L HLA-DQA1*03:01-B1*03:02L HLA-DQA1*05:05-B1*03:01L HLA-DPA 1*01:02-B1*04:01L HLA-DRB1*10:01L HLA-DQA1*01:03-B1*06:01L
  REGION 1..11: note = CONT. FROM ABOVE: HLA-DRB1*08:02L
  source 1..11: note = Severe acute respiratory syndrome coronavirus 2
SPIQYIDIGNY

SEQ ID NO: 10430 - protein, 11 aa, Severe acute respiratory syndrome-related coronavirus
  REGION 1..11: note = Table B: HLA-DQA1*03:02-B1*03:03L HLA-DRB1*04:03L HLA-DPA1*03:01-B1*04:02L HLA-DRB1*12:01L HLA-DQA1*03:01-B1*03:02L HLA-DPA1*01:02-B1*04:01L
  source 1..11: note = Severe acute respiratory syndrome coronavirus 2
PIQYIDIGNYT

SEQ ID NO: 10431 - protein, 10 aa, Severe acute respiratory syndrome-related coronavirus
  REGION 1..10: note = Table B: HLA-DQA1*03:02-B1*03:03M HLA-DQA1*05:01-B1*03:01L HLA-DRB1*04:03L HLA-DRB1*01:03L HLA-DRB1*04:05L HLA-DQA1*01:02-B1*06:02L HLA-DRB1*01:01L HLA-DRB1*01:02L HLA-DRB1*08:77L HLA-DPA1*03:01-B1*04:02L HLA-DRB1*14:01L
  REGION 1..10: note = CONT. FROM ABOVE: HLA-DRB1*11:02L HLA-DRB1*14:02L HLA-DRB1*08:01 L HLA-DRB1*11:01L HLA-DQA1*05:05-B1*03:19M HLA-DQA1*05:01-B1*02: 01L HLA-DRB4*01:01L HLA-DPA1*01:03-B1*04:01L HLA-DQA1*05:05-B1*0 3:116L HLA-DRB1*09:01L HLA-DPA1*01:03-B1*04:02L HLA-DRB1*12:01L
  REGION 1..10: note = CONT. FROM ABOVE: HLA-DPA1*02:01-B1*13:01M HLA-DPA1*03:01-B1*105 :01L HLA-DQA1*03:01-B1*03:02L HLA-DPA1*01:03-B1*104:01M HLA-DPA1 *01:02-B1*04:01L HLA-DRB1*10:01L HLA-DRB1*16:01L HLA-DQA1*01:03- B1*06:01M HLA-DRB1*08:03L HLA-DQA1*02:01-B1*03:03L
  REGION 1..10: note = CONT. FROM ABOVE: HLA-DRB1*15:03M
  source 1..10: note = Severe acute respiratory syndrome coronavirus 2
QYIDIGNYTV

SEQ ID NO: 10432 - protein, 12 aa, Severe acute respiratory syndrome-related coronavirus
  REGION 1..12: note = Table B: HLA-DQA1*03:02-B1*03:03L HLA-DQA1*05:01-B1*03:01L HLA-DQA1*01:02-B1*06:02L HLA-DQA1*05:05-B1*03:19L HLA-DQA1*05:01-B1*02:01L HLA-DPA1*03:01-B1*105:01L HLA-DQA1*03:01-B1*03:02L HLA-DQA1*05:05-B1*03:01L
  REGION 1..12: note = CONT. FROM ABOVE: HLA-DQA1*02:01-B1*03:03L
  source 1..12: note = Severe acute respiratory syndrome coronavirus 2
IGNYTVSCLPFT

SEQ ID NO: 10433 - protein, 13 aa, Severe acute respiratory syndrome-related coronavirus
  REGION 1..13: note = Table B: HLA-DQA1*03:02-B1*03:03L HLA-DPA1*01:03-B1*03:01L HLA-DQA1*05:01-B1*02:01L HLA-DPA1*01:03-B1*04:02L HLA-DQA1*03:01-B1*03:02L HLA-DRB1*15:03L
  source 1..13: note = Severe acute respiratory syndrome coronavirus 2
GNYTVSCLPFTIN

SEQ ID NO: 10434 - protein, 11 aa, Severe acute respiratory syndrome-related coronavirus
  REGION 1..11: note = Table B: HLA-DQA1*03:02-B1*03:03L HLA-DQA1*05:01-B1*03:01L HLA-DRB1*04:03L HLA-DRB1*04:02L HLA-DQA1*01:02-B1*06:02L HLA-DQA1*03:01-B1*03:02L HLA-DRB1*14:17L HLA-DRB1*16:01L HLA-DQA1*01:03-B1*06:01L HLA-DQA1*02:01-B1*03:03L
  source 1..11: note = Severe acute respiratory syndrome coronavirus 2
LPFTINCQEPK

SEQ ID NO: 10435 - protein, 10 aa, Severe acute respiratory syndrome-related coronavirus
  REGION 1..10: note = Table B: HLA-DQA1*03:02-B1*03:03L HLA-DRB1*11:02L HLA-DQA1*05:05-B1*03:19M HLA-DQA1*03:01-B1*03:02L HLA-DPA1*01:03-B1*104:01L
  source 1..10: note = Severe acute respiratory syndrome coronavirus 2
QEPKLGSLVV

SEQ ID NO: 10436 - protein, 10 aa, Severe acute respiratory syndrome-related coronavirus
  REGION 1..10: note = Table B: HLA-DQA1*03:02-B1*03:03L HLA-DQA1*01-B1*05L HLA-DQA1*05:05-B1*03:19L HLA-DPA1*01:03-B1*104:01L HLA-DPA1*01:02-B1*04:01L
  source 1..10: note = Severe acute respiratory syndrome coronavirus 2
YEDFLEYHDV

SEQ ID NO: 10437 - protein, 10 aa, Severe acute respiratory syndrome-related coronavirus
  REGION 1..10: note = Table B: HLA-DQA1*03:02-B1*03:03L HLA-DRB1*04:03L HLA-DRB1*04:02L HLA-DPA1*03:01-B1*04:02L HLA-DQA1*01-B1*05L HLA-DQA1*05:01-B1*02:01L HLA-DPA1*03:01-B1*105:01L HLA-DQA1*03:01-B1*03:02L HLA-DPA1*01:02-B1*04:01L
  REGION 1..10: note = CONT. FROM ABOVE: HLA-DRB1*16:01L HLA-DQA1*01:03-B1*06:01L HLA-D QA1*02:01-B1*03:03L
  source 1..10: note = Severe acute respiratory syndrome coronavirus 2
EDFLEYHDVR

SEQ ID NO: 10438 - protein, 10 aa, Severe acute respiratory syndrome-related coronavirus
  REGION 1..10: note = Table B: HLA-DQA1*03:02-B1*03:03L HLA-DRB1*04:03L HLA-DQA1*01:02-B1*06:02L HLA-DRB1*01:02L HLA-DPA1*03:01-B1*04:02L HLA-DQA1*01-B1*05L HLA-DQA1*05:01-B1*02:01L HLA-DPA1*02:01-B1*13:01L
  REGION 1..10: note = CONT. FROM ABOVE: HLA-DPA1*03:01-B1*105:01L HLA-DQA1*03:01-B1*03 :02L HLA-DPA1*01:02-B1*04:01L HLA-DRB1*16:01L HLA-DQA1*01:03-B1* 06:01L HLA-DQA1*02:01-B1*03:03L HLA-DRB1*15:03L
  source 1..10: note = Severe acute respiratory syndrome coronavirus 2
FLEYHDVRVV

SEQ ID NO: 10439 - protein, 10 aa, Severe acute respiratory syndrome-related coronavirus
  REGION 1..10: note = Table B: HLA-DQA1*03:02-B1*03:03M HLA-DQA1*05:01-B1*03:01L HLA-DPA1*03:01-B1*04:02L HLA-DRB1*11:02L HLA-DQA1*05:05-B1*03:19L HLA-DQA1*05:01-B1*02:01L HLA-DQA1*05:05-B1*03:116L HLA-DRB1*09:01L
  REGION 1..10: note = CONT. FROM ABOVE: HLA-DPA1*01:03-B1*04:02L HLA-DQA1*03:01-B1*03: 02L HLA-DPA1*01:03-B1*104:01L HLA-DPA1*01:02-B1*04:01L HLA-DRB1* 16:01L HLA-DQA1*01:03-B1*06:01L HLA-DQA1*02:01-B1*03:03L HLA-DRB 1*15:03L
  source 1..10: note = Severe acute respiratory syndrome coronavirus 2
LEYHDVRVVL

SEQ ID NO: 10440 - protein, 11 aa, Severe acute respiratory syndrome-related coronavirus
  REGION 1..11: note = Table B: HLA-DQA1*03:02-B1*03:03L HLA-DRB1*04:03L HLA-DRB1*01:03L HLA-DRB1*04:05L HLA-DRB1*01:01L HLA-DRB1*01:02L HLA-DPA1*03:01-B1*04:02L HLA-DRB1*14:02L HLA-DQA1*01:01-B1*05:01L HLA-DQA1*05:05-B1*03:19L
  REGION 1..11: note = CONT. FROM ABOVE: HLA-DQA1*05:01-B1*02:01L HLA-DPA1*01:03-B1*04: 01L HLA-DPA1*01:03-B1*04:02L HLA-DRB1*12:01L HLA-DRB1*16:01L
  source 1..11: note = Severe acute respiratory syndrome coronavirus 2
EYHDVRVVLDF

SEQ ID NO: 10441 - protein, 17 aa, Severe acute respiratory syndrome-related coronavirus
  REGION 1..17: note = Table B: HLA-DQA1*03:02-B1*03:03L HLA-DQA1*05:01-B1*03:01L HLA-DRB1*04:03L HLA-DRB1*13:02L HLA-DRB1*04:05L HLA-DPA1*01:03-B1*03:01L HLA-DRB1*14:01L HLA-DRB1*11:04L HLA-DRB1*08:01L HLA-DRB1*11:01L HLA-DQA1*05:05-B1*03:19L
  REGION 1..17: note = CONT. FROM ABOVE: HLA-DRB1*12:01L HLA-DRB3*01:01L HLA-DPA1*02:01 -B1*13:01L HLA-DPA1*01:03-B1*104:01L HLA-DQA1*05:05-B1*03:01L HL A-DRB1*07:01L HLA-DRB1*16:01L HLA-DRB1*04:08L HLA-DRB1*15:03L
  source 1..17: note = Severe acute respiratory syndrome coronavirus 2
GPQNQRNAPRITFGGPS

SEQ ID NO: 10442 - protein, 12 aa, Severe acute respiratory syndrome-related coronavirus
  REGION 1..12: note = Table B: HLA-DQA1*03:02-B1*03:03L HLA-DRB1*04:02L HLA-DQA1*01-B1*05L
  source 1..12: note = Severe acute respiratory syndrome coronavirus 2
APRITFGGPSDS

SEQ ID NO: 10443 - protein, 13 aa, Severe acute respiratory syndrome-related coronavirus
  REGION 1..13: note = Table B: HLA-DQA1*03:02-B1*03:03L HLA-DQA1*05:01-B1*03:01L HLA-DQA1*01:02-B1*06:02L HLA-DQA1*05:05-B1*03:19L HLA-DQA1*03:01-B1*03:02L HLA-DQA1*05:05-B1*03:01L HLA-DQA1*01:03-B1*06:01L HLA-DQA1*02:01-B1*03:03L
  source 1..13: note = Severe acute respiratory syndrome coronavirus 2
ITFGGPSDSTGSN

SEQ ID NO: 10444 - protein, 13 aa, Severe acute respiratory syndrome-related coronavirus
  REGION 1..13: note = Table B: HLA-DQA1*03:02-B1*03:03L HLA-DQA1*03:01-B1*03:02L
  source 1..13: note = Severe acute respiratory syndrome coronavirus 2
GPSDSTGSNQNGE

SEQ ID NO: 10445 - protein, 12 aa, Severe acute respiratory syndrome-related coronavirus
  REGION 1..12: note = Table B: HLA-DQA1*03:02-B1*03:03L HLA-DQA1*05:01-B1*03:01L
  source 1..12: note = Severe acute respiratory syndrome coronavirus 2
SDSTGSNQNGER

SEQ ID NO: 10446 - protein, 12 aa, Severe acute respiratory syndrome-related coronavirus
  REGION 1..12: note = Table B: HLA-DQA1*03:02-B1*03:03L HLA-DQA1*05:01-B1*03:01L HLA-DQA1*05:05-B1*03:19L
  source 1..12: note = Severe acute respiratory syndrome coronavirus 2
DSTGSNQNGERS

SEQ ID NO: 10447 - protein, 10 aa, Severe acute respiratory syndrome-related coronavirus
  REGION 1..10: note = Table B: HLA-DQA1*03:02-B1*03:03L HLA-DQA1*05:01-B1*03:01L HLA-DRB1*13:03M HLA-DRB1*01:03L HLA-DRB1*04:02L HLA-DRB1*04:05L HLA-DRB4*03:01NL HLA-DPA1*03:01-B1*04:02L HLA-DRB1*14:01L HLA-DRB1*11:03L HLA-DRB1*08:01L HLA-DRB5*01:01L
  REGION 1..10: note = CONT. FROM ABOVE: HLA-DQA1*01-B1*05M HLA-DQA1*05:01-B1*02:01L HL A-DRB1*13:01L HLA-DRB3*01:01L HLA-DPA1*03:01-B1*105:01L HLA-DQA1 *03:01-B1*03:02L HLA-DRB1*14:17L HLA-DPA1*01:02-B1*04:01L HLA-DR B1*10:01L HLA-DRB1*16:01L
  source 1..10: note = Severe acute respiratory syndrome coronavirus 2
RPQGLPNNTA

SEQ ID NO: 10448 - protein, 13 aa, Severe acute respiratory syndrome-related coronavirus
  REGION 1..13: note = Table B: HLA-DQA1*03:02-B1*03:03L HLA-DQA1*05:01-B1*03:01L HLA-DQA1*05:05-B1*03:19L HLA-DPA1*03:01-B1*105:01L HLA-DQA1*05:05-B1*03:01L HLA-DQA1*02:01-B1*03:03L
  source 1..13: note = Severe acute respiratory syndrome coronavirus 2
LPNNTASWFTALT

SEQ ID NO: 10449 - protein, 12 aa, Severe acute respiratory syndrome-related coronavirus
  REGION 1..12: note = Table B: HLA-DQA1*03:02-B1*03:03L HLA-DRB1*04:03L HLA-DRB1*04:02L HLA-DRB1*04:05L HLA-DQA1*01:02-B1*06:02L HLA-DRB1*04:10L HLA-DPA1*03:01-B1*105:01L HLA-DQA1*03:01-B1*03:02L HLA-DRB1*14:17L
  REGION 1..12: note = CONT. FROM ABOVE: HLA-DQA1*01:03-B1*06:01L HLA-DQA1*02:01-B1*03: 03L
  source 1..12: note = Severe acute respiratory syndrome coronavirus 2
TASWFTALTQHG

SEQ ID NO: 10450 - protein, 12 aa, Severe acute respiratory syndrome-related coronavirus
  REGION 1..12: note = Table B: HLA-DQA1*03:02-B1*03:03L HLA-DRB1*13:03L HLA-DRB1*04:05L HLA-DRB1*01:02L HLA-DRB1*08:01L HLA-DQA1*05:05-B1*03:19L HLA-DRB1*04:10L HLA-DRB1*12:01L HLA-DRB1*14:54L HLA-DRB1*10:01L
  source 1..12: note = Severe acute respiratory syndrome coronavirus 2
ASWFTALTQHGK

SEQ ID NO: 10451 - protein, 10 aa, Severe acute respiratory syndrome-related coronavirus
  REGION 1..10: note = Table B: HLA-DQA1*03:02-B1*03:03L HLA-DQA1*05:01-B1*03:01L HLA-DRB1*04:03L HLA-DRB1*13:03L HLA-DRB1*01:03L HLA-DRB1*04:02L HLA-DRB1*04:05L HLA-DQA1*01:02-B1*06:02L HLA-DRB1*01:02L HLA-DRB4*03:01NL HLA-DRB1*14:01L HLA-DQA1*05:05-B1*03:19L
  REGION 1..10: note = CONT. FROM ABOVE: HLA-DQA1*05:01-B1*02:01L HLA-DRB1*12:01L HLA-D PA1*03:01-B1*105:01L HLA-DQA1*03:01-B1*03:02L HLA-DRB1*14:54L HL A-DQA1*05:05-B1*03:01L HLA-DRB1*14:17L HLA-DPA1*01:02-B1*04:01L HLA-DRB1*16:01L HLA-DQA1*01:03-B1*06:01L HLA-DRB1*04:08L
  REGION 1..10: note = CONT. FROM ABOVE: HLA-DQA1*02:01-B1*03:03L HLA-DRB1*15:03L
  source 1..10: note = Severe acute respiratory syndrome coronavirus 2
FTALTQHGKE

SEQ ID NO: 10452 - protein, 10 aa, Severe acute respiratory syndrome-related coronavirus
  REGION 1..10: note = Table B: HLA-DQA1*03:02-B1*03:03L HLA-DQA1*05:01-B1*03:01L HLA-DRB1*04:03L HLA-DRB1*13:02L HLA-DRB1*13:03L HLA-DRB1*01:03L HLA-DRB1*04:02L HLA-DRB1*04:05L HLA-DQA1*01:02-B1*06:02L HLA-DRB1*01:02L HLA-DRB4*03:01NL HLA-DRB1*14:01L
  REGION 1..10: note = CONT. FROM ABOVE: HLA-DQA1*01:01-B1*05:01L HLA-DRB1*08:01L HLA-D QA1*01-B1*05L HLA-DQA1*05:05-B1*03:19L HLA-DQA1*05:01-B1*02:01L HLA-DRB1*04:10L HLA-DRB1*12:01L HLA-DPA1*03:01-B1*105:01L HLA-DQ A1*03:01-B1*03:02L HLA-DRB1*14:54L HLA-DQA1*05:05-B1*03:01L
  REGION 1..10: note = CONT. FROM ABOVE: HLA-DRB1*14:17L HLA-DPA1*01:02-B1*04:01L HLA-D RB1*16:01L HLA-DQA1*01:03-B1*06:01L HLA-DRB1*04:08L HLA-DQA1*02: 01-B1*03:03L
  source 1..10: note = Severe acute respiratory syndrome coronavirus 2
TALTQHGKED

SEQ ID NO: 10453 - protein, 13 aa, Severe acute respiratory syndrome-related coronavirus
  REGION 1..13: note = Table B: HLA-DQA1*03:02-B1*03:03L HLA-DRB1*01:02L HLA-DQA1*05:05-B1*03:19L
  source 1..13: note = Severe acute respiratory syndrome coronavirus 2
DLKFPRGQGVPIN

SEQ ID NO: 10454 - protein, 12 aa, Severe acute respiratory syndrome-related coronavirus
  REGION 1..12: note = Table B: HLA-DQA1*03:02-B1*03:03L HLA-DRB1*04:03L HLA-DRB1*13:02L HLA-DRB1*04:02L HLA-DRB1*04:05L HLA-DQA1*01:02-B1*06:02L HLA-DRB1*01:02L HLA-DRB4*03:01NL HLA-DRB1*08:04L HLA-DPA1*01:03-B1*03:01L HLA-DRB1*14:02L
  REGION 1..12: note = CONT. FROM ABOVE: HLA-DQA1*01:01-B1*05:01L HLA-DRB1*08:01L HLA-D RB1*11:01L HLA-DQA1*05:05-B1*03:19M HLA-DQA1*05:01-B1*02:01L HLA -DQA1*05:05-B1*03:116L HLA-DPA1*01:03-B1*04:02L HLA-DRB1*12:01L HLA-DPA1*03:01-B1*105:01L HLA-DPA1*01:03-B1*104:01L
  REGION 1..12: note = CONT. FROM ABOVE: HLA-DQA1*05:05-B1*03:01M HLA-DRB1*14:17L HLA-D QA1*01:03-B1*06:01L HLA-DRB1*04:08L
  source 1..12: note = Severe acute respiratory syndrome coronavirus 2
FPRGQGVPINTN

SEQ ID NO: 10455 - protein, 14 aa, Severe acute respiratory syndrome-related coronavirus
  REGION 1..14: note = Table B: HLA-DQA1*03:02-B1*03:03L HLA-DQA1*05:05-B1*03:01L HLA-DQA1*02:01-B1*03:03L
  source 1..14: note = Severe acute respiratory syndrome coronavirus 2
GQGVPINTNSSPDD

SEQ ID NO: 10456 - protein, 12 aa, Severe acute respiratory syndrome-related coronavirus
  REGION 1..12: note = Table B: HLA-DQA1*03:02-B1*03:03L HLA-DQA1*05:01-B1*03:01L HLA-DRB1*13:02L HLA-DRB1*13:03L HLA-DRB1*01:03L HLA-DRB1*04:04L HLA-DQA1*01:02-B1*06:02L HLA-DRB1*08:77L HLA-DPA1*01:03-B1*03:01L HLA-DRB1*11:03L HLA-DRB1*11:04L
  REGION 1..12: note = CONT. FROM ABOVE: HLA-DQA1*01:01-B1*05:01L HLA-DRB5*01:01L HLA-D QA1*01-B1*05L HLA-DQA1*05:05-B1*03:19L HLA-DRB1*12:01L HLA-DRB1* 12:02L HLA-DQA1*05:05-B1*03:01L HLA-DRB1*07:01L HLA-DRB1*10:01L HLA-DRB1*16:01L HLA-DRB1*04:08L HLA-DRB1*08:03L
  REGION 1..12: note = CONT. FROM ABOVE: HLA-DQA1*02:01-B1*03:03L
  source 1..12: note = Severe acute respiratory syndrome coronavirus 2
VPINTNSSPDDQ

SEQ ID NO: 10457 - protein, 12 aa, Severe acute respiratory syndrome-related coronavirus
  REGION 1..12: note = Table B: HLA-DQA1*03:02-B1*03:03L HLA-DRB1*04:03L HLA-DRB1*04:05L HLA-DRB1*04:10L HLA-DRB1*12:01L HLA-DQA1*03:01-B1*03:02L HLA-DRB1*16:01L HLA-DQA1*01:03-B1*06:01L HLA-DQA1*02:01-B1*03:03L
  source 1..12: note = Severe acute respiratory syndrome coronavirus 2
INTNSSPDDQIG

SEQ ID NO: 10458 - protein, 14 aa, Severe acute respiratory syndrome-related coronavirus
  REGION 1..14: note = Table B: HLA-DQA1*03:02-B1*03:03L HLA-DQA1*05:01-B1*03:01L HLA-DRB1*04:03L HLA-DRB1*13:02L HLA-DRB1*13:03L HLA-DRB1*01:03L HLA-DRB1*04:02L HLA-DRB1*04:04L HLA-DRB1*04:05L HLA-DQA1*01:02-B1*06:02L HLA-DRB1*01:02L HLA-DRB1*08:04L
  REGION 1..14: note = CONT. FROM ABOVE: HLA-DPA1*01:03-B1*03:01L HLA-DPA1*03:01-B1*04: 02L HLA-DRB1*08:01L HLA-DQA1*01-B1*05L HLA-DQA1*05:01-B1*02:01L HLA-DPA1*01:03-B1*04:01L HLA-DPA1*01:03-B1*04:02L HLA-DRB1*12:01 L HLA-DPA1*02:01-B1*13:01L HLA-DPA1*03:01-B1*105:01L
  REGION 1..14: note = CONT. FROM ABOVE: HLA-DQA1*03:01-B1*03:02L HLA-DPA1*01:03-B1*02: 01L HLA-DPA1*01:03-B1*104:01L HLA-DQA1*05:05-B1*03:01L HLA-DPA1* 01:02-B1*04:01L HLA-DRB1*16:01L HLA-DQA1*01:03-B1*06:01L HLA-DRB 1*04:08L HLA-DRB1*08:03L HLA-DQA1*02:01-B1*03:03L
  REGION 1..14: note = CONT. FROM ABOVE: HLA-DRB1*15:03L
  source 1..14: note = Severe acute respiratory syndrome coronavirus 2
SPRWYFYYLGTGPE

SEQ ID NO: 10459 - protein, 11 aa, Severe acute respiratory syndrome-related coronavirus
  REGION 1..11: note = Table B: HLA-DQA1*03:02-B1*03:03L HLA-DRB1*04:03L HLA-DRB1*13:03L HLA-DRB1*04:02L HLA-DRB1*04:05L HLA-DRB4*03:01NL HLA-DQA1*01-B1*05L HLA-DQA1*05:01-B1*02:01L HLA-DRB1*04:10L HLA-DQA1*03:01-B1*03:02L HLA-DRB1*14:54L HLA-DRB1*14:17L
  REGION 1..11: note = CONT. FROM ABOVE: HLA-DRB1*16:01L HLA-DRB1*04:08L HLA-DQA1*02:01 -B1*03:03L
  source 1..11: note = Severe acute respiratory syndrome coronavirus 2
FYYLGTGPEAG

SEQ ID NO: 10460 - protein, 12 aa, Severe acute respiratory syndrome-related coronavirus
  REGION 1..12: note = Table B: HLA-DQA1*03:02-B1*03:03L HLA-DQA1*05:01-B1*03:01L HLA-DQA1*01:02-B1*06:02L HLA-DQA1*05:05-B1*03:19L HLA-DQA1*05:01-B1*02:01L HLA-DPA1*03:01-B1*105:01L HLA-DQA1*03:01-B1*03:02L HLA-DQA1*05:05-B1*03:01L
  REGION 1..12: note = CONT. FROM ABOVE: HLA-DQA1*01:03-B1*06:01L HLA-DQA1*02:01-B1*03: 03L
  source 1..12: note = Severe acute respiratory syndrome coronavirus 2
YLGTGPEAGLPY

SEQ ID NO: 10461 - protein, 12 aa, Severe acute respiratory syndrome-related coronavirus
  REGION 1..12: note = Table B: HLA-DQA1*03:02-B1*03:03L HLA-DQA1*05:01-B1*03:01L HLA-DQA1*05:05-B1*03:19L HLA-DQA1*05:05-B1*03:01L HLA-DQA1*01:03-B1*06:01L HLA-DQA1*02:01-B1*03:03L
  source 1..12: note = Severe acute respiratory syndrome coronavirus 2
LGTGPEAGLPYG

SEQ ID NO: 10462 - protein, 10 aa, Severe acute respiratory syndrome-related coronavirus
  REGION 1..10: note = Table B: HLA-DQA1*03:02-B1*03:03L HLA-DQA1*05:01-B1*03:01L HLA-DQA1*05:05-B1*03:19L HLA-DQA1*05:05-B1*03:01L HLA-DQA1*01:03-B1*06:01L HLA-DQA1*02:01-B1*03:03L
  source 1..10: note = Severe acute respiratory syndrome coronavirus 2
PEAGLPYGAN

SEQ ID NO: 10463 - protein, 11 aa, Severe acute respiratory syndrome-related coronavirus
  REGION 1..11: note = Table B: HLA-DQA1*03:02-B1*03:03L HLA-DRB1*04:02L
  source 1..11: note = Severe acute respiratory syndrome coronavirus 2
AGLPYGANKDG

SEQ ID NO: 10464 - protein, 10 aa, Severe acute respiratory syndrome-related coronavirus
  REGION 1..10: note = Table B: HLA-DQA1*03:02-B1*03:03L HLA-DQA1*05:01-B1*03:01L HLA-DRB1*13:03L HLA-DRB1*04:05L HLA-DQA1*01:02-B1*06:02L HLA-DRB1*01:01L HLA-DRB1*01:02L HLA-DPA1*03:01-B1*04:02L HLA-DRB1*14:01L HLA-DQA1*01-B1*05L HLA-DQA1*05:05-B1*03:19L
  REGION 1..10: note = CONT. FROM ABOVE: HLA-DQA1*05:05-B1*03:116L HLA-DPA1*02:01-B1*13 :01L HLA-DPA1*03:01-B1*105:01L HLA-DPA1*01:02-B1*04:01L HLA-DQA1 *01:03-B1*06:01L HLA-DRB1*08:03L HLA-DRB1*15:03L
  source 1..10: note = Severe acute respiratory syndrome coronavirus 2
LPYGANKDGI

SEQ ID NO: 10465 - protein, 13 aa, Severe acute respiratory syndrome-related coronavirus
  REGION 1..13: note = Table B: HLA-DQA1*03:02-B1*03:03L HLA-DQA1*05:01-B1*03:01L HLA-DQA1*05:05-B1*03:19L HLA-DQA1*03:01-B1*03:02L
  source 1..13: note = Severe acute respiratory syndrome coronavirus 2
GANKDGIIWVATE

SEQ ID NO: 10466 - protein, 12 aa, Severe acute respiratory syndrome-related coronavirus
  REGION 1..12: note = Table B: HLA-DQA1*03:02-B1*03:03L HLA-DQA1*05:01-B1*03:01L HLA-DQA1*01:02-B1*06:02L HLA-DQA1*05:05-B1*03:19L HLA-DPA1*03:01-B1*105:01L HLA-DQA1*03:01-B1*03:02L HLA-DQA1*05:05-B1*03:01L HLA-DQA1*02:01-B1*03:03L
  source 1..12: note = Severe acute respiratory syndrome coronavirus 2
NKDGIIWVATEG

SEQ ID NO: 10467 - protein, 13 aa, Severe acute respiratory syndrome-related coronavirus
  REGION 1..13: note = Table B: HLA-DQA1*03:02-B1*03:03L HLA-DQA1*05:01-B1*03:01L HLA-DRB1*01:03L HLA-DRB1*04:02L HLA-DRB1*04:04L HLA-DRB1*04:05L HLA-DRB1*01:02L HLA-DRB4*03:01NL HLA-DPA1*01:03-B1*03:01L HLA-DPA1*03:01-B1*04:02L HLA-DRB1*14:01L HLA-DQA1*01-B1*05L
  REGION 1..13: note = CONT. FROM ABOVE: HLA-DQA1*05:05-B1*03:19L HLA-DRB1*04:10L HLA-D RB1*12:01L HLA-DPA1*03:01-B1*105:01L HLA-DRB1*14:54L HLA-DQA1*05 :05-B1*03:01L HLA-DRB1*16:01L HLA-DQA1*01:03-B1*06:01L HLA-DRB1* 04:08L HLA-DQA1*02:01-B1*03:03L HLA-DRB1*15:03L
  source 1..13: note = Severe acute respiratory syndrome coronavirus 2
KDGIIWVATEGAL

SEQ ID NO: 10468 - protein, 12 aa, Severe acute respiratory syndrome-related coronavirus
  REGION 1..12: note = Table B: HLA-DQA1*03:02-B1*03:03L HLA-DQA1*05:01-B1*03:01L HLA-DRB1*01:03L HLA-DPA1*01:03-B1*03:01L HLA-DRB1*14:01L HLA-DQA1*01-B1*05L HLA-DRB1*12:02L HLA-DPA1*03:01-B1*105:01L HLA-DRB1*10:01L HLA-DQA1*01:03-B1*06:01L HLA-DRB1*15:03L
  source 1..12: note = Severe acute respiratory syndrome coronavirus 2
GIIWVATEGALN

SEQ ID NO: 10469 - protein, 12 aa, Severe acute respiratory syndrome-related coronavirus
  REGION 1..12: note = Table B: HLA-DQA1*03:02-B1*03:03L HLA-DQA1*05:01-B1*03:01L HLA-DRB1*04:01L HLA-DRB1*13:02L HLA-DRB1*04:04L HLA-DRB1*04:05L HLA-DQA1*01:02-B1*06:02L HLA-DRB1*01:01L HLA-DRB1*01:02L HLA-DRB1*08:77L HLA-DPA1*01:03-B1*03:01L HLA-DRB1*11:03L
  REGION 1..12: note = CONT. FROM ABOVE: HLA-DRB1*11:04L HLA-DRB1*14:02L HLA-DQA1*05:05 -B1*03:19L HLA-DQA1*05:01-B1*02:01L HLA-DRB1*04:10L HLA-DRB1*12: 02L HLA-DPA1*03:01-B1*105:01L HLA-DRB1*10:01L HLA-DRB1*04:08L HL A-DRB1*15:03L
  source 1..12: note = Severe acute respiratory syndrome coronavirus 2
WVATEGALNTPK

SEQ ID NO: 10470 - protein, 10 aa, Severe acute respiratory syndrome-related coronavirus
  REGION 1..10: note = Table B: HLA-DQA1*03:02-B1*03:03L HLA-DQA1*03:01-B1*03:02L HLA-DQA1*02:01-B1*03:03L
  source 1..10: note = Severe acute respiratory syndrome coronavirus 2
TEGALNTPKD

SEQ ID NO: 10471 - protein, 10 aa, Severe acute respiratory syndrome-related coronavirus
  REGION 1..10: note = Table B: HLA-DQA1*03:02-B1*03:03L HLA-DRB1*04:03L HLA-DRB1*04:05L HLA-DRB1*04:10L HLA-DQA1*03:01-B1*03:02L HLA-DQA1*05:05-B1*03:01L HLA-DQA1*01:03-B1*06:01L HLA-DQA1*02:01-B1*03:03L
  source 1..10: note = Severe acute respiratory syndrome coronavirus 2
EGALNTPKDH

SEQ ID NO: 10472 - protein, 14 aa, Severe acute respiratory syndrome-related coronavirus
  REGION 1..14: note = Table B: HLA-DQA1*03:02-B1*03:03L HLA-DRB1*01:03L HLA-DRB1*04:05L HLA-DRB1*01:02L HLA-DQA1*01:01-B1*05:01L HLA-DRB1*12:01L HLA-DPA1*02:01-B1*13:01L HLA-DQA1*05:05-B1*03:01L HLA-DRB1*16:01L HLA-DRB1*04:08L
  source 1..14: note = Severe acute respiratory syndrome coronavirus 2
TPKDHIGTRNPANN

SEQ ID NO: 10473 - protein, 13 aa, Severe acute respiratory syndrome-related coronavirus
  REGION 1..13: note = Table B: HLA-DQA1*03:02-B1*03:03L HLA-DQA1*01:02-B1*06:02L HLA-DQA1*01:03-B1*06:01L
  source 1..13: note = Severe acute respiratory syndrome coronavirus 2
DHIGTRNPANNAA

SEQ ID NO: 10474 - protein, 10 aa, Severe acute respiratory syndrome-related coronavirus
  REGION 1..10: note = Table B: HLA-DQA1*03:02-B1*03:03L HLA-DRB1*13:03L HLA-DQA1*05:05-B1*03:19L HLA-DQA1*03:01-B1*03:02L HLA-DRB1*16:01L HLA-DQA1*02:01-B1*03:03L
  source 1..10: note = Severe acute respiratory syndrome coronavirus 2
TRNPANNAAI

SEQ ID NO: 10475 - protein, 14 aa, Severe acute respiratory syndrome-related coronavirus
  REGION 1..14: note = Table B: HLA-DQA1*03:02-B1*03:03L HLA-DQA1*05:01-B1*03:01L HLA-DRB1*04:03L HLA-DRB1*01:03L HLA-DQA1*05:05-B1*03:19L HLA-DQA1*05:01-B1*02:01L HLA-DPA1*03:01-B1*105:01L HLA-DQA1*03:01-B1*03:02L HLA-DQA1*05:05-B1*03:01L
  REGION 1..14: note = CONT. FROM ABOVE: HLA-DRB1*04:08L HLA-DQA1*02:01-B1*03:03L
  source 1..14: note = Severe acute respiratory syndrome coronavirus 2
NPANNAAIVLQLPQ

SEQ ID NO: 10476 - protein, 12 aa, Severe acute respiratory syndrome-related coronavirus
  REGION 1..12: note = Table B: HLA-DQA1*03:02-B1*03:03L HLA-DQA1*05:01-B1*03:01L HLA-DQA1*01:02-B1*06:02L HLA-DQA1*05:05-B1*03:19L HLA-DQA1*03:01-B1*03:02L HLA-DQA1*05:05-B1*03:01L HLA-DQA1*02:01-B1*03:03L
  source 1..12: note = Severe acute respiratory syndrome coronavirus 2
NNAAIVLQLPQG

SEQ ID NO: 10477 - protein, 10 aa, Severe acute respiratory syndrome-related coronavirus
  REGION 1..10: note = Table B: HLA-DQA1*03:02-B1*03:03L HLA-DQA1*05:01-B1*03:01L HLA-DRB1*04:03L HLA-DRB1*04:02L HLA-DRB4*03:01NL HLA-DQA1*05:01-B1*02:01L HLA-DRB1*12:01L HLA-DQA1*03:01-B1*03:02L HLA-DRB1*14:17L HLA-DRB1*16:01L
  REGION 1..10: note = CONT. FROM ABOVE: HLA-DQA1*02:01-B1*03:03L
  source 1..10: note = Severe acute respiratory syndrome coronavirus 2
IVLQLPQGTT

SEQ ID NO: 10478 - protein, 10 aa, Severe acute respiratory syndrome-related coronavirus
  REGION 1..10: note = Table B: HLA-DQA1*03:02-B1*03:03L HLA-DQA1*05:01-B1*03:01L HLA-DPA1*03:01-B1*04:02L HLA-DRB1*14:02L HLA-DQA1*05:05-B1*03:116L HLA-DRB1*09:01L HLA-DQA1*03:01-B1*03:02L HLA-DQA1*02:01-B1*03:03L
  REGION 1..10: note = CONT. FROM ABOVE: HLA-DRB1*15:03L
  source 1..10: note = Severe acute respiratory syndrome coronavirus 2
VLQLPQGTTL

SEQ ID NO: 10479 - protein, 12 aa, Severe acute respiratory syndrome-related coronavirus
  REGION 1..12: note = Table B: HLA-DQA1*03:02-B1*03:03L HLA-DRB3*02:01L HLA-DRB1*03:01L HLA-DQA1*01-B1*05L HLA-DPA1*01:03-B1*04:02L HLA-DRB1*12:01L HLA-DPA1*01:03-B1*104:01L HLA-DQA1*05:05-B1*03:01L HLA-DRB1*08:02L
  source 1..12: note = Severe acute respiratory syndrome coronavirus 2
LPQGTTLPKGFY

SEQ ID NO: 10480 - protein, 14 aa, Severe acute respiratory syndrome-related coronavirus
  REGION 1..14: note = Table B: HLA-DQA1*03:02-B1*03:03L HLA-DQA1*05:05-B1*03:19L HLA-DPA1*02:01-B1*13:01L HLA-DQA1*05:05-B1*03:01L HLA-DQA1*01:03-B1*06:01L HLA-DRB1*15:03L
  source 1..14: note = Severe acute respiratory syndrome coronavirus 2
LPKGFYAEGSRGGS

SEQ ID NO: 10481 - protein, 12 aa, Severe acute respiratory syndrome-related coronavirus
  REGION 1..12: note = Table B: HLA-DQA1*03:02-B1*03:03L HLA-DRB1*13:02L HLA-DRB1*08:04L HLA-DRB1*08:77L HLA-DPA1*01:03-B1*03:01L HLA-DRB1*08:01L HLA-DPA1*03:01-B1*105:01L HLA-DRB1*08:03L
  source 1..12: note = Severe acute respiratory syndrome coronavirus 2
GFYAEGSRGGSQ

SEQ ID NO: 10482 - protein, 10 aa, Severe acute respiratory syndrome-related coronavirus
  REGION 1..10: note = Table B: HLA-DQA1*03:02-B1*03:03M HLA-DRB1*13:03L HLA-DRB1*11:01L HLA-DQA1*05:05-B1*03:19L HLA-DRB1*09:01L HLA-DPA1*01:03-B1*04:02L HLA-DQA1*03:01-B1*03:02L
  source 1..10: note = Severe acute respiratory syndrome coronavirus 2
AEGSRGGSQA

SEQ ID NO: 10483 - protein, 13 aa, Severe acute respiratory syndrome-related coronavirus
  REGION 1..13: note = Table B: HLA-DQA1*03:02-B1*03:03L HLA-DRB1*04:03L HLA-DRB1*04:02L HLA-DRB1*04:05L HLA-DRB1*11:01L HLA-DRB1*14:17L
  source 1..13: note = Severe acute respiratory syndrome coronavirus 2
EGSRGGSQASSRS

SEQ ID NO: 10484 - protein, 12 aa, Severe acute respiratory syndrome-related coronavirus
  REGION 1..12: note = Table B: HLA-DQA1*03:02-B1*03:03L HLA-DQA1*05:01-B1*03:01L HLA-DRB1*01:03L HLA-DQA1*01:02-B1*06:02L HLA-DQA1*05:05-B1*03:19L HLA-DQA1*05:05-B1*03:01L HLA-DQA1*01:03-B1*06:01L HLA-DQA1*02:01-B1*03:03L
  source 1..12: note = Severe acute respiratory syndrome coronavirus 2
SRGGSQASSRSS

SEQ ID NO: 10485 - protein, 12 aa, Severe acute respiratory syndrome-related coronavirus
  REGION 1..12: note = Table B: HLA-DQA1*03:02-B1*03:03L HLA-DQA1*05:01-B1*03:01L HLA-DQA1*05:05-B1*03:19L HLA-DQA1*05:05-B1*03:01L HLA-DQA1*02:01-B1*03:03L
  source 1..12: note = Severe acute respiratory syndrome coronavirus 2
STPGSSRGTSPA

SEQ ID NO: 10486 - protein, 15 aa, Severe acute respiratory syndrome-related coronavirus
  REGION 1..15: note = Table B: HLA-DQA1*03:02-B1*03:03L HLA-DRB1*13:02L HLA-DRB1*04:05L HLA-DRB1*01:02L HLA-DPA1*01:03-B1*03:01L HLA-DQA1*01:01-B1*05:01L HLA-DRB1*08:01L HLA-DRB1*12:01L HLA-DPA1*02:01-B1*13:01L HLA-DPA1*03:01-B1*105:01L
  REGION 1..15: note = CONT. FROM ABOVE: HLA-DPA1*01:03-B1*104:01L HLA-DRB1*07:01L HLA- DRB1*04:08L HLA-DRB1*15:03L
  source 1..15: note = Severe acute respiratory syndrome coronavirus 2
TPGSSRGTSPARMAG

SEQ ID NO: 10487 - protein, 12 aa, Severe acute respiratory syndrome-related coronavirus
  REGION 1..12: note = Table B: HLA-DQA1*03:02-B1*03:03L HLA-DQA1*05:01-B1*03:01L HLA-DRB1*13:03L HLA-DRB1*01:03L HLA-DRB1*04:02L HLA-DRB1*04:05L HLA-DQA1*01:02-B1*06:02L HLA-DRB4*03:01NL HLA-DQA1*05:05-B1*03:19L HLA-DRB1*14:54L
  REGION 1..12: note = CONT. FROM ABOVE: HLA-DQA1*05:05-B1*03:01L HLA-DRB1*14:17L HLA-D RB1*16:01L HLA-DQA1*01:03-B1*06:01L HLA-DQA1*02:01-B1*03:03L
  source 1..12: note = Severe acute respiratory syndrome coronavirus 2
TSPARMAGNGGD

SEQ ID NO: 10488 - protein, 12 aa, Severe acute respiratory syndrome-related coronavirus
  REGION 1..12: note = Table B: HLA-DQA1*03:02-B1*03:03L HLA-DQA1*05:01-B1*03:01L HLA-DRB1*13:03L HLA-DRB1*01:03L HLA-DRB1*04:02L HLA-DRB1*04:05L HLA-DRB4*03:01NL HLA-DQA1*05:05-B1*03:19L HLA-DQA1*05:05-B1*03:01L HLA-DRB1*14:17L
  REGION 1..12: note = CONT. FROM ABOVE: HLA-DQA1*02:01-B1*03:03L
  source 1..12: note = Severe acute respiratory syndrome coronavirus 2
SPARMAGNGGDA

SEQ ID NO: 10489 - protein, 11 aa, Severe acute respiratory syndrome-related coronavirus
  REGION 1..11: note = Table B: HLA-DQA1*03:02-B1*03:03L HLA-DQA1*03:01-B1*03:02L HLA-DRB1*16:01L
  source 1..11: note = Severe acute respiratory syndrome coronavirus 2
RMAGNGGDAAL

SEQ ID NO: 10490 - protein, 12 aa, Severe acute respiratory syndrome-related coronavirus
  REGION 1..12: note = Table B: HLA-DQA1*03:02-B1*03:03L HLA-DPA1*03:01-B1*105:01L
  source 1..12: note = Severe acute respiratory syndrome coronavirus 2
GDAALALLLLDR

SEQ ID NO: 10491 - protein, 14 aa, Severe acute respiratory syndrome-related coronavirus
  REGION 1..14: note = Table B: HLA-DQA1*03:02-B1*03:03L HLA-DRB1*13:02L HLA-DRB1*01:03L HLA-DRB1*04:04L HLA-DRB1*11:04L HLA-DQA1*05:05-B1*03:19L HLA-DRB1*04:10L HLA-DPA1*01:03-B1*02:01L HLA-DPA1*01:03-B1*104:01L
  source 1..14: note = Severe acute respiratory syndrome coronavirus 2
DAALALLLLDRLNQ

SEQ ID NO: 10492 - protein, 10 aa, Severe acute respiratory syndrome-related coronavirus
  REGION 1..10: note = Table B: HLA-DQA1*03:02-B1*03:03L HLA-DQA1*05:01-B1*03:01L HLA-DQA1*01:02-B1*06:02L HLA-DPA1*03:01-B1*04:02L HLA-DRB1*14:01L HLA-DRB1*14:02L HLA-DQA1*05:05-B1*03:19L HLA-DQA1*05:05-B1*03:116L HLA-DPA1*01:03-B1*04:02L
  REGION 1..10: note = CONT. FROM ABOVE: HLA-DPA1*03:01-B1*105:01L HLA-DQA1*03:01-B1*03 :02L HLA-DPA1*01:02-B1*04:01L HLA-DRB1*08:03L HLA-DQA1*02:01-B1* 03:03L HLA-DRB1*15:03L
  source 1..10: note = Severe acute respiratory syndrome coronavirus 2
LLLLDRLNQL

SEQ ID NO: 10493 - protein, 12 aa, Severe acute respiratory syndrome-related coronavirus
  REGION 1..12: note = Table B: HLA-DQA1*03:02-B1*03:03L HLA-DQA1*05:01-B1*03:01L HLA-DRB1*01:03L HLA-DRB1*04:02L HLA-DQA1*01:02-B1*06:02L HLA-DQA1*05:05-B1*03:19L HLA-DQA1*05:01-B1*02:01L HLA-DQA1*05:05-B1*03:01L HLA-DRB1*14:17L
  REGION 1..12: note = CONT. FROM ABOVE: HLA-DQA1*01:03-B1*06:01L HLA-DQA1*02:01-B1*03: 03L
  source 1..12: note = Severe acute respiratory syndrome coronavirus 2
MSGKGQQQQGQT

SEQ ID NO: 10494 - protein, 13 aa, Severe acute respiratory syndrome-related coronavirus
  REGION 1..13: note = Table B: HLA-DQA1*03:02-B1*03:03L HLA-DQA1*02:01-B1*03:03L
  source 1..13: note = Severe acute respiratory syndrome coronavirus 2
SGKGQQQQGQTVT

SEQ ID NO: 10495 - protein, 10 aa, Severe acute respiratory syndrome-related coronavirus
  REGION 1..10: note = Table B: HLA-DQA1*03:02-B1*03:03L HLA-DQA1*05:01-B1*03:01L HLA-DRB1*04:03L HLA-DRB1*13:03L HLA-DRB1*01:03L HLA-DRB1*04:02L HLA-DRB4*03:01NL HLA-DQA1*05:05-B1*03:19L HLA-DQA1*05:01-B1*02:01L HLA-DRB1*12:01L
  REGION 1..10: note = CONT. FROM ABOVE: HLA-DQA1*03:01-B1*03:02L HLA-DQA1*05:05-B1*03: 01L HLA-DRB1*14:17L HLA-DPA1*01:02-B1*04:01L HLA-DRB1*16:01L HLA -DQA1*01:03-B1*06:01L HLA-DQA1*02:01-B1*03:03L
  source 1..10: note = Severe acute respiratory syndrome coronavirus 2
TATKAYNVTQ

SEQ ID NO: 10496 - protein, 12 aa, Severe acute respiratory syndrome-related coronavirus
  REGION 1..12: note = Table B: HLA-DQA1*03:02-B1*03:03L HLA-DRB1*04:02L HLA-DQA1*01:02-B1*06:02L HLA-DQA1*01-B1*05L HLA-DQA1*05:01-B1*02:01L HLA-DQA1*01:03-B1*06:01L
  source 1..12: note = Severe acute respiratory syndrome coronavirus 2
ATKAYNVTQAFG

SEQ ID NO: 10497 - protein, 16 aa, Severe acute respiratory syndrome-related coronavirus
  REGION 1..16: note = Table B: HLA-DQA1*03:02-B1*03:03L HLA-DRB1*04:01L HLA-DRB1*04:04L HLA-DRB1*08:77L HLA-DRB3*02:01L HLA-DPA1*03:01-B1*04:02L HLA-DRB1*03:01L HLA-DRB1*11:03L HLA-DRB1*14:02L HLA-DQA1*01-B1*05L HLA-DQA1*05:05-B1*03:19L
  REGION 1..16: note = CONT. FROM ABOVE: HLA-DQA1*05:01-B1*02:01L HLA-DRB1*13:01L HLA-D RB1*09:01L HLA-DPA1*02:01-B1*13:01L HLA-DPA1*01:02-B1*04:01L HLA -DRB1*10:01L
  source 1..16: note = Severe acute respiratory syndrome coronavirus 2
TKAYNVTQAFGRRGPE

SEQ ID NO: 10498 - protein, 12 aa, Severe acute respiratory syndrome-related coronavirus
  REGION 1..12: note = Table B: HLA-DQA1*03:02-B1*03:03L HLA-DQA1*05:01-B1*02:01L HLA-DQA1*03:01-B1*03:02L
  source 1..12: note = Severe acute respiratory syndrome coronavirus 2
GPEQTQGNFGDQ

SEQ ID NO: 10499 - protein, 10 aa, Severe acute respiratory syndrome-related coronavirus
  REGION 1..10: note = Table B: HLA-DQA1*03:02-B1*03:03L HLA-DQA1*01-B1*05L HLA-DQA1*05:01-B1*02:01L HLA-DQA1*03:01-B1*03:02L HLA-DRB1*16:01L
  source 1..10: note = Severe acute respiratory syndrome coronavirus 2
TQGNFGDQEL

SEQ ID NO: 10500 - protein, 12 aa, Severe acute respiratory syndrome-related coronavirus
  REGION 1..12: note = Table B: HLA-DQA1*03:02-B1*03:03L HLA-DQA1*05:01-B1*03:01L HLA-DRB1*13:03L HLA-DRB1*01:03L HLA-DRB1*04:05L HLA-DQA1*01:02-B1*06:02L HLA-DQA1*01:01-B1*05:01L HLA-DPA1*03:01-B1*105:01L HLA-DPA1*01:02-B1*04:01L
  REGION 1..12: note = CONT. FROM ABOVE: HLA-DRB1*04:08L
  source 1..12: note = Severe acute respiratory syndrome coronavirus 2
GNFGDQELIRQG

SEQ ID NO: 10501 - protein, 11 aa, Severe acute respiratory syndrome-related coronavirus
  REGION 1..11: note = Table B: HLA-DQA1*03:02-B1*03:03L HLA-DRB1*04:03L HLA-DQA1*05:01-B1*02:01L HLA-DQA1*01:03-B1*06:01L HLA-DQA1*02:01-B1*03:03L
  source 1..11: note = Severe acute respiratory syndrome coronavirus 2
GDQELIRQGTD

SEQ ID NO: 10502 - protein, 10 aa, Severe acute respiratory syndrome-related coronavirus
  REGION 1..10: note = Table B: HLA-DQA1*03:02-B1*03:03L HLA-DQA1*05:01-B1*03:01M HLA-DRB1*13:03L HLA-DRB4*03:01NL HLA-DRB1*08:77M HLA-DPA1*01:03-B1*03:01L HLA-DPA1*03:01-B1*04:02M HLA-DRB1*03:01L HLA-DRB1*11:02L HLA-DQA1*01-B1*05L
  REGION 1..10: note = CONT. FROM ABOVE: HLA-DQA1*05:05-B1*03:19L HLA-DQA1*05:01-B1*02: 01L HLA-DRB4*01:01M HLA-DPA1*01:03-B1*04:01M HLA-DQA1*05:05-B1*0 3:116L HLA-DPA1*01:03-B1*04:02L HLA-DRB1*12:01L HLA-DQA1*03:01-B 1*03:02L HLA-DPA1*01:03-B1*104:01L HLA-DPA1*01:02-B1*04:01L
  REGION 1..10: note = CONT. FROM ABOVE: HLA-DRB1*10:01M HLA-DRB1*16:01L HLA-DRB1*15:03 M
  source 1..10: note = Severe acute respiratory syndrome coronavirus 2
QELIRQGTDY

SEQ ID NO: 10503 - protein, 12 aa, Severe acute respiratory syndrome-related coronavirus
  REGION 1..12: note = Table B: HLA-DQA1*03:02-B1*03:03L HLA-DRB1*01:03L HLA-DQA1*01:02-B1*06:02L HLA-DRB1*01:02L HLA-DRB4*03:01NL HLA-DRB1*08:04L HLA-DRB1*14:01L HLA-DRB1*08:01L HLA-DRB1*04:10L HLA-DRB1*12:01L HLA-DRB1*14:54L HLA-DQA1*02:01-B1*03:03L
  REGION 1..12: note = CONT. FROM ABOVE: HLA-DRB1*15:03L
  source 1..12: note = Severe acute respiratory syndrome coronavirus 2
GTDYKHWPQIAQ

SEQ ID NO: 10504 - protein, 14 aa, Severe acute respiratory syndrome-related coronavirus
  REGION 1..14: note = Table B: HLA-DQA1*03:02-B1*03:03L HLA-DQA1*05:01-B1*03:01L HLA-DRB1*13:02L HLA-DRB1*13:03L HLA-DRB1*04:02L HLA-DRB1*04:04L HLA-DRB1*08:04L HLA-DPA1*01:03-B1*03:01L HLA-DPA1*03:01-B1*04:02L HLA-DRB1*14:01L HLA-DRB1*11:04L
  REGION 1..14: note = CONT. FROM ABOVE: HLA-DRB1*14:02L HLA-DRB1*08:01L HLA-DRB1*11:01 L HLA-DQA1*01-B1*05L HLA-DQA1*05:05-B1*03:19L HLA-DQA1*05:01-B1* 02:01L HLA-DRB1*04:10L HLA-DPA1*01:03-B1*04:02L HLA-DRB1*12:01L HLA-DPA1*03:01-B1*105:01L HLA-DPA1*01:03-B1*104:01L
  REGION 1..14: note = CONT. FROM ABOVE: HLA-DQA1*05:05-B1*03:01L HLA-DRB1*14:17L HLA-D PA1*01:02-B1*04:01L HLA-DRB1*07:01L HLA-DRB1*10:01L HLA-DRB1*04: 08L HLA-DRB1*08:03L HLA-DRB1*15:03L
  source 1..14: note = Severe acute respiratory syndrome coronavirus 2
DYKHWPQIAQFAPS

SEQ ID NO: 10505 - protein, 12 aa, Severe acute respiratory syndrome-related coronavirus
  REGION 1..12: note = Table B: HLA-DQA1*03:02-B1*03:03L HLA-DRB1*04:03L HLA-DQA1*03:01-B1*03:02L HLA-DRB1*14:17L HLA-DQA1*02:01-B1*03:03L
  source 1..12: note = Severe acute respiratory syndrome coronavirus 2
WPQIAQFAPSAS

SEQ ID NO: 10506 - protein, 10 aa, Severe acute respiratory syndrome-related coronavirus
  REGION 1..10: note = Table B: HLA-DQA1*03:02-B1*03:03L HLA-DQA1*05:01-B1*03:01L HLA-DRB1*04:01L HLA-DRB1*04:03L HLA-DRB1*13:02L HLA-DRB1*13:03L HLA-DRB1*01:03L HLA-DRB1*04:05L HLA-DQA1*01:02-B1*06:02M HLA-DRB1*01:01L HLA-DRB4*03:01NL HLA-DRB1*08:77L
  REGION 1..10: note = CONT. FROM ABOVE: HLA-DPA1*01:03-B1*03:01L HLA-DPA1*03:01-B1*04: 02L HLA-DRB1*03:01L HLA-DRB1*14:01L HLA-DRB1*14:02M HLA-DRB1*11: 01L HLA-DQA1*01-B1*05L HLA-DQA1*05:05-B1*03:19L HLA-DQA1*05:01-B 1*02:01L HLA-DRB4*01:01L HLA-DPA1*01:03-B1*04:01L
  REGION 1..10: note = CONT. FROM ABOVE: HLA-DQA1*05:05-B1*03:116L HLA-DPA1*01:03-B1*04 :02L HLA-DRB1*12:01L HLA-DPA1*02:01-B1*13:01L HLA-DPA1*03:01-B1* 105:01L HLA-DQA1*03:01-B1*03:02L HLA-DPA1*01:02-B1*04:01L HLA-DR B1*10:01L HLA-DRB1*16:01L HLA-DQA1*01:03-B1*06:01L
  REGION 1..10: note = CONT. FROM ABOVE: HLA-DRB1*08:02L HLA-DQA1*02:01-B1*03:03M HLA-D RB1*15:03L
  source 1..10: note = Severe acute respiratory syndrome coronavirus 2
AQFAPSASAF

SEQ ID NO: 10507 - protein, 12 aa, Severe acute respiratory syndrome-related coronavirus
  REGION 1..12: note = Table B: HLA-DQA1*03:02-B1*03:03L HLA-DQA1*05:01-B1*03:01L HLA-DRB1*04:03L HLA-DRB1*01:03L HLA-DQA1*01:02-B1*06:02L HLA-DQA1*01:01-B1*05:01L HLA-DQA1*05:05-B1*03:19L HLA-DQA1*05:01-B1*02:01L HLA-DPA1*03:01-B1*105:01L
  REGION 1..12: note = CONT. FROM ABOVE: HLA-DRB1*16:01L
  source 1..12: note = Severe acute respiratory syndrome coronavirus 2
APSASAFFGMSR

SEQ ID NO: 10508 - protein, 11 aa, Severe acute respiratory syndrome-related coronavirus
  REGION 1..11: note = Table B: HLA-DQA1*03:02-B1*03:03L HLA-DRB1*13:03L HLA-DRB1*01:03L HLA-DRB1*04:02L HLA-DRB4*03:01NL HLA-DQA1*01-B1*05L HLA-DRB1*04:10L HLA-DRB1*12:01L HLA-DRB1*14:54L HLA-DRB1*16:01L HLA-DRB1*04:08L
  REGION 1..11: note = CONT. FROM ABOVE: HLA-DQA1*02:01-B1*03:03L
  source 1..11: note = Severe acute respiratory syndrome coronavirus 2
SRIGMEVTPSG

SEQ ID NO: 10509 - protein, 11 aa, Severe acute respiratory syndrome-related coronavirus
  REGION 1..11: note = Table B: HLA-DQA1*03:02-B1*03:03L HLA-DQA1*05:01-B1*03:01L HLA-DRB1*04:03L HLA-DRB1*13:03L HLA-DRB1*08:77L HLA-DPA1*01:03-B1*03:01L HLA-DPA1*03:01-B1*04:02L HLA-DRB1*14:02L HLA-DQA1*01-B1*05L HLA-DRB4*01:01L
  REGION 1..11: note = CONT. FROM ABOVE: HLA-DPA1*01:03-B1*04:01L HLA-DPA1*01:03-B1*04: 02L HLA-DRB1*12:01L HLA-DPA1*02:01-B1*13:01L HLA-DPA1*03:01-B1*1 05:01L HLA-DQA1*03:01-B1*03:02L HLA-DRB1*16:01L HLA-DQA1*01:03-B 1*06:01L HLA-DQA1*02:01-B1*03:03L HLA-DRB1*15:03L
  source 1..11: note = Severe acute respiratory syndrome coronavirus 2
IGMEVTPSGTW

SEQ ID NO: 10510 - protein, 10 aa, Severe acute respiratory syndrome-related coronavirus
  REGION 1..10: note = Table B: HLA-DQA1*03:02-B1*03:03M HLA-DQA1*05:01-B1*03:01L HLA-DRB1*13:03L HLA-DRB1*08:77L HLA-DPA1*03:01-B1*04:02L HLA-DRB1*11:02L HLA-DRB1*14:02L HLA-DQA1*05:05-B1*03:19M HLA-DQA1*05:01-B1*02:01L HLA-DRB4*01:01L
  REGION 1..10: note = CONT. FROM ABOVE: HLA-DPA1*01:03-B1*04:01L HLA-DQA1*05:05-B1*03: 116L HLA-DRB1*09:01L HLA-DPA1*01:03-B1*04:02L HLA-DQA1*03:01-B1* 03:02M HLA-DPA1*01:03-B1*104:01L HLA-DPA1*01:02-B1*04:01L HLA-DR B1*10:01L HLA-DQA1*02:01-B1*03:03L HLA-DRB1*15:03L
  source 1..10: note = Severe acute respiratory syndrome coronavirus 2
MEVTPSGTWL

SEQ ID NO: 10511 - protein, 11 aa, Severe acute respiratory syndrome-related coronavirus
  REGION 1..11: note = Table B: HLA-DQA1*03:02-B1*03:03L HLA-DQA1*05:01-B1*03:01L HLA-DRB1*04:03L HLA-DRB1*04:02L HLA-DRB1*01:02L HLA-DQA1*01-B1*05L HLA-DQA1*03:01-B1*03:02L HLA-DRB1*14:17L HLA-DRB1*16:01L HLA-DQA1*01:03-B1*06:01L
  REGION 1..11: note = CONT. FROM ABOVE: HLA-DQA1*02:01-B1*03:03L
  source 1..11: note = Severe acute respiratory syndrome coronavirus 2
GTWLTYTGAIK

SEQ ID NO: 10512 - protein, 10 aa, Severe acute respiratory syndrome-related coronavirus
  REGION 1..10: note = Table B: HLA-DQA1*03:02-B1*03:03L HLA-DRB1*08:77L HLA-DRB3*02:01L HLA-DPA1*03:01-B1*04:02L HLA-DRB1*12:01L HLA-DPA1*01:02-B1*04:01L HLA-DRB1*07:01L HLA-DRB1*16:01L HLA-DQA1*02:01-B1*03:03L HLA-DRB1*15:03L
  source 1..10: note = Severe acute respiratory syndrome coronavirus 2
WLTYTGAIKL

SEQ ID NO: 10513 - protein, 12 aa, Severe acute respiratory syndrome-related coronavirus
  REGION 1..12: note = Table B: HLA-DQA1*03:02-B1*03:03L HLA-DRB1*04:03L HLA-DRB1*13:02L HLA-DRB1*01:01L HLA-DRB4*03:01NL HLA-DRB1*08:77L HLA-DRB3*02:01L HLA-DPA1*01:03-B1*03:01L HLA-DPA1*03:01-B1*04:02L HLA-DRB1*14:01L HLA-DRB1*11:03L
  REGION 1..12: note = CONT. FROM ABOVE: HLA-DRB1*11:04L HLA-DRB1*14:02L HLA-DQA1*01:01 -B1*05:01L HLA-DRB1*11:01L HLA-DQA1*01-B1*05L HLA-DQA1*05:05-B1* 03:19L HLA-DPA1*01:03-B1*04:01L HLA-DRB1*04:10L HLA-DRB1*09:01L HLA-DPA1*01:03-B1*04:02L HLA-DRB1*12:02L HLA-DRB3*01:01L
  REGION 1..12: note = CONT. FROM ABOVE: HLA-DPA1*02:01-B1*13:01L HLA-DRB1*14:54L HLA-D PA1*01:03-B1*02:01L HLA-DQA1*05:05-B1*03:01L HLA-DRB1*14:17L HLA -DRB1*07:01L HLA-DRB1*10:01L HLA-DRB1*08:02L
  source 1..12: note = Severe acute respiratory syndrome coronavirus 2
LTYTGAIKLDDK

SEQ ID NO: 10514 - protein, 11 aa, Severe acute respiratory syndrome-related coronavirus
  REGION 1..11: note = Table B: HLA-DQA1*03:02-B1*03:03L HLA-DRB1*13:02L HLA-DRB1*01:02L HLA-DRB1*08:04L HLA-DRB1*08:77L HLA-DRB1*14:01L HLA-DRB1*11:04L HLA-DRB1*08:01L HLA-DQA1*05:01-B1*02:01L HLA-DRB1*04:10L HLA-DRB1*12:01L HLA-DRB1*12:02L
  REGION 1..11: note = CONT. FROM ABOVE: HLA-DPA1*01:02-B1*04:01L HLA-DRB1*04:08L HLA-D RB1*08:03L HLA-DRB1*15:03L
  source 1..11: note = Severe acute respiratory syndrome coronavirus 2
GAIKLDDKDPN

SEQ ID NO: 10515 - protein, 10 aa, Severe acute respiratory syndrome-related coronavirus
  REGION 1..10: note = Table B: HLA-DQA1*03:02-B1*03:03L HLA-DQA1*05:01-B1*03:01L HLA-DRB1*13:03L HLA-DQA1*01-B1*05L HLA-DQA1*05:01-B1*02:01L HLA-DQA1*03:01-B1*03:02L HLA-DPA1*01:02-B1*04:01L
  source 1..10: note = Severe acute respiratory syndrome coronavirus 2
DPNFKDQVIL

SEQ ID NO: 10516 - protein, 11 aa, Severe acute respiratory syndrome-related coronavirus
  REGION 1..11: note = Table B: HLA-DQA1*03:02-B1*03:03L HLA-DQA1*05:01-B1*03:01L HLA-DRB1*04:03L HLA-DRB1*13:03L HLA-DRB1*01:03L HLA-DRB1*04:02L HLA-DRB1*04:05L HLA-DQA1*01:02-B1*06:02L HLA-DRB1*01:02L HLA-DRB4*03:01NL HLA-DRB1*08:04L HLA-DPA1*03:01-B1*04:02L
  REGION 1..11: note = CONT. FROM ABOVE: HLA-DRB1*14:01L HLA-DRB1*11:04L HLA-DRB1*08:01 L HLA-DRB1*12:01L HLA-DPA1*03:01-B1*105:01L HLA-DRB1*14:54L HLA- DRB1*14:17L HLA-DPA1*01:02-B1*04:01L HLA-DRB1*16:01L HLA-DQA1*01 :03-B1*06:01L HLA-DRB1*04:08L HLA-DRB1*08:03L
  REGION 1..11: note = CONT. FROM ABOVE: HLA-DQA1*02:01-B1*03:03L HLA-DRB1*15:03L
  source 1..11: note = Severe acute respiratory syndrome coronavirus 2
DQVILLNKHID

SEQ ID NO: 10517 - protein, 12 aa, Severe acute respiratory syndrome-related coronavirus
  REGION 1..12: note = Table B: HLA-DQA1*03:02-B1*03:03L HLA-DQA1*01:02-B1*06:02L HLA-DQA1*05:01-B1*02:01L HLA-DPA1*03:01-B1*105:01L HLA-DRB1*16:01L HLA-DQA1*01:03-B1*06:01L HLA-DQA1*02:01-B1*03:03L HLA-DRB1*15:03L
  source 1..12: note = Severe acute respiratory syndrome coronavirus 2
IDAYKTFPPTEP

SEQ ID NO: 10518 - protein, 12 aa, Severe acute respiratory syndrome-related coronavirus
  REGION 1..12: note = Table B: HLA-DQA1*03:02-B1*03:03L HLA-DQA1*01:02-B1*06:02L HLA-DRB1*01:02L HLA-DQA1*01:01-B1*05:01L HLA-DQA1*05:01-B1*02:01L HLA-DRB1*12:02L HLA-DPA1*02:01-B1*13:01L HLA-DRB1*10:01L HLA-DRB1*08:03L
  REGION 1..12: note = CONT. FROM ABOVE: HLA-DRB1*15:03L
  source 1..12: note = Severe acute respiratory syndrome coronavirus 2
DAYKTFPPTEPK

SEQ ID NO: 10519 - protein, 10 aa, Severe acute respiratory syndrome-related coronavirus
  REGION 1..10: note = Table B: HLA-DQA1*03:02-B1*03:03L HLA-DQA1*05:01-B1*03:01L HLA-DQA1*05:01-B1*02:01L HLA-DQA1*03:01-B1*03:02L HLA-DQA1*01:03-B1*06:01L HLA-DQA1*02:01-B1*03:03L
  source 1..10: note = Severe acute respiratory syndrome coronavirus 2
DETQALPQRQ

SEQ ID NO: 10520 - protein, 10 aa, Severe acute respiratory syndrome-related coronavirus
  REGION 1..10: note = Table B: HLA-DQA1*03:02-B1*03:03L HLA-DQA1*05:01-B1*03:01L HLA-DRB1*04:01L HLA-DRB1*13:02M HLA-DRB1*13:03M HLA-DRB1*01:03L HLA-DRB1*04:02L HLA-DRB1*04:04L HLA-DQA1*01:02-B1*06:02L HLA-DRB1*01:01L HLA-DRB4*03:01NM HLA-DRB3*02:01L HLA-DRB1*14:01L
  REGION 1..10: note = CONT. FROM ABOVE: HLA-DRB1*11:04M HLA-DRB1*14:02L HLA-DRB1*08:01 M HLA-DRB1*11:01L HLA-DRB5*01:01M HLA-DPA1*01:03-B1*04:01L HLA-D PA1*01:03-B1*04:02L HLA-DRB1*12:01M HLA-DRB1*12:02L HLA-DPA1*03: 01-B1*105:01L HLA-DQA1*03:01-B1*03:02M HLA-DRB1*14:54L
  REGION 1..10: note = CONT. FROM ABOVE: HLA-DQA1*05:05-B1*03:01M HLA-DRB1*14:17L HLA-D RB1*16:01L HLA-DQA1*01:03-B1*06:01L HLA-DRB1*08:02L HLA-DRB1*08: 03L HLA-DQA1*02:01-B1*03:03L HLA-DRB1*15:01L
  source 1..10: note = Severe acute respiratory syndrome coronavirus 2
ETQALPQRQK

SEQ ID NO: 10521 - protein, 10 aa, Severe acute respiratory syndrome-related coronavirus
  REGION 1..10: note = Table B: HLA-DQA1*03:02-B1*03:03L HLA-DQA1*05:01-B1*03:01L HLA-DRB1*13:02L HLA-DRB1*13:03L HLA-DRB1*01:03L HLA-DRB1*04:02L HLA-DQA1*01:02-B1*06:02L HLA-DPA1*01:03-B1*03:01L HLA-DPA1*03:01-B1*04:02L HLA-DRB1*14:01L
  REGION 1..10: note = CONT. FROM ABOVE: HLA-DQA1*01:01-B1*05:01L HLA-DRB1*08:01M HLA-D RB1*11:01L HLA-DRB5*01:01L HLA-DQA1*01-B1*05L HLA-DQA1*05:01-B1* 02:01L HLA-DRB1*13:01L HLA-DPA1*01:03-B1*04:01L HLA-DQA1*05:05-B 1*03:116L HLA-DPA1*01:03-B1*04:02L HLA-DRB3*01:01L
  REGION 1..10: note = CONT. FROM ABOVE: HLA-DQA1*03:01-B1*03:02L HLA-DPA1*01:02-B1*04: 01L HLA-DRB1*16:01L HLA-DQA1*01:03-B1*06:01L HLA-DQA1*02:01-B1*0 3:03L
  source 1..10: note = Severe acute respiratory syndrome coronavirus 2
RQKKQQTVTL

SEQ ID NO: 10522 - protein, 12 aa, Severe acute respiratory syndrome-related coronavirus
  REGION 1..12: note = Table B: HLA-DQA1*03:02-B1*03:03L HLA-DRB1*04:03L HLA-DQA1*05:01-B1*02:01L
  source 1..12: note = Severe acute respiratory syndrome coronavirus 2
KQQTVTLLPAAD

SEQ ID NO: 10523 - protein, 13 aa, Severe acute respiratory syndrome-related coronavirus
  REGION 1..13: note = Table B: HLA-DQA1*03:02-B1*03:03L HLA-DRB1*01:02L HLA-DRB1*14:17L HLA-DRB1*16:01L HLA-DRB1*15:03L
  source 1..13: note = Severe acute respiratory syndrome coronavirus 2
QQTVTLLPAADLD

SEQ ID NO: 10524 - protein, 11 aa, Severe acute respiratory syndrome-related coronavirus
  REGION 1..11: note = Table B: HLA-DQA1*03:02-B1*03:03L HLA-DRB1*04:03L HLA-DRB1*04:02L HLA-DRB1*04:05L HLA-DRB4*03:01NL HLA-DQA1*01-B1*05L HLA-DQA1*05:01-B1*02:01L HLA-DRB1*04:10L HLA-DRB1*12:01L HLA-DRB1*14:54L HLA-DRB1*14:17L HLA-DRB1*16:01L
  REGION 1..11: note = CONT. FROM ABOVE: HLA-DQA1*01:03-B1*06:01L HLA-DQA1*02:01-B1*03: 03L HLA-DRB1*15:03L
  source 1..11: note = Severe acute respiratory syndrome coronavirus 2
VTLLPAADLDD

SEQ ID NO: 10525 - protein, 12 aa, Severe acute respiratory syndrome-related coronavirus
  REGION 1..12: note = Table B: HLA-DQA1*03:02-B1*03:03L HLA-DRB1*04:02L HLA-DRB1*04:05L HLA-DRB1*04:10L HLA-DRB1*12:01L HLA-DPA1*03:01-B1*105:01L HLA-DRB1*14:17L HLA-DRB1*16:01L
  source 1..12: note = Severe acute respiratory syndrome coronavirus 2
TLLPAADLDDFS

SEQ ID NO: 10526 - protein, 12 aa, Severe acute respiratory syndrome-related coronavirus
  REGION 1..12: note = Table B: HLA-DQA1*03:02-B1*03:03L HLA-DRB1*04:02L HLA-DRB1*04:05L HLA-DRB1*04:10L HLA-DRB1*14:17L HLA-DRB1*16:01L HLA-DRB1*04:08L
  source 1..12: note = Severe acute respiratory syndrome coronavirus 2
LLPAADLDDFSK

SEQ ID NO: 10527 - protein, 12 aa, Severe acute respiratory syndrome-related coronavirus
  REGION 1..12: note = Table B: HLA-DQA1*03:02-B1*03:03L HLA-DRB1*01:03L HLA-DRB1*04:02L HLA-DRB1*04:05L HLA-DQA1*01:01-B1*05:01L HLA-DRB1*12:01L HLA-DPA1*03:01-B1*105:01L HLA-DRB1*14:17L HLA-DRB1*16:01L HLA-DQA1*01:03-B1*06:01L
  source 1..12: note = Severe acute respiratory syndrome coronavirus 2
LPAADLDDFSKQ

SEQ ID NO: 10528 - protein, 10 aa, Severe acute respiratory syndrome-related coronavirus
  REGION 1..10: note = Table B: HLA-DQA1*03:02-B1*03:03M HLA-DQA1*01-B1*05L HLA-DQA1*05:05-B1*03:19L HLA-DQA1*05:01-B1*02:01L HLA-DRB1*09:01L HLA-DQA1*03:01-B1*03:02L HLA-DPA1*01:03-B1*104:01L
  source 1..10: note = Severe acute respiratory syndrome coronavirus 2
ADLDDFSKQL

SEQ ID NO: 10529 - protein, 10 aa, Severe acute respiratory syndrome-related coronavirus
  REGION 1..10: note = Table B: HLA-DQA1*03:02-B1*03:03L HLA-DQA1*01-B1*05L HLA-DQA1*03:01-B1*03:02L
  source 1..10: note = Severe acute respiratory syndrome coronavirus 2
DDFSKQLQQS

SEQ ID NO: 10530 - protein, 10 aa, Severe acute respiratory syndrome-related coronavirus
  REGION 1..10: note = Table B: HLA-DQA1*03:02-B1*03:03L HLA-DQA1*03:01-B1*03:02L
  source 1..10: note = Severe acute respiratory syndrome coronavirus 2
DFSKQLQQSM

SEQ ID NO: 10531 - protein, 14 aa, Severe acute respiratory syndrome-related coronavirus
  REGION 1..14: note = Table B: HLA-DQA1*03:02-B1*03:03L HLA-DQA1*05:01-B1*03:01L HLA-DRB1*04:01L HLA-DRB1*13:02L HLA-DRB1*13:03L HLA-DRB1*01:03L HLA-DQA1*01:02-B1*06:02L HLA-DRB1*01:02L HLA-DRB1*08:04L HLA-DPA1*01:03-B1*03:01L HLA-DRB1*14:01L HLA-DRB1*11:04L
  REGION 1..14: note = CONT. FROM ABOVE: HLA-DQA1*01:01-B1*05:01L HLA-DQA1*05:05-B1*03: 19L HLA-DQA1*05:01-B1*02:01L HLA-DRB1*12:01L HLA-DPA1*02:01-B1*1 3:01L HLA-DPA1*03:01-B1*105:01L HLA-DQA1*05:05-B1*03:01L HLA-DRB 1*10:01L HLA-DQA1*01:03-B1*06:01L HLA-DRB1*08:03L
  REGION 1..14: note = CONT. FROM ABOVE: HLA-DRB1*15:03L
  source 1..14: note = Severe acute respiratory syndrome coronavirus 2
SKQLQQSMSSADST

SEQ ID NO: 10532 - protein, 14 aa, Severe acute respiratory syndrome-related coronavirus
  REGION 1..14: note = Table B: HLA-DQA1*03:02-B1*03:03L HLA-DQA1*01:02-B1*06:02L HLA-DQA1*01-B1*05L HLA-DQA1*05:01-B1*02:01L HLA-DQA1*02:01-B1*03:03L
  source 1..14: note = Severe acute respiratory syndrome coronavirus 2
KQLQQSMSSADSTQ

SEQ ID NO: 10533 - protein, 13 aa, Severe acute respiratory syndrome-related coronavirus
  REGION 1..13: note = Table B: HLA-DQA1*03:02-B1*03:03L HLA-DRB1*04:03L HLA-DQA1*01-B1*05L HLA-DQA1*05:01-B1*02:01L HLA-DRB1*14:17L HLA-DQA1*02:01-B1*03:03L
  source 1..13: note = Severe acute respiratory syndrome coronavirus 2
LQQSMSSADSTQA

SEQ ID NO: 10534 - protein, 10 aa, Severe acute respiratory syndrome-related coronavirus
  REGION 1..10: note = Table B: HLA-DQA1*03:02-B1*03:03L HLA-DRB1*04:03L HLA-DRB1*01:03L HLA-DRB1*04:05L HLA-DQA1*01:02-B1*06:02L HLA-DRB1*01:01L HLA-DRB1*01:02L HLA-DPA1*03:01-B1*04:02L HLA-DQA1*05:05-B1*03:19L HLA-DQA1*05:01-B1*02:01L
  REGION 1..10: note = CONT. FROM ABOVE: HLA-DPA1*01:03-B1*04:01L HLA-DRB1*12:01L HLA-D PA1*02:01-B1*13:01M HLA-DPA1*03:01-B1*105:01L HLA-DRB1*16:01L HL A-DQA1*01:03-B1*06:01M HLA-DQA1*02:01-B1*03:03L HLA-DRB1*15:03L
  source 1..10: note = Severe acute respiratory syndrome coronavirus 2
GYINVFAFPF

SEQ ID NO: 10535 - protein, 10 aa, Severe acute respiratory syndrome-related coronavirus
  REGION 1..10: note = Table B: HLA-DQA1*03:02-B1*03:03L HLA-DQA1*05:01-B1*03:01L HLA-DRB1*13:02L HLA-DRB1*13:03L HLA-DRB1*01:03L HLA-DRB1*04:05L HLA-DQA1*01:02-B1*06:02M HLA-DRB1*01:01L HLA-DRB4*03:01NL HLA-DRB1*08:77L HLA-DPA1*01:03-B1*03:01L
  REGION 1..10: note = CONT. FROM ABOVE: HLA-DPA1*03:01-B1*04:02L HLA-DRB1*03:01L HLA-D RB1*14:01L HLA-DRB1*11:02L HLA-DRB1*14:02L HLA-DQA1*01-B1*05L HL A-DQA1*05:05-B1*03:19L HLA-DQA1*05:01-B1*02:01L HLA-DRB4*01:01L HLA-DPA1*01:03-B1*04:01M HLA-DQA1*05:05-B1*03:116L
  REGION 1..10: note = CONT. FROM ABOVE: HLA-DRB1*09:01L HLA-DPA1*01:03-B1*04:02L HLA-D RB1*12:01L HLA-DPA1*02:01-B1*13:01L HLA-DPA1*03:01-B1*105:01M HL A-DPA1*01:03-B1*104:01L HLA-DQA1*05:05-B1*03:01L HLA-DPA1*01:02- B1*04:01L HLA-DRB1*10:01L HLA-DRB1*16:01L
  REGION 1..10: note = CONT. FROM ABOVE: HLA-DQA1*01:03-B1*06:01L HLA-DRB1*08:02L HLA-D QA1*02:01-B1*03:03L HLA-DRB1*15:03L
  source 1..10: note = Severe acute respiratory syndrome coronavirus 2
NVFAFPFTIY

SEQ ID NO: 10536 - protein, 10 aa, Severe acute respiratory syndrome-related coronavirus
  REGION 1..10: note = Table B: HLA-DQA1*03:02-B1*03:03M HLA-DQA1*05:01-B1*03:01L HLA-DRB1*01:03L HLA-DRB1*04:05L HLA-DQA1*01:02-B1*06:02L HLA-DRB1*01:02L HLA-DPA1*03:01-B1*04:02L HLA-DRB1*14:01L HLA-DRB1*11:02L HLA-DRB1*14:02L HLA-DRB1*08:01L
  REGION 1..10: note = CONT. FROM ABOVE: HLA-DQA1*05:05-B1*03:19L HLA-DQA1*05:01-B1*02: 01L HLA-DRB4*01:01L HLA-DPA1*01:03-B1*04:01L HLA-DQA1*05:05-B1*0 3:116L HLA-DRB1*09:01L HLA-DPA1*01:03-B1*04:02L HLA-DPA1*02:01-B 1*13:01L HLA-DPA1*03:01-B1*105:01L HLA-DQA1*03:01-B1*03:02L
  REGION 1..10: note = CONT. FROM ABOVE: HLA-DPA1*01:03-B1*104:01L HLA-DPA1*01:02-B1*04 :01L HLA-DRB1*10:01L HLA-DRB1*16:01L HLA-DQA1*01:03-B1*06:01L HL A-DRB1*08:03L HLA-DQA1*02:01-B1*03:03L HLA-DRB1*15:03M
  source 1..10: note = Severe acute respiratory syndrome coronavirus 2
FAFPFTIYSL

SEQ ID NO: 10537 - protein, 10 aa, Severe acute respiratory syndrome-related coronavirus
  REGION 1..10: note = Table B: HLA-DQA1*03:02-B1*03:03L HLA-DQA1*05:01-B1*03:01L HLA-DRB1*04:03L HLA-DRB1*04:05L HLA-DQA1*01:02-B1*06:02L HLA-DQA1*01-B1*05L HLA-DQA1*05:01-B1*02:01L HLA-DQA1*03:01-B1*03:02L HLA-DQA1*01:03-B1*06:01L
  REGION 1..10: note = CONT. FROM ABOVE: HLA-DQA1*02:01-B1*03:03L
  source 1..10: note = Severe acute respiratory syndrome coronavirus 2
NYIAQVDVVN

SEQ ID NO: 10538 - protein, 10 aa, Severe acute respiratory syndrome-related coronavirus
  REGION 1..10: note = Table B: HLA-DQA1*03:02-B1*03:03L HLA-DQA1*05:01-B1*03:01L HLA-DRB1*04:03L HLA-DRB1*13:03L HLA-DRB1*01:03L HLA-DRB1*04:05L HLA-DQA1*01:02-B1*06:02M HLA-DRB1*01:01L HLA-DRB1*01:02L HLA-DRB4*03:01NL HLA-DRB1*08:77L HLA-DPA1*01:03-B1*03:01L
  REGION 1..10: note = CONT. FROM ABOVE: HLA-DPA1*03:01-B1*04:02L HLA-DRB1*03:01L HLA-D RB1*14:01L HLA-DRB1*11:03L HLA-DRB1*14:02L HLA-DQA1*01:01-B1*05: 01L HLA-DRB1*11:01L HLA-DQA1*01-B1*05L HLA-DQA1*05:05-B1*03:19L HLA-DQA1*05:01-B1*02:01L HLA-DRB4*01:01L
  REGION 1..10: note = CONT. FROM ABOVE: HLA-DPA1*01:03-B1*04:01L HLA-DQA1*05:05-B1*03: 116L HLA-DRB1*09:01L HLA-DPA1*01:03-B1*04:02L HLA-DRB1*12:01L HL A-DPA1*02:01-B1*13:01M HLA-DPA1*03:01-B1*105:01L HLA-DQA1*03:01- B1*03:02L HLA-DQA1*05:05-B1*03:01L HLA-DPA1*01:02-B1*04:01L
  REGION 1..10: note = CONT. FROM ABOVE: HLA-DRB1*10:01L HLA-DRB1*16:01L HLA-DQA1*01:03 -B1*06:01M HLA-DRB1*08:03L HLA-DQA1*02:01-B1*03:03L HLA-DRB1*15: 03L
  source 1..10: note = Severe acute respiratory syndrome coronavirus 2
YIAQVDVVNF

SEQ ID NO: 10539 - protein, 10 aa, Severe acute respiratory syndrome-related coronavirus
  REGION 1..10: note = Table B: HLA-DQA1*03:02-B1*03:03L HLA-DQA1*05:01-B1*03:01L HLA-DRB1*04:03L HLA-DRB1*13:02L HLA-DRB1*13:03L HLA-DRB1*04:02L HLA-DRB1*04:05L HLA-DQA1*01:02-B1*06:02L HLA-DRB1*01:02L HLA-DRB4*03:01NL HLA-DRB3*02:01L HLA-DPA1*01:03-B1*03:01L
  REGION 1..10: note = CONT. FROM ABOVE: HLA-DPA1*03:01-B1*04:02L HLA-DRB1*14:01L HLA-D QA1*01-B1*05L HLA-DQA1*05:05-B1*03:19L HLA-DQA1*05:01-B1*02:01L HLA-DRB1*04:10L HLA-DRB1*12:01L HLA-DRB1*12:02L HLA-DPA1*03:01-B 1*105:01L HLA-DQA1*03:01-B1*03:02L HLA-DRB1*14:54L
  REGION 1..10: note = CONT. FROM ABOVE: HLA-DQA1*05:05-B1*03:01L HLA-DRB1*14:17L HLA-D PA1*01:02-B1*04:01L HLA-DRB1*16:01L HLA-DQA1*01:03-B1*06:01L HLA -DQA1*02:01-B1*03:03L HLA-DRB1*15:03L
  source 1..10: note = Severe acute respiratory syndrome coronavirus 2
IAQVDVVNFN

SEQ ID NO: 10540 - protein, 10 aa, Severe acute respiratory syndrome-related coronavirus
  REGION 1..10: note = Table B: HLA-DQA1*03:02-B1*03:03M HLA-DQA1*05:01-B1*03:01L HLA-DRB1*13:03L HLA-DRB1*01:03L HLA-DQA1*01:02-B1*06:02L HLA-DRB1*01:02L HLA-DPA1*03:01-B1*04:02L HLA-DRB1*14:01L HLA-DRB1*11:02L HLA-DRB1*14:02L HLA-DRB1*08:01L
  REGION 1..10: note = CONT. FROM ABOVE: HLA-DQA1*05:05-B1*03:19M HLA-DQA1*05:01-B1*02: 01L HLA-DRB4*01:01L HLA-DPA1*01:03-B1*04:01L HLA-DQA1*05:05-B1*0 3:116M HLA-DRB1*09:01L HLA-DPA1*01:03-B1*04:02L HLA-DPA1*02:01-B 1*13:01L HLA-DPA1*03:01-B1*105:01L HLA-DQA1*03:01-B1*03:02M
  REGION 1..10: note = CONT. FROM ABOVE: HLA-DPA1*01:03-B1*104:01L HLA-DPA1*01:02-B1*04 :01L HLA-DRB1*10:01L HLA-DRB1*16:01L HLA-DQA1*01:03-B1*06:01L HL A-DRB1*08:03L HLA-DQA1*02:01-B1*03:03M HLA-DRB1*15:03M
  source 1..10: note = Severe acute respiratory syndrome coronavirus 2
AQVDVVNFNL

SEQ ID NO: 10541 - protein, 14 aa, Severe acute respiratory syndrome-related coronavirus
  REGION 1..14: note = Table B: HLA-DQA1*05:01-B1*03:01L HLA-DRB1*04:05L HLA-DPA1*01:03-B1*03:01L HLA-DQA1*05:01-B1*02:01L HLA-DPA1*02:01-B1*13:01L HLA-DPA1*03:01-B1*105:01L HLA-DQA1*05:05-B1*03:01L
  source 1..14: note = Severe acute respiratory syndrome coronavirus 2
NEKTHVQLSLPVLQ

SEQ ID NO: 10542 - protein, 15 aa, Severe acute respiratory syndrome-related coronavirus
  REGION 1..15: note = Table B: HLA-DQA1*05:01-B1*03:01L HLA-DPA1*02:01-B1*13:01L
  source 1..15: note = Severe acute respiratory syndrome coronavirus 2
THVQLSLPVLQVRDV

SEQ ID NO: 10543 - protein, 10 aa, Severe acute respiratory syndrome-related coronavirus
  REGION 1..10: note = Table B: HLA-DQA1*05:01-B1*03:01L HLA-DRB1*13:02L HLA-DRB1*13:03L HLA-DRB1*01:03L HLA-DQA1*01:02-B1*06:02M HLA-DPA1*01:03-B1*03:01L HLA-DRB1*03:01L HLA-DRB1*14:01L HLA-DRB1*14:02L HLA-DRB1*11:01L HLA-DQA1*05:01-B1*02:01L
  REGION 1..10: note = CONT. FROM ABOVE: HLA-DPA1*01:03-B1*04:01L HLA-DPA1*01:03-B1*04: 02L HLA-DPA1*02:01-B1*13:01L HLA-DPA1*03:01-B1*105:01L HLA-DQA1* 01:03-B1*06:01L HLA-DRB1*08:02L HLA-DQA1*02:01-B1*03:03M HLA-DRB 1*15:03L
  source 1..10: note = Severe acute respiratory syndrome coronavirus 2
QVRDVLVRGF

SEQ ID NO: 10544 - protein, 11 aa, Severe acute respiratory syndrome-related coronavirus
  REGION 1..11: note = Table B: HLA-DQA1*05:01-B1*03:01L HLA-DRB1*13:02L HLA-DRB1*13:03L HLA-DRB1*01:03L HLA-DRB4*03:01NL HLA-DRB1*14:01L HLA-DQA1*05:01-B1*02:01L HLA-DRB1*12:01L HLA-DRB1*14:54L HLA-DRB1*16:01L
  source 1..11: note = Severe acute respiratory syndrome coronavirus 2
LVEVEKGVLPQ

SEQ ID NO: 10545 - protein, 10 aa, Severe acute respiratory syndrome-related coronavirus
  REGION 1..10: note = Table B: HLA-DQA1*05:01-B1*03:01L HLA-DRB1*13:03L HLA-DQA1*01:02-B1*06:02M HLA-DPA1*03:01-B1*04:02L HLA-DRB1*14:01L HLA-DQA1*05:05-B1*03:116L HLA-DPA1*02:01-B1*13:01L HLA-DPA1*03:01-B1*105:01M
  REGION 1..10: note = CONT. FROM ABOVE: HLA-DPA1*01:02-B1*04:01L HLA-DQA1*01:03-B1*06: 01L HLA-DQA1*02:01-B1*03:03L HLA-DRB1*15:03L
  source 1..10: note = Severe acute respiratory syndrome coronavirus 2
LPQLEQPYVF

SEQ ID NO: 10546 - protein, 13 aa, Severe acute respiratory syndrome-related coronavirus
  REGION 1..13: note = Table B: HLA-DQA1*05:01-B1*03:01L HLA-DRB1*13:03L HLA-DRB1*04:02L HLA-DRB1*04:04L HLA-DRB1*14:01L HLA-DRB1*11:04L HLA-DRB1*11:01L HLA-DRB3*01:01L HLA-DRB1*14:17L
  source 1..13: note = Severe acute respiratory syndrome coronavirus 2
VFIKRSDARTAPH

SEQ ID NO: 10547 - protein, 12 aa, Severe acute respiratory syndrome-related coronavirus
  REGION 1..12: note = Table B: HLA-DQA1*05:01-B1*03:01L HLA-DRB1*04:05L HLA-DQA1*01:02-B1*06:02L HLA-DRB1*01:02L HLA-DRB1*08:01L HLA-DRB1*12:01L HLA-DQA1*01:03-B1*06:01L HLA-DRB1*04:08L
  source 1..12: note = Severe acute respiratory syndrome coronavirus 2
IKRSDARTAPHG

SEQ ID NO: 10548 - protein, 10 aa, Severe acute respiratory syndrome-related coronavirus
  REGION 1..10: note = Table B: HLA-DQA1*05:01-B1*03:01L HLA-DRB1*01:03L HLA-DRB1*08:01L HLA-DQA1*03:01-B1*03:02L HLA-DRB1*16:01L HLA-DQA1*02:01-B1*03:03L
  source 1..10: note = Severe acute respiratory syndrome coronavirus 2
ARTAPHGHVM

SEQ ID NO: 10549 - protein, 10 aa, Severe acute respiratory syndrome-related coronavirus
  REGION 1..10: note = Table B: HLA-DQA1*05:01-B1*03:01M HLA-DRB1*13:03L HLA-DRB1*04:02L HLA-DRB1*04:05L HLA-DQA1*01:02-B1*06:02L HLA-DPA1*01:03-B1*03:01L HLA-DPA1*03:01-B1*04:02L HLA-DRB1*14:01L HLA-DRB1*08:01L HLA-DRB5*01:01L
  REGION 1..10: note = CONT. FROM ABOVE: HLA-DQA1*01-B1*05L HLA-DQA1*05:01-B1*02:01L HL A-DRB1*13:01L HLA-DPA1*01:03-B1*04:01L HLA-DRB3*01:01L HLA-DPA1* 03:01-B1*105:01L HLA-DQA1*03:01-B1*03:02L HLA-DPA1*01:02-B1*04:0 1L HLA-DRB1*10:01L HLA-DRB1*16:01L HLA-DRB1*15:01L
  source 1..10: note = Severe acute respiratory syndrome coronavirus 2
APHGHVMVEL

SEQ ID NO: 10550 - protein, 10 aa, Severe acute respiratory syndrome-related coronavirus
  REGION 1..10: note = Table B: HLA-DQA1*05:01-B1*03:01L HLA-DRB1*13:03M HLA-DRB1*01:03L HLA-DQA1*01:02-B1*06:02M HLA-DRB4*03:01NL HLA-DRB1*08:77L HLA-DPA1*01:03-B1*03:01L HLA-DPA1*03:01-B1*04:02L HLA-DRB1*03:01L HLA-DRB1*14:01L
  REGION 1..10: note = CONT. FROM ABOVE: HLA-DRB1*11:02L HLA-DRB1*14:02L HLA-DQA1*01-B1 *05L HLA-DQA1*05:05-B1*03:19M HLA-DQA1*05:01-B1*02:01M HLA-DRB4* 01:01L HLA-DPA1*01:03-B1*04:01L HLA-DQA1*05:05-B1*03:116L HLA-DP A1*01:03-B1*04:02L HLA-DRB1*12:01L HLA-DPA1*02:01-B1*13:01L
  REGION 1..10: note = CONT. FROM ABOVE: HLA-DPA1*03:01-B1*105:01L HLA-DPA1*01:03-B1*10 4:01L HLA-DRB1*10:01L HLA-DRB1*16:01L HLA-DRB1*08:02L HLA-DQA1*0 2:01-B1*03:03L HLA-DRB1*15:03L
  source 1..10: note = Severe acute respiratory syndrome coronavirus 2
LVAELEGIQY

SEQ ID NO: 10551 - protein, 12 aa, Severe acute respiratory syndrome-related coronavirus
  REGION 1..12: note = Table B: HLA-DQA1*05:01-B1*03:01L HLA-DRB1*04:03L HLA-DRB1*01:02L HLA-DPA1*03:01-B1*04:02L HLA-DRB1*14:01L HLA-DQA1*05:01-B1*02:01L HLA-DPA1*03:01-B1*105:01L HLA-DRB1*14:54L HLA-DRB1*14:17L HLA-DPA1*01:02-B1*04:01L
  REGION 1..12: note = CONT. FROM ABOVE: HLA-DRB1*16:01L HLA-DQA1*02:01-B1*03:03L HLA-D RB1*15:03L
  source 1..12: note = Severe acute respiratory syndrome coronavirus 2
VAELEGIQYGRS

SEQ ID NO: 10552 - protein, 14 aa, Severe acute respiratory syndrome-related coronavirus
  REGION 1..14: note = Table B: HLA-DQA1*05:01-B1*03:01L HLA-DRB1*04:05L HLA-DRB1*01:02L HLA-DRB1*12:01L HLA-DPA1*02:01-B1*13:01L
  source 1..14: note = Severe acute respiratory syndrome coronavirus 2
YGRSGETLGVLVPH

SEQ ID NO: 10553 - protein, 10 aa, Severe acute respiratory syndrome-related coronavirus
  REGION 1..10: note = Table B: HLA-DQA1*05:01-B1*03:01L HLA-DRB1*13:03L HLA-DRB1*04:05L HLA-DQA1*01-B1*05L HLA-DQA1*03:01-B1*03:02L HLA-DRB1*16:01L
  source 1..10: note = Severe acute respiratory syndrome coronavirus 2
VPHVGEIPVA

SEQ ID NO: 10554 - protein, 10 aa, Severe acute respiratory syndrome-related coronavirus
  REGION 1..10: note = Table B: HLA-DQA1*05:01-B1*03:01L
  source 1..10: note = Severe acute respiratory syndrome coronavirus 2
IPVAYRKVLL

SEQ ID NO: 10555 - protein, 12 aa, Severe acute respiratory syndrome-related coronavirus
  REGION 1..12: note = Table B: HLA-DQA1*05:01-B1*03:01L HLA-DQA1*03:01-B1*03:02L
  source 1..12: note = Severe acute respiratory syndrome coronavirus 2
NGNKGAGGHSYG

SEQ ID NO: 10556 - protein, 13 aa, Severe acute respiratory syndrome-related coronavirus
  REGION 1..13: note = Table B: HLA-DQA1*05:01-B1*03:01L HLA-DQA1*03:01-B1*03:02L HLA-DQA1*05:05-B1*03:01L HLA-DQA1*01:03-B1*06:01L
  source 1..13: note = Severe acute respiratory syndrome coronavirus 2
GNKGAGGHSYGAD

SEQ ID NO: 10557 - protein, 11 aa, Severe acute respiratory syndrome-related coronavirus
  REGION 1..11: note = Table B: HLA-DQA1*05:01-B1*03:01L HLA-DQA1*01:03-B1*06:01L HLA-DQA1*02:01-B1*03:03L
  source 1..11: note = Severe acute respiratory syndrome coronavirus 2
AGGHSYGADLK

SEQ ID NO: 10558 - protein, 13 aa, Severe acute respiratory syndrome-related coronavirus
  REGION 1..13: note = Table B: HLA-DQA1*05:01-B1*03:01L HLA-DRB1*13:03L HLA-DRB1*01:03L HLA-DQA1*01:02-B1*06:02L HLA-DRB1*01:02L HLA-DPA1*01:03-B1*03:01L HLA-DRB1*08:01L HLA-DRB1*04:10L HLA-DRB1*12:01L HLA-DPA1*02:01-B1*13:01L
  REGION 1..13: note = CONT. FROM ABOVE: HLA-DPA1*03:01-B1*105:01L HLA-DQA1*05:05-B1*03 :01L HLA-DRB1*04:08L HLA-DRB1*15:03L
  source 1..13: note = Severe acute respiratory syndrome coronavirus 2
YGADLKSFDLGDE

SEQ ID NO: 10559 - protein, 12 aa, Severe acute respiratory syndrome-related coronavirus
  REGION 1..12: note = Table B: HLA-DQA1*05:01-B1*03:01L HLA-DPA1*01:03-B1*04:01L HLA-DPA1*01:03-B1*04:02L HLA-DRB1*12:01L HLA-DPA1*02:01-B1*13:01L HLA-DQA1*05:05-B1*03:01L HLA-DPA1*01:02-B1*04:01L HLA-DRB1*16:01L HLA-DRB1*04:08L
  REGION 1..12: note = CONT. FROM ABOVE: HLA-DRB1*15:03L
  source 1..12: note = Severe acute respiratory syndrome coronavirus 2
DELGTDPYEDFQ

SEQ ID NO: 10560 - protein, 10 aa, Severe acute respiratory syndrome-related coronavirus
  REGION 1..10: note = Table B: HLA-DQA1*05:01-B1*03:01L HLA-DRB1*13:03L HLA-DQA1*01:02-B1*06:02M HLA-DPA1*03:01-B1*04:02L HLA-DQA1*05:05-B1*03:116L HLA-DPA1*02:01-B1*13:01L HLA-DPA1*03:01-B1*105:01M HLA-DQA1*01:03-B1*06:01L
  REGION 1..10: note = CONT. FROM ABOVE: HLA-DRB1*15:03L
  source 1..10: note = Severe acute respiratory syndrome coronavirus 2
DPYEDFQENW

SEQ ID NO: 10561 - protein, 12 aa, Severe acute respiratory syndrome-related coronavirus
  REGION 1..12: note = Table B: HLA-DQA1*05:01-B1*03:01L HLA-DQA1*01:02-B1*06:02L HLA-DRB1*08:01L HLA-DQA1*02:01-B1*03:03L
  source 1..12: note = Severe acute respiratory syndrome coronavirus 2
ENWNTKHSSGVT

SEQ ID NO: 10562 - protein, 10 aa, Severe acute respiratory syndrome-related coronavirus
  REGION 1..10: note = Table B: HLA-DQA1*05:01-B1*03:01L HLA-DQA1*01:02-B1*06:02L HLA-DPA1*03:01-B1*105:01L HLA-DQA1*03:01-B1*03:02L HLA-DQA1*05:05-B1*03:01L HLA-DQA1*01:03-B1*06:01L HLA-DQA1*02:01-B1*03:03L
  source 1..10: note = Severe acute respiratory syndrome coronavirus 2
HSSGVTRELM

SEQ ID NO: 10563 - protein, 10 aa, Severe acute respiratory syndrome-related coronavirus
  REGION 1..10: note = Table B: HLA-DQA1*05:01-B1*03:01L HLA-DRB1*13:02L HLA-DRB1*13:03L HLA-DRB1*01:03L HLA-DQA1*01:02-B1*06:02L HLA-DRB1*08:77L HLA-DPA1*01:03-B1*03:01L HLA-DRB1*03:01L HLA-DRB1*14:01L HLA-DRB1*11:02L HLA-DRB1*14:02L HLA-DRB1*11:01L
  REGION 1..10: note = CONT. FROM ABOVE: HLA-DQA1*01-B1*05L HLA-DQA1*05:05-B1*03:19L HL A-DQA1*05:01-B1*02:01L HLA-DRB4*01:01L HLA-DPA1*01:03-B1*04:01L HLA-DQA1*05:05-B1*03:116L HLA-DPA1*01:03-B1*04:02L HLA-DRB1*12:0 1L HLA-DPA1*02:01-B1*13:01L HLA-DPA1*03:01-B1*105:01L
  REGION 1..10: note = CONT. FROM ABOVE: HLA-DPA1*01:03-B1*104:01L HLA-DRB1*10:01L HLA- DRB1*16:01L HLA-DQA1*01:03-B1*06:01L HLA-DRB1*08:02L HLA-DQA1*02 :01-B1*03:03L HLA-DRB1*15:03L
  source 1..10: note = Severe acute respiratory syndrome coronavirus 2
LMRELNGGAY

SEQ ID NO: 10564 - protein, 11 aa, Severe acute respiratory syndrome-related coronavirus
  REGION 1..11: note = Table B: HLA-DQA1*05:01-B1*03:01L HLA-DPA1*03:01-B1*105:01L HLA-DQA1*05:05-B1*03:01L
  source 1..11: note = Severe acute respiratory syndrome coronavirus 2
LNGGAYTRYVD

SEQ ID NO: 10565 - protein, 11 aa, Severe acute respiratory syndrome-related coronavirus
  REGION 1..11: note = Table B: HLA-DQA1*05:01-B1*03:01L HLA-DQA1*05:05-B1*03:19L HLA-DPA1*03:01-B1*105:01L HLA-DQA1*05:05-B1*03:01L
  source 1..11: note = Severe acute respiratory syndrome coronavirus 2
NGGAYTRYVDN

SEQ ID NO: 10566 - protein, 12 aa, Severe acute respiratory syndrome-related coronavirus
  REGION 1..12: note = Table B: HLA-DQA1*05:01-B1*03:01L HLA-DRB1*08:04L HLA-DRB3*02:01L HLA-DPA1*01:03-B1*03:01L HLA-DPA1*03:01-B1*04:02L HLA-DRB1*14:01L HLA-DRB1*08:01L HLA-DQA1*05:05-B1*03:19L HLA-DQA1*05:05-B1*03:01L
  REGION 1..12: note = CONT. FROM ABOVE: HLA-DRB1*14:17L HLA-DRB1*04:08L
  source 1..12: note = Severe acute respiratory syndrome coronavirus 2
GGAYTRYVDNNF

SEQ ID NO: 10567 - protein, 16 aa, Severe acute respiratory syndrome-related coronavirus
  REGION 1..16: note = Table B: HLA-DQA1*05:01-B1*03:01L HLA-DRB1*13:02L HLA-DPA1*03:01-B1*04:02L HLA-DRB1*14:02L HLA-DQA1*05:05-B1*03:19L HLA-DPA1*01:03-B1*04:02L HLA-DPA1*01:03-B1*104:01L HLA-DQA1*05:05-B1*03:01L
  source 1..16: note = Severe acute respiratory syndrome coronavirus 2
GAYTRYVDNNFCGPDG

SEQ ID NO: 10568 - protein, 16 aa, Severe acute respiratory syndrome-related coronavirus
  REGION 1..16: note = Table B: HLA-DQA1*05:01-B1*03:01L HLA-DRB1*04:01L HLA-DRB1*13:02L HLA-DRB1*13:03L HLA-DRB1*01:01L HLA-DRB1*08:04L HLA-DRB1*14:01L HLA-DQA1*01-B1*05L HLA-DPA1*01:03-B1*04:02L HLA-DRB3*01:01L HLA-DPA1*01:03-B1*02:01L
  REGION 1..16: note = CONT. FROM ABOVE: HLA-DPA1*01:03-B1*104:01L HLA-DPA1*01:02-B1*04 :01L HLA-DRB1*07:01L HLA-DRB1*10:01L HLA-DRB1*08:03L
  source 1..16: note = Severe acute respiratory syndrome coronavirus 2
GPDGYPLECIKDLLAR

SEQ ID NO: 10569 - protein, 12 aa, Severe acute respiratory syndrome-related coronavirus
  REGION 1..12: note = Table B: HLA-DQA1*05:01-B1*03:01L HLA-DQA1*01:02-B1*06:02L HLA-DRB1*01:02L HLA-DRB1*08:01L HLA-DQA1*05:05-B1*03:01L HLA-DRB1*16:01L HLA-DQA1*01:03-B1*06:01L HLA-DRB1*04:08L
  source 1..12: note = Severe acute respiratory syndrome coronavirus 2
IKDLLARAGKAS

SEQ ID NO: 10570 - protein, 15 aa, Severe acute respiratory syndrome-related coronavirus
  REGION 1..15: note = Table B: HLA-DQA1*05:01-B1*03:01L HLA-DRB1*13:02L HLA-DQA1*05:05-B1*03:19L HLA-DQA1*01:03-B1*06:01L HLA-DRB1*04:08L
  source 1..15: note = Severe acute respiratory syndrome coronavirus 2
DLLARAGKASCTLSE

SEQ ID NO: 10571 - protein, 14 aa, Severe acute respiratory syndrome-related coronavirus
  REGION 1..14: note = Table B: HLA-DQA1*05:01-B1*03:01L HLA-DRB1*04:05L HLA-DRB1*01:02L HLA-DPA1*01:03-B1*03:01L HLA-DQA1*05:05-B1*03:19L HLA-DRB1*12:01L HLA-DPA1*02:01-B1*13:01L HLA-DPA1*01:03-B1*104:01L
  REGION 1..14: note = CONT. FROM ABOVE: HLA-DQA1*05:05-B1*03:01L HLA-DQA1*01:03-B1*06: 01L HLA-DQA1*02:01-B1*03:03L
  source 1..14: note = Severe acute respiratory syndrome coronavirus 2
LARAGKASCTLSEQ

SEQ ID NO: 10572 - protein, 12 aa, Severe acute respiratory syndrome-related coronavirus
  REGION 1..12: note = Table B: HLA-DQA1*05:01-B1*03:01L HLA-DRB1*01:03L HLA-DRB1*04:04L HLA-DQA1*01:02-B1*06:02L HLA-DRB1*01:02L HLA-DRB1*14:01L HLA-DQA1*01:01-B1*05:01L HLA-DQA1*05:01-B1*02:01L HLA-DRB1*04:10L
  REGION 1..12: note = CONT. FROM ABOVE: HLA-DPA1*02:01-B1*13:01L HLA-DPA1*03:01-B1*105 :01L HLA-DRB1*14:54L HLA-DPA1*01:02-B1*04:01L HLA-DQA1*01:03-B1* 06:01L HLA-DRB1*04:08L HLA-DRB1*08:03L HLA-DRB1*15:03L
  source 1..12: note = Severe acute respiratory syndrome coronavirus 2
SEQLDFIDTKRG

SEQ ID NO: 10573 - protein, 16 aa, Severe acute respiratory syndrome-related coronavirus
  REGION 1..16: note = Table B: HLA-DQA1*05:01-B1*03:01L HLA-DRB1*13:03L HLA-DRB1*03:01L HLA-DRB1*14:01L HLA-DRB1*11:04L HLA-DQA1*01:01-B1*05:01L HLA-DRB3*01:01L HLA-DPA1*03:01-B1*105:01L HLA-DQA1*01:03-B1*06:01L
  source 1..16: note = Severe acute respiratory syndrome coronavirus 2
IDTKRGVYCCREHEHE

SEQ ID NO: 10574 - protein, 10 aa, Severe acute respiratory syndrome-related coronavirus
  REGION 1..10: note = Table B: HLA-DQA1*05:01-B1*03:01M HLA-DRB1*13:03L HLA-DRB1*01:03L HLA-DQA1*01:02-B1*06:02L HLA-DRB4*03:01NL HLA-DRB1*08:77L HLA-DPA1*01:03-B1*03:01L HLA-DPA1*03:01-B1*04:02L HLA-DRB1*03:01L HLA-DRB1*14:02L
  REGION 1..10: note = CONT. FROM ABOVE: HLA-DRB1*11:01L HLA-DQA1*01-B1*05L HLA-DQA1*05 :05-B1*03:19L HLA-DQA1*05:01-B1*02:01L HLA-DRB4*01:01L HLA-DPA1* 01:03-B1*04:01L HLA-DQA1*05:05-B1*03:116L HLA-DPA1*01:03-B1*04:0 2L HLA-DRB1*12:01L HLA-DPA1*01:03-B1*104:01L
  REGION 1..10: note = CONT. FROM ABOVE: HLA-DPA1*01:02-B1*04:01L HLA-DRB1*10:01L HLA-D RB1*16:01L HLA-DRB1*08:02L HLA-DQA1*02:01-B1*03:03L HLA-DRB1*15: 03L
  source 1..10: note = Severe acute respiratory syndrome coronavirus 2
REHEHEIAWY

SEQ ID NO: 10575 - protein, 15 aa, Severe acute respiratory syndrome-related coronavirus
  REGION 1..15: note = Table B: HLA-DQA1*05:01-B1*03:01L HLA-DQA1*01:01-B1*05:01L
  source 1..15: note = Severe acute respiratory syndrome coronavirus 2
EHEHEIAWYTERSEK

SEQ ID NO: 10576 - protein, 14 aa, Severe acute respiratory syndrome-related coronavirus
  REGION 1..14: note = Table B: HLA-DQA1*05:01-B1*03:01L HLA-DRB1*13:02L HLA-DRB1*08:04L HLA-DRB3*02:01L HLA-DRB1*11:04L HLA-DRB1*07:01L HLA-DRB1*08:03L
  source 1..14: note = Severe acute respiratory syndrome coronavirus 2
EHEIAWYTERSEKS

SEQ ID NO: 10577 - protein, 10 aa, Severe acute respiratory syndrome-related coronavirus
  REGION 1..10: note = Table B: HLA-DQA1*05:01-B1*03:01L HLA-DRB1*01:03L HLA-DRB1*04:05L HLA-DQA1*01:02-B1*06:02L HLA-DRB1*08:77L HLA-DPA1*01:03-B1*03:01L HLA-DPA1*03:01-B1*04:02L HLA-DRB1*03:01L HLA-DRB1*14:02L HLA-DQA1*01-B1*05L
  REGION 1..10: note = CONT. FROM ABOVE: HLA-DQA1*05:05-B1*03:19L HLA-DQA1*05:01-B1*02: 01L HLA-DRB4*01:01L HLA-DPA1*01:03-B1*04:01L HLA-DPA1*01:03-B1*0 4:02L HLA-DPA1*02:01-B1*13:01L HLA-DPA1*03:01-B1*105:01L HLA-DPA 1*01:03-B1*104:01L HLA-DRB1*10:01L HLA-DRB1*16:01L
  REGION 1..10: note = CONT. FROM ABOVE: HLA-DQA1*01:03-B1*06:01L HLA-DQA1*02:01-B1*03: 03L HLA-DRB1*15:03L
  source 1..10: note = Severe acute respiratory syndrome coronavirus 2
WYTERSEKSY

SEQ ID NO: 10578 - protein, 12 aa, Severe acute respiratory syndrome-related coronavirus
  REGION 1..12: note = Table B: HLA-DQA1*05:01-B1*03:01L HLA-DRB1*04:02L HLA-DRB1*04:05L HLA-DQA1*01:02-B1*06:02L HLA-DPA1*01:03-B1*03:01L HLA-DQA1*01:01-B1*05:01L HLA-DQA1*05:05-B1*03:19L HLA-DPA1*02:01-B1*13:01L
  REGION 1..12: note = CONT. FROM ABOVE: HLA-DPA1*03:01-B1*105:01L HLA-DQA1*05:05-B1*03 :01L HLA-DRB1*14:17L HLA-DRB1*16:01L HLA-DQA1*01:03-B1*06:01L
  source 1..12: note = Severe acute respiratory syndrome coronavirus 2
SEKSYELQTPFE

SEQ ID NO: 10579 - protein, 11 aa, Severe acute respiratory syndrome-related coronavirus
  REGION 1..11: note = Table B: HLA-DQA1*05:01-B1*03:01L HLA-DRB1*01:03L HLA-DQA1*01:02-B1*06:02L HLA-DPA1*03:01-B1*04:02L HLA-DRB1*14:01L HLA-DRB1*14:02L HLA-DQA1*05:01-B1*02:01L HLA-DPA1*01:03-B1*04:01L HLA-DRB1*12:01L
  REGION 1..11: note = CONT. FROM ABOVE: HLA-DPA1*03:01-B1*105:01L HLA-DPA1*01:02-B1*04 :01L HLA-DRB1*16:01L HLA-DRB1*15:03L
  source 1..11: note = Severe acute respiratory syndrome coronavirus 2
TPFEIKLAKKF

SEQ ID NO: 10580 - protein, 14 aa, Severe acute respiratory syndrome-related coronavirus
  REGION 1..14: note = Table B: HLA-DQA1*05:01-B1*03:01L HLA-DRB1*01:02L HLA-DQA1*05:05-B1*03:19L HLA-DRB1*12:01L HLA-DQA1*05:05-B1*03:01L HLA-DRB1*10:01L HLA-DQA1*01:03-B1*06:01L
  source 1..14: note = Severe acute respiratory syndrome coronavirus 2
DTFNGECPNFVFPL

SEQ ID NO: 10581 - protein, 13 aa, Severe acute respiratory syndrome-related coronavirus
  REGION 1..13: note = Table B: HLA-DQA1*05:01-B1*03:01L HLA-DQA1*05:05-B1*03:19L HLA-DPA1*03:01-B1*105:01L HLA-DQA1*05:05-B1*03:01L HLA-DQA1*02:01-B1*03:03L
  source 1..13: note = Severe acute respiratory syndrome coronavirus 2
FNGECPNFVFPLN

SEQ ID NO: 10582 - protein, 10 aa, Severe acute respiratory syndrome-related coronavirus
  REGION 1..10: note = Table B: HLA-DQA1*05:01-B1*03:01L HLA-DRB1*04:03L HLA-DRB1*13:02L HLA-DRB1*13:03L HLA-DRB1*04:02L HLA-DRB4*03:01NL HLA-DRB1*08:01L HLA-DRB1*12:01L HLA-DPA1*03:01-B1*105:01L HLA-DQA1*03:01-B1*03:02L HLA-DQA1*05:05-B1*03:01L
  REGION 1..10: note = CONT. FROM ABOVE: HLA-DRB1*14:17L HLA-DRB1*16:01L HLA-DQA1*01:03 -B1*06:01L HLA-DQA1*02:01-B1*03:03L
  source 1..10: note = Severe acute respiratory syndrome coronavirus 2
FVFPLNSIIK

SEQ ID NO: 10583 - protein, 10 aa, Severe acute respiratory syndrome-related coronavirus
  REGION 1..10: note = Table B: HLA-DQA1*05:01-B1*03:01L HLA-DRB1*01:03L HLA-DQA1*01:02-B1*06:02L HLA-DQA1*03:01-B1*03:02L HLA-DQA1*01:03-B1*06:01L HLA-DQA1*02:01-B1*03:03L
  source 1..10: note = Severe acute respiratory syndrome coronavirus 2
IKTIQPRVEK

SEQ ID NO: 10584 - protein, 12 aa, Severe acute respiratory syndrome-related coronavirus
  REGION 1..12: note = Table B: HLA-DQA1*05:01-B1*03:01L HLA-DQA1*01:02-B1*06:02L HLA-DQA1*05:05-B1*03:19L HLA-DQA1*05:05-B1*03:01L HLA-DQA1*01:03-B1*06:01L
  source 1..12: note = Severe acute respiratory syndrome coronavirus 2
YPVASPNECNQM

SEQ ID NO: 10585 - protein, 14 aa, Severe acute respiratory syndrome-related coronavirus
  REGION 1..14: note = Table B: HLA-DQA1*05:01-B1*03:01L HLA-DRB1*01:02L HLA-DPA1*01:03-B1*04:02L HLA-DPA1*03:01-B1*105:01L HLA-DQA1*05:05-B1*03:01L HLA-DRB1*04:08L HLA-DQA1*02:01-B1*03:03L HLA-DRB1*15:03L
  source 1..14: note = Severe acute respiratory syndrome coronavirus 2
GDFVKATCEFCGTE

SEQ ID NO: 10586 - protein, 14 aa, Severe acute respiratory syndrome-related coronavirus
  REGION 1..14: note = Table B: HLA-DQA1*05:01-B1*03:01L HLA-DRB1*01:02L HLA-DPA1*01:03-B1*03:01L HLA-DQA1*05:05-B1*03:19L HLA-DPA1*01:03-B1*04:02L HLA-DPA1*02:01-B1*13:01L HLA-DPA1*03:01-B1*105:01L HLA-DPA1*01:03-B1*104:01L
  REGION 1..14: note = CONT. FROM ABOVE: HLA-DQA1*05:05-B1*03:01L HLA-DQA1*02:01-B1*03: 03L HLA-DRB1*15:03L
  source 1..14: note = Severe acute respiratory syndrome coronavirus 2
DFVKATCEFCGTEN

SEQ ID NO: 10587 - protein, 12 aa, Severe acute respiratory syndrome-related coronavirus
  REGION 1..12: note = Table B: HLA-DQA1*05:01-B1*03:01L HLA-DRB1*01:03L HLA-DRB1*04:05L HLA-DQA1*01:02-B1*06:02L HLA-DRB1*14:01L HLA-DQA1*01:01-B1*05:01L HLA-DQA1*05:05-B1*03:19L HLA-DRB1*12:01L HLA-DPA1*03:01-B1*105:01L HLA-DRB1*14:54L
  REGION 1..12: note = CONT. FROM ABOVE: HLA-DQA1*05:05-B1*03:01L HLA-DQA1*01:03-B1*06: 01L
  source 1..12: note = Severe acute respiratory syndrome coronavirus 2
GTENLTKEGATT

SEQ ID NO: 10588 - protein, 15 aa, Severe acute respiratory syndrome-related coronavirus
  REGION 1..15: note = Table B: HLA-DQA1*05:01-B1*03:01L HLA-DRB1*01:02L HLA-DPA1*01:03-B1*03:01L HLA-DPA1*02:01-B1*13:01L HLA-DPA1*01:03-B1*104:01L
  source 1..15: note = Severe acute respiratory syndrome coronavirus 2
NLTKEGATTCGYLPQ

SEQ ID NO: 10589 - protein, 14 aa, Severe acute respiratory syndrome-related coronavirus
  REGION 1..14: note = Table B: HLA-DQA1*05:01-B1*03:01L HLA-DQA1*03:01-B1*03:02L
  source 1..14: note = Severe acute respiratory syndrome coronavirus 2
TKEGATTCGYLPQN

SEQ ID NO: 10590 - protein, 10 aa, Severe acute respiratory syndrome-related coronavirus
  REGION 1..10: note = Table B: HLA-DQA1*05:01-B1*03:01L HLA-DRB1*13:03M HLA-DRB1*01:03L HLA-DQA1*01:02-B1*06:02M HLA-DPA1*01:03-B1*03:01L HLA-DPA1*03:01-B1*04:02L HLA-DRB1*03:01L HLA-DRB1*14:01L HLA-DRB1*14:02L HLA-DRB5*01:01L
  REGION 1..10: note = CONT. FROM ABOVE: HLA-DQA1*01-B1*05L HLA-DQA1*05:05-B1*03:19L HL A-DQA1*05:01-B1*02:01L HLA-DPA1*01:03-B1*04:01L HLA-DPA1*02:01-B 1*13:01L HLA-DPA1*03:01-B1*105:01M HLA-DQA1*02:01-B1*03:03L HLA- DRB1*15:03L
  source 1..10: note = Severe acute respiratory syndrome coronavirus 2
LPQNAVVKIY

SEQ ID NO: 10591 - protein, 11 aa, Severe acute respiratory syndrome-related coronavirus
  REGION 1..11: note = Table B: HLA-DQA1*05:01-B1*03:01L HLA-DRB1*04:03L HLA-DRB1*13:02L HLA-DRB4*03:01NL HLA-DRB1*08:77L HLA-DPA1*03:01-B1*04:02L HLA-DRB1*03:01L HLA-DRB1*14:01L HLA-DRB1*11:02L HLA-DRB1*11:03L HLA-DRB1*14:02L HLA-DRB1*11:01L
  REGION 1..11: note = CONT. FROM ABOVE: HLA-DQA1*01-B1*05L HLA-DRB4*01:01L HLA-DPA1*01 :03-B1*04:01L HLA-DQA1*05:05-B1*03:116L HLA-DPA1*01:03-B1*04:02L HLA-DRB1*12:01L HLA-DPA1*02:01-B1*13:01L HLA-DPA1*01:03-B1*104:0 1L HLA-DRB1*10:01L HLA-DRB1*16:01L HLA-DQA1*01:03-B1*06:01L
  REGION 1..11: note = CONT. FROM ABOVE: HLA-DRB1*08:02L HLA-DRB1*15:03L
  source 1..11: note = Severe acute respiratory syndrome coronavirus 2
EVGPEHSLAEY

SEQ ID NO: 10592 - protein, 14 aa, Severe acute respiratory syndrome-related coronavirus
  REGION 1..14: note = Table B: HLA-DQA1*05:01-B1*03:01L HLA-DRB1*13:03L HLA-DRB1*01:03L HLA-DRB1*04:05L HLA-DQA1*01:02-B1*06:02L HLA-DRB1*01:02L HLA-DRB4*03:01NL HLA-DPA1*01:03-B1*03:01L HLA-DQA1*01:01-B1*05:01L HLA-DRB1*08:01L
  REGION 1..14: note = CONT. FROM ABOVE: HLA-DQA1*05:05-B1*03:19L HLA-DQA1*05:01-B1*02: 01L HLA-DRB1*04:10L HLA-DRB1*12:01L HLA-DPA1*02:01-B1*13:01L HLA -DPA1*03:01-B1*105:01L HLA-DQA1*05:05-B1*03:01L HLA-DRB1*14:17L HLA-DRB1*16:01L HLA-DQA1*01:03-B1*06:01L HLA-DRB1*04:08L
  REGION 1..14: note = CONT. FROM ABOVE: HLA-DRB1*15:03L
  source 1..14: note = Severe acute respiratory syndrome coronavirus 2
GPEHSLAEYHNESG

SEQ ID NO: 10593 - protein, 12 aa, Severe acute respiratory syndrome-related coronavirus
  REGION 1..12: note = Table B: HLA-DQA1*05:01-B1*03:01L HLA-DRB1*13:02L HLA-DRB1*04:04L HLA-DQA1*01:02-B1*06:02L HLA-DRB1*08:04L HLA-DRB1*08:77L HLA-DRB3*02:01L HLA-DPA1*01:03-B1*03:01L HLA-DPA1*03:01-B1*04:02L HLA-DRB1*14:01L HLA-DRB1*11:03L
  REGION 1..12: note = CONT. FROM ABOVE: HLA-DRB1*11:04L HLA-DRB1*08:01L HLA-DRB1*11:01 L HLA-DQA1*05:01-B1*02:01L HLA-DRB1*04:10L HLA-DRB1*09:01L HLA-D RB1*12:02L HLA-DRB3*01:01L HLA-DPA1*02:01-B1*13:01L HLA-DPA1*03: 01-B1*105:01L HLA-DRB1*14:54L HLA-DPA1*01:02-B1*04:01L
  REGION 1..12: note = CONT. FROM ABOVE: HLA-DRB1*07:01L HLA-DRB1*10:01L HLA-DRB1*08:03 L HLA-DRB1*15:03L
  source 1..12: note = Severe acute respiratory syndrome coronavirus 2
LAEYHNESGLKT

SEQ ID NO: 10594 - protein, 14 aa, Severe acute respiratory syndrome-related coronavirus
  REGION 1..14: note = Table B: HLA-DQA1*05:01-B1*03:01L HLA-DRB1*01:02L HLA-DPA1*01:03-B1*03:01L HLA-DRB1*04:08L HLA-DQA1*02:01-B1*03:03L
  source 1..14: note = Severe acute respiratory syndrome coronavirus 2
RTIAFGGCVFSYVG

SEQ ID NO: 10595 - protein, 12 aa, Severe acute respiratory syndrome-related coronavirus
  REGION 1..12: note = Table B: HLA-DQA1*05:01-B1*03:01L HLA-DRB1*04:05L HLA-DQA1*01:02-B1*06:02L HLA-DRB1*01:02L HLA-DPA1*01:03-B1*03:01L HLA-DRB1*12:01L HLA-DQA1*03:01-B1*03:02L HLA-DQA1*05:05-B1*03:01L
  REGION 1..12: note = CONT. FROM ABOVE: HLA-DQA1*01:03-B1*06:01L HLA-DQA1*02:01-B1*03: 03L
  source 1..12: note = Severe acute respiratory syndrome coronavirus 2
VPRASANIGCNH

SEQ ID NO: 10596 - protein, 12 aa, Severe acute respiratory syndrome-related coronavirus
  REGION 1..12: note = Table B: HLA-DQA1*05:01-B1*03:01L HLA-DRB1*04:03L HLA-DRB1*13:02L HLA-DRB1*04:02L HLA-DQA1*01:02-B1*06:02L HLA-DRB1*08:04L HLA-DRB1*12:01L HLA-DRB1*12:02L HLA-DRB1*14:54L HLA-DQA1*05:05-B1*03:01L HLA-DQA1*01:03-B1*06:01L
  REGION 1..12: note = CONT. FROM ABOVE: HLA-DQA1*02:01-B1*03:03L HLA-DRB1*15:03L
  source 1..12: note = Severe acute respiratory syndrome coronavirus 2
ANIGCNHTGVVG

SEQ ID NO: 10597 - protein, 12 aa, Severe acute respiratory syndrome-related coronavirus
  REGION 1..12: note = Table B: HLA-DQA1*05:01-B1*03:01L HLA-DRB1*13:02L HLA-DRB1*13:03L HLA-DRB1*01:03L HLA-DRB1*04:02L HLA-DRB1*04:05L HLA-DQA1*01:02-B1*06:02L HLA-DRB1*01:02L HLA-DRB1*08:04L HLA-DPA1*03:01-B1*04:02L HLA-DRB1*11:04L HLA-DRB1*08:01L
  REGION 1..12: note = CONT. FROM ABOVE: HLA-DRB1*11:01L HLA-DRB1*12:01L HLA-DRB3*01:01 L HLA-DRB1*14:54L HLA-DRB1*16:01L HLA-DRB1*04:08L HLA-DRB1*15:03 L
  source 1..12: note = Severe acute respiratory syndrome coronavirus 2
NLLEILQKEKVN

SEQ ID NO: 10598 - protein, 15 aa, Severe acute respiratory syndrome-related coronavirus
  REGION 1..15: note = Table B: HLA-DQA1*05:01-B1*03:01L HLA-DRB1*01:01L HLA-DQA1*05:05-B1*03:01L
  source 1..15: note = Severe acute respiratory syndrome coronavirus 2
LQKEKVNINIVGDFK

SEQ ID NO: 10599 - protein, 13 aa, Severe acute respiratory syndrome-related coronavirus
  REGION 1..13: note = Table B: HLA-DQA1*05:01-B1*03:01L HLA-DRB1*04:04L HLA-DRB1*04:05L HLA-DQA1*01:02-B1*06:02L HLA-DRB1*01:02L HLA-DRB4*03:01NL HLA-DPA1*01:03-B1*03:01L HLA-DRB1*14:01L HLA-DQA1*05:05-B1*03:19L HLA-DQA1*05:01-B1*02:01L
  REGION 1..13: note = CONT. FROM ABOVE: HLA-DRB1*04:10L HLA-DRB1*12:01L HLA-DPA1*03:01 -B1*105:01L HLA-DQA1*03:01-B1*03:02L HLA-DRB1*14:54L HLA-DQA1*05 :05-B1*03:01L HLA-DRB1*16:01L HLA-DRB1*04:08L HLA-DQA1*02:01-B1* 03:03L HLA-DRB1*15:03L
  source 1..13: note = Severe acute respiratory syndrome coronavirus 2
IAIILASFSASTS

SEQ ID NO: 10600 - protein, 13 aa, Severe acute respiratory syndrome-related coronavirus
  REGION 1..13: note = Table B: HLA-DQA1*05:01-B1*03:01L HLA-DQA1*01:02-B1*06:02L HLA-DRB1*01:02L HLA-DPA1*01:03-B1*03:01L HLA-DRB1*14:01L HLA-DRB1*11:04L HLA-DRB1*08:01L HLA-DRB1*11:01L HLA-DQA1*01-B1*05L HLA-DRB1*12:01L HLA-DPA1*02:01-B1*13:01L
  REGION 1..13: note = CONT. FROM ABOVE: HLA-DPA1*01:03-B1*02:01L HLA-DQA1*01:03-B1*06: 01L HLA-DQA1*02:01-B1*03:03L HLA-DRB1*15:03L
  source 1..13: note = Severe acute respiratory syndrome coronavirus 2
VKGLDYKAFKQIV

SEQ ID NO: 10601 - protein, 11 aa, Severe acute respiratory syndrome-related coronavirus
  REGION 1..11: note = Table B: HLA-DQA1*05:01-B1*03:01L HLA-DRB1*04:03L HLA-DRB1*13:03L HLA-DRB1*01:03L HLA-DRB1*04:02L HLA-DRB1*04:05L HLA-DQA1*01:02-B1*06:02L HLA-DRB1*01:02L HLA-DRB1*14:01L HLA-DRB1*11:04L HLA-DRB1*08:01L HLA-DRB1*11:01L
  REGION 1..11: note = CONT. FROM ABOVE: HLA-DQA1*01-B1*05L HLA-DPA1*01:03-B1*04:01L HL A-DPA1*01:03-B1*04:02L HLA-DRB1*12:01L HLA-DQA1*03:01-B1*03:02L HLA-DPA1*01:03-B1*02:01L HLA-DRB1*16:01L HLA-DQA1*01:03-B1*06:01 L HLA-DRB1*04:08L HLA-DQA1*02:01-B1*03:03L HLA-DRB1*15:03L
  source 1..11: note = Severe acute respiratory syndrome coronavirus 2
LDYKAFKQIVE

SEQ ID NO: 10602 - protein, 13 aa, Severe acute respiratory syndrome-related coronavirus
  REGION 1..13: note = Table B: HLA-DQA1*05:01-B1*03:01L HLA-DRB1*04:03L HLA-DRB1*01:03L HLA-DRB1*14:01L HLA-DRB1*12:01L HLA-DPA1*03:01-B1*105:01L HLA-DQA1*05:05-B1*03:01L HLA-DRB1*16:01L HLA-DRB1*04:08L HLA-DQA1*02:01-B1*03:03L
  source 1..13: note = Severe acute respiratory syndrome coronavirus 2
KQIVESCGNFKVT

SEQ ID NO: 10603 - protein, 11 aa, Severe acute respiratory syndrome-related coronavirus
  REGION 1..11: note = Table B: HLA-DQA1*05:01-B1*03:01L HLA-DRB1*04:03L HLA-DRB1*13:02L HLA-DRB1*13:03L HLA-DRB1*04:02L HLA-DRB1*04:04L HLA-DRB1*04:05L HLA-DQA1*01:02-B1*06:02L HLA-DRB1*01:01L HLA-DRB4*03:01NL HLA-DRB1*14:01L HLA-DRB1*11:04L HLA-DRB1*08:01L
  REGION 1..11: note = CONT. FROM ABOVE: HLA-DRB1*11:01L HLA-DRB1*12:01L HLA-DRB3*01:01 L HLA-DRB1*14:17L HLA-DPA1*01:02-B1*04:01L HLA-DRB1*07:01L HLA-D QA1*01:03-B1*06:01L HLA-DQA1*02:01-B1*03:03L HLA-DRB1*15:03L
  source 1..11: note = Severe acute respiratory syndrome coronavirus 2
GNFKVTKGKAK

SEQ ID NO: 10604 - protein, 12 aa, Severe acute respiratory syndrome-related coronavirus
  REGION 1..12: note = Table B: HLA-DQA1*05:01-B1*03:01L HLA-DRB1*13:02L HLA-DRB1*04:05L HLA-DQA1*01:02-B1*06:02L HLA-DRB1*01:01L HLA-DRB1*14:01L HLA-DRB1*08:01L HLA-DRB1*11:01L HLA-DRB3*01:01L HLA-DRB1*07:01L HLA-DQA1*01:03-B1*06:01L
  source 1..12: note = Severe acute respiratory syndrome coronavirus 2
NFKVTKGKAKKG

SEQ ID NO: 10605 - protein, 14 aa, Severe acute respiratory syndrome-related coronavirus
  REGION 1..14: note = Table B: HLA-DQA1*05:01-B1*03:01L HLA-DRB1*08:01L HLA-DQA1*05:05-B1*03:01L HLA-DQA1*01:03-B1*06:01L
  source 1..14: note = Severe acute respiratory syndrome coronavirus 2
FKVTKGKAKKGAWN

SEQ ID NO: 10606 - protein, 13 aa, Severe acute respiratory syndrome-related coronavirus
  REGION 1..13: note = Table B: HLA-DQA1*05:01-B1*03:01L HLA-DPA1*03:01-B1*105:01L HLA-DQA1*05:05-B1*03:01L HLA-DRB1*15:03L
  source 1..13: note = Severe acute respiratory syndrome coronavirus 2
AWNIGEQKSILSP

SEQ ID NO: 10607 - protein, 12 aa, Severe acute respiratory syndrome-related coronavirus
  REGION 1..12: note = Table B: HLA-DQA1*05:01-B1*03:01L
  source 1..12: note = Severe acute respiratory syndrome coronavirus 2
NIGEQKSILSPL

SEQ ID NO: 10608 - protein, 14 aa, Severe acute respiratory syndrome-related coronavirus
  REGION 1..14: note = Table B: HLA-DQA1*05:01-B1*03:01L HLA-DRB1*01:03L HLA-DPA1*01:03-B1*03:01L HLA-DRB1*14:01L HLA-DQA1*01-B1*05L HLA-DQA1*03:01-B1*03:02L HLA-DRB1*10:01L
  source 1..14: note = Severe acute respiratory syndrome coronavirus 2
KSILSPLYAFASEA

SEQ ID NO: 10609 - protein, 11 aa, Severe acute respiratory syndrome-related coronavirus
  REGION 1..11: note = Table B: HLA-DQA1*05:01-B1*03:01L HLA-DRB1*04:03L HLA-DRB1*04:02L HLA-DQA1*01-B1*05L HLA-DQA1*03:01-B1*03:02L HLA-DRB1*14:17L HLA-DRB1*16:01L HLA-DQA1*02:01-B1*03:03L
  source 1..11: note = Severe acute respiratory syndrome coronavirus 2
PLYAFASEAAR

SEQ ID NO: 10610 - protein, 10 aa, Severe acute respiratory syndrome-related coronavirus
  REGION 1..10: note = Table B: HLA-DQA1*05:01-B1*03:01L HLA-DQA1*01:02-B1*06:02L HLA-DPA1*03:01-B1*105:01L HLA-DQA1*01:03-B1*06:01L HLA-DQA1*02:01-B1*03:03L HLA-DRB1*15:03L
  source 1..10: note = Severe acute respiratory syndrome coronavirus 2
EAARVVRSIF

SEQ ID NO: 10611 - protein, 10 aa, Severe acute respiratory syndrome-related coronavirus
  REGION 1..10: note = Table B: HLA-DQA1*05:01-B1*03:01L HLA-DQA1*03:01-B1*03:02L HLA-DPA1*01:02-B1*04:01L HLA-DRB1*16:01L HLA-DQA1*01:03-B1*06:01L HLA-DQA1*02:01-B1*03:03L
  source 1..10: note = Severe acute respiratory syndrome coronavirus 2
VVRSIFSRTL

SEQ ID NO: 10612 - protein, 12 aa, Severe acute respiratory syndrome-related coronavirus
  REGION 1..12: note = Table B: HLA-DQA1*05:01-B1*03:01L HLA-DQA1*01:02-B1*06:02L HLA-DRB1*01:02L HLA-DRB1*08:04L HLA-DRB1*11:03L HLA-DRB1*11:04L HLA-DRB1*08:01L HLA-DRB1*11:01L HLA-DRB3*01:01L HLA-DPA1*02:01-B1*13:01L HLA-DRB1*14:54L HLA-DRB1*04:08L
  REGION 1..12: note = CONT. FROM ABOVE: HLA-DRB1*15:03L
  source 1..12: note = Severe acute respiratory syndrome coronavirus 2
NSVRVLQKAAIT

SEQ ID NO: 10613 - protein, 12 aa, Severe acute respiratory syndrome-related coronavirus
  REGION 1..12: note = Table B: HLA-DQA1*05:01-B1*03:01L HLA-DRB1*04:05L HLA-DRB1*01:02L HLA-DRB1*08:04L HLA-DPA1*01:03-B1*03:01L HLA-DPA1*03:01-B1*04:02L HLA-DRB1*08:01L HLA-DQA1*05:05-B1*03:19L HLA-DPA1*01:03-B1*04:01L
  REGION 1..12: note = CONT. FROM ABOVE: HLA-DPA1*01:03-B1*04:02L HLA-DRB1*12:01L HLA-D PA1*02:01-B1*13:01L HLA-DQA1*05:05-B1*03:01L HLA-DRB1*15:03L
  source 1..12: note = Severe acute respiratory syndrome coronavirus 2
ISQYSLRLIDAM

SEQ ID NO: 10614 - protein, 13 aa, Severe acute respiratory syndrome-related coronavirus
  REGION 1..13: note = Table B: HLA-DQA1*05:01-B1*03:01L HLA-DRB4*03:01NL HLA-DPA1*03:01-B1*04:02L HLA-DQA1*05:05-B1*03:19L HLA-DRB1*04:10L HLA-DRB1*12:01L HLA-DRB1*14:54L HLA-DRB1*04:08L HLA-DRB1*15:03L
  source 1..13: note = Severe acute respiratory syndrome coronavirus 2
DAMMFTSDLATNN

SEQ ID NO: 10615 - protein, 11 aa, Severe acute respiratory syndrome-related coronavirus
  REGION 1..11: note = Table B: HLA-DQA1*05:01-B1*03:01L HLA-DQA1*01:02-B1*06:02L HLA-DQA1*05:05-B1*03:19L HLA-DQA1*05:05-B1*03:01L HLA-DQA1*02:01-B1*03:03L
  source 1..11: note = Severe acute respiratory syndrome coronavirus 2
YITGGVVQLTS

SEQ ID NO: 10616 - protein, 12 aa, Severe acute respiratory syndrome-related coronavirus
  REGION 1..12: note = Table B: HLA-DQA1*05:01-B1*03:01L HLA-DQA1*05:01-B1*02:01L HLA-DQA1*05:05-B1*03:01L HLA-DRB1*15:03L
  source 1..12: note = Severe acute respiratory syndrome coronavirus 2
TGGVVQLTSQWL

SEQ ID NO: 10617 - protein, 11 aa, Severe acute respiratory syndrome-related coronavirus
  REGION 1..11: note = Table B: HLA-DQA1*05:01-B1*03:01L HLA-DRB1*04:03L HLA-DRB1*04:02L HLA-DRB1*01:02L HLA-DQA1*05:01-B1*02:01L HLA-DRB1*12:01L HLA-DPA1*03:01-B1*105:01L HLA-DQA1*05:05-B1*03:01L HLA-DRB1*14:17L HLA-DRB1*16:01L
  REGION 1..11: note = CONT. FROM ABOVE: HLA-DQA1*02:01-B1*03:03L HLA-DRB1*15:03L
  source 1..11: note = Severe acute respiratory syndrome coronavirus 2
VVQLTSQWLTN

SEQ ID NO: 10618 - protein, 12 aa, Severe acute respiratory syndrome-related coronavirus
  REGION 1..12: note = Table B: HLA-DQA1*05:01-B1*03:01L HLA-DRB1*14:01L HLA-DRB1*12:01L HLA-DQA1*05:05-B1*03:01L HLA-DPA1*01:02-B1*04:01L
  source 1..12: note = Severe acute respiratory syndrome coronavirus 2
SQWLTNIFGTVY

SEQ ID NO: 10619 - protein, 12 aa, Severe acute respiratory syndrome-related coronavirus
  REGION 1..12: note = Table B: HLA-DQA1*05:01-B1*03:01L HLA-DRB1*04:03L HLA-DRB1*13:02L HLA-DRB1*01:02L HLA-DRB1*08:04L HLA-DPA1*01:03-B1*03:01L HLA-DRB1*14:01L HLA-DRB1*11:04L HLA-DRB1*08:01L HLA-DRB1*11:01L HLA-DQA1*01-B1*05L
  REGION 1..12: note = CONT. FROM ABOVE: HLA-DQA1*05:01-B1*02:01L HLA-DRB3*01:01L HLA-D PA1*02:01-B1*13:01L HLA-DQA1*03:01-B1*03:02L HLA-DPA1*01:03-B1*0 2:01L HLA-DPA1*01:03-B1*104:01L HLA-DQA1*05:05-B1*03:01L HLA-DRB 1*15:03L
  source 1..12: note = Severe acute respiratory syndrome coronavirus 2
IFGTVYEKLKPV

SEQ ID NO: 10620 - protein, 10 aa, Severe acute respiratory syndrome-related coronavirus
  REGION 1..10: note = Table B: HLA-DQA1*05:01-B1*03:01L HLA-DQA1*01:02-B1*06:02L HLA-DRB1*08:77L HLA-DPA1*03:01-B1*04:02L HLA-DRB1*03:01L HLA-DQA1*01-B1*05L HLA-DQA1*05:05-B1*03:19L HLA-DQA1*05:01-B1*02:01L HLA-DRB4*01:01L
  REGION 1..10: note = CONT. FROM ABOVE: HLA-DPA1*01:03-B1*04:01L HLA-DPA1*01:03-B1*104 :01L HLA-DRB1*10:01L HLA-DRB1*16:01L HLA-DQA1*01:03-B1*06:01L HL A-DQA1*02:01-B1*03:03L HLA-DRB1*15:03L
  source 1..10: note = Severe acute respiratory syndrome coronavirus 2
YEKLKPVLDW

SEQ ID NO: 10621 - protein, 10 aa, Severe acute respiratory syndrome-related coronavirus
  REGION 1..10: note = Table B: HLA-DQA1*05:01-B1*03:01L HLA-DRB1*04:03L HLA-DRB1*13:02L HLA-DRB1*01:03L HLA-DQA1*01:02-B1*06:02L HLA-DRB1*01:02L HLA-DPA1*01:03-B1*03:01L HLA-DPA1*03:01-B1*04:02L HLA-DRB1*14:01L HLA-DRB1*11:04L
  REGION 1..10: note = CONT. FROM ABOVE: HLA-DRB1*08:01L HLA-DRB1*11:01L HLA-DQA1*01-B1 *05L HLA-DQA1*05:01-B1*02:01L HLA-DPA1*01:03-B1*04:01L HLA-DPA1* 01:03-B1*04:02L HLA-DRB1*12:01L HLA-DRB3*01:01L HLA-DPA1*03:01-B 1*105:01L HLA-DQA1*03:01-B1*03:02L HLA-DPA1*01:03-B1*02:01L
  REGION 1..10: note = CONT. FROM ABOVE: HLA-DPA1*01:02-B1*04:01M HLA-DRB1*16:01L HLA-D QA1*01:03-B1*06:01L HLA-DRB1*04:08L HLA-DQA1*02:01-B1*03:03L HLA -DRB1*15:03L
  source 1..10: note = Severe acute respiratory syndrome coronavirus 2
FLRDGWEIVK

SEQ ID NO: 10622 - protein, 14 aa, Severe acute respiratory syndrome-related coronavirus
  REGION 1..14: note = Table B: HLA-DQA1*05:01-B1*03:01L HLA-DRB1*13:02L HLA-DRB1*01:03L HLA-DRB1*04:05L HLA-DRB1*01:02L HLA-DPA1*01:03-B1*03:01L HLA-DQA1*05:05-B1*03:19L HLA-DPA1*01:03-B1*04:02L HLA-DRB1*12:01L
  REGION 1..14: note = CONT. FROM ABOVE: HLA-DPA1*02:01-B1*13:01L HLA-DPA1*01:03-B1*104 :01L HLA-DPA1*01:02-B1*04:01L HLA-DRB1*16:01L HLA-DRB1*04:08L HL A-DQA1*02:01-B1*03:03L HLA-DRB1*15:03L
  source 1..14: note = Severe acute respiratory syndrome coronavirus 2
IVKFISTCACEIVG

SEQ ID NO: 10623 - protein, 15 aa, Severe acute respiratory syndrome-related coronavirus
  REGION 1..15: note = Table B: HLA-DQA1*05:01-B1*03:01L HLA-DPA1*01:03-B1*03:01L HLA-DRB1*12:01L HLA-DPA1*01:03-B1*104:01L HLA-DQA1*02:01-B1*03:03L
  source 1..15: note = Severe acute respiratory syndrome coronavirus 2
VKFISTCACEIVGGQ

SEQ ID NO: 10624 - protein, 11 aa, Severe acute respiratory syndrome-related coronavirus
  REGION 1..11: note = Table B: HLA-DQA1*05:01-B1*03:01L HLA-DQA1*01:02-B1*06:02L HLA-DQA1*05:05-B1*03:19L HLA-DQA1*05:05-B1*03:01L HLA-DQA1*02:01-B1*03:03L
  source 1..11: note = Severe acute respiratory syndrome coronavirus 2
VGGQIVTCAKE

SEQ ID NO: 10625 - protein, 15 aa, Severe acute respiratory syndrome-related coronavirus
  REGION 1..15: note = Table B: HLA-DQA1*05:01-B1*03:01L HLA-DPA1*01:03-B1*03:01L HLA-DPA1*03:01-B1*04:02L HLA-DRB1*03:01L HLA-DRB1*11:02L HLA-DRB1*14:02L HLA-DQA1*05:05-B1*03:19L HLA-DQA1*05:01-B1*02:01L HLA-DRB1*13:01L
  REGION 1..15: note = CONT. FROM ABOVE: HLA-DPA1*01:03-B1*04:02L HLA-DPA1*02:01-B1*13: 01L HLA-DQA1*05:05-B1*03:01L HLA-DPA1*01:02-B1*04:01L HLA-DRB1*0 8:02L HLA-DRB1*08:03L HLA-DQA1*02:01-B1*03:03L
  source 1..15: note = Severe acute respiratory syndrome coronavirus 2
GQIVTCAKEIKESVQ

SEQ ID NO: 10626 - protein, 10 aa, Severe acute respiratory syndrome-related coronavirus
  REGION 1..10: note = Table B: HLA-DQA1*05:01-B1*03:01L HLA-DRB1*04:03L HLA-DRB1*01:03L HLA-DRB1*04:02L HLA-DRB1*01:02L HLA-DRB1*14:01L HLA-DRB1*12:01L HLA-DQA1*03:01-B1*03:02L HLA-DRB1*14:17L HLA-DPA1*01:02-B1*04:01L HLA-DRB1*16:01L
  REGION 1..10: note = CONT. FROM ABOVE: HLA-DQA1*02:01-B1*03:03L HLA-DRB1*15:03L
  source 1..10: note = Severe acute respiratory syndrome coronavirus 2
IIIGGAKLKA

SEQ ID NO: 10627 - protein, 10 aa, Severe acute respiratory syndrome-related coronavirus
  REGION 1..10: note = Table B: HLA-DQA1*05:01-B1*03:01L HLA-DQA1*01:02-B1*06:02L HLA-DPA1*03:01-B1*105:01L HLA-DQA1*05:05-B1*03:01L HLA-DQA1*01:03-B1*06:01L HLA-DQA1*02:01-B1*03:03L
  source 1..10: note = Severe acute respiratory syndrome coronavirus 2
IGGAKLKALN

SEQ ID NO: 10628 - protein, 13 aa, Severe acute respiratory syndrome-related coronavirus
  REGION 1..13: note = Table B: HLA-DQA1*05:01-B1*03:01L HLA-DRB1*04:03L HLA-DRB1*04:05L HLA-DRB1*01:02L HLA-DPA1*01:03-B1*03:01L HLA-DRB1*12:01L HLA-DQA1*05:05-B1*03:01L HLA-DRB1*14:17L
  source 1..13: note = Severe acute respiratory syndrome coronavirus 2
LKALNLGETFVTH

SEQ ID NO: 10629 - protein, 12 aa, Severe acute respiratory syndrome-related coronavirus
  REGION 1..12: note = Table B: HLA-DQA1*05:01-B1*03:01L HLA-DQA1*01:02-B1*06:02L HLA-DQA1*05:05-B1*03:01L HLA-DQA1*01:03-B1*06:01L HLA-DQA1*02:01-B1*03:03L
  source 1..12: note = Severe acute respiratory syndrome coronavirus 2
LNLGETFVTHSK

SEQ ID NO: 10630 - protein, 12 aa, Severe acute respiratory syndrome-related coronavirus
  REGION 1..12: note = Table B: HLA-DQA1*05:01-B1*03:01L HLA-DRB1*01:03L HLA-DRB1*04:02L HLA-DRB1*04:05L HLA-DQA1*01:02-B1*06:02L HLA-DQA1*01:01-B1*05:01L HLA-DRB1*08:01L HLA-DPA1*03:01-B1*105:01L HLA-DQA1*05:05-B1*03:01L
  REGION 1..12: note = CONT. FROM ABOVE: HLA-DRB1*14:17L HLA-DRB1*16:01L HLA-DRB1*04:08 L
  source 1..12: note = Severe acute respiratory syndrome coronavirus 2
NLGETFVTHSKG

SEQ ID NO: 10631 - protein, 10 aa, Severe acute respiratory syndrome-related coronavirus
  REGION 1..10: note = Table B: HLA-DQA1*05:01-B1*03:01L HLA-DRB1*13:03L HLA-DRB1*01:03L HLA-DQA1*01:02-B1*06:02L HLA-DRB1*08:77L HLA-DPA1*01:03-B1*03:01L HLA-DPA1*03:01-B1*04:02L HLA-DRB1*03:01L HLA-DRB1*14:02L HLA-DQA1*01-B1*05L
  REGION 1..10: note = CONT. FROM ABOVE: HLA-DQA1*05:05-B1*03:19L HLA-DQA1*05:01-B1*02: 01L HLA-DRB4*01:01L HLA-DPA1*01:03-B1*04:01L HLA-DQA1*05:05-B1*0 3:116L HLA-DPA1*01:03-B1*04:02L HLA-DPA1*02:01-B1*13:01L HLA-DPA 1*03:01-B1*105:01L HLA-DPA1*01:03-B1*104:01L
  REGION 1..10: note = CONT. FROM ABOVE: HLA-DPA1*01:02-B1*04:01L HLA-DRB1*16:01L HLA-D QA1*01:03-B1*06:01L HLA-DQA1*02:01-B1*03:03L HLA-DRB1*15:03L
  source 1..10: note = Severe acute respiratory syndrome coronavirus 2
TFVTHSKGLY

SEQ ID NO: 10632 - protein, 10 aa, Severe acute respiratory syndrome-related coronavirus
  REGION 1..10: note = Table B: HLA-DQA1*05:01-B1*03:01L HLA-DRB1*04:03L HLA-DRB1*13:02L HLA-DRB1*13:03L HLA-DRB1*01:03L HLA-DRB1*04:02L HLA-DRB1*04:04L HLA-DRB1*04:05L HLA-DQA1*01:02-B1*06:02L HLA-DRB1*01:01L HLA-DRB1*01:02L HLA-DRB4*03:01NL HLA-DRB1*03:01L
  REGION 1..10: note = CONT. FROM ABOVE: HLA-DRB1*14:01L HLA-DRB1*11:03L HLA-DRB1*11:04 L HLA-DRB1*08:01L HLA-DRB1*11:01L HLA-DRB1*13:01L HLA-DRB1*12:01 L HLA-DRB3*01:01L HLA-DQA1*03:01-B1*03:02L HLA-DRB1*14:54L HLA-D RB1*14:17L HLA-DPA1*01:02-B1*04:01L HLA-DRB1*16:01L
  REGION 1..10: note = CONT. FROM ABOVE: HLA-DQA1*01:03-B1*06:01L HLA-DRB1*04:08L HLA-D QA1*02:01-B1*03:03L HLA-DRB1*15:03L
  source 1..10: note = Severe acute respiratory syndrome coronavirus 2
FVTHSKGLYR

SEQ ID NO: 10633 - protein, 12 aa, Severe acute respiratory syndrome-related coronavirus
  REGION 1..12: note = Table B: HLA-DQA1*05:01-B1*03:01L HLA-DPA1*03:01-B1*105:01L HLA-DQA1*05:05-B1*03:01L
  source 1..12: note = Severe acute respiratory syndrome coronavirus 2
ETGLLMPLKAPK

SEQ ID NO: 10634 - protein, 11 aa, Severe acute respiratory syndrome-related coronavirus
  REGION 1..11: note = Table B: HLA-DQA1*05:01-B1*03:01L HLA-DRB1*13:03L HLA-DRB1*01:03L HLA-DRB1*04:04L HLA-DRB1*04:05L HLA-DQA1*01:02-B1*06:02L HLA-DRB1*01:02L HLA-DRB4*03:01NL HLA-DRB1*14:01L HLA-DRB1*08:01L HLA-DRB1*04:10L HLA-DRB1*12:01L
  REGION 1..11: note = CONT. FROM ABOVE: HLA-DRB1*14:54L HLA-DPA1*01:02-B1*04:01L HLA-D RB1*16:01L HLA-DQA1*01:03-B1*06:01L HLA-DRB1*04:08L HLA-DRB1*15: 03L
  source 1..11: note = Severe acute respiratory syndrome coronavirus 2
GLLMPLKAPKE

SEQ ID NO: 10635 - protein, 10 aa, Severe acute respiratory syndrome-related coronavirus
  REGION 1..10: note = Table B: HLA-DQA1*05:01-B1*03:01L HLA-DQA1*01:02-B1*06:02L HLA-DQA1*01-B1*05L HLA-DQA1*05:05-B1*03:116L HLA-DPA1*02:01-B1*13:01L
  source 1..10: note = Severe acute respiratory syndrome coronavirus 2
MPLKAPKEII

SEQ ID NO: 10636 - protein, 13 aa, Severe acute respiratory syndrome-related coronavirus
  REGION 1..13: note = Table B: HLA-DQA1*05:01-B1*03:01L HLA-DRB1*04:03L HLA-DRB1*13:02L HLA-DRB1*01:02L HLA-DRB4*03:01NL HLA-DRB1*08:77L HLA-DRB3*02:01L HLA-DPA1*03:01-B1*04:02L HLA-DRB1*14:01L HLA-DRB1*11:03L HLA-DQA1*05:01-B1*02:01L HLA-DRB1*09:01L
  REGION 1..13: note = CONT. FROM ABOVE: HLA-DRB1*12:01L HLA-DRB1*12:02L HLA-DRB1*14:54 L HLA-DPA1*01:02-B1*04:01L HLA-DRB1*07:01L HLA-DRB1*16:01L HLA-D QA1*02:01-B1*03:03L HLA-DRB1*15:03L
  source 1..13: note = Severe acute respiratory syndrome coronavirus 2
APKEIIFLEGETL

SEQ ID NO: 10637 - protein, 12 aa, Severe acute respiratory syndrome-related coronavirus
  REGION 1..12: note = Table B: HLA-DQA1*05:01-B1*03:01L HLA-DRB1*13:02L HLA-DRB1*01:03L HLA-DRB1*04:02L HLA-DRB1*01:01L HLA-DRB4*03:01NL HLA-DRB1*08:77L HLA-DRB1*11:03L HLA-DQA1*05:05-B1*03:19L HLA-DQA1*05:01-B1*02:01L HLA-DPA1*03:01-B1*105:01L
  REGION 1..12: note = CONT. FROM ABOVE: HLA-DQA1*05:05-B1*03:01L HLA-DRB1*07:01L HLA-D RB1*10:01L HLA-DRB1*04:08L HLA-DQA1*02:01-B1*03:03L
  source 1..12: note = Severe acute respiratory syndrome coronavirus 2
EIIFLEGETLPT

SEQ ID NO: 10638 - protein, 12 aa, Severe acute respiratory syndrome-related coronavirus
  REGION 1..12: note = Table B: HLA-DQA1*05:01-B1*03:01L HLA-DRB1*01:03L HLA-DQA1*01:02-B1*06:02L HLA-DRB1*01:01L HLA-DRB1*08:77L HLA-DQA1*05:05-B1*03:19L HLA-DQA1*05:01-B1*02:01L HLA-DPA1*03:01-B1*105:01L HLA-DQA1*03:01-B1*03:02L
  REGION 1..12: note = CONT. FROM ABOVE: HLA-DQA1*05:05-B1*03:01L HLA-DRB1*10:01L HLA-D QA1*01:03-B1*06:01L HLA-DRB1*04:08L HLA-DQA1*02:01-B1*03:03L
  source 1..12: note = Severe acute respiratory syndrome coronavirus 2
IIFLEGETLPTE

SEQ ID NO: 10639 - protein, 12 aa, Severe acute respiratory syndrome-related coronavirus
  REGION 1..12: note = Table B: HLA-DQA1*05:01-B1*03:01L HLA-DQA1*01:02-B1*06:02L HLA-DPA1*03:01-B1*105:01L HLA-DQA1*05:05-B1*03:01L HLA-DQA1*01:03-B1*06:01L HLA-DQA1*02:01-B1*03:03L
  source 1..12: note = Severe acute respiratory syndrome coronavirus 2
FLEGETLPTEVL

SEQ ID NO: 10640 - protein, 13 aa, Severe acute respiratory syndrome-related coronavirus
  REGION 1..13: note = Table B: HLA-DQA1*05:01-B1*03:01L HLA-DRB1*04:05L HLA-DRB1*01:02L HLA-DPA1*01:03-B1*03:01L HLA-DQA1*01:01-B1*05:01L HLA-DRB1*04:10L HLA-DPA1*02:01-B1*13:01L HLA-DRB1*14:54L HLA-DRB1*15:03L
  source 1..13: note = Severe acute respiratory syndrome coronavirus 2
LPTEVLTEEVVLK

SEQ ID NO: 10641 - protein, 12 aa, Severe acute respiratory syndrome-related coronavirus
  REGION 1..12: note = Table B: HLA-DQA1*05:01-B1*03:01L HLA-DRB1*01:02L HLA-DQA1*01-B1*05L HLA-DQA1*05:01-B1*02:01L HLA-DRB1*15:03L
  source 1..12: note = Severe acute respiratory syndrome coronavirus 2
EVLTEEVVLKTG

SEQ ID NO: 10642 - protein, 13 aa, Severe acute respiratory syndrome-related coronavirus
  REGION 1..13: note = Table B: HLA-DQA1*05:01-B1*03:01L HLA-DQA1*05:05-B1*03:01L
  source 1..13: note = Severe acute respiratory syndrome coronavirus 2
VLTEEVVLKTGDL

SEQ ID NO: 10643 - protein, 12 aa, Severe acute respiratory syndrome-related coronavirus
  REGION 1..12: note = Table B: HLA-DQA1*05:01-B1*03:01L HLA-DQA1*05:01-B1*02:01L
  source 1..12: note = Severe acute respiratory syndrome coronavirus 2
EVVLKTGDLQPL

SEQ ID NO: 10644 - protein, 12 aa, Severe acute respiratory syndrome-related coronavirus
  REGION 1..12: note = Table B: HLA-DQA1*05:01-B1*03:01L HLA-DQA1*05:05-B1*03:19L HLA-DQA1*03:01-B1*03:02L HLA-DQA1*05:05-B1*03:01L
  source 1..12: note = Severe acute respiratory syndrome coronavirus 2
LKTGDLQPLEQP

SEQ ID NO: 10645 - protein, 12 aa, Severe acute respiratory syndrome-related coronavirus
  REGION 1..12: note = Table B: HLA-DQA1*05:01-B1*03:01L HLA-DQA1*01:02-B1*06:02L HLA-DQA1*03:01-B1*03:02L HLA-DQA1*02:01-B1*03:03L
  source 1..12: note = Severe acute respiratory syndrome coronavirus 2
KTGDLQPLEQPT

SEQ ID NO: 10646 - protein, 13 aa, Severe acute respiratory syndrome-related coronavirus
  REGION 1..13: note = Table B: HLA-DQA1*05:01-B1*03:01L HLA-DRB1*13:02L HLA-DRB1*04:04L HLA-DQA1*01:02-B1*06:02L HLA-DRB1*01:02L HLA-DRB1*08:04L HLA-DRB1*08:77L HLA-DPA1*01:03-B1*03:01L HLA-DRB1*11:03L HLA-DRB1*11:04L HLA-DQA1*05:05-B1*03:19L
  REGION 1..13: note = CONT. FROM ABOVE: HLA-DPA1*03:01-B1*105:01L HLA-DRB1*08:03L HLA- DRB1*15:03L
  source 1..13: note = Severe acute respiratory syndrome coronavirus 2
TGDLQPLEQPTSE

SEQ ID NO: 10647 - protein, 13 aa, Severe acute respiratory syndrome-related coronavirus
  REGION 1..13: note = Table B: HLA-DQA1*05:01-B1*03:01L HLA-DRB1*04:04L HLA-DQA1*01:02-B1*06:02L HLA-DRB1*01:02L HLA-DPA1*01:03-B1*03:01L HLA-DRB1*14:01L HLA-DRB1*11:04L HLA-DQA1*05:05-B1*03:19L HLA-DPA1*03:01-B1*105:01L
  REGION 1..13: note = CONT. FROM ABOVE: HLA-DRB1*08:03L HLA-DRB1*15:03L
  source 1..13: note = Severe acute respiratory syndrome coronavirus 2
GDLQPLEQPTSEA

SEQ ID NO: 10648 - protein, 14 aa, Severe acute respiratory syndrome-related coronavirus
  REGION 1..14: note = Table B: HLA-DQA1*05:01-B1*03:01L HLA-DRB1*01:03L HLA-DQA1*01:02-B1*06:02L HLA-DRB1*01:02L HLA-DRB4*03:01NL HLA-DPA1*01:03-B1*03:01L HLA-DQA1*05:05-B1*03:19L HLA-DRB1*12:01L HLA-DPA1*02:01-B1*13:01L
  REGION 1..14: note = CONT. FROM ABOVE: HLA-DPA1*03:01-B1*105:01L HLA-DRB1*14:54L HLA- DQA1*05:05-B1*03:01L HLA-DRB1*04:08L
  source 1..14: note = Severe acute respiratory syndrome coronavirus 2
DLQPLEQPTSEAVE

SEQ ID NO: 10649 - protein, 15 aa, Severe acute respiratory syndrome-related coronavirus
  REGION 1..15: note = Table B: HLA-DQA1*05:01-B1*03:01L HLA-DRB1*04:03L HLA-DRB1*01:03L HLA-DRB1*04:02L HLA-DQA1*01:02-B1*06:02L HLA-DPA1*01:03-B1*03:01L HLA-DQA1*01:01-B1*05:01L HLA-DQA1*05:05-B1*03:19L HLA-DRB1*12:01L
  REGION 1..15: note = CONT. FROM ABOVE: HLA-DPA1*02:01-B1*13:01L HLA-DPA1*03:01-B1*105 :01L HLA-DQA1*05:05-B1*03:01L HLA-DRB1*16:01L
  source 1..15: note = Severe acute respiratory syndrome coronavirus 2
QPLEQPTSEAVEAPL

SEQ ID NO: 10650 - protein, 13 aa, Severe acute respiratory syndrome-related coronavirus
  REGION 1..13: note = Table B: HLA-DQA1*05:01-B1*03:01L HLA-DQA1*01:02-B1*06:02L HLA-DQA1*01:01-B1*05:01L HLA-DQA1*01-B1*05L HLA-DQA1*05:05-B1*03:19L HLA-DQA1*05:05-B1*03:01L HLA-DRB1*16:01L
  source 1..13: note = Severe acute respiratory syndrome coronavirus 2
QPTSEAVEAPLVG

SEQ ID NO: 10651 - protein, 13 aa, Severe acute respiratory syndrome-related coronavirus
  REGION 1..13: note = Table B: HLA-DQA1*05:01-B1*03:01L HLA-DQA1*01:02-B1*06:02L HLA-DPA1*03:01-B1*105:01L HLA-DQA1*01:03-B1*06:01L
  source 1..13: note = Severe acute respiratory syndrome coronavirus 2
VEAPLVGTPVCIN

SEQ ID NO: 10652 - protein, 12 aa, Severe acute respiratory syndrome-related coronavirus
  REGION 1..12: note = Table B: HLA-DQA1*05:01-B1*03:01L HLA-DQA1*05:05-B1*03:19L HLA-DPA1*01:03-B1*04:02L HLA-DQA1*03:01-B1*03:02L HLA-DQA1*05:05-B1*03:01L HLA-DQA1*02:01-B1*03:03L
  source 1..12: note = Severe acute respiratory syndrome coronavirus 2
INGLMLLEIKDT

SEQ ID NO: 10653 - protein, 13 aa, Severe acute respiratory syndrome-related coronavirus
  REGION 1..13: note = Table B: HLA-DQA1*05:01-B1*03:01L HLA-DRB1*01:03L HLA-DRB1*04:05L HLA-DQA1*01:02-B1*06:02L HLA-DRB1*01:02L HLA-DPA1*01:03-B1*03:01L HLA-DPA1*03:01-B1*04:02L HLA-DRB1*08:01L HLA-DPA1*01:03-B1*04:02L HLA-DRB1*12:01L
  REGION 1..13: note = CONT. FROM ABOVE: HLA-DPA1*02:01-B1*13:01L HLA-DQA1*03:01-B1*03: 02L HLA-DRB1*16:01L HLA-DRB1*04:08L HLA-DQA1*02:01-B1*03:03L
  source 1..13: note = Severe acute respiratory syndrome coronavirus 2
IKDTEKYCALAPN

SEQ ID NO: 10654 - protein, 11 aa, Severe acute respiratory syndrome-related coronavirus
  REGION 1..11: note = Table B: HLA-DQA1*05:01-B1*03:01L HLA-DRB1*13:03L HLA-DQA1*01:02-B1*06:02L HLA-DQA1*05:01-B1*02:01L HLA-DPA1*03:01-B1*105:01L HLA-DQA1*01:03-B1*06:01L HLA-DQA1*02:01-B1*03:03L HLA-DRB1*15:03L
  source 1..11: note = Severe acute respiratory syndrome coronavirus 2
APNMMVTNNTF

SEQ ID NO: 10655 - protein, 10 aa, Severe acute respiratory syndrome-related coronavirus
  REGION 1..10: note = Table B: HLA-DQA1*05:01-B1*03:01L HLA-DRB1*04:03L HLA-DRB1*13:02L HLA-DRB1*13:03L HLA-DRB1*01:03L HLA-DRB1*04:02L HLA-DRB1*01:01L HLA-DRB1*01:02L HLA-DRB4*03:01NL HLA-DRB1*11:04L HLA-DRB1*08:01L HLA-DRB1*12:01L HLA-DQA1*03:01-B1*03:02L
  REGION 1..10: note = CONT. FROM ABOVE: HLA-DQA1*05:05-B1*03:01L HLA-DRB1*14:17L HLA-D RB1*16:01L HLA-DQA1*02:01-B1*03:03L
  source 1..10: note = Severe acute respiratory syndrome coronavirus 2
FTLKGGAPTK

SEQ ID NO: 10656 - protein, 10 aa, Severe acute respiratory syndrome-related coronavirus
  REGION 1..10: note = Table B: HLA-DQA1*05:01-B1*03:01L HLA-DQA1*05:05-B1*03:01L HLA-DQA1*01:03-B1*06:01L
  source 1..10: note = Severe acute respiratory syndrome coronavirus 2
LKGGAPTKVT

SEQ ID NO: 10657 - protein, 12 aa, Severe acute respiratory syndrome-related coronavirus
  REGION 1..12: note = Table B: HLA-DQA1*05:01-B1*03:01L HLA-DRB4*01:01L HLA-DRB1*12:01L HLA-DPA1*03:01-B1*105:01L HLA-DRB1*15:03L
  source 1..12: note = Severe acute respiratory syndrome coronavirus 2
FGDDTVIEVQGY

SEQ ID NO: 10658 - protein, 10 aa, Severe acute respiratory syndrome-related coronavirus
  REGION 1..10: note = Table B: HLA-DQA1*05:01-B1*03:01L HLA-DRB1*13:03L HLA-DQA1*01:02-B1*06:02L HLA-DRB4*03:01NL HLA-DRB1*08:01L HLA-DRB5*01:01L HLA-DRB1*12:01L HLA-DQA1*03:01-B1*03:02L HLA-DQA1*05:05-B1*03:01L HLA-DRB1*14:17L
  REGION 1..10: note = CONT. FROM ABOVE: HLA-DQA1*01:03-B1*06:01L HLA-DQA1*02:01-B1*03: 03L
  source 1..10: note = Severe acute respiratory syndrome coronavirus 2
DTVIEVQGYK

SEQ ID NO: 10659 - protein, 11 aa, Severe acute respiratory syndrome-related coronavirus
  REGION 1..11: note = Table B: HLA-DQA1*05:01-B1*03:01L HLA-DRB1*13:03L HLA-DRB1*01:03L HLA-DRB1*04:02L HLA-DRB1*04:04L HLA-DRB1*04:05L HLA-DQA1*01:02-B1*06:02L HLA-DRB1*01:02L HLA-DRB4*03:01NL HLA-DPA1*01:03-B1*03:01L HLA-DPA1*03:01-B1*04:02L
  REGION 1..11: note = CONT. FROM ABOVE: HLA-DRB1*14:01L HLA-DQA1*05:05-B1*03:19L HLA-D QA1*05:01-B1*02:01L HLA-DRB1*04:10L HLA-DPA1*01:03-B1*04:02L HLA -DRB1*12:01L HLA-DPA1*03:01-B1*105:01L HLA-DRB1*14:54L HLA-DQA1* 05:05-B1*03:01L HLA-DRB1*14:17L HLA-DRB1*16:01L
  REGION 1..11: note = CONT. FROM ABOVE: HLA-DQA1*01:03-B1*06:01L HLA-DRB1*04:08L HLA-D RB1*15:03L
  source 1..11: note = Severe acute respiratory syndrome coronavirus 2
VIEVQGYKSVN

SEQ ID NO: 10660 - protein, 12 aa, Severe acute respiratory syndrome-related coronavirus
  REGION 1..12: note = Table B: HLA-DQA1*05:01-B1*03:01L HLA-DRB1*13:02L HLA-DRB1*13:03L HLA-DRB1*01:03L HLA-DRB1*04:04L HLA-DRB1*04:05L HLA-DRB3*02:01L HLA-DPA1*03:01-B1*04:02L HLA-DRB1*14:01L HLA-DRB1*08:01L HLA-DPA1*02:01-B1*13:01L
  REGION 1..12: note = CONT. FROM ABOVE: HLA-DQA1*05:05-B1*03:01L HLA-DRB1*04:08L HLA-D RB1*15:01L
  source 1..12: note = Severe acute respiratory syndrome coronavirus 2
IEVQGYKSVNIT

SEQ ID NO: 10661 - protein, 13 aa, Severe acute respiratory syndrome-related coronavirus
  REGION 1..13: note = Table B: HLA-DQA1*05:01-B1*03:01L HLA-DRB1*13:02L HLA-DRB1*01:03L HLA-DRB1*04:02L HLA-DRB1*04:05L HLA-DRB1*01:02L HLA-DRB3*02:01L HLA-DPA1*01:03-B1*03:01L HLA-DRB1*14:01L HLA-DPA1*01:03-B1*04:01L HLA-DRB1*04:10L
  REGION 1..13: note = CONT. FROM ABOVE: HLA-DPA1*01:03-B1*04:02L HLA-DQA1*05:05-B1*03: 01L HLA-DRB1*04:08L
  source 1..13: note = Severe acute respiratory syndrome coronavirus 2
SVNITFELDERID

SEQ ID NO: 10662 - protein, 16 aa, Severe acute respiratory syndrome-related coronavirus
  REGION 1..16: note = Table B: HLA-DQA1*05:01-B1*03:01L HLA-DRB1*14:02L HLA-DQA1*01-B1*05L HLA-DRB3*01:01L HLA-DRB1*07:01L
  source 1..16: note = Severe acute respiratory syndrome coronavirus 2
DERIDKVLNEKCSAYT

SEQ ID NO: 10663 - protein, 15 aa, Severe acute respiratory syndrome-related coronavirus
  REGION 1..15: note = Table B: HLA-DQA1*05:01-B1*03:01L HLA-DRB1*04:03L HLA-DRB1*13:02L HLA-DRB1*01:03L HLA-DRB1*04:05L HLA-DRB1*08:04L HLA-DRB1*08:01L HLA-DQA1*05:05-B1*03:01L HLA-DRB1*04:08L
  source 1..15: note = Severe acute respiratory syndrome coronavirus 2
IDKVLNEKCSAYTVE

SEQ ID NO: 10664 - protein, 13 aa, Severe acute respiratory syndrome-related coronavirus
  REGION 1..13: note = Table B: HLA-DQA1*05:01-B1*03:01L HLA-DRB1*14:01L HLA-DRB1*12:01L HLA-DPA1*03:01-B1*105:01L HLA-DQA1*05:05-B1*03:01L
  source 1..13: note = Severe acute respiratory syndrome coronavirus 2
VADAVIKTLQPVS

SEQ ID NO: 10665 - protein, 13 aa, Severe acute respiratory syndrome-related coronavirus
  REGION 1..13: note = Table B: HLA-DQA1*05:01-B1*03:01L HLA-DRB1*01:02L HLA-DPA1*01:03-B1*03:01L HLA-DPA1*03:01-B1*04:02L HLA-DRB1*14:01L HLA-DQA1*01:01-B1*05:01L HLA-DPA1*02:01-B1*13:01L HLA-DQA1*05:05-B1*03:01L
  REGION 1..13: note = CONT. FROM ABOVE: HLA-DPA1*01:02-B1*04:01L
  source 1..13: note = Severe acute respiratory syndrome coronavirus 2
TLQPVSELLTPLG

SEQ ID NO: 10666 - protein, 14 aa, Severe acute respiratory syndrome-related coronavirus
  REGION 1..14: note = Table B: HLA-DQA1*05:01-B1*03:01L HLA-DRB1*04:01L HLA-DRB1*01:03L HLA-DRB1*01:02L HLA-DRB1*08:04L HLA-DPA1*01:03-B1*03:01L HLA-DRB1*14:01L HLA-DRB1*11:04L HLA-DRB4*01:01L HLA-DQA1*05:05-B1*03:01L HLA-DRB1*10:01L
  REGION 1..14: note = CONT. FROM ABOVE: HLA-DRB1*04:08L HLA-DRB1*08:03L
  source 1..14: note = Severe acute respiratory syndrome coronavirus 2
LQPVSELLTPLGID

SEQ ID NO: 10667 - protein, 10 aa, Severe acute respiratory syndrome-related coronavirus
  REGION 1..10: note = Table B: HLA-DQA1*05:01-B1*03:01L HLA-DRB1*13:03L HLA-DQA1*01:02-B1*06:02M HLA-DQA1*05:01-B1*02:01L HLA-DPA1*02:01-B1*13:01L HLA-DPA1*03:01-B1*105:01M HLA-DRB1*15:03L
  source 1..10: note = Severe acute respiratory syndrome coronavirus 2
TPLGIDLDEW

SEQ ID NO: 10668 - protein, 19 aa, Severe acute respiratory syndrome-related coronavirus
  REGION 1..19: note = Table B: HLA-DQA1*05:01-B1*03:01L HLA-DRB1*04:05L HLA-DRB1*14:02L HLA-DPA1*02:01-B1*13:01L HLA-DRB1*04:08L
  source 1..19: note = Severe acute respiratory syndrome coronavirus 2
PPDEDEEEGDCEEEEFEPS

SEQ ID NO: 10669 - protein, 10 aa, Severe acute respiratory syndrome-related coronavirus
  REGION 1..10: note = Table B: HLA-DQA1*05:01-B1*03:01L HLA-DRB1*13:03L HLA-DRB1*01:03L HLA-DQA1*01:02-B1*06:02L HLA-DRB1*08:77L HLA-DPA1*01:03-B1*03:01L HLA-DPA1*03:01-B1*04:02L HLA-DRB1*03:01L HLA-DRB1*11:02L HLA-DRB1*14:02L
  REGION 1..10: note = CONT. FROM ABOVE: HLA-DQA1*01-B1*05L HLA-DQA1*05:05-B1*03:19M HL A-DQA1*05:01-B1*02:01M HLA-DRB4*01:01L HLA-DPA1*01:03-B1*04:01L HLA-DQA1*05:05-B1*03:116L HLA-DPA1*01:03-B1*04:02L HLA-DPA1*02:0 1-B1*13:01L HLA-DPA1*03:01-B1*105:01L HLA-DPA1*01:03-B1*104:01L
  REGION 1..10: note = CONT. FROM ABOVE: HLA-DRB1*10:01L HLA-DRB1*16:01L HLA-DQA1*02:01 -B1*03:03L HLA-DRB1*15:03L
  source 1..10: note = Severe acute respiratory syndrome coronavirus 2
EFEPSTQYEY

SEQ ID NO: 10670 - protein, 11 aa, Severe acute respiratory syndrome-related coronavirus
  REGION 1..11: note = Table B: HLA-DQA1*05:01-B1*03:01L HLA-DRB1*13:03L HLA-DRB1*01:03L HLA-DRB1*04:05L HLA-DRB4*03:01NL HLA-DRB1*04:10L HLA-DRB1*12:01L HLA-DPA1*03:01-B1*105:01L HLA-DRB1*14:54L HLA-DQA1*05:05-B1*03:01L HLA-DQA1*01:03-B1*06:01L
  REGION 1..11: note = CONT. FROM ABOVE: HLA-DRB1*04:08L
  source 1..11: note = Severe acute respiratory syndrome coronavirus 2
YGTEDDYQGKP

SEQ ID NO: 10671 - protein, 12 aa, Severe acute respiratory syndrome-related coronavirus
  REGION 1..12: note = Table B: HLA-DQA1*05:01-B1*03:01L HLA-DQA1*01:02-B1*06:02L HLA-DQA1*05:05-B1*03:19L HLA-DPA1*03:01-B1*105:01L HLA-DQA1*05:05-B1*03:01L
  source 1..12: note = Severe acute respiratory syndrome coronavirus 2
DYQGKPLEFGAT

SEQ ID NO: 10672 - protein, 13 aa, Severe acute respiratory syndrome-related coronavirus
  REGION 1..13: note = Table B: HLA-DQA1*05:01-B1*03:01L HLA-DRB1*04:03L HLA-DRB1*04:02L HLA-DQA1*01:02-B1*06:02L HLA-DQA1*05:05-B1*03:01L HLA-DRB1*14:17L HLA-DQA1*01:03-B1*06:01L HLA-DQA1*02:01-B1*03:03L
  source 1..13: note = Severe acute respiratory syndrome coronavirus 2
KPLEFGATSAALQ

SEQ ID NO: 10673 - protein, 14 aa, Severe acute respiratory syndrome-related coronavirus
  REGION 1..14: note = Table B: HLA-DQA1*05:01-B1*03:01L HLA-DQA1*01:02-B1*06:02L HLA-DQA1*01:03-B1*06:01L
  source 1..14: note = Severe acute respiratory syndrome coronavirus 2
PLEFGATSAALQPE

SEQ ID NO: 10674 - protein, 11 aa, Severe acute respiratory syndrome-related coronavirus
  REGION 1..11: note = Table B: HLA-DQA1*05:01-B1*03:01L HLA-DQA1*01:01-B1*05:01L HLA-DQA1*05:05-B1*03:19L HLA-DQA1*05:05-B1*03:01L
  source 1..11: note = Severe acute respiratory syndrome coronavirus 2
ATSAALQPEEE

SEQ ID NO: 10675 - protein, 11 aa, Severe acute respiratory syndrome-related coronavirus
  REGION 1..11: note = Table B: HLA-DQA1*05:01-B1*03:01L HLA-DQA1*01:01-B1*05:01L HLA-DQA1*05:05-B1*03:19L HLA-DQA1*05:05-B1*03:01L
  source 1..11: note = Severe acute respiratory syndrome coronavirus 2
TSAALQPEEEQ

SEQ ID NO: 10676 - protein, 12 aa, Severe acute respiratory syndrome-related coronavirus
  REGION 1..12: note = Table B: HLA-DQA1*05:01-B1*03:01L HLA-DRB1*13:03L HLA-DRB1*04:02L HLA-DRB1*04:05L HLA-DQA1*01:02-B1*06:02L HLA-DQA1*01:01-B1*05:01L HLA-DQA1*05:05-B1*03:19L HLA-DRB1*04:10L HLA-DRB1*12:01L HLA-DQA1*05:05-B1*03:01L
  REGION 1..12: note = CONT. FROM ABOVE: HLA-DRB1*16:01L
  source 1..12: note = Severe acute respiratory syndrome coronavirus 2
SAALQPEEEQEE

SEQ ID NO: 10677 - protein, 14 aa, Severe acute respiratory syndrome-related coronavirus
  REGION 1..14: note = Table B: HLA-DQA1*05:01-B1*03:01L HLA-DRB1*04:03L HLA-DQA1*01:02-B1*06:02L HLA-DQA1*01:01-B1*05:01L HLA-DQA1*05:05-B1*03:19L HLA-DQA1*05:05-B1*03:01L
  source 1..14: note = Severe acute respiratory syndrome coronavirus 2
DSQQTVGQQDGSED

SEQ ID NO: 10678 - protein, 12 aa, Severe acute respiratory syndrome-related coronavirus
  REGION 1..12: note = Table B: HLA-DQA1*05:01-B1*03:01L HLA-DRB1*13:02L HLA-DRB1*13:03L HLA-DRB1*01:03L HLA-DRB1*04:02L HLA-DRB1*04:04L HLA-DRB1*04:05L HLA-DRB1*01:02L HLA-DRB4*03:01NL HLA-DRB1*08:04L HLA-DRB3*02:01L HLA-DPA1*01:03-B1*03:01L
  REGION 1..12: note = CONT. FROM ABOVE: HLA-DPA1*03:01-B1*04:02L HLA-DRB1*14:01L HLA-D QA1*01:01-B1*05:01L HLA-DQA1*01-B1*05L HLA-DQA1*05:05-B1*03:19L HLA-DRB1*04:10L HLA-DRB1*12:01L HLA-DRB1*12:02L HLA-DPA1*02:01-B 1*13:01L HLA-DPA1*03:01-B1*105:01L HLA-DRB1*14:54L
  REGION 1..12: note = CONT. FROM ABOVE: HLA-DPA1*01:03-B1*104:01L HLA-DQA1*05:05-B1*03 :01L HLA-DRB1*10:01L HLA-DRB1*16:01L HLA-DRB1*04:08L HLA-DRB1*08 :03L HLA-DRB1*15:03L
  source 1..12: note = Severe acute respiratory syndrome coronavirus 2
IQTIVEVQPQLE

SEQ ID NO: 10679 - protein, 12 aa, Severe acute respiratory syndrome-related coronavirus
  REGION 1..12: note = Table B: HLA-DQA1*05:01-B1*03:01L HLA-DRB1*04:03L HLA-DRB1*04:02L HLA-DQA1*05:01-B1*02:01L HLA-DRB1*12:01L HLA-DQA1*03:01-B1*03:02L HLA-DQA1*05:05-B1*03:01L HLA-DRB1*14:17L
  source 1..12: note = Severe acute respiratory syndrome coronavirus 2
VVQTIEVNSFSG

SEQ ID NO: 10680 - protein, 10 aa, Severe acute respiratory syndrome-related coronavirus
  REGION 1..10: note = Table B: HLA-DQA1*05:01-B1*03:01L HLA-DRB1*04:03L HLA-DRB1*13:03L HLA-DRB1*01:03L HLA-DQA1*01:02-B1*06:02L HLA-DRB4*03:01NL HLA-DRB1*08:77M HLA-DPA1*01:03-B1*03:01M HLA-DPA1*03:01-B1*04:02L HLA-DRB1*03:01L HLA-DRB1*11:02L
  REGION 1..10: note = CONT. FROM ABOVE: HLA-DRB1*14:02L HLA-DQA1*01-B1*05L HLA-DQA1*05 :05-B1*03:19M HLA-DQA1*05:01-B1*02:01M HLA-DRB4*01:01L HLA-DPA1* 01:03-B1*04:01L HLA-DQA1*05:05-B1*03:116L HLA-DPA1*01:03-B1*04:0 2L HLA-DRB1*12:01L HLA-DPA1*03:01-B1*105:01L
  REGION 1..10: note = CONT. FROM ABOVE: HLA-DPA1*01:03-B1*104:01M HLA-DPA1*01:02-B1*04 :01L HLA-DRB1*10:01L HLA-DRB1*16:01M HLA-DQA1*02:01-B1*03:03L HL A-DRB1*15:03L
  source 1..10: note = Severe acute respiratory syndrome coronavirus 2
TIEVNSFSGY

SEQ ID NO: 10681 - protein, 11 aa, Severe acute respiratory syndrome-related coronavirus
  REGION 1..11: note = Table B: HLA-DQA1*05:01-B1*03:01L HLA-DRB1*04:03L HLA-DRB1*01:03L HLA-DRB1*04:02L HLA-DPA1*03:01-B1*04:02L HLA-DQA1*01-B1*05L HLA-DPA1*01:02-B1*04:01L HLA-DRB1*16:01L HLA-DRB1*15:03L
  source 1..11: note = Severe acute respiratory syndrome coronavirus 2
IEVNSFSGYLK

SEQ ID NO: 10682 - protein, 11 aa, Severe acute respiratory syndrome-related coronavirus
  REGION 1..11: note = Table B: HLA-DQA1*05:01-B1*03:01L HLA-DRB1*04:03L HLA-DRB1*13:02L HLA-DRB1*13:03L HLA-DRB1*01:03L HLA-DRB1*04:02L HLA-DRB1*04:05L HLA-DRB4*03:01NL HLA-DRB1*14:01L HLA-DQA1*05:01-B1*02:01L HLA-DPA1*03:01-B1*105:01L
  REGION 1..11: note = CONT. FROM ABOVE: HLA-DQA1*03:01-B1*03:02L HLA-DRB1*14:54L HLA-D RB1*14:17L HLA-DPA1*01:02-B1*04:01L HLA-DRB1*07:01L HLA-DRB1*04: 08L
  source 1..11: note = Severe acute respiratory syndrome coronavirus 2
YLKLTDNVYIK

SEQ ID NO: 10683 - protein, 12 aa, Severe acute respiratory syndrome-related coronavirus
  REGION 1..12: note = Table B: HLA-DQA1*05:01-B1*03:01L HLA-DRB1*13:02L HLA-DRB1*04:04L HLA-DQA1*01:02-B1*06:02L HLA-DRB1*08:04L HLA-DRB1*08:77L HLA-DRB3*02:01L HLA-DPA1*01:03-B1*03:01L HLA-DPA1*03:01-B1*04:02L HLA-DRB1*11:03L HLA-DRB1*11:04L
  REGION 1..12: note = CONT. FROM ABOVE: HLA-DRB1*14:02L HLA-DQA1*01:01-B1*05:01L HLA-D RB1*11:01L HLA-DRB5*01:01L HLA-DQA1*05:05-B1*03:19L HLA-DPA1*01: 03-B1*04:01L HLA-DRB1*09:01L HLA-DPA1*01:03-B1*04:02L HLA-DRB1*1 2:02M HLA-DRB3*01:01L HLA-DQA1*05:05-B1*03:01L HLA-DRB1*07:01L
  REGION 1..12: note = CONT. FROM ABOVE: HLA-DRB1*10:01L HLA-DRB1*08:03L
  source 1..12: note = Severe acute respiratory syndrome coronavirus 2
DNVYIKNADIVE

SEQ ID NO: 10684 - protein, 11 aa, Severe acute respiratory syndrome-related coronavirus
  REGION 1..11: note = Table B: HLA-DQA1*05:01-B1*03:01L HLA-DRB1*04:03L HLA-DRB1*13:03L HLA-DRB1*04:02L HLA-DRB1*04:05L HLA-DQA1*01:02-B1*06:02L HLA-DRB1*01:02L HLA-DRB4*03:01NL HLA-DRB1*14:01L HLA-DRB1*11:04L HLA-DRB1*08:01L HLA-DRB1*12:01L
  REGION 1..11: note = CONT. FROM ABOVE: HLA-DRB1*14:54L HLA-DRB1*14:17L HLA-DPA1*01:02 -B1*04:01L HLA-DRB1*04:08L HLA-DQA1*02:01-B1*03:03L
  source 1..11: note = Severe acute respiratory syndrome coronavirus 2
IVEEAKKVKPT

SEQ ID NO: 10685 - protein, 12 aa, Severe acute respiratory syndrome-related coronavirus
  REGION 1..12: note = Table B: HLA-DQA1*05:01-B1*03:01L HLA-DQA1*01:02-B1*06:02L HLA-DRB1*01:02L
  source 1..12: note = Severe acute respiratory syndrome coronavirus 2
VVNAANVYLKHG

SEQ ID NO: 10686 - protein, 12 aa, Severe acute respiratory syndrome-related coronavirus
  REGION 1..12: note = Table B: HLA-DQA1*05:01-B1*03:01L HLA-DQA1*05:05-B1*03:19L HLA-DQA1*05:05-B1*03:01L
  source 1..12: note = Severe acute respiratory syndrome coronavirus 2
YLKHGGGVAGAL

SEQ ID NO: 10687 - protein, 14 aa, Severe acute respiratory syndrome-related coronavirus
  REGION 1..14: note = Table B: HLA-DQA1*05:01-B1*03:01L HLA-DRB1*01:03L HLA-DRB1*04:05L HLA-DRB1*01:02L HLA-DPA1*01:03-B1*03:01L HLA-DQA1*05:05-B1*03:19L HLA-DRB1*12:01L HLA-DPA1*02:01-B1*13:01L HLA-DPA1*03:01-B1*105:01L
  REGION 1..14: note = CONT. FROM ABOVE: HLA-DQA1*03:01-B1*03:02L HLA-DPA1*01:03-B1*104 :01L HLA-DRB1*04:08L HLA-DQA1*02:01-B1*03:03L
  source 1..14: note = Severe acute respiratory syndrome coronavirus 2
GPLKVGGSCVLSGH

SEQ ID NO: 10688 - protein, 10 aa, Severe acute respiratory syndrome-related coronavirus
  REGION 1..10: note = Table B: HLA-DQA1*05:01-B1*03:01L HLA-DRB1*04:03L HLA-DRB1*13:03L HLA-DRB1*01:03L HLA-DRB1*04:02L HLA-DRB1*01:02L HLA-DRB1*12:01L HLA-DQA1*03:01-B1*03:02L HLA-DRB1*14:17L HLA-DRB1*16:01L HLA-DRB1*04:08L HLA-DQA1*02:01-B1*03:03L
  source 1..10: note = Severe acute respiratory syndrome coronavirus 2
VLSGHNLAKH

SEQ ID NO: 10689 - protein, 16 aa, Severe acute respiratory syndrome-related coronavirus
  REGION 1..16: note = Table B: HLA-DQA1*05:01-B1*03:01L HLA-DRB1*13:02L HLA-DRB1*04:04L HLA-DRB1*04:05L HLA-DPA1*01:03-B1*03:01L HLA-DRB1*14:01L HLA-DRB1*11:04L HLA-DRB1*11:01L HLA-DRB1*12:01L HLA-DRB3*01:01L HLA-DPA1*02:01-B1*13:01L
  REGION 1..16: note = CONT. FROM ABOVE: HLA-DPA1*03:01-B1*105:01L HLA-DQA1*03:01-B1*03 :02L HLA-DPA1*01:03-B1*104:01L HLA-DPA1*01:02-B1*04:01L HLA-DRB1 *07:01L HLA-DRB1*16:01L HLA-DRB1*15:03L
  source 1..16: note = Severe acute respiratory syndrome coronavirus 2
SGHNLAKHCLHVVGPN

SEQ ID NO: 10690 - protein, 10 aa, Severe acute respiratory syndrome-related coronavirus
  REGION 1..10: note = Table B: HLA-DQA1*05:01-B1*03:01M HLA-DRB1*13:03L HLA-DRB1*01:03L HLA-DQA1*01:02-B1*06:02L HLA-DRB4*03:01NL HLA-DRB1*08:77M HLA-DPA1*01:03-B1*03:01L HLA-DPA1*03:01-B1*04:02L HLA-DRB1*03:01L HLA-DRB1*11:02L
  REGION 1..10: note = CONT. FROM ABOVE: HLA-DRB1*14:02L HLA-DQA1*01-B1*05L HLA-DQA1*05 :05-B1*03:19M HLA-DQA1*05:01-B1*02:01L HLA-DRB4*01:01M HLA-DPA1* 01:03-B1*04:01M HLA-DQA1*05:05-B1*03:116L HLA-DPA1*01:03-B1*04:0 2L HLA-DRB1*12:01L HLA-DPA1*01:03-B1*104:01L
  REGION 1..10: note = CONT. FROM ABOVE: HLA-DPA1*01:02-B1*04:01L HLA-DRB1*10:01L HLA-D RB1*16:01L HLA-DQA1*02:01-B1*03:03L HLA-DRB1*15:03L
  source 1..10: note = Severe acute respiratory syndrome coronavirus 2
EDIQLLKSAY

SEQ ID NO: 10691 - protein, 13 aa, Severe acute respiratory syndrome-related coronavirus
  REGION 1..13: note = Table B: HLA-DQA1*05:01-B1*03:01L HLA-DRB1*04:04L HLA-DRB1*04:05L HLA-DRB1*01:02L HLA-DRB1*04:10L HLA-DRB1*12:01L HLA-DPA1*03:01-B1*105:01L HLA-DQA1*03:01-B1*03:02L HLA-DQA1*05:05-B1*03:01L HLA-DQA1*01:03-B1*06:01L
  REGION 1..13: note = CONT. FROM ABOVE: HLA-DQA1*02:01-B1*03:03L HLA-DRB1*15:03L
  source 1..13: note = Severe acute respiratory syndrome coronavirus 2
QHEVLLAPLLSAG

SEQ ID NO: 10692 - protein, 12 aa, Severe acute respiratory syndrome-related coronavirus
  REGION 1..12: note = Table B: HLA-DQA1*05:01-B1*03:01L HLA-DQA1*01:02-B1*06:02L HLA-DQA1*05:05-B1*03:19L HLA-DPA1*03:01-B1*105:01L HLA-DQA1*05:05-B1*03:01L
  source 1..12: note = Severe acute respiratory syndrome coronavirus 2
LSAGIFGADPIH

SEQ ID NO: 10693 - protein, 10 aa, Severe acute respiratory syndrome-related coronavirus
  REGION 1..10: note = Table B: HLA-DQA1*05:01-B1*03:01L HLA-DRB1*04:03L HLA-DRB1*13:02L HLA-DRB1*13:03L HLA-DRB1*01:03L HLA-DRB1*04:02L HLA-DQA1*01:02-B1*06:02L HLA-DRB1*01:01L HLA-DRB1*01:02L HLA-DRB4*03:01NL HLA-DRB3*02:01L HLA-DRB1*14:01L HLA-DRB1*11:04L
  REGION 1..10: note = CONT. FROM ABOVE: HLA-DRB1*14:02L HLA-DRB1*08:01L HLA-DRB5*01:01 L HLA-DQA1*05:05-B1*03:19L HLA-DQA1*05:01-B1*02:01L HLA-DRB1*13: 01L HLA-DPA1*01:03-B1*04:02L HLA-DRB1*12:01L HLA-DRB1*12:02L HLA -DRB3*01:01L HLA-DPA1*03:01-B1*105:01L HLA-DQA1*03:01-B1*03:02M
  REGION 1..10: note = CONT. FROM ABOVE: HLA-DQA1*05:05-B1*03:01L HLA-DRB1*14:17L HLA-D PA1*01:02-B1*04:01L HLA-DRB1*16:01L HLA-DQA1*01:03-B1*06:01L HLA -DRB1*04:08L HLA-DQA1*02:01-B1*03:03L HLA-DRB1*15:03L
  source 1..10: note = Severe acute respiratory syndrome coronavirus 2
FGADPIHSLR

SEQ ID NO: 10694 - protein, 14 aa, Severe acute respiratory syndrome-related coronavirus
  REGION 1..14: note = Table B: HLA-DQA1*05:01-B1*03:01L HLA-DRB1*13:02L HLA-DRB1*04:05L HLA-DPA1*01:03-B1*03:01L HLA-DRB1*14:01L HLA-DRB1*08:01L HLA-DPA1*01:03-B1*04:02L HLA-DPA1*02:01-B1*13:01L HLA-DPA1*01:03-B1*02:01L
  source 1..14: note = Severe acute respiratory syndrome coronavirus 2
DTVRTNVYLAVFDK

SEQ ID NO: 10695 - protein, 13 aa, Severe acute respiratory syndrome-related coronavirus
  REGION 1..13: note = Table B: HLA-DQA1*05:01-B1*03:01L HLA-DRB1*04:05L HLA-DRB1*01:02L HLA-DPA1*01:03-B1*03:01L HLA-DPA1*03:01-B1*04:02L HLA-DRB1*12:01L HLA-DPA1*02:01-B1*13:01L HLA-DQA1*05:05-B1*03:01L
  REGION 1..13: note = CONT. FROM ABOVE: HLA-DRB1*16:01L HLA-DRB1*04:08L HLA-DRB1*15:03 L
  source 1..13: note = Severe acute respiratory syndrome coronavirus 2
VRTNVYLAVFDKN

SEQ ID NO: 10696 - protein, 12 aa, Severe acute respiratory syndrome-related coronavirus
  REGION 1..12: note = Table B: HLA-DQA1*05:01-B1*03:01L HLA-DRB1*13:02L HLA-DRB1*13:03L HLA-DRB1*01:03L HLA-DRB4*03:01NL HLA-DRB1*08:04L HLA-DRB1*08:77L HLA-DRB3*02:01L HLA-DPA1*01:03-B1*03:01L HLA-DRB1*14:01L HLA-DRB1*08:01L HLA-DQA1*05:05-B1*03:19L
  REGION 1..12: note = CONT. FROM ABOVE: HLA-DRB1*09:01L HLA-DPA1*01:03-B1*04:02L HLA-D QA1*05:05-B1*03:01L HLA-DRB1*14:17L HLA-DRB1*07:01L HLA-DRB1*04: 08L
  source 1..12: note = Severe acute respiratory syndrome coronavirus 2
TNVYLAVFDKNL

SEQ ID NO: 10697 - protein, 10 aa, Severe acute respiratory syndrome-related coronavirus
  REGION 1..10: note = Table B: HLA-DQA1*05:01-B1*03:01L HLA-DRB1*04:05L HLA-DQA1*01:02-B1*06:02L HLA-DRB1*08:77L HLA-DPA1*01:03-B1*03:01L HLA-DPA1*03:01-B1*04:02L HLA-DRB1*03:01L HLA-DRB1*11:02L HLA-DRB1*14:02L
  REGION 1..10: note = CONT. FROM ABOVE: HLA-DQA1*01-B1*05L HLA-DQA1*05:05-B1*03:19L HL A-DQA1*05:01-B1*02:01L HLA-DRB4*01:01L HLA-DPA1*01:03-B1*04:01L HLA-DQA1*05:05-B1*03:116L HLA-DPA1*01:03-B1*04:02L HLA-DPA1*02:0 1-B1*13:01L HLA-DPA1*03:01-B1*105:01L HLA-DPA1*01:03-B1*104:01L
  REGION 1..10: note = CONT. FROM ABOVE: HLA-DRB1*10:01L HLA-DRB1*16:01L HLA-DQA1*01:03 -B1*06:01L HLA-DQA1*02:01-B1*03:03L HLA-DRB1*15:03L
  source 1..10: note = Severe acute respiratory syndrome coronavirus 2
YLAVFDKNLY

SEQ ID NO: 10698 - protein, 10 aa, Severe acute respiratory syndrome-related coronavirus
  REGION 1..10: note = Table B: HLA-DQA1*05:01-B1*03:01L HLA-DRB1*04:01L HLA-DRB1*04:03L HLA-DRB1*13:02L HLA-DRB1*13:03M HLA-DRB1*01:03L HLA-DRB1*04:02L HLA-DRB1*04:04L HLA-DQA1*01:02-B1*06:02L HLA-DRB1*01:01L HLA-DRB1*01:02L HLA-DRB4*03:01NL HLA-DRB3*02:01L
  REGION 1..10: note = CONT. FROM ABOVE: HLA-DRB1*14:01L HLA-DRB1*11:04L HLA-DRB1*14:02 L HLA-DRB1*08:01L HLA-DRB1*11:01L HLA-DRB5*01:01L HLA-DPA1*01:03 -B1*04:02L HLA-DRB1*12:01L HLA-DRB1*12:02L HLA-DRB3*01:01L HLA-D PA1*03:01-B1*105:01L HLA-DQA1*03:01-B1*03:02M
  REGION 1..10: note = CONT. FROM ABOVE: HLA-DQA1*05:05-B1*03:01L HLA-DRB1*14:17L HLA-D PA1*01:02-B1*04:01L HLA-DRB1*16:01L HLA-DQA1*01:03-B1*06:01L HLA -DRB1*08:02L HLA-DRB1*08:03L HLA-DQA1*02:01-B1*03:03L HLA-DRB1*1 5:01L
  source 1..10: note = Severe acute respiratory syndrome coronavirus 2
AVFDKNLYDK

SEQ ID NO: 10699 - protein, 13 aa, Severe acute respiratory syndrome-related coronavirus
  REGION 1..13: note = Table B: HLA-DQA1*05:01-B1*03:01L HLA-DRB1*08:01L HLA-DQA1*05:05-B1*03:01L
  source 1..13: note = Severe acute respiratory syndrome coronavirus 2
LYDKLVSSFLEMK

SEQ ID NO: 10700 - protein, 12 aa, Severe acute respiratory syndrome-related coronavirus
  REGION 1..12: note = Table B: HLA-DQA1*05:01-B1*03:01L HLA-DRB1*01:01L HLA-DRB1*11:03L HLA-DRB1*14:02L HLA-DRB1*11:01L HLA-DRB3*01:01L HLA-DQA1*05:05-B1*03:01L HLA-DRB1*08:03L
  source 1..12: note = Severe acute respiratory syndrome coronavirus 2
SFLEMKSEKQVE

SEQ ID NO: 10701 - protein, 12 aa, Severe acute respiratory syndrome-related coronavirus
  REGION 1..12: note = Table B: HLA-DQA1*05:01-B1*03:01L HLA-DRB1*04:05L HLA-DQA1*01:02-B1*06:02L HLA-DRB1*01:02L HLA-DRB1*16:01L HLA-DQA1*01:03-B1*06:01L HLA-DRB1*04:08L
  source 1..12: note = Severe acute respiratory syndrome coronavirus 2
LEMKSEKQVEQK

SEQ ID NO: 10702 - protein, 12 aa, Severe acute respiratory syndrome-related coronavirus
  REGION 1..12: note = Table B: HLA-DQA1*05:01-B1*03:01L HLA-DRB1*13:02L HLA-DRB1*13:03L HLA-DRB1*01:03L HLA-DRB1*04:02L HLA-DRB1*04:05L HLA-DQA1*01:02-B1*06:02L HLA-DRB1*01:02L HLA-DRB1*08:04L HLA-DRB1*14:01L HLA-DRB1*11:04L HLA-DRB1*08:01L
  REGION 1..12: note = CONT. FROM ABOVE: HLA-DQA1*05:01-B1*02:01L HLA-DRB1*12:01L HLA-D RB1*14:54L HLA-DRB1*14:17L HLA-DRB1*16:01L HLA-DRB1*04:08L HLA-D RB1*08:03L HLA-DRB1*15:03L
  source 1..12: note = Severe acute respiratory syndrome coronavirus 2
KPFITESKPSVE

SEQ ID NO: 10703 - protein, 14 aa, Severe acute respiratory syndrome-related coronavirus
  REGION 1..14: note = Table B: HLA-DQA1*05:01-B1*03:01L HLA-DRB1*13:02L HLA-DRB1*01:03L HLA-DPA1*01:03-B1*03:01L HLA-DRB1*14:01L HLA-DRB1*08:01L HLA-DPA1*03:01-B1*105:01L HLA-DPA1*01:03-B1*104:01L HLA-DQA1*05:05-B1*03:01L
  REGION 1..14: note = CONT. FROM ABOVE: HLA-DRB1*04:08L
  source 1..14: note = Severe acute respiratory syndrome coronavirus 2
DDKKIKACVEEVTT

SEQ ID NO: 10704 - protein, 14 aa, Severe acute respiratory syndrome-related coronavirus
  REGION 1..14: note = Table B: HLA-DQA1*05:01-B1*03:01L HLA-DRB1*01:03L HLA-DPA1*02:01-B1*13:01L HLA-DPA1*03:01-B1*105:01L HLA-DQA1*03:01-B1*03:02L HLA-DQA1*05:05-B1*03:01L HLA-DRB1*04:08L
  source 1..14: note = Severe acute respiratory syndrome coronavirus 2
DKKIKACVEEVTTT

SEQ ID NO: 10705 - protein, 12 aa, Severe acute respiratory syndrome-related coronavirus
  REGION 1..12: note = Table B: HLA-DQA1*05:01-B1*03:01L HLA-DQA1*01:02-B1*06:02L HLA-DPA1*01:03-B1*03:01L
  source 1..12: note = Severe acute respiratory syndrome coronavirus 2
TTTLEETKFLTE

SEQ ID NO: 10706 - protein, 11 aa, Severe acute respiratory syndrome-related coronavirus
  REGION 1..11: note = Table B: HLA-DQA1*05:01-B1*03:01L HLA-DRB1*13:02L HLA-DRB1*04:04L HLA-DRB1*01:02L HLA-DRB1*08:77L HLA-DRB1*14:01L HLA-DRB1*11:04L HLA-DRB1*04:10L HLA-DPA1*03:01-B1*105:01L HLA-DQA1*05:05-B1*03:01L HLA-DRB1*10:01L HLA-DRB1*04:08L
  REGION 1..11: note = CONT. FROM ABOVE: HLA-DRB1*15:03L
  source 1..11: note = Severe acute respiratory syndrome coronavirus 2
YIDINGNLHPD

SEQ ID NO: 10707 - protein, 11 aa, Severe acute respiratory syndrome-related coronavirus
  REGION 1..11: note = Table B: HLA-DQA1*05:01-B1*03:01L HLA-DRB1*13:02L HLA-DQA1*01:02-B1*06:02L HLA-DRB1*14:01L HLA-DQA1*01:01-B1*05:01L HLA-DQA1*05:05-B1*03:19L HLA-DRB1*04:10L HLA-DPA1*03:01-B1*105:01L
  REGION 1..11: note = CONT. FROM ABOVE: HLA-DQA1*05:05-B1*03:01L HLA-DQA1*01:03-B1*06: 01L HLA-DRB1*04:08L
  source 1..11: note = Severe acute respiratory syndrome coronavirus 2
IDINGNLHPDS

SEQ ID NO: 10708 - protein, 10 aa, Severe acute respiratory syndrome-related coronavirus
  REGION 1..10: note = Table B: HLA-DQA1*05:01-B1*03:01L HLA-DRB1*01:03L HLA-DQA1*01:02-B1*06:02L HLA-DRB1*14:01L HLA-DQA1*05:05-B1*03:19L HLA-DQA1*05:01-B1*02:01L HLA-DQA1*03:01-B1*03:02L HLA-DPA1*01:02-B1*04:01L
  REGION 1..10: note = CONT. FROM ABOVE: HLA-DRB1*16:01L HLA-DQA1*01:03-B1*06:01L HLA-D QA1*02:01-B1*03:03L
  source 1..10: note = Severe acute respiratory syndrome coronavirus 2
ITFLKKDAPY

SEQ ID NO: 10709 - protein, 13 aa, Severe acute respiratory syndrome-related coronavirus
  REGION 1..13: note = Table B: HLA-DQA1*05:01-B1*03:01L HLA-DQA1*01:02-B1*06:02L HLA-DRB1*01:02L HLA-DRB1*08:04L HLA-DPA1*01:03-B1*03:01L HLA-DRB1*14:01L HLA-DRB1*11:03L HLA-DRB1*14:02L HLA-DQA1*01:01-B1*05:01L HLA-DRB1*08:01L HLA-DRB5*01:01L
  REGION 1..13: note = CONT. FROM ABOVE: HLA-DQA1*05:05-B1*03:19L HLA-DRB1*09:01L HLA-D RB3*01:01L HLA-DPA1*02:01-B1*13:01L HLA-DQA1*05:05-B1*03:01L HLA -DQA1*01:03-B1*06:01L HLA-DRB1*08:03L HLA-DRB1*15:03L
  source 1..13: note = Severe acute respiratory syndrome coronavirus 2
DAPYIVGDVVQEG

SEQ ID NO: 10710 - protein, 11 aa, Severe acute respiratory syndrome-related coronavirus
  REGION 1..11: note = Table B: HLA-DQA1*05:01-B1*03:01L HLA-DRB1*04:03L HLA-DRB1*04:02L HLA-DRB1*04:05L HLA-DQA1*01:02-B1*06:02L HLA-DRB4*03:01NL HLA-DQA1*01-B1*05L HLA-DQA1*05:05-B1*03:19L HLA-DQA1*05:01-B1*02:01L HLA-DRB1*12:01L
  REGION 1..11: note = CONT. FROM ABOVE: HLA-DPA1*03:01-B1*105:01L HLA-DQA1*03:01-B1*03 :02L HLA-DRB1*14:54L HLA-DQA1*05:05-B1*03:01L HLA-DRB1*14:17L HL A-DRB1*16:01L HLA-DQA1*01:03-B1*06:01L HLA-DQA1*02:01-B1*03:03L HLA-DRB1*15:03L
  source 1..11: note = Severe acute respiratory syndrome coronavirus 2
IVGDVVQEGVL

SEQ ID NO: 10711 - protein, 10 aa, Severe acute respiratory syndrome-related coronavirus
  REGION 1..10: note = Table B: HLA-DQA1*05:01-B1*03:01L HLA-DQA1*01:02-B1*06:02L HLA-DQA1*05:05-B1*03:19L HLA-DPA1*03:01-B1*105:01L HLA-DQA1*03:01-B1*03:02L HLA-DQA1*05:05-B1*03:01L HLA-DQA1*01:03-B1*06:01M HLA-DQA1*02:01-B1*03:03L
  source 1..10: note = Severe acute respiratory syndrome coronavirus 2
LTAVVIPTKK

SEQ ID NO: 10712 - protein, 15 aa, Severe acute respiratory syndrome-related coronavirus
  REGION 1..15: note = Table B: HLA-DQA1*05:01-B1*03:01L HLA-DRB1*13:02L HLA-DRB1*04:05L HLA-DQA1*01:02-B1*06:02L HLA-DRB1*01:02L HLA-DPA1*01:03-B1*03:01L HLA-DRB1*12:01L HLA-DPA1*02:01-B1*13:01L HLA-DQA1*05:05-B1*03:01L
  source 1..15: note = Severe acute respiratory syndrome coronavirus 2
IPTKKAGGTTEMLAK

SEQ ID NO: 10713 - protein, 16 aa, Severe acute respiratory syndrome-related coronavirus
  REGION 1..16: note = Table B: HLA-DQA1*05:01-B1*03:01L HLA-DRB1*04:05L HLA-DPA1*03:01-B1*04:02L HLA-DRB1*11:02L HLA-DRB1*11:03L HLA-DRB1*11:04L HLA-DRB1*14:02L HLA-DQA1*05:05-B1*03:19L HLA-DPA1*01:03-B1*04:02L HLA-DRB3*01:01L
  REGION 1..16: note = CONT. FROM ABOVE: HLA-DPA1*02:01-B1*13:01L HLA-DPA1*01:03-B1*02: 01L HLA-DQA1*05:05-B1*03:01L HLA-DPA1*01:02-B1*04:01L HLA-DRB1*0 8:02L HLA-DRB1*08:03L
  source 1..16: note = Severe acute respiratory syndrome coronavirus 2
TTEMLAKALRKVPTDN

SEQ ID NO: 10714 - protein, 10 aa, Severe acute respiratory syndrome-related coronavirus
  REGION 1..10: note = Table B: HLA-DQA1*05:01-B1*03:01L HLA-DRB1*04:01L HLA-DRB1*04:03L HLA-DRB1*13:02L HLA-DRB1*13:03L HLA-DRB1*01:03M HLA-DQA1*01:02-B1*06:02L HLA-DRB1*08:77L HLA-DPA1*01:03-B1*03:01L HLA-DRB1*03:01L HLA-DRB1*14:01L
  REGION 1..10: note = CONT. FROM ABOVE: HLA-DRB1*14:02L HLA-DRB1*11:01L HLA-DQA1*01-B1 *05L HLA-DQA1*05:05-B1*03:19L HLA-DQA1*05:01-B1*02:01L HLA-DPA1* 01:03-B1*04:01L HLA-DQA1*05:05-B1*03:116L HLA-DPA1*01:03-B1*04:0 2L HLA-DRB1*12:01L HLA-DPA1*02:01-B1*13:01L
  REGION 1..10: note = CONT. FROM ABOVE: HLA-DPA1*03:01-B1*105:01L HLA-DPA1*01:03-B1*10 4:01L HLA-DPA1*01:02-B1*04:01L HLA-DRB1*10:01L HLA-DRB1*16:01L H LA-DQA1*01:03-B1*06:01L HLA-DRB1*08:02L HLA-DQA1*02:01-B1*03:03M HLA-DRB1*15:03L
  source 1..10: note = Severe acute respiratory syndrome coronavirus 2
ALRKVPTDNY

SEQ ID NO: 10715 - protein, 11 aa, Severe acute respiratory syndrome-related coronavirus
  REGION 1..11: note = Table B: HLA-DQA1*05:01-B1*03:01L HLA-DRB1*13:03L HLA-DQA1*01:02-B1*06:02L HLA-DQA1*05:05-B1*03:19L HLA-DRB1*12:01L HLA-DQA1*05:05-B1*03:01L HLA-DQA1*01:03-B1*06:01L
  source 1..11: note = Severe acute respiratory syndrome coronavirus 2
DNYITTYPGQG

SEQ ID NO: 10716 - protein, 12 aa, Severe acute respiratory syndrome-related coronavirus
  REGION 1..12: note = Table B: HLA-DQA1*05:01-B1*03:01L HLA-DQA1*01:01-B1*05:01L HLA-DQA1*05:05-B1*03:19L HLA-DRB1*04:10L HLA-DPA1*03:01-B1*105:01L HLA-DQA1*05:05-B1*03:01L
  source 1..12: note = Severe acute respiratory syndrome coronavirus 2
GLNGYTVEEAKT

SEQ ID NO: 10717 - protein, 11 aa, Severe acute respiratory syndrome-related coronavirus
  REGION 1..11: note = Table B: HLA-DQA1*05:01-B1*03:01L HLA-DRB1*12:01L HLA-DPA1*03:01-B1*105:01L
  source 1..11: note = Severe acute respiratory syndrome coronavirus 2
NGYTVEEAKTV

SEQ ID NO: 10718 - protein, 11 aa, Severe acute respiratory syndrome-related coronavirus
  REGION 1..11: note = Table B: HLA-DQA1*05:01-B1*03:01L HLA-DRB1*04:03L HLA-DRB1*01:02L HLA-DPA1*01:02-B1*04:01L
  source 1..11: note = Severe acute respiratory syndrome coronavirus 2
TVEEAKTVLKK

SEQ ID NO: 10719 - protein, 12 aa, Severe acute respiratory syndrome-related coronavirus
  REGION 1..12: note = Table B: HLA-DQA1*05:01-B1*03:01L HLA-DRB1*04:01L HLA-DRB1*13:02L HLA-DRB1*04:04L HLA-DQA1*01:02-B1*06:02L HLA-DRB1*01:01L HLA-DRB1*08:04L HLA-DRB1*08:77L HLA-DPA1*01:03-B1*03:01L HLA-DRB1*14:01L HLA-DRB1*11:03L
  REGION 1..12: note = CONT. FROM ABOVE: HLA-DRB1*11:04L HLA-DRB1*14:02L HLA-DRB1*08:01 L HLA-DQA1*05:05-B1*03:19L HLA-DRB1*09:01L HLA-DRB1*12:02L HLA-D PA1*02:01-B1*13:01L HLA-DRB1*08:03L
  source 1..12: note = Severe acute respiratory syndrome coronavirus 2
SAFYILPSIISN

SEQ ID NO: 10720 - protein, 12 aa, Severe acute respiratory syndrome-related coronavirus
  REGION 1..12: note = Table B: HLA-DQA1*05:01-B1*03:01L HLA-DRB1*01:03L HLA-DRB1*04:05L HLA-DRB4*03:01NL HLA-DQA1*01:01-B1*05:01L HLA-DQA1*01-B1*05L HLA-DQA1*05:05-B1*03:19L HLA-DRB1*04:10L HLA-DRB1*12:01L HLA-DPA1*03:01-B1*105:01L HLA-DRB1*14:54L
  REGION 1..12: note = CONT. FROM ABOVE: HLA-DRB1*16:01L
  source 1..12: note = Severe acute respiratory syndrome coronavirus 2
ILPSIISNEKQE

SEQ ID NO: 10721 - protein, 10 aa, Severe acute respiratory syndrome-related coronavirus
  REGION 1..10: note = Table B: HLA-DQA1*05:01-B1*03:01L HLA-DQA1*01:02-B1*06:02L HLA-DRB1*08:77L HLA-DQA1*05:05-B1*03:19L HLA-DQA1*05:01-B1*02:01L HLA-DRB4*01:01L HLA-DPA1*01:03-B1*04:01L HLA-DQA1*02:01-B1*03:03L
  source 1..10: note = Severe acute respiratory syndrome coronavirus 2
KQEILGTVSW

SEQ ID NO: 10722 - protein, 10 aa, Severe acute respiratory syndrome-related coronavirus
  REGION 1..10: note = Table B: HLA-DQA1*05:01-B1*03:01L HLA-DRB1*04:03L HLA-DQA1*01:02-B1*06:02L HLA-DRB1*01:02L HLA-DQA1*05:01-B1*02:01L HLA-DRB1*12:01L HLA-DPA1*03:01-B1*105:01L HLA-DQA1*03:01-B1*03:02L
  REGION 1..10: note = CONT. FROM ABOVE: HLA-DQA1*05:05-B1*03:01L HLA-DPA1*01:02-B1*04: 01L HLA-DRB1*16:01L HLA-DQA1*01:03-B1*06:01L HLA-DQA1*02:01-B1*0 3:03L HLA-DRB1*15:03L
  source 1..10: note = Severe acute respiratory syndrome coronavirus 2
ILGTVSWNLR

SEQ ID NO: 10723 - protein, 13 aa, Severe acute respiratory syndrome-related coronavirus
  REGION 1..13: note = Table B: HLA-DQA1*05:01-B1*03:01L HLA-DRB1*01:03L HLA-DQA1*01:01-B1*05:01L HLA-DPA1*02:01-B1*13:01L HLA-DRB1*04:08L
  source 1..13: note = Severe acute respiratory syndrome coronavirus 2
NLREMLAHAEETR

SEQ ID NO: 10724 - protein, 11 aa, Severe acute respiratory syndrome-related coronavirus
  REGION 1..11: note = Table B: HLA-DQA1*05:01-B1*03:01L HLA-DRB1*16:01L
  source 1..11: note = Severe acute respiratory syndrome coronavirus 2
EMLAHAEETRK

SEQ ID NO: 10725 - protein, 10 aa, Severe acute respiratory syndrome-related coronavirus
  REGION 1..10: note = Table B: HLA-DQA1*05:01-B1*03:01L HLA-DRB1*01:03L HLA-DRB1*01:02L HLA-DRB1*12:01L HLA-DQA1*03:01-B1*03:02L HLA-DPA1*01:02-B1*04:01L HLA-DRB1*16:01L HLA-DQA1*01:03-B1*06:01L HLA-DQA1*02:01-B1*03:03L
  source 1..10: note = Severe acute respiratory syndrome coronavirus 2
IVSTIQRKYK

SEQ ID NO: 10726 - protein, 15 aa, Severe acute respiratory syndrome-related coronavirus
  REGION 1..15: note = Table B: HLA-DQA1*05:01-B1*03:01L HLA-DRB1*04:01L HLA-DRB1*04:03L HLA-DRB1*04:02L HLA-DRB1*01:01L HLA-DRB1*08:04L HLA-DPA1*01:03-B1*03:01L HLA-DQA1*05:05-B1*03:19L HLA-DPA1*01:03-B1*04:02L HLA-DRB3*01:01L
  REGION 1..15: note = CONT. FROM ABOVE: HLA-DQA1*05:05-B1*03:01L HLA-DRB1*10:01L
  source 1..15: note = Severe acute respiratory syndrome coronavirus 2
IQRKYKGIKIQEGVV

SEQ ID NO: 10727 - protein, 11 aa, Severe acute respiratory syndrome-related coronavirus
  REGION 1..11: note = Table B: HLA-DQA1*05:01-B1*03:01L HLA-DRB1*04:03L HLA-DRB1*13:02L HLA-DRB1*13:03L HLA-DRB1*01:03L HLA-DRB1*04:02L HLA-DRB1*04:05L HLA-DQA1*01:02-B1*06:02L HLA-DRB1*01:02L HLA-DRB4*03:01NL HLA-DPA1*01:03-B1*03:01L
  REGION 1..11: note = CONT. FROM ABOVE: HLA-DQA1*01:01-B1*05:01L HLA-DRB1*08:01L HLA-D RB5*01:01L HLA-DQA1*01-B1*05L HLA-DQA1*05:05-B1*03:19L HLA-DQA1* 05:01-B1*02:01L HLA-DRB1*04:10L HLA-DPA1*01:03-B1*04:02L HLA-DRB 1*12:01L HLA-DPA1*03:01-B1*105:01L HLA-DRB1*14:54L
  REGION 1..11: note = CONT. FROM ABOVE: HLA-DQA1*05:05-B1*03:01L HLA-DRB1*14:17L HLA-D PA1*01:02-B1*04:01L HLA-DRB1*16:01L HLA-DRB1*04:08L HLA-DRB1*15: 03L
  source 1..11: note = Severe acute respiratory syndrome coronavirus 2
IQEGVVDYGAR

SEQ ID NO: 10728 - protein, 10 aa, Severe acute respiratory syndrome-related coronavirus
  REGION 1..10: note = Table B: HLA-DQA1*05:01-B1*03:01L HLA-DQA1*01:02-B1*06:02L HLA-DPA1*01:03-B1*03:01L HLA-DRB1*03:01L HLA-DRB1*11:02L HLA-DRB1*14:02L HLA-DQA1*01-B1*05L HLA-DQA1*05:05-B1*03:19L HLA-DQA1*05:01-B1*02:01L HLA-DPA1*01:03-B1*04:01L
  REGION 1..10: note = CONT. FROM ABOVE: HLA-DPA1*02:01-B1*13:01L HLA-DPA1*03:01-B1*105 :01L HLA-DPA1*01:03-B1*104:01L HLA-DRB1*16:01L HLA-DQA1*01:03-B1 *06:01L HLA-DQA1*02:01-B1*03:03L HLA-DRB1*15:03L
  source 1..10: note = Severe acute respiratory syndrome coronavirus 2
VVDYGARFYF

SEQ ID NO: 10729 - protein, 11 aa, Severe acute respiratory syndrome-related coronavirus
  REGION 1..11: note = Table B: HLA-DQA1*05:01-B1*03:01L HLA-DRB1*13:03L HLA-DRB1*01:03L HLA-DRB1*04:02L HLA-DRB3*02:01L HLA-DPA1*03:01-B1*04:02L HLA-DRB1*14:01L HLA-DQA1*05:01-B1*02:01L HLA-DRB1*12:01L
  REGION 1..11: note = CONT. FROM ABOVE: HLA-DQA1*03:01-B1*03:02L HLA-DQA1*05:05-B1*03: 01L HLA-DRB1*14:17L HLA-DRB1*04:08L
  source 1..11: note = Severe acute respiratory syndrome coronavirus 2
FYFYTSKTTVA

SEQ ID NO: 10730 - protein, 12 aa, Severe acute respiratory syndrome-related coronavirus
  REGION 1..12: note = Table B: HLA-DQA1*05:01-B1*03:01L HLA-DRB1*01:02L HLA-DPA1*03:01-B1*105:01L HLA-DPA1*01:02-B1*04:01L HLA-DQA1*01:03-B1*06:01L HLA-DRB1*15:03L
  source 1..12: note = Severe acute respiratory syndrome coronavirus 2
LVTMPLGYVTHG

SEQ ID NO: 10731 - protein, 12 aa, Severe acute respiratory syndrome-related coronavirus
  REGION 1..12: note = Table B: HLA-DQA1*05:01-B1*03:01L HLA-DRB1*01:03L HLA-DRB1*04:05L HLA-DQA1*01:02-B1*06:02L HLA-DQA1*01:01-B1*05:01L HLA-DQA1*05:05-B1*03:19L HLA-DRB1*12:01L HLA-DQA1*05:05-B1*03:01L
  source 1..12: note = Severe acute respiratory syndrome coronavirus 2
YVTHGLNLEEAA

SEQ ID NO: 10732 - protein, 12 aa, Severe acute respiratory syndrome-related coronavirus
  REGION 1..12: note = Table B: HLA-DQA1*05:01-B1*03:01L HLA-DRB1*04:03L HLA-DQA1*01:02-B1*06:02L HLA-DQA1*01:01-B1*05:01L HLA-DPA1*03:01-B1*105:01L HLA-DQA1*05:05-B1*03:01L
  source 1..12: note = Severe acute respiratory syndrome coronavirus 2
VTHGLNLEEAAR

SEQ ID NO: 10733 - protein, 10 aa, Severe acute respiratory syndrome-related coronavirus
  REGION 1..10: note = Table B: HLA-DQA1*05:01-B1*03:01L HLA-DRB1*04:03L HLA-DRB1*13:02L HLA-DRB1*13:03L HLA-DRB1*01:03L HLA-DQA1*01:02-B1*06:02L HLA-DRB4*03:01NL HLA-DRB1*08:77L HLA-DPA1*01:03-B1*03:01L HLA-DPA1*03:01-B1*04:02L
  REGION 1..10: note = CONT. FROM ABOVE: HLA-DRB1*03:01L HLA-DRB1*14:01L HLA-DRB1*11:02 L HLA-DRB1*14:02L HLA-DRB1*11:01L HLA-DQA1*01-B1*05L HLA-DQA1*05 :05-B1*03:19M HLA-DQA1*05:01-B1*02:01M HLA-DRB4*01:01L HLA-DPA1* 01:03-B1*04:01L HLA-DQA1*05:05-B1*03:116L
  REGION 1..10: note = CONT. FROM ABOVE: HLA-DPA1*01:03-B1*04:02L HLA-DRB1*12:01L HLA-D PA1*02:01-B1*13:01L HLA-DPA1*03:01-B1*105:01L HLA-DPA1*01:03-B1* 104:01L HLA-DPA1*01:02-B1*04:01L HLA-DRB1*10:01L HLA-DRB1*16:01L HLA-DQA1*01:03-B1*06:01L HLA-DRB1*08:02L
  REGION 1..10: note = CONT. FROM ABOVE: HLA-DQA1*02:01-B1*03:03L HLA-DRB1*15:03L
  source 1..10: note = Severe acute respiratory syndrome coronavirus 2
GLNLEEAARY

SEQ ID NO: 10734 - protein, 10 aa, Severe acute respiratory syndrome-related coronavirus
  REGION 1..10: note = Table B: HLA-DQA1*05:01-B1*03:01L HLA-DRB1*04:03L HLA-DRB1*13:03L HLA-DRB1*01:03L HLA-DRB1*04:02L HLA-DRB1*01:02L HLA-DRB4*03:01NL HLA-DRB1*08:04L HLA-DRB1*14:01L HLA-DRB1*08:01L HLA-DRB1*12:01L HLA-DQA1*03:01-B1*03:02L HLA-DRB1*14:54L
  REGION 1..10: note = CONT. FROM ABOVE: HLA-DRB1*14:17L HLA-DPA1*01:02-B1*04:01L HLA-D RB1*16:01L HLA-DRB1*04:08L HLA-DQA1*02:01-B1*03:03L
  source 1..10: note = Severe acute respiratory syndrome coronavirus 2
YMRSLKVPAT

SEQ ID NO: 10735 - protein, 13 aa, Severe acute respiratory syndrome-related coronavirus
  REGION 1..13: note = Table B: HLA-DQA1*05:01-B1*03:01L HLA-DRB1*04:02L HLA-DQA1*01:02-B1*06:02L HLA-DQA1*05:05-B1*03:01L HLA-DQA1*01:03-B1*06:01L
  source 1..13: note = Severe acute respiratory syndrome coronavirus 2
LKVPATVSVSSPD

SEQ ID NO: 10736 - protein, 10 aa, Severe acute respiratory syndrome-related coronavirus
  REGION 1..10: note = Table B: HLA-DQA1*05:01-B1*03:01L HLA-DRB1*13:03M HLA-DRB1*01:03L HLA-DQA1*01:02-B1*06:02M HLA-DRB4*03:01NL HLA-DRB1*08:77L HLA-DPA1*01:03-B1*03:01L HLA-DRB1*03:01L HLA-DRB1*14:01L HLA-DRB1*11:02L HLA-DRB1*14:02L
  REGION 1..10: note = CONT. FROM ABOVE: HLA-DQA1*01-B1*05L HLA-DQA1*05:05-B1*03:19L HL A-DQA1*05:01-B1*02:01L HLA-DRB4*01:01L HLA-DPA1*01:03-B1*04:01L HLA-DQA1*05:05-B1*03:116L HLA-DPA1*01:03-B1*04:02L HLA-DRB1*12:0 1L HLA-DPA1*02:01-B1*13:01L HLA-DPA1*03:01-B1*105:01L
  REGION 1..10: note = CONT. FROM ABOVE: HLA-DPA1*01:03-B1*104:01L HLA-DRB1*10:01L HLA- DRB1*16:01L HLA-DRB1*08:02L HLA-DQA1*02:01-B1*03:03L HLA-DRB1*15 :03L
  source 1..10: note = Severe acute respiratory syndrome coronavirus 2
VSSPDAVTAY

SEQ ID NO: 10737 - protein, 11 aa, Severe acute respiratory syndrome-related coronavirus
  REGION 1..11: note = Table B: HLA-DQA1*05:01-B1*03:01L HLA-DRB1*04:03L HLA-DRB1*13:03M HLA-DRB1*01:03L HLA-DRB4*03:01NL HLA-DRB1*08:77L HLA-DRB1*03:01L HLA-DRB1*14:01L HLA-DRB1*14:02L HLA-DQA1*01-B1*05L HLA-DPA1*01:03-B1*04:01L
  REGION 1..11: note = CONT. FROM ABOVE: HLA-DQA1*05:05-B1*03:116L HLA-DRB1*12:01L HLA- DPA1*02:01-B1*13:01L HLA-DPA1*03:01-B1*105:01L HLA-DPA1*01:02-B1 *04:01L HLA-DRB1*10:01L HLA-DQA1*02:01-B1*03:03L HLA-DRB1*15:03L
  source 1..11: note = Severe acute respiratory syndrome coronavirus 2
SPDAVTAYNGY

SEQ ID NO: 10738 - protein, 14 aa, Severe acute respiratory syndrome-related coronavirus
  REGION 1..14: note = Table B: HLA-DQA1*05:01-B1*03:01L HLA-DRB1*13:02L HLA-DRB1*13:03L HLA-DRB1*01:03L HLA-DRB1*04:02L HLA-DRB1*04:04L HLA-DRB1*04:05L HLA-DQA1*01:02-B1*06:02L HLA-DRB1*01:02L HLA-DRB4*03:01NL HLA-DRB1*08:04L HLA-DRB1*08:77L HLA-DRB3*02:01L
  REGION 1..14: note = CONT. FROM ABOVE: HLA-DPA1*01:03-B1*03:01L HLA-DPA1*03:01-B1*04: 02L HLA-DRB1*14:01L HLA-DRB1*11:03L HLA-DQA1*01:01-B1*05:01L HLA -DRB1*08:01L HLA-DRB1*04:10L HLA-DRB1*12:01L HLA-DRB1*12:02L HLA -DRB3*01:01L HLA-DPA1*03:01-B1*105:01L HLA-DRB1*14:54L
  REGION 1..14: note = CONT. FROM ABOVE: HLA-DQA1*05:05-B1*03:01L HLA-DPA1*01:02-B1*04: 01L HLA-DRB1*07:01L HLA-DRB1*10:01L HLA-DQA1*01:03-B1*06:01L HLA -DRB1*04:08L HLA-DRB1*08:03L HLA-DQA1*02:01-B1*03:03L HLA-DRB1*1 5:03L
  source 1..14: note = Severe acute respiratory syndrome coronavirus 2
TPEEHFIETISLAG

SEQ ID NO: 10739 - protein, 10 aa, Severe acute respiratory syndrome-related coronavirus
  REGION 1..10: note = Table B: HLA-DQA1*05:01-B1*03:01L HLA-DRB1*08:77L HLA-DQA1*05:05-B1*03:19L HLA-DRB4*01:01L HLA-DPA1*01:03-B1*04:01L
  source 1..10: note = Severe acute respiratory syndrome coronavirus 2
IETISLAGSY

SEQ ID NO: 10740 - protein, 12 aa, Severe acute respiratory syndrome-related coronavirus
  REGION 1..12: note = Table B: HLA-DQA1*05:01-B1*03:01L HLA-DRB1*04:05L HLA-DRB1*01:02L HLA-DRB1*12:01L HLA-DQA1*05:05-B1*03:01L
  source 1..12: note = Severe acute respiratory syndrome coronavirus 2
TISLAGSYKDWS

SEQ ID NO: 10741 - protein, 12 aa, Severe acute respiratory syndrome-related coronavirus
  REGION 1..12: note = Table B: HLA-DQA1*05:01-B1*03:01L HLA-DRB1*01:02L HLA-DPA1*01:03-B1*03:01L HLA-DRB1*14:01L HLA-DRB1*12:01L HLA-DQA1*01:03-B1*06:01L
  source 1..12: note = Severe acute respiratory syndrome coronavirus 2
YSGQSTQLGIEF

SEQ ID NO: 10742 - protein, 13 aa, Severe acute respiratory syndrome-related coronavirus
  REGION 1..13: note = Table B: HLA-DQA1*05:01-B1*03:01L HLA-DRB1*04:03L HLA-DRB1*12:01L
  source 1..13: note = Severe acute respiratory syndrome coronavirus 2
SGQSTQLGIEFLK

SEQ ID NO: 10743 - protein, 14 aa, Severe acute respiratory syndrome-related coronavirus
  REGION 1..14: note = Table B: HLA-DQA1*05:01-B1*03:01L HLA-DRB1*04:05L HLA-DRB1*14:01L HLA-DRB1*12:01L HLA-DRB3*01:01L HLA-DPA1*03:01-B1*105:01L HLA-DPA1*01:02-B1*04:01L HLA-DRB1*15:03L
  source 1..14: note = Severe acute respiratory syndrome coronavirus 2
STQLGIEFLKRGDK

SEQ ID NO: 10744 - protein, 18 aa, Severe acute respiratory syndrome-related coronavirus
  REGION 1..18: note = Table B: HLA-DQA1*05:01-B1*03:01L HLA-DRB1*04:03L HLA-DPA1*01:03-B1*03:01L HLA-DRB1*08:01L HLA-DQA1*05:01-B1*02:01L HLA-DRB3*01:01L HLA-DPA1*03:01-B1*105:01L HLA-DPA1*01:03-B1*104:01L
  REGION 1..18: note = CONT. FROM ABOVE: HLA-DRB1*07:01L HLA-DQA1*01:03-B1*06:01L HLA-D RB1*04:08L
  source 1..18: note = Severe acute respiratory syndrome coronavirus 2
IEFLKRGDKSVYYTSNPT

SEQ ID NO: 10745 - protein, 13 aa, Severe acute respiratory syndrome-related coronavirus
  REGION 1..13: note = Table B: HLA-DQA1*05:01-B1*03:01L HLA-DRB1*13:02L HLA-DRB1*04:04L HLA-DRB1*01:02L HLA-DRB1*14:01L HLA-DRB1*11:04L HLA-DRB1*12:02L HLA-DRB1*04:08L HLA-DRB1*15:03L
  source 1..13: note = Severe acute respiratory syndrome coronavirus 2
GDKSVYYTSNPTT

SEQ ID NO: 10746 - protein, 13 aa, Severe acute respiratory syndrome-related coronavirus
  REGION 1..13: note = Table B: HLA-DQA1*05:01-B1*03:01L HLA-DRB1*13:02L HLA-DRB1*13:03L HLA-DRB1*01:03L HLA-DRB1*04:02L HLA-DRB1*04:04L HLA-DRB1*04:05L HLA-DQA1*01:02-B1*06:02L HLA-DRB1*01:02L HLA-DRB4*03:01NL HLA-DRB1*08:04L HLA-DRB1*08:77L HLA-DRB3*02:01L
  REGION 1..13: note = CONT. FROM ABOVE: HLA-DPA1*01:03-B1*03:01L HLA-DPA1*03:01-B1*04: 02L HLA-DRB1*03:01L HLA-DRB1*14:01L HLA-DRB1*11:03L HLA-DRB1*11: 04L HLA-DRB1*14:02L HLA-DQA1*01:01-B1*05:01L HLA-DRB1*08:01L HLA -DRB1*11:01L HLA-DRB5*01:01L HLA-DQA1*05:05-B1*03:19L
  REGION 1..13: note = CONT. FROM ABOVE: HLA-DRB1*13:01L HLA-DRB4*01:01L HLA-DPA1*01:03 -B1*04:01L HLA-DRB1*04:10L HLA-DRB1*09:01L HLA-DPA1*01:03-B1*04: 02L HLA-DRB1*12:01L HLA-DRB1*12:02L HLA-DRB3*01:01L HLA-DPA1*02: 01-B1*13:01L HLA-DPA1*03:01-B1*105:01L HLA-DRB1*14:54M
  REGION 1..13: note = CONT. FROM ABOVE: HLA-DQA1*05:05-B1*03:01L HLA-DRB1*14:17L HLA-D PA1*01:02-B1*04:01L HLA-DRB1*07:01L HLA-DRB1*10:01L HLA-DRB1*16: 01M HLA-DQA1*01:03-B1*06:01L HLA-DRB1*04:08L HLA-DRB1*08:03L HLA -DQA1*02:01-B1*03:03L HLA-DRB1*15:03L
  source 1..13: note = Severe acute respiratory syndrome coronavirus 2
NPTTFHLDGEVIT

SEQ ID NO: 10747 - protein, 12 aa, Severe acute respiratory syndrome-related coronavirus
  REGION 1..12: note = Table B: HLA-DQA1*05:01-B1*03:01L HLA-DRB1*13:02L HLA-DRB3*02:01L HLA-DPA1*03:01-B1*04:02L HLA-DRB1*11:03L HLA-DRB1*11:04L HLA-DRB1*12:02L HLA-DPA1*02:01-B1*13:01L HLA-DRB1*10:01L HLA-DRB1*08:03L
  source 1..12: note = Severe acute respiratory syndrome coronavirus 2
DGEVITFDNLKT

SEQ ID NO: 10748 - protein, 14 aa, Severe acute respiratory syndrome-related coronavirus
  REGION 1..14: note = Table B: HLA-DQA1*05:01-B1*03:01L HLA-DRB1*13:02L HLA-DRB1*04:04L HLA-DRB1*01:01L HLA-DRB1*14:01L HLA-DRB1*11:04L HLA-DRB1*08:01L HLA-DRB1*11:01L HLA-DRB3*01:01L HLA-DPA1*03:01-B1*105:01L HLA-DRB1*07:01L
  REGION 1..14: note = CONT. FROM ABOVE: HLA-DQA1*02:01-B1*03:03L
  source 1..14: note = Severe acute respiratory syndrome coronavirus 2
LKTLLSLREVRTIK

SEQ ID NO: 10749 - protein, 12 aa, Severe acute respiratory syndrome-related coronavirus
  REGION 1..12: note = Table B: HLA-DQA1*05:01-B1*03:01L HLA-DRB1*04:03L HLA-DQA1*05:05-B1*03:19L HLA-DPA1*03:01-B1*105:01L HLA-DQA1*05:05-B1*03:01L HLA-DQA1*02:01-B1*03:03L
  source 1..12: note = Severe acute respiratory syndrome coronavirus 2
EVRTIKVFTTVD

SEQ ID NO: 10750 - protein, 12 aa, Severe acute respiratory syndrome-related coronavirus
  REGION 1..12: note = Table B: HLA-DQA1*05:01-B1*03:01L HLA-DRB1*13:03L HLA-DRB1*01:03L HLA-DRB1*04:05L HLA-DQA1*01:02-B1*06:02L HLA-DRB1*01:02L HLA-DRB3*02:01L HLA-DPA1*01:03-B1*03:01L HLA-DPA1*03:01-B1*04:02L HLA-DRB1*14:01L
  REGION 1..12: note = CONT. FROM ABOVE: HLA-DQA1*01:01-B1*05:01L HLA-DQA1*05:05-B1*03: 19L HLA-DPA1*01:03-B1*04:01L HLA-DRB1*04:10L HLA-DPA1*01:03-B1*0 4:02L HLA-DRB1*12:01L HLA-DPA1*02:01-B1*13:01L HLA-DPA1*03:01-B1 *105:01L HLA-DPA1*01:03-B1*104:01L HLA-DQA1*05:05-B1*03:01L
  REGION 1..12: note = CONT. FROM ABOVE: HLA-DPA1*01:02-B1*04:01L HLA-DRB1*16:01L HLA-D RB1*04:08L HLA-DRB1*15:03L
  source 1..12: note = Severe acute respiratory syndrome coronavirus 2
TIKVFTTVDNIN

SEQ ID NO: 10751 - protein, 11 aa, Severe acute respiratory syndrome-related coronavirus
  REGION 1..11: note = Table B: HLA-DQA1*05:01-B1*03:01L HLA-DRB1*08:77L HLA-DRB3*02:01L HLA-DPA1*03:01-B1*04:02L HLA-DRB1*14:02L HLA-DRB1*09:01L HLA-DRB1*12:01L
  source 1..11: note = Severe acute respiratory syndrome coronavirus 2
KVFTTVDNINL

SEQ ID NO: 10752 - protein, 11 aa, Severe acute respiratory syndrome-related coronavirus
  REGION 1..11: note = Table B: HLA-DQA1*05:01-B1*03:01L HLA-DRB1*13:02L HLA-DRB1*04:05L HLA-DQA1*01:02-B1*06:02L HLA-DRB1*01:02L HLA-DPA1*01:03-B1*03:01L HLA-DRB1*14:01L HLA-DRB1*14:02L HLA-DQA1*01:01-B1*05:01L HLA-DQA1*05:05-B1*03:19L
  REGION 1..11: note = CONT. FROM ABOVE: HLA-DPA1*01:03-B1*04:02L HLA-DRB1*12:01L HLA-D PA1*03:01-B1*105:01L HLA-DQA1*05:05-B1*03:01L HLA-DPA1*01:02-B1* 04:01L HLA-DRB1*15:03L
  source 1..11: note = Severe acute respiratory syndrome coronavirus 2
TTVDNINLHTQ

SEQ ID NO: 10753 - protein, 11 aa, Severe acute respiratory syndrome-related coronavirus
  REGION 1..11: note = Table B: HLA-DQA1*05:01-B1*03:01L HLA-DRB1*13:02L HLA-DRB1*13:03L HLA-DRB1*01:03L HLA-DRB1*04:04L HLA-DRB1*04:05L HLA-DQA1*01:02-B1*06:02L HLA-DRB1*01:02L HLA-DRB4*03:01NL HLA-DPA1*01:03-B1*03:01L HLA-DPA1*03:01-B1*04:02L
  REGION 1..11: note = CONT. FROM ABOVE: HLA-DRB1*14:01L HLA-DQA1*01:01-B1*05:01L HLA-D RB1*04:10L HLA-DRB1*12:01L HLA-DPA1*02:01-B1*13:01L HLA-DPA1*03: 01-B1*105:01L HLA-DRB1*14:54L HLA-DQA1*05:05-B1*03:01L HLA-DPA1* 01:02-B1*04:01L HLA-DRB1*16:01L HLA-DQA1*01:03-B1*06:01L
  REGION 1..11: note = CONT. FROM ABOVE: HLA-DRB1*04:08L HLA-DRB1*15:03L
  source 1..11: note = Severe acute respiratory syndrome coronavirus 2
INLHTQVVDMS

SEQ ID NO: 10754 - protein, 11 aa, Severe acute respiratory syndrome-related coronavirus
  REGION 1..11: note = Table B: HLA-DQA1*05:01-B1*03:01L HLA-DRB1*04:01L HLA-DRB1*13:02L HLA-DRB1*13:03L HLA-DRB1*04:02L HLA-DRB1*04:04L HLA-DRB1*04:05L HLA-DQA1*01:02-B1*06:02L HLA-DRB1*01:02L HLA-DRB4*03:01NL HLA-DRB1*08:04L HLA-DRB1*08:77L HLA-DRB3*02:01L
  REGION 1..11: note = CONT. FROM ABOVE: HLA-DPA1*01:03-B1*03:01L HLA-DPA1*03:01-B1*04: 02L HLA-DRB1*14:01L HLA-DRB1*11:03L HLA-DRB1*11:04L HLA-DRB1*14: 02L HLA-DQA1*01:01-B1*05:01L HLA-DQA1*05:05-B1*03:19L HLA-DPA1*0 1:03-B1*04:01L HLA-DRB1*04:10L HLA-DPA1*01:03-B1*04:02L
  REGION 1..11: note = CONT. FROM ABOVE: HLA-DRB1*12:01L HLA-DPA1*02:01-B1*13:01L HLA-D RB1*14:54L HLA-DPA1*01:03-B1*104:01L HLA-DQA1*05:05-B1*03:01L HL A-DRB1*14:17L HLA-DRB1*10:01L HLA-DRB1*04:08L
  source 1..11: note = Severe acute respiratory syndrome coronavirus 2
LHTQVVDMSMT

SEQ ID NO: 10755 - protein, 11 aa, Severe acute respiratory syndrome-related coronavirus
  REGION 1..11: note = Table B: HLA-DQA1*05:01-B1*03:01L HLA-DRB1*13:02L HLA-DRB1*01:03L HLA-DRB4*03:01NL HLA-DPA1*03:01-B1*04:02L HLA-DRB1*14:01L HLA-DRB1*14:02L HLA-DQA1*05:05-B1*03:116L HLA-DPA1*01:03-B1*04:02L HLA-DRB1*12:01L
  REGION 1..11: note = CONT. FROM ABOVE: HLA-DPA1*02:01-B1*13:01L HLA-DPA1*03:01-B1*105 :01L HLA-DRB1*08:02L HLA-DRB1*15:03L
  source 1..11: note = Severe acute respiratory syndrome coronavirus 2
HTQVVDMSMTY

SEQ ID NO: 10756 - protein, 14 aa, Severe acute respiratory syndrome-related coronavirus
  REGION 1..14: note = Table B: HLA-DQA1*05:01-B1*03:01L HLA-DRB1*04:03L HLA-DQA1*01:02-B1*06:02L HLA-DRB1*01:02L HLA-DRB1*14:01L HLA-DPA1*03:01-B1*105:01L HLA-DQA1*05:05-B1*03:01L HLA-DRB1*07:01L HLA-DQA1*01:03-B1*06:01L
  source 1..14: note = Severe acute respiratory syndrome coronavirus 2
VVDMSMTYGQQFGP

SEQ ID NO: 10757 - protein, 12 aa, Severe acute respiratory syndrome-related coronavirus
  REGION 1..12: note = Table B: HLA-DQA1*05:01-B1*03:01L HLA-DRB1*04:03L HLA-DQA1*05:05-B1*03:19L HLA-DRB1*12:01L HLA-DQA1*03:01-B1*03:02L HLA-DQA1*05:05-B1*03:01L HLA-DQA1*01:03-B1*06:01L HLA-DQA1*02:01-B1*03:03L
  source 1..12: note = Severe acute respiratory syndrome coronavirus 2
MSMTYGQQFGPT

SEQ ID NO: 10758 - protein, 15 aa, Severe acute respiratory syndrome-related coronavirus
  REGION 1..15: note = Table B: HLA-DQA1*05:01-B1*03:01L HLA-DRB1*04:03L HLA-DRB1*04:05L HLA-DQA1*01:02-B1*06:02L HLA-DQA1*05:05-B1*03:19L HLA-DPA1*02:01-B1*13:01L HLA-DPA1*03:01-B1*105:01L HLA-DQA1*05:05-B1*03:01L
  REGION 1..15: note = CONT. FROM ABOVE: HLA-DRB1*16:01L HLA-DQA1*01:03-B1*06:01L
  source 1..15: note = Severe acute respiratory syndrome coronavirus 2
GQQFGPTYLDGADVT

SEQ ID NO: 10759 - protein, 11 aa, Severe acute respiratory syndrome-related coronavirus
  REGION 1..11: note = Table B: HLA-DQA1*05:01-B1*03:01L HLA-DQA1*01:02-B1*06:02L HLA-DQA1*05:05-B1*03:19L HLA-DQA1*05:05-B1*03:01L
  source 1..11: note = Severe acute respiratory syndrome coronavirus 2
LDGADVTKIKP

SEQ ID NO: 10760 - protein, 11 aa, Severe acute respiratory syndrome-related coronavirus
  REGION 1..11: note = Table B: HLA-DQA1*05:01-B1*03:01L
  source 1..11: note = Severe acute respiratory syndrome coronavirus 2
DGADVTKIKPH

SEQ ID NO: 10761 - protein, 12 aa, Severe acute respiratory syndrome-related coronavirus
  REGION 1..12: note = Table B: HLA-DQA1*05:01-B1*03:01L HLA-DRB1*04:03L HLA-DRB1*01:03L HLA-DQA1*01:02-B1*06:02L HLA-DRB1*01:02L HLA-DRB1*14:17L HLA-DRB1*04:08L
  source 1..12: note = Severe acute respiratory syndrome coronavirus 2
ADVTKIKPHNSH

SEQ ID NO: 10762 - protein, 12 aa, Severe acute respiratory syndrome-related coronavirus
  REGION 1..12: note = Table B: HLA-DQA1*05:01-B1*03:01L HLA-DRB1*04:03L HLA-DRB1*01:03L HLA-DRB1*04:02L HLA-DRB1*04:04L HLA-DRB1*04:05L HLA-DQA1*01:02-B1*06:02L HLA-DRB1*01:02L HLA-DRB1*14:01L HLA-DRB1*08:01L HLA-DRB1*04:10L HLA-DRB1*12:01L
  REGION 1..12: note = CONT. FROM ABOVE: HLA-DQA1*03:01-B1*03:02L HLA-DRB1*14:17L HLA-D RB1*16:01L HLA-DRB1*04:08L HLA-DQA1*02:01-B1*03:03L
  source 1..12: note = Severe acute respiratory syndrome coronavirus 2
VTKIKPHNSHEG

SEQ ID NO: 10763 - protein, 11 aa, Severe acute respiratory syndrome-related coronavirus
  REGION 1..11: note = Table B: HLA-DQA1*05:01-B1*03:01L HLA-DRB1*13:03L HLA-DRB1*01:03L HLA-DQA1*01:02-B1*06:02L HLA-DRB1*14:01L HLA-DPA1*03:01-B1*105:01L
  source 1..11: note = Severe acute respiratory syndrome coronavirus 2
KPHNSHEGKTF

SEQ ID NO: 10764 - protein, 14 aa, Severe acute respiratory syndrome-related coronavirus
  REGION 1..14: note = Table B: HLA-DQA1*05:01-B1*03:01L HLA-DRB1*04:05L HLA-DRB1*01:02L HLA-DPA1*01:03-B1*03:01L HLA-DQA1*01:01-B1*05:01L HLA-DRB1*08:01L HLA-DPA1*02:01-B1*13:01L HLA-DPA1*03:01-B1*105:01L
  REGION 1..14: note = CONT. FROM ABOVE: HLA-DQA1*05:05-B1*03:01L HLA-DRB1*16:01L HLA-D RB1*04:08L
  source 1..14: note = Severe acute respiratory syndrome coronavirus 2
SHEGKTFYVLPNDD

SEQ ID NO: 10765 - protein, 12 aa, Severe acute respiratory syndrome-related coronavirus
  REGION 1..12: note = Table B: HLA-DQA1*05:01-B1*03:01L HLA-DRB1*13:03L HLA-DRB1*01:03L HLA-DRB1*04:04L HLA-DQA1*01:02-B1*06:02L HLA-DRB1*01:02L HLA-DRB4*03:01NL HLA-DPA1*01:03-B1*03:01L HLA-DQA1*01:01-B1*05:01L HLA-DRB1*08:01L HLA-DRB1*12:01L
  REGION 1..12: note = CONT. FROM ABOVE: HLA-DRB1*12:02L HLA-DPA1*02:01-B1*13:01L HLA-D PA1*03:01-B1*105:01L HLA-DRB1*14:54L HLA-DQA1*05:05-B1*03:01L HL A-DRB1*10:01L HLA-DQA1*01:03-B1*06:01L HLA-DRB1*04:08L HLA-DRB1* 08:03L HLA-DRB1*15:03L
  source 1..12: note = Severe acute respiratory syndrome coronavirus 2
GKTFYVLPNDDT

SEQ ID NO: 10766 - protein, 10 aa, Severe acute respiratory syndrome-related coronavirus
  REGION 1..10: note = Table B: HLA-DQA1*05:01-B1*03:01L HLA-DRB1*13:03L HLA-DRB1*01:03L HLA-DQA1*01:02-B1*06:02M HLA-DRB1*08:77L HLA-DPA1*01:03-B1*03:01L HLA-DRB1*03:01L HLA-DRB1*14:02L HLA-DQA1*01-B1*05L HLA-DQA1*05:05-B1*03:19L
  REGION 1..10: note = CONT. FROM ABOVE: HLA-DQA1*05:01-B1*02:01L HLA-DRB4*01:01L HLA-D PA1*01:03-B1*04:01L HLA-DQA1*05:05-B1*03:116L HLA-DPA1*01:03-B1* 04:02L HLA-DPA1*02:01-B1*13:01L HLA-DPA1*03:01-B1*105:01L HLA-DP A1*01:03-B1*104:01L HLA-DRB1*10:01L HLA-DRB1*16:01L
  REGION 1..10: note = CONT. FROM ABOVE: HLA-DQA1*01:03-B1*06:01L HLA-DQA1*02:01-B1*03: 03L HLA-DRB1*15:03L
  source 1..10: note = Severe acute respiratory syndrome coronavirus 2
DTLRVEAFEY

SEQ ID NO: 10767 - protein, 13 aa, Severe acute respiratory syndrome-related coronavirus
  REGION 1..13: note = Table B: HLA-DQA1*05:01-B1*03:01L HLA-DRB1*13:03L HLA-DRB1*01:03L HLA-DRB1*04:02L HLA-DRB1*04:05L HLA-DQA1*01:02-B1*06:02L HLA-DRB1*01:02L HLA-DRB4*03:01NL HLA-DRB1*08:04L HLA-DPA1*01:03-B1*03:01L
  REGION 1..13: note = CONT. FROM ABOVE: HLA-DPA1*03:01-B1*04:02L HLA-DRB1*14:01L HLA-D QA1*01:01-B1*05:01L HLA-DRB1*08:01L HLA-DQA1*05:05-B1*03:19L HLA -DQA1*05:01-B1*02:01L HLA-DPA1*01:03-B1*04:01L HLA-DRB1*04:10L H LA-DPA1*01:03-B1*04:02L HLA-DRB1*12:01L HLA-DPA1*02:01-B1*13:01L
  REGION 1..13: note = CONT. FROM ABOVE: HLA-DRB1*14:54L HLA-DQA1*05:05-B1*03:01L HLA-D RB1*14:17L HLA-DRB1*16:01L HLA-DQA1*01:03-B1*06:01L HLA-DRB1*04: 08L HLA-DRB1*08:03L HLA-DRB1*15:03L
  source 1..13: note = Severe acute respiratory syndrome coronavirus 2
VEAFEYYHTTDPS

SEQ ID NO: 10768 - protein, 10 aa, Severe acute respiratory syndrome-related coronavirus
  REGION 1..10: note = Table B: HLA-DQA1*05:01-B1*03:01L HLA-DRB1*04:01L HLA-DRB1*13:02H HLA-DRB1*13:03H HLA-DRB1*01:03L HLA-DRB1*04:02L HLA-DRB1*04:04L HLA-DQA1*01:02-B1*06:02L HLA-DRB1*01:01M HLA-DRB4*03:01NM HLA-DRB3*02:01M HLA-DRB1*03:01L HLA-DRB1*14:01M
  REGION 1..10: note = CONT. FROM ABOVE: HLA-DRB1*11:04M HLA-DRB1*14:02L HLA-DRB1*08:01 H HLA-DRB1*11:01L HLA-DRB5*01:01M HLA-DRB4*02:01NL HLA-DRB1*13:0 1L HLA-DPA1*01:03-B1*04:01L HLA-DPA1*01:03-B1*04:02M HLA-DRB1*12 :01H HLA-DRB1*12:02M HLA-DRB3*01:01L HLA-DPA1*03:01-B1*105:01L
  REGION 1..10: note = CONT. FROM ABOVE: HLA-DQA1*03:01-B1*03:02M HLA-DRB1*14:54L HLA-D QA1*05:05-B1*03:01H HLA-DRB1*14:17L HLA-DRB1*16:01L HLA-DQA1*01: 03-B1*06:01L HLA-DRB1*08:02L HLA-DRB1*08:03L HLA-DQA1*02:01-B1*0 3:03L HLA-DRB1*15:01M
  source 1..10: note = Severe acute respiratory syndrome coronavirus 2
HTTDPSFLGR

SEQ ID NO: 10769 - protein, 14 aa, Severe acute respiratory syndrome-related coronavirus
  REGION 1..14: note = Table B: HLA-DQA1*05:01-B1*03:01L HLA-DQA1*05:05-B1*03:01L HLA-DQA1*02:01-B1*03:03L
  source 1..14: note = Severe acute respiratory syndrome coronavirus 2
TDPSFLGRYMSALN

SEQ ID NO: 10770 - protein, 15 aa, Severe acute respiratory syndrome-related coronavirus
  REGION 1..15: note = Table B: HLA-DQA1*05:01-B1*03:01L HLA-DRB1*04:03L HLA-DRB1*13:02L HLA-DRB1*04:02L HLA-DRB1*04:04L HLA-DRB1*04:05L HLA-DRB1*08:04L HLA-DPA1*01:03-B1*03:01L HLA-DRB1*14:01L HLA-DRB1*11:04L HLA-DRB1*11:01L HLA-DQA1*01-B1*05L
  REGION 1..15: note = CONT. FROM ABOVE: HLA-DRB3*01:01L HLA-DPA1*02:01-B1*13:01L HLA-D QA1*03:01-B1*03:02L HLA-DPA1*01:03-B1*02:01L
  source 1..15: note = Severe acute respiratory syndrome coronavirus 2
DPSFLGRYMSALNHT

SEQ ID NO: 10771 - protein, 12 aa, Severe acute respiratory syndrome-related coronavirus
  REGION 1..12: note = Table B: HLA-DQA1*05:01-B1*03:01L HLA-DRB1*04:03L HLA-DRB1*04:02L HLA-DRB1*04:04L HLA-DRB1*04:05L HLA-DQA1*01:02-B1*06:02L HLA-DRB1*01:01L HLA-DRB1*14:01L HLA-DRB1*11:04L HLA-DRB1*11:01L HLA-DRB3*01:01L
  REGION 1..12: note = CONT. FROM ABOVE: HLA-DPA1*01:02-B1*04:01L HLA-DRB1*07:01L HLA-D RB1*15:03L
  source 1..12: note = Severe acute respiratory syndrome coronavirus 2
GRYMSALNHTKK

SEQ ID NO: 10772 - protein, 10 aa, Severe acute respiratory syndrome-related coronavirus
  REGION 1..10: note = Table B: HLA-DQA1*05:01-B1*03:01L HLA-DRB1*13:03L HLA-DRB1*01:03L HLA-DQA1*01:02-B1*06:02L HLA-DRB1*08:77L HLA-DRB1*14:02L HLA-DQA1*05:05-B1*03:19L HLA-DQA1*05:01-B1*02:01L HLA-DRB4*01:01L
  REGION 1..10: note = CONT. FROM ABOVE: HLA-DPA1*01:03-B1*04:01L HLA-DPA1*01:03-B1*04: 02L HLA-DPA1*02:01-B1*13:01L HLA-DPA1*03:01-B1*105:01L HLA-DQA1* 01:03-B1*06:01L HLA-DQA1*02:01-B1*03:03L HLA-DRB1*15:03L
  source 1..10: note = Severe acute respiratory syndrome coronavirus 2
QVNGLTSIKW

SEQ ID NO: 10773 - protein, 11 aa, Severe acute respiratory syndrome-related coronavirus
  REGION 1..11: note = Table B: HLA-DQA1*05:01-B1*03:01L HLA-DRB1*04:02L HLA-DPA1*03:01-B1*04:02L HLA-DQA1*05:01-B1*02:01L HLA-DPA1*01:03-B1*04:02L HLA-DQA1*05:05-B1*03:01L HLA-DRB1*14:17L HLA-DRB1*16:01L
  source 1..11: note = Severe acute respiratory syndrome coronavirus 2
GLTSIKWADNN

SEQ ID NO: 10774 - protein, 12 aa, Severe acute respiratory syndrome-related coronavirus
  REGION 1..12: note = Table B: HLA-DQA1*05:01-B1*03:01L HLA-DQA1*05:05-B1*03:01L HLA-DQA1*02:01-B1*03:03L
  source 1..12: note = Severe acute respiratory syndrome coronavirus 2
LATALLTLQQIE

SEQ ID NO: 10775 - protein, 10 aa, Severe acute respiratory syndrome-related coronavirus
  REGION 1..10: note = Table B: HLA-DQA1*05:01-B1*03:01L HLA-DRB1*13:03L HLA-DRB1*01:03L HLA-DQA1*01:02-B1*06:02L HLA-DRB1*08:77L HLA-DPA1*01:03-B1*03:01L HLA-DRB1*03:01L HLA-DRB1*11:02L HLA-DRB1*14:02L HLA-DQA1*01-B1*05L HLA-DQA1*05:05-B1*03:19M
  REGION 1..10: note = CONT. FROM ABOVE: HLA-DQA1*05:01-B1*02:01L HLA-DRB4*01:01L HLA-D PA1*01:03-B1*04:01L HLA-DQA1*05:05-B1*03:116L HLA-DPA1*01:03-B1* 04:02L HLA-DRB1*12:01L HLA-DPA1*03:01-B1*105:01L HLA-DPA1*01:03- B1*104:01L HLA-DRB1*10:01L HLA-DRB1*16:01L
  REGION 1..10: note = CONT. FROM ABOVE: HLA-DQA1*02:01-B1*03:03L HLA-DRB1*15:03L
  source 1..10: note = Severe acute respiratory syndrome coronavirus 2
FNPPALQDAY

SEQ ID NO: 10776 - protein, 11 aa, Severe acute respiratory syndrome-related coronavirus
  REGION 1..11: note = Table B: HLA-DQA1*05:01-B1*03:01L HLA-DRB1*13:03L HLA-DRB1*04:02L HLA-DRB1*04:05L HLA-DQA1*01:02-B1*06:02L HLA-DRB1*01:02L HLA-DRB4*03:01NL HLA-DRB1*08:01L HLA-DQA1*05:05-B1*03:19L HLA-DRB1*12:01L
  REGION 1..11: note = CONT. FROM ABOVE: HLA-DQA1*05:05-B1*03:01L HLA-DRB1*14:17L HLA-D QA1*01:03-B1*06:01L HLA-DRB1*04:08L HLA-DRB1*15:03L
  source 1..11: note = Severe acute respiratory syndrome coronavirus 2
YYRARAGEAAN

SEQ ID NO: 10777 - protein, 10 aa, Severe acute respiratory syndrome-related coronavirus
  REGION 1..10: note = Table B: HLA-DQA1*05:01-B1*03:01L HLA-DRB1*13:02L HLA-DRB1*13:03L HLA-DRB1*01:03M HLA-DQA1*01:02-B1*06:02L HLA-DRB1*08:77L HLA-DRB1*03:01L HLA-DRB1*14:01L HLA-DRB1*14:02L HLA-DRB1*11:01L HLA-DQA1*05:01-B1*02:01L
  REGION 1..10: note = CONT. FROM ABOVE: HLA-DPA1*01:03-B1*04:01L HLA-DPA1*01:03-B1*04: 02L HLA-DRB1*12:01L HLA-DPA1*02:01-B1*13:01L HLA-DPA1*03:01-B1*1 05:01L HLA-DQA1*03:01-B1*03:02L HLA-DRB1*16:01L HLA-DQA1*01:03-B 1*06:01L HLA-DRB1*08:02L HLA-DQA1*02:01-B1*03:03M
  REGION 1..10: note = CONT. FROM ABOVE: HLA-DRB1*15:03L
  source 1..10: note = Severe acute respiratory syndrome coronavirus 2
RARAGEAANF

SEQ ID NO: 10778 - protein, 12 aa, Severe acute respiratory syndrome-related coronavirus
  REGION 1..12: note = Table B: HLA-DQA1*05:01-B1*03:01L HLA-DRB1*04:03L HLA-DRB1*04:02L HLA-DRB1*01:02L HLA-DRB1*14:01L HLA-DQA1*01-B1*05L HLA-DRB1*12:01L HLA-DPA1*03:01-B1*105:01L HLA-DQA1*05:05-B1*03:01L HLA-DRB1*14:17L HLA-DRB1*16:01L
  REGION 1..12: note = CONT. FROM ABOVE: HLA-DQA1*02:01-B1*03:03L
  source 1..12: note = Severe acute respiratory syndrome coronavirus 2
ALILAYCNKTVG

SEQ ID NO: 10779 - protein, 14 aa, Severe acute respiratory syndrome-related coronavirus
  REGION 1..14: note = Table B: HLA-DQA1*05:01-B1*03:01L HLA-DRB1*13:02L HLA-DRB1*01:03L HLA-DQA1*05:05-B1*03:19L HLA-DPA1*01:03-B1*04:02L HLA-DRB1*12:01L HLA-DPA1*02:01-B1*13:01L HLA-DQA1*05:05-B1*03:01L
  REGION 1..14: note = CONT. FROM ABOVE: HLA-DRB1*16:01L HLA-DRB1*04:08L HLA-DQA1*02:01 -B1*03:03L
  source 1..14: note = Severe acute respiratory syndrome coronavirus 2
LILAYCNKTVGELG

SEQ ID NO: 10780 - protein, 11 aa, Severe acute respiratory syndrome-related coronavirus
  REGION 1..11: note = Table B: HLA-DQA1*05:01-B1*03:01L HLA-DRB1*04:03L HLA-DRB1*13:02L HLA-DRB1*01:03L HLA-DRB4*03:01NL HLA-DPA1*03:01-B1*04:02L HLA-DRB1*14:02L HLA-DQA1*05:05-B1*03:116L HLA-DPA1*01:03-B1*04:02L
  REGION 1..11: note = CONT. FROM ABOVE: HLA-DPA1*02:01-B1*13:01L HLA-DPA1*03:01-B1*105 :01L HLA-DPA1*01:02-B1*04:01L HLA-DRB1*08:02L HLA-DQA1*02:01-B1* 03:03L HLA-DRB1*15:03L
  source 1..11: note = Severe acute respiratory syndrome coronavirus 2
ELGDVRETMSY

SEQ ID NO: 10781 - protein, 13 aa, Severe acute respiratory syndrome-related coronavirus
  REGION 1..13: note = Table B: HLA-DQA1*05:01-B1*03:01L HLA-DRB1*04:03L HLA-DRB1*13:02L HLA-DRB3*02:01L HLA-DPA1*03:01-B1*04:02L HLA-DQA1*02:01-B1*03:03L
  source 1..13: note = Severe acute respiratory syndrome coronavirus 2
LGDVRETMSYLFQ

SEQ ID NO: 10782 - protein, 14 aa, Severe acute respiratory syndrome-related coronavirus
  REGION 1..14: note = Table B: HLA-DQA1*05:01-B1*03:01L HLA-DRB1*04:03L HLA-DRB1*13:02L HLA-DRB1*01:03L HLA-DRB1*04:05L HLA-DRB3*02:01L HLA-DPA1*01:03-B1*03:01L HLA-DRB1*14:01L HLA-DQA1*01-B1*05L HLA-DQA1*05:05-B1*03:19L HLA-DQA1*05:01-B1*02:01L
  REGION 1..14: note = CONT. FROM ABOVE: HLA-DPA1*01:03-B1*104:01L HLA-DQA1*05:05-B1*03 :01L HLA-DRB1*04:08L
  source 1..14: note = Severe acute respiratory syndrome coronavirus 2
DVRETMSYLFQHAN

SEQ ID NO: 10783 - protein, 13 aa, Severe acute respiratory syndrome-related coronavirus
  REGION 1..13: note = Table B: HLA-DQA1*05:01-B1*03:01L HLA-DRB1*01:02L HLA-DRB1*08:04L HLA-DPA1*01:03-B1*03:01L HLA-DQA1*05:01-B1*02:01L HLA-DPA1*01:03-B1*04:02L HLA-DRB1*12:01L HLA-DPA1*02:01-B1*13:01L
  REGION 1..13: note = CONT. FROM ABOVE: HLA-DQA1*05:05-B1*03:01L HLA-DRB1*16:01L HLA-D RB1*04:08L
  source 1..13: note = Severe acute respiratory syndrome coronavirus 2
ETMSYLFQHANLD

SEQ ID NO: 10784 - protein, 12 aa, Severe acute respiratory syndrome-related coronavirus
  REGION 1..12: note = Table B: HLA-DQA1*05:01-B1*03:01L HLA-DRB1*04:04L HLA-DQA1*01:02-B1*06:02L HLA-DRB1*01:02L HLA-DRB1*08:04L HLA-DRB1*08:01L HLA-DQA1*05:01-B1*02:01L HLA-DRB1*12:01L HLA-DPA1*02:01-B1*13:01L HLA-DPA1*03:01-B1*105:01L
  REGION 1..12: note = CONT. FROM ABOVE: HLA-DQA1*05:05-B1*03:01L HLA-DPA1*01:02-B1*04: 01L HLA-DRB1*10:01L HLA-DRB1*08:03L HLA-DRB1*15:03L
  source 1..12: note = Severe acute respiratory syndrome coronavirus 2
MSYLFQHANLDS

SEQ ID NO: 10785 - protein, 14 aa, Severe acute respiratory syndrome-related coronavirus
  REGION 1..14: note = Table B: HLA-DQA1*05:01-B1*03:01L HLA-DRB1*04:01L HLA-DRB1*13:02L HLA-DRB1*04:04L HLA-DRB1*01:01L HLA-DRB1*14:01L HLA-DRB1*11:04L HLA-DPA1*02:01-B1*13:01L
  source 1..14: note = Severe acute respiratory syndrome coronavirus 2
SYLFQHANLDSCKR

SEQ ID NO: 10786 - protein, 12 aa, Severe acute respiratory syndrome-related coronavirus
  REGION 1..12: note = Table B: HLA-DQA1*05:01-B1*03:01L HLA-DRB1*04:02L HLA-DQA1*01:02-B1*06:02L HLA-DRB4*03:01NL HLA-DQA1*05:01-B1*02:01L HLA-DRB1*14:54L HLA-DQA1*05:05-B1*03:01L HLA-DRB1*14:17L
  REGION 1..12: note = CONT. FROM ABOVE: HLA-DQA1*01:03-B1*06:01L HLA-DQA1*02:01-B1*03: 03L
  source 1..12: note = Severe acute respiratory syndrome coronavirus 2
GQQQTTLKGVEA

SEQ ID NO: 10787 - protein, 13 aa, Severe acute respiratory syndrome-related coronavirus
  REGION 1..13: note = Table B: HLA-DQA1*05:01-B1*03:01L HLA-DPA1*01:03-B1*03:01L HLA-DPA1*03:01-B1*04:02L HLA-DPA1*01:03-B1*04:02L HLA-DRB1*12:01L HLA-DQA1*05:05-B1*03:01L HLA-DQA1*02:01-B1*03:03L HLA-DRB1*15:03L
  source 1..13: note = Severe acute respiratory syndrome coronavirus 2
LKGVEAVMYMGTL

SEQ ID NO: 10788 - protein, 10 aa, Severe acute respiratory syndrome-related coronavirus
  REGION 1..10: note = Table B: HLA-DQA1*05:01-B1*03:01L HLA-DRB1*13:03L HLA-DQA1*01:02-B1*06:02L HLA-DRB1*08:77L HLA-DPA1*01:03-B1*03:01L HLA-DRB1*03:01L HLA-DRB1*11:02L HLA-DRB1*14:02L HLA-DQA1*01-B1*05L HLA-DQA1*05:05-B1*03:19M
  REGION 1..10: note = CONT. FROM ABOVE: HLA-DQA1*05:01-B1*02:01L HLA-DRB4*01:01L HLA-D PA1*01:03-B1*04:01L HLA-DQA1*05:05-B1*03:116L HLA-DRB1*12:01L HL A-DPA1*03:01-B1*105:01L HLA-DPA1*01:03-B1*104:01L HLA-DRB1*10:01 L HLA-DRB1*16:01L HLA-DQA1*02:01-B1*03:03L HLA-DRB1*15:03L
  source 1..10: note = Severe acute respiratory syndrome coronavirus 2
AVMYMGTLSY

SEQ ID NO: 10789 - protein, 11 aa, Severe acute respiratory syndrome-related coronavirus
  REGION 1..11: note = Table B: HLA-DQA1*05:01-B1*03:01L HLA-DRB1*04:03L HLA-DPA1*03:01-B1*04:02L HLA-DPA1*01:03-B1*04:02L HLA-DRB1*12:01L HLA-DQA1*03:01-B1*03:02L HLA-DQA1*05:05-B1*03:01L
  source 1..11: note = Severe acute respiratory syndrome coronavirus 2
YMGTLSYEQFK

SEQ ID NO: 10790 - protein, 11 aa, Severe acute respiratory syndrome-related coronavirus
  REGION 1..11: note = Table B: HLA-DQA1*05:01-B1*03:01L HLA-DRB1*04:03L HLA-DRB1*13:02L HLA-DRB1*13:03L HLA-DRB1*04:02L HLA-DRB1*04:05L HLA-DQA1*01:02-B1*06:02L HLA-DRB1*01:02L HLA-DPA1*01:03-B1*03:01L HLA-DRB1*14:01L HLA-DRB1*11:04L
  REGION 1..11: note = CONT. FROM ABOVE: HLA-DRB1*08:01L HLA-DRB1*11:01L HLA-DQA1*01-B1 *05L HLA-DPA1*01:03-B1*04:02L HLA-DRB1*12:01L HLA-DRB3*01:01L HL A-DPA1*02:01-B1*13:01L HLA-DPA1*01:03-B1*02:01L HLA-DRB1*14:17L HLA-DRB1*15:03L
  source 1..11: note = Severe acute respiratory syndrome coronavirus 2
GTLSYEQFKKG

SEQ ID NO: 10791 - protein, 12 aa, Severe acute respiratory syndrome-related coronavirus
  REGION 1..12: note = Table B: HLA-DQA1*05:01-B1*03:01L HLA-DRB1*04:03L HLA-DRB1*13:02L HLA-DRB1*04:02L HLA-DRB1*04:04L HLA-DRB1*04:05L HLA-DPA1*01:03-B1*03:01L HLA-DRB3*01:01L HLA-DPA1*02:01-B1*13:01L HLA-DRB1*08:03L HLA-DRB1*15:03L
  source 1..12: note = Severe acute respiratory syndrome coronavirus 2
TLSYEQFKKGVQ

SEQ ID NO: 10792 - protein, 13 aa, Severe acute respiratory syndrome-related coronavirus
  REGION 1..13: note = Table B: HLA-DQA1*05:01-B1*03:01L HLA-DRB1*01:02L HLA-DPA1*03:01-B1*105:01L HLA-DQA1*05:05-B1*03:01L HLA-DRB1*16:01L HLA-DQA1*02:01-B1*03:03L
  source 1..13: note = Severe acute respiratory syndrome coronavirus 2
YEQFKKGVQIPCT

SEQ ID NO: 10793 - protein, 14 aa, Severe acute respiratory syndrome-related coronavirus
  REGION 1..14: note = Table B: HLA-DQA1*05:01-B1*03:01L HLA-DQA1*05:05-B1*03:19L HLA-DQA1*02:01-B1*03:03L
  source 1..14: note = Severe acute respiratory syndrome coronavirus 2
GTFTCASEYTGNYQ

SEQ ID NO: 10794 - protein, 13 aa, Severe acute respiratory syndrome-related coronavirus
  REGION 1..13: note = Table B: HLA-DQA1*05:01-B1*03:01L HLA-DRB1*13:02L HLA-DRB1*04:04L HLA-DRB1*04:05L HLA-DPA1*01:03-B1*03:01L HLA-DRB1*14:01L HLA-DRB1*11:04L HLA-DRB3*01:01L HLA-DPA1*02:01-B1*13:01L HLA-DQA1*02:01-B1*03:03L
  source 1..13: note = Severe acute respiratory syndrome coronavirus 2
TGNYQCGHYKHIT

SEQ ID NO: 10795 - protein, 11 aa, Severe acute respiratory syndrome-related coronavirus
  REGION 1..11: note = Table B: HLA-DQA1*05:01-B1*03:01L HLA-DRB1*04:03L HLA-DRB1*13:02L HLA-DRB1*13:03L HLA-DRB1*04:02L HLA-DRB4*03:01NL HLA-DRB1*14:01L HLA-DRB1*12:01L HLA-DRB1*14:17L HLA-DRB1*15:03L
  source 1..11: note = Severe acute respiratory syndrome coronavirus 2
GHYKHITSKET

SEQ ID NO: 10796 - protein, 10 aa, Severe acute respiratory syndrome-related coronavirus
  REGION 1..10: note = Table B: HLA-DQA1*05:01-B1*03:01L HLA-DRB1*08:01L HLA-DQA1*01-B1*05L HLA-DQA1*03:01-B1*03:02L HLA-DPA1*01:02-B1*04:01L HLA-DRB1*16:01L HLA-DQA1*02:01-B1*03:03L
  source 1..10: note = Severe acute respiratory syndrome coronavirus 2
YKHITSKETL

SEQ ID NO: 10797 - protein, 10 aa, Severe acute respiratory syndrome-related coronavirus
  REGION 1..10: note = Table B: HLA-DQA1*05:01-B1*03:01L HLA-DRB1*13:02L HLA-DRB1*13:03L HLA-DRB1*01:03M HLA-DQA1*01:02-B1*06:02L HLA-DRB1*08:77L HLA-DPA1*01:03-B1*03:01L HLA-DRB1*03:01L HLA-DRB1*14:01L HLA-DRB1*14:02L HLA-DRB1*11:01L
  REGION 1..10: note = CONT. FROM ABOVE: HLA-DQA1*05:05-B1*03:19L HLA-DQA1*05:01-B1*02: 01L HLA-DPA1*01:03-B1*04:01L HLA-DPA1*01:03-B1*04:02L HLA-DRB1*1 2:01L HLA-DPA1*03:01-B1*105:01L HLA-DRB1*16:01L HLA-DQA1*01:03-B 1*06:01L HLA-DRB1*08:02L HLA-DQA1*02:01-B1*03:03M
  REGION 1..10: note = CONT. FROM ABOVE: HLA-DRB1*15:03L
  source 1..10: note = Severe acute respiratory syndrome coronavirus 2
KHITSKETLY

SEQ ID NO: 10798 - protein, 13 aa, Severe acute respiratory syndrome-related coronavirus
  REGION 1..13: note = Table B: HLA-DQA1*05:01-B1*03:01L HLA-DRB1*04:03L HLA-DRB1*04:02L HLA-DRB1*04:05L HLA-DQA1*01:02-B1*06:02L HLA-DRB1*01:01L HLA-DRB1*08:04L HLA-DRB1*14:02L HLA-DQA1*05:01-B1*02:01L HLA-DRB3*01:01L HLA-DRB1*14:17L
  REGION 1..13: note = CONT. FROM ABOVE: HLA-DPA1*01:02-B1*04:01L HLA-DRB1*10:01L HLA-D RB1*04:08L
  source 1..13: note = Severe acute respiratory syndrome coronavirus 2
ETLYCIDGALLTK

SEQ ID NO: 10799 - protein, 10 aa, Severe acute respiratory syndrome-related coronavirus
  REGION 1..10: note = Table B: HLA-DQA1*05:01-B1*03:01L HLA-DQA1*03:01-B1*03:02L HLA-DQA1*01:03-B1*06:01L HLA-DQA1*02:01-B1*03:03L
  source 1..10: note = Severe acute respiratory syndrome coronavirus 2
DGALLTKSSE

SEQ ID NO: 10800 - protein, 10 aa, Severe acute respiratory syndrome-related coronavirus
  REGION 1..10: note = Table B: HLA-DQA1*05:01-B1*03:01L HLA-DQA1*01:02-B1*06:02L HLA-DRB1*14:02L HLA-DQA1*05:05-B1*03:19L HLA-DQA1*05:01-B1*02:01L HLA-DPA1*03:01-B1*105:01L HLA-DQA1*01:03-B1*06:01L HLA-DQA1*02:01-B1*03:03L
  source 1..10: note = Severe acute respiratory syndrome coronavirus 2
GALLTKSSEY

SEQ ID NO: 10801 - protein, 10 aa, Severe acute respiratory syndrome-related coronavirus
  REGION 1..10: note = Table B: HLA-DQA1*05:01-B1*03:01L HLA-DRB1*01:03L HLA-DQA1*01:02-B1*06:02L HLA-DRB1*08:77L HLA-DPA1*01:03-B1*03:01L HLA-DRB1*03:01L HLA-DRB1*14:02L HLA-DQA1*01-B1*05L HLA-DQA1*05:05-B1*03:19L
  REGION 1..10: note = CONT. FROM ABOVE: HLA-DQA1*05:01-B1*02:01L HLA-DPA1*01:03-B1*04: 01L HLA-DPA1*01:03-B1*04:02L HLA-DPA1*02:01-B1*13:01L HLA-DPA1*0 3:01-B1*105:01L HLA-DPA1*01:03-B1*104:01L HLA-DRB1*16:01L HLA-DQ A1*01:03-B1*06:01L HLA-DQA1*02:01-B1*03:03L
  source 1..10: note = Severe acute respiratory syndrome coronavirus 2
YKGPITDVFY

SEQ ID NO: 10802 - protein, 14 aa, Severe acute respiratory syndrome-related coronavirus
  REGION 1..14: note = Table B: HLA-DQA1*05:01-B1*03:01L HLA-DRB1*01:03L HLA-DRB1*04:02L HLA-DRB1*04:05L HLA-DRB1*01:02L HLA-DRB1*08:04L HLA-DQA1*01:01-B1*05:01L HLA-DRB1*08:01L HLA-DPA1*01:03-B1*04:01L HLA-DPA1*01:03-B1*04:02L
  REGION 1..14: note = CONT. FROM ABOVE: HLA-DRB1*12:01L HLA-DPA1*02:01-B1*13:01L HLA-D QA1*05:05-B1*03:01L HLA-DRB1*04:08L
  source 1..14: note = Severe acute respiratory syndrome coronavirus 2
GPITDVFYKENSYT

SEQ ID NO: 10803 - protein, 14 aa, Severe acute respiratory syndrome-related coronavirus
  REGION 1..14: note = Table B: HLA-DQA1*05:01-B1*03:01L HLA-DRB1*13:02L HLA-DRB1*01:03L HLA-DRB1*04:05L HLA-DQA1*01:02-B1*06:02L HLA-DRB1*01:02L HLA-DPA1*01:03-B1*03:01L HLA-DRB1*08:01L HLA-DRB1*12:01L HLA-DPA1*03:01-B1*105:01L
  REGION 1..14: note = CONT. FROM ABOVE: HLA-DQA1*05:05-B1*03:01L HLA-DPA1*01:02-B1*04: 01L HLA-DRB1*16:01L HLA-DRB1*04:08L HLA-DRB1*15:03L
  source 1..14: note = Severe acute respiratory syndrome coronavirus 2
VFYKENSYTTTIKP

SEQ ID NO: 10804 - protein, 10 aa, Severe acute respiratory syndrome-related coronavirus
  REGION 1..10: note = Table B: HLA-DQA1*05:01-B1*03:01L HLA-DRB1*04:03L HLA-DRB1*13:02L HLA-DRB1*13:03L HLA-DRB1*01:03L HLA-DRB1*04:02L HLA-DQA1*01:02-B1*06:02L HLA-DRB1*01:01L HLA-DRB4*03:01NL HLA-DRB3*02:01L HLA-DRB1*14:01L HLA-DRB1*11:04L HLA-DRB1*08:01L
  REGION 1..10: note = CONT. FROM ABOVE: HLA-DRB5*01:01L HLA-DPA1*01:03-B1*04:02L HLA-D RB1*12:01L HLA-DRB1*12:02L HLA-DPA1*03:01-B1*105:01L HLA-DQA1*03 :01-B1*03:02M HLA-DRB1*14:54L HLA-DQA1*05:05-B1*03:01L HLA-DRB1* 14:17L HLA-DPA1*01:02-B1*04:01L HLA-DRB1*16:01L
  REGION 1..10: note = CONT. FROM ABOVE: HLA-DQA1*01:03-B1*06:01L HLA-DQA1*02:01-B1*03: 03L
  source 1..10: note = Severe acute respiratory syndrome coronavirus 2
TTTIKPVTYK

SEQ ID NO: 10805 - protein, 14 aa, Severe acute respiratory syndrome-related coronavirus
  REGION 1..14: note = Table B: HLA-DQA1*05:01-B1*03:01L HLA-DRB1*13:02L HLA-DRB1*01:03L HLA-DRB1*04:04L HLA-DPA1*01:03-B1*03:01L HLA-DRB1*14:01L HLA-DRB1*14:02L HLA-DQA1*01:01-B1*05:01L HLA-DRB1*08:01L HLA-DQA1*05:05-B1*03:19L HLA-DRB1*04:10L
  REGION 1..14: note = CONT. FROM ABOVE: HLA-DRB1*12:01L HLA-DRB1*14:17L HLA-DRB1*04:08 L
  source 1..14: note = Severe acute respiratory syndrome coronavirus 2
DGVVCTEIDPKLDN

SEQ ID NO: 10806 - protein, 16 aa, Severe acute respiratory syndrome-related coronavirus
  REGION 1..16: note = Table B: HLA-DQA1*05:01-B1*03:01L HLA-DRB1*04:01L HLA-DRB1*04:04L HLA-DRB1*11:02L HLA-DRB1*11:03L HLA-DPA1*01:03-B1*104:01L HLA-DRB1*10:01L HLA-DRB1*08:02L
  source 1..16: note = Severe acute respiratory syndrome coronavirus 2
LDNYYKKDNSYFTEQP

SEQ ID NO: 10807 - protein, 13 aa, Severe acute respiratory syndrome-related coronavirus
  REGION 1..13: note = Table B: HLA-DQA1*05:01-B1*03:01L HLA-DRB1*13:02L HLA-DRB1*01:03L HLA-DRB1*01:02L HLA-DRB1*08:77L HLA-DPA1*01:03-B1*03:01L HLA-DRB1*14:01L HLA-DQA1*01:01-B1*05:01L HLA-DRB1*08:01L HLA-DRB1*04:10L
  REGION 1..13: note = CONT. FROM ABOVE: HLA-DPA1*01:03-B1*04:02L HLA-DRB1*07:01L HLA-D RB1*04:08L
  source 1..13: note = Severe acute respiratory syndrome coronavirus 2
KDNSYFTEQPIDL

SEQ ID NO: 10808 - protein, 12 aa, Severe acute respiratory syndrome-related coronavirus
  REGION 1..12: note = Table B: HLA-DQA1*05:01-B1*03:01L HLA-DRB1*13:02L HLA-DRB1*04:04L HLA-DQA1*01:02-B1*06:02L HLA-DRB1*01:02L HLA-DRB1*08:04L HLA-DPA1*01:03-B1*03:01L HLA-DPA1*03:01-B1*04:02L HLA-DQA1*05:05-B1*03:19L
  REGION 1..12: note = CONT. FROM ABOVE: HLA-DPA1*01:03-B1*04:02L HLA-DPA1*03:01-B1*105 :01L HLA-DQA1*05:05-B1*03:01L HLA-DPA1*01:02-B1*04:01L HLA-DRB1* 10:01L HLA-DQA1*01:03-B1*06:01L HLA-DRB1*15:03L
  source 1..12: note = Severe acute respiratory syndrome coronavirus 2
YFTEQPIDLVPN

SEQ ID NO: 10809 - protein, 13 aa, Severe acute respiratory syndrome-related coronavirus
  REGION 1..13: note = Table B: HLA-DQA1*05:01-B1*03:01L HLA-DQA1*01:02-B1*06:02L HLA-DPA1*01:03-B1*03:01L HLA-DQA1*05:05-B1*03:19L HLA-DPA1*03:01-B1*105:01L HLA-DQA1*05:05-B1*03:01L HLA-DQA1*01:03-B1*06:01L
  source 1..13: note = Severe acute respiratory syndrome coronavirus 2
FTEQPIDLVPNQP

SEQ ID NO: 10810 - protein, 11 aa, Severe acute respiratory syndrome-related coronavirus
  REGION 1..11: note = Table B: HLA-DQA1*05:01-B1*03:01L HLA-DRB1*13:03L HLA-DRB1*08:77L HLA-DPA1*03:01-B1*04:02L HLA-DRB1*14:01L HLA-DRB1*14:02L HLA-DPA1*01:03-B1*04:01L HLA-DQA1*05:05-B1*03:116L HLA-DPA1*01:02-B1*04:01L
  REGION 1..11: note = CONT. FROM ABOVE: HLA-DRB1*08:03L
  source 1..11: note = Severe acute respiratory syndrome coronavirus 2
QPYPNASFDNF

SEQ ID NO: 10811 - protein, 11 aa, Severe acute respiratory syndrome-related coronavirus
  REGION 1..11: note = Table B: HLA-DQA1*05:01-B1*03:01L HLA-DPA1*03:01-B1*105:01L
  source 1..11: note = Severe acute respiratory syndrome coronavirus 2
NIKFADDLNQL

SEQ ID NO: 10812 - protein, 11 aa, Severe acute respiratory syndrome-related coronavirus
  REGION 1..11: note = Table B: HLA-DQA1*05:01-B1*03:01L HLA-DRB1*13:03L HLA-DRB1*01:03L HLA-DRB1*04:05L HLA-DQA1*01:02-B1*06:02L HLA-DPA1*03:01-B1*04:02L HLA-DRB1*11:03L HLA-DQA1*05:05-B1*03:116L HLA-DPA1*01:03-B1*04:02L
  REGION 1..11: note = CONT. FROM ABOVE: HLA-DRB1*12:01L HLA-DRB1*15:03L
  source 1..11: note = Severe acute respiratory syndrome coronavirus 2
FADDLNQLTGY

SEQ ID NO: 10813 - protein, 12 aa, Severe acute respiratory syndrome-related coronavirus
  REGION 1..12: note = Table B: HLA-DQA1*05:01-B1*03:01L HLA-DRB1*04:03L HLA-DRB1*01:03L HLA-DRB1*04:02L HLA-DRB1*01:02L HLA-DRB1*14:01L HLA-DRB1*12:01L HLA-DRB1*14:17L HLA-DPA1*01:02-B1*04:01L HLA-DRB1*16:01L HLA-DRB1*04:08L HLA-DQA1*02:01-B1*03:03L
  REGION 1..12: note = CONT. FROM ABOVE: HLA-DRB1*15:03L
  source 1..12: note = Severe acute respiratory syndrome coronavirus 2
DDLNQLTGYKKP

SEQ ID NO: 10814 - protein, 12 aa, Severe acute respiratory syndrome-related coronavirus
  REGION 1..12: note = Table B: HLA-DQA1*05:01-B1*03:01L HLA-DRB1*01:03L HLA-DRB1*04:05L HLA-DQA1*01:02-B1*06:02L HLA-DRB1*01:02L HLA-DRB4*03:01NL HLA-DRB1*08:01L HLA-DRB1*12:01L HLA-DRB1*14:54L HLA-DPA1*01:02-B1*04:01L HLA-DRB1*04:08L HLA-DRB1*15:03L
  source 1..12: note = Severe acute respiratory syndrome coronavirus 2
LNQLTGYKKPAS

SEQ ID NO: 10815 - protein, 13 aa, Severe acute respiratory syndrome-related coronavirus
  REGION 1..13: note = Table B: HLA-DQA1*05:01-B1*03:01L HLA-DRB1*11:02L
  source 1..13: note = Severe acute respiratory syndrome coronavirus 2
NQLTGYKKPASRE

SEQ ID NO: 10816 - protein, 10 aa, Severe acute respiratory syndrome-related coronavirus
  REGION 1..10: note = Table B: HLA-DQA1*05:01-B1*03:01L HLA-DRB1*01:03L HLA-DRB1*08:01L HLA-DQA1*03:01-B1*03:02L HLA-DPA1*01:02-B1*04:01L HLA-DRB1*16:01L HLA-DQA1*02:01-B1*03:03L
  source 1..10: note = Severe acute respiratory syndrome coronavirus 2
GYKKPASREL

SEQ ID NO: 10817 - protein, 13 aa, Severe acute respiratory syndrome-related coronavirus
  REGION 1..13: note = Table B: HLA-DQA1*05:01-B1*03:01L HLA-DRB1*13:02L HLA-DRB1*08:04L HLA-DRB1*14:01L HLA-DRB1*11:01L HLA-DQA1*03:01-B1*03:02L HLA-DPA1*01:03-B1*02:01L HLA-DPA1*01:03-B1*104:01L
  source 1..13: note = Severe acute respiratory syndrome coronavirus 2
SRELKVTFFPDLN

SEQ ID NO: 10818 - protein, 12 aa, Severe acute respiratory syndrome-related coronavirus
  REGION 1..12: note = Table B: HLA-DQA1*05:01-B1*03:01L HLA-DRB1*04:01L HLA-DRB1*13:02L HLA-DRB1*13:03L HLA-DRB1*01:03L HLA-DRB1*04:04L HLA-DQA1*01:02-B1*06:02L HLA-DRB1*01:02L HLA-DRB4*03:01NL HLA-DRB1*08:04L HLA-DRB1*08:77L HLA-DRB3*02:01L
  REGION 1..12: note = CONT. FROM ABOVE: HLA-DPA1*01:03-B1*03:01L HLA-DPA1*03:01-B1*04: 02L HLA-DRB1*14:01L HLA-DRB1*11:03L HLA-DRB1*11:04L HLA-DRB1*14: 02L HLA-DRB4*01:01L HLA-DPA1*01:03-B1*04:01L HLA-DRB1*09:01L HLA -DPA1*01:03-B1*04:02L HLA-DRB1*12:01L HLA-DRB3*01:01L
  REGION 1..12: note = CONT. FROM ABOVE: HLA-DPA1*03:01-B1*105:01L HLA-DRB1*14:54L HLA- DPA1*01:03-B1*104:01L HLA-DQA1*05:05-B1*03:01L HLA-DPA1*01:02-B1 *04:01L HLA-DRB1*10:01L HLA-DQA1*01:03-B1*06:01L HLA-DRB1*04:08L HLA-DRB1*08:03L
  source 1..12: note = Severe acute respiratory syndrome coronavirus 2
VTFFPDLNGDVV

SEQ ID NO: 10819 - protein, 11 aa, Severe acute respiratory syndrome-related coronavirus
  REGION 1..11: note = Table B: HLA-DQA1*05:01-B1*03:01L HLA-DRB1*04:03L HLA-DQA1*01:01-B1*05:01L HLA-DQA1*01-B1*05L HLA-DPA1*03:01-B1*105:01L HLA-DQA1*05:05-B1*03:01L
  source 1..11: note = Severe acute respiratory syndrome coronavirus 2
LNGDVVAIDYK

SEQ ID NO: 10820 - protein, 13 aa, Severe acute respiratory syndrome-related coronavirus
  REGION 1..13: note = Table B: HLA-DQA1*05:01-B1*03:01L HLA-DRB1*13:02L HLA-DQA1*01:02-B1*06:02L HLA-DRB1*01:01L HLA-DRB1*14:01L HLA-DRB3*01:01L HLA-DPA1*03:01-B1*105:01L HLA-DRB1*07:01L HLA-DRB1*15:01L
  source 1..13: note = Severe acute respiratory syndrome coronavirus 2
IDYKHYTPSFKKG

SEQ ID NO: 10821 - protein, 14 aa, Severe acute respiratory syndrome-related coronavirus
  REGION 1..14: note = Table B: HLA-DQA1*05:01-B1*03:01L HLA-DRB1*01:01L HLA-DPA1*02:01-B1*13:01L HLA-DRB1*07:01L
  source 1..14: note = Severe acute respiratory syndrome coronavirus 2
DYKHYTPSFKKGAK

SEQ ID NO: 10822 - protein, 10 aa, Severe acute respiratory syndrome-related coronavirus
  REGION 1..10: note = Table B: HLA-DQA1*05:01-B1*03:01L HLA-DQA1*01-B1*05L HLA-DPA1*01:02-B1*04:01L
  source 1..10: note = Severe acute respiratory syndrome coronavirus 2
TPSFKKGAKL

SEQ ID NO: 10823 - protein, 13 aa, Severe acute respiratory syndrome-related coronavirus
  REGION 1..13: note = Table B: HLA-DQA1*05:01-B1*03:01L HLA-DRB1*04:01L HLA-DRB1*13:02L HLA-DRB1*11:04L HLA-DRB1*08:01L HLA-DRB1*11:01L HLA-DRB3*01:01L HLA-DPA1*02:01-B1*13:01L HLA-DPA1*01:02-B1*04:01L HLA-DRB1*07:01L HLA-DRB1*10:01L
  REGION 1..13: note = CONT. FROM ABOVE: HLA-DRB1*08:03L
  source 1..13: note = Severe acute respiratory syndrome coronavirus 2
KPIVWHVNNATNK

SEQ ID NO: 10824 - protein, 13 aa, Severe acute respiratory syndrome-related coronavirus
  REGION 1..13: note = Table B: HLA-DQA1*05:01-B1*03:01L HLA-DRB1*13:02L HLA-DRB1*14:01L
  source 1..13: note = Severe acute respiratory syndrome coronavirus 2
PIVWHVNNATNKA

SEQ ID NO: 10825 - protein, 12 aa, Severe acute respiratory syndrome-related coronavirus
  REGION 1..12: note = Table B: HLA-DQA1*05:01-B1*03:01L HLA-DRB1*04:03L HLA-DRB1*13:02L HLA-DRB1*01:03L HLA-DRB1*04:02L HLA-DRB1*01:02L HLA-DRB1*08:04L HLA-DRB1*14:01L HLA-DRB1*12:01L HLA-DRB1*12:02L HLA-DRB1*14:54L HLA-DRB1*14:17L HLA-DRB1*16:01L HLA-DRB1*15:03L
  source 1..12: note = Severe acute respiratory syndrome coronavirus 2
VWHVNNATNKAT

SEQ ID NO: 10826 - protein, 10 aa, Severe acute respiratory syndrome-related coronavirus
  REGION 1..10: note = Table B: HLA-DQA1*05:01-B1*03:01L HLA-DRB1*04:03L HLA-DRB1*13:03L HLA-DRB1*01:03L HLA-DQA1*01:02-B1*06:02L HLA-DRB1*08:77L HLA-DPA1*01:03-B1*03:01L HLA-DRB1*03:01L HLA-DRB1*14:02L HLA-DQA1*01-B1*05L HLA-DQA1*05:05-B1*03:19L
  REGION 1..10: note = CONT. FROM ABOVE: HLA-DQA1*05:01-B1*02:01L HLA-DPA1*01:03-B1*04: 01L HLA-DPA1*01:03-B1*04:02L HLA-DRB1*12:01L HLA-DPA1*03:01-B1*1 05:01L HLA-DRB1*10:01L HLA-DRB1*16:01L HLA-DRB1*08:02L HLA-DQA1* 02:01-B1*03:03L HLA-DRB1*15:03L
  source 1..10: note = Severe acute respiratory syndrome coronavirus 2
VNNATNKATY

SEQ ID NO: 10827 - protein, 12 aa, Severe acute respiratory syndrome-related coronavirus
  REGION 1..12: note = Table B: HLA-DQA1*05:01-B1*03:01L HLA-DQA1*01:02-B1*06:02L HLA-DQA1*01-B1*05L HLA-DQA1*05:01-B1*02:01L HLA-DRB1*12:01L HLA-DPA1*03:01-B1*105:01L HLA-DQA1*05:05-B1*03:01L HLA-DRB1*16:01L HLA-DQA1*01:03-B1*06:01L
  REGION 1..12: note = CONT. FROM ABOVE: HLA-DQA1*02:01-B1*03:03L
  source 1..12: note = Severe acute respiratory syndrome coronavirus 2
KPVETSNSFDVL

SEQ ID NO: 10828 - protein, 12 aa, Severe acute respiratory syndrome-related coronavirus
  REGION 1..12: note = Table B: HLA-DQA1*05:01-B1*03:01L HLA-DRB1*04:03L HLA-DQA1*05:01-B1*02:01L HLA-DRB1*16:01L
  source 1..12: note = Severe acute respiratory syndrome coronavirus 2
PVETSNSFDVLK

SEQ ID NO: 10829 - protein, 12 aa, Severe acute respiratory syndrome-related coronavirus
  REGION 1..12: note = Table B: HLA-DQA1*05:01-B1*03:01L HLA-DRB1*13:02L HLA-DRB1*01:03L HLA-DRB1*04:04L HLA-DQA1*01:02-B1*06:02L HLA-DRB1*01:02L HLA-DRB1*08:77L HLA-DRB3*02:01L HLA-DPA1*01:03-B1*03:01L HLA-DPA1*03:01-B1*04:02L
  REGION 1..12: note = CONT. FROM ABOVE: HLA-DRB1*14:01L HLA-DRB1*11:03L HLA-DRB1*11:04 L HLA-DRB1*14:02L HLA-DQA1*01:01-B1*05:01L HLA-DQA1*05:05-B1*03: 19L HLA-DRB4*01:01L HLA-DRB1*04:10L HLA-DRB1*09:01L HLA-DRB1*12: 02L HLA-DPA1*02:01-B1*13:01L HLA-DPA1*03:01-B1*105:01L
  REGION 1..12: note = CONT. FROM ABOVE: HLA-DRB1*14:54L HLA-DQA1*05:05-B1*03:01L HLA-D PA1*01:02-B1*04:01L HLA-DRB1*07:01L HLA-DRB1*10:01L HLA-DRB1*04: 08L
  source 1..12: note = Severe acute respiratory syndrome coronavirus 2
DVLKSEDAQGMD

SEQ ID NO: 10830 - protein, 12 aa, Severe acute respiratory syndrome-related coronavirus
  REGION 1..12: note = Table B: HLA-DQA1*05:01-B1*03:01L HLA-DRB1*04:01L HLA-DRB1*13:02L HLA-DRB1*13:03L HLA-DRB1*01:03L HLA-DRB1*04:04L HLA-DQA1*01:02-B1*06:02L HLA-DRB1*01:01L HLA-DRB1*01:02M HLA-DRB1*08:04L HLA-DRB1*08:77L HLA-DRB3*02:01L
  REGION 1..12: note = CONT. FROM ABOVE: HLA-DPA1*01:03-B1*03:01L HLA-DRB1*14:01L HLA-D RB1*11:03L HLA-DRB1*11:04L HLA-DRB1*14:02L HLA-DQA1*01:01-B1*05: 01L HLA-DRB1*08:01L HLA-DRB1*11:01L HLA-DRB5*01:01L HLA-DQA1*05: 05-B1*03:19L HLA-DRB4*01:01L HLA-DRB1*04:10L HLA-DRB1*09:01L
  REGION 1..12: note = CONT. FROM ABOVE: HLA-DRB1*12:01L HLA-DRB1*12:02L HLA-DRB3*01:01 L HLA-DPA1*02:01-B1*13:01L HLA-DPA1*03:01-B1*105:01L HLA-DRB1*14 :54L HLA-DPA1*01:03-B1*104:01L HLA-DQA1*05:05-B1*03:01L HLA-DRB1 *07:01L HLA-DRB1*10:01L HLA-DRB1*04:08L HLA-DRB1*08:03L
  REGION 1..12: note = CONT. FROM ABOVE: HLA-DRB1*15:03L
  source 1..12: note = Severe acute respiratory syndrome coronavirus 2
VLKSEDAQGMDN

SEQ ID NO: 10831 - protein, 13 aa, Severe acute respiratory syndrome-related coronavirus
  REGION 1..13: note = Table B: HLA-DQA1*05:01-B1*03:01L HLA-DRB1*04:03L HLA-DRB1*01:02L HLA-DPA1*01:03-B1*03:01L HLA-DRB1*14:01L HLA-DRB1*08:01L HLA-DQA1*01-B1*05L HLA-DRB1*12:01L HLA-DPA1*02:01-B1*13:01L HLA-DPA1*01:03-B1*02:01L
  REGION 1..13: note = CONT. FROM ABOVE: HLA-DRB1*15:03L
  source 1..13: note = Severe acute respiratory syndrome coronavirus 2
MDNLACEDLKPVS

SEQ ID NO: 10832 - protein, 13 aa, Severe acute respiratory syndrome-related coronavirus
  REGION 1..13: note = Table B: HLA-DQA1*05:01-B1*03:01L
  source 1..13: note = Severe acute respiratory syndrome coronavirus 2
DNLACEDLKPVSE

SEQ ID NO: 10833 - protein, 14 aa, Severe acute respiratory syndrome-related coronavirus
  REGION 1..14: note = Table B: HLA-DQA1*05:01-B1*03:01L HLA-DQA1*01:02-B1*06:02L HLA-DQA1*05:05-B1*03:01L
  source 1..14: note = Severe acute respiratory syndrome coronavirus 2
KPVSEEVVENPTIQ

SEQ ID NO: 10834 - protein, 10 aa, Severe acute respiratory syndrome-related coronavirus
  REGION 1..10: note = Table B: HLA-DQA1*05:01-B1*03:01L HLA-DRB1*04:01L HLA-DRB1*13:02H HLA-DRB1*13:03H HLA-DRB1*01:03L HLA-DRB1*04:02L HLA-DRB1*04:04L HLA-DQA1*01:02-B1*06:02L HLA-DRB1*01:01M HLA-DRB4*03:01NM HLA-DRB3*02:01M HLA-DPA1*03:01-B1*04:02L
  REGION 1..10: note = CONT. FROM ABOVE: HLA-DRB1*03:01L HLA-DRB1*14:01M HLA-DRB1*11:04 M HLA-DRB1*14:02M HLA-DRB1*08:01H HLA-DRB1*11:01L HLA-DRB5*01:01 M HLA-DRB4*02:01NL HLA-DQA1*05:01-B1*02:01L HLA-DRB1*13:01L HLA- DRB4*01:01L HLA-DPA1*01:03-B1*04:01L HLA-DPA1*01:03-B1*04:02M
  REGION 1..10: note = CONT. FROM ABOVE: HLA-DRB1*12:01H HLA-DRB1*12:02M HLA-DRB3*01:01 L HLA-DPA1*03:01-B1*105:01M HLA-DQA1*03:01-B1*03:02M HLA-DRB1*14 :54L HLA-DQA1*05:05-B1*03:01H HLA-DRB1*14:17L HLA-DRB1*16:01L HL A-DQA1*01:03-B1*06:01L HLA-DRB1*08:02M HLA-DRB1*08:03M
  REGION 1..10: note = CONT. FROM ABOVE: HLA-DQA1*02:01-B1*03:03L HLA-DRB1*15:01M HLA-D RB1*15:03L
  source 1..10: note = Severe acute respiratory syndrome coronavirus 2
EVVENPTIQK

SEQ ID NO: 10835 - protein, 14 aa, Severe acute respiratory syndrome-related coronavirus
  REGION 1..14: note = Table B: HLA-DQA1*05:01-B1*03:01L HLA-DRB1*04:03L HLA-DRB1*13:02L HLA-DRB1*01:02L HLA-DRB1*08:04L HLA-DRB1*14:02L HLA-DRB1*08:01L HLA-DQA1*05:05-B1*03:19L HLA-DQA1*05:01-B1*02:01L HLA-DRB1*12:01L
  REGION 1..14: note = CONT. FROM ABOVE: HLA-DPA1*03:01-B1*105:01L HLA-DQA1*05:05-B1*03 :01L HLA-DRB1*16:01L HLA-DQA1*02:01-B1*03:03L HLA-DRB1*15:03L
  source 1..14: note = Severe acute respiratory syndrome coronavirus 2
DVLECNVKTTEVVG

SEQ ID NO: 10836 - protein, 12 aa, Severe acute respiratory syndrome-related coronavirus
  REGION 1..12: note = Table B: HLA-DQA1*05:01-B1*03:01L HLA-DRB1*04:03L HLA-DRB1*04:05L HLA-DQA1*01:02-B1*06:02L HLA-DRB1*01:02L HLA-DPA1*01:03-B1*03:01L HLA-DQA1*01:01-B1*05:01L HLA-DQA1*05:05-B1*03:19L HLA-DRB1*12:01L
  REGION 1..12: note = CONT. FROM ABOVE: HLA-DPA1*02:01-B1*13:01L HLA-DQA1*05:05-B1*03: 01L HLA-DRB1*16:01L HLA-DRB1*15:03L
  source 1..12: note = Severe acute respiratory syndrome coronavirus 2
NVKTTEVVGDII

SEQ ID NO: 10837 - protein, 14 aa, Severe acute respiratory syndrome-related coronavirus
  REGION 1..14: note = Table B: HLA-DQA1*05:01-B1*03:01L HLA-DQA1*05:05-B1*03:19L
  source 1..14: note = Severe acute respiratory syndrome coronavirus 2
KPANNSLKITEEVG

SEQ ID NO: 10838 - protein, 11 aa, Severe acute respiratory syndrome-related coronavirus
  REGION 1..11: note = Table B: HLA-DQA1*05:01-B1*03:01L HLA-DRB1*08:77L HLA-DPA1*01:03-B1*03:01L HLA-DPA1*03:01-B1*04:02L HLA-DRB1*14:01L HLA-DRB1*14:02L HLA-DQA1*01-B1*05L HLA-DRB4*01:01L HLA-DPA1*01:03-B1*04:01L
  REGION 1..11: note = CONT. FROM ABOVE: HLA-DQA1*05:05-B1*03:116L HLA-DPA1*01:03-B1*04 :02L HLA-DRB1*12:01L HLA-DPA1*02:01-B1*13:01L HLA-DPA1*01:03-B1* 104:01L HLA-DPA1*01:02-B1*04:01L HLA-DRB1*10:01L HLA-DQA1*01:03- B1*06:01L HLA-DRB1*08:02L HLA-DRB1*15:03L
  source 1..11: note = Severe acute respiratory syndrome coronavirus 2
EVGHTDLMAAY

SEQ ID NO: 10839 - protein, 13 aa, Severe acute respiratory syndrome-related coronavirus
  REGION 1..13: note = Table B: HLA-DQA1*05:01-B1*03:01L HLA-DRB1*13:03L HLA-DRB1*01:03L HLA-DRB1*04:04L HLA-DRB1*01:02L HLA-DRB4*03:01NL HLA-DRB3*02:01L HLA-DPA1*01:03-B1*03:01L HLA-DRB1*14:01L HLA-DQA1*05:05-B1*03:19L HLA-DRB1*14:54L
  REGION 1..13: note = CONT. FROM ABOVE: HLA-DQA1*05:05-B1*03:01L HLA-DRB1*04:08L HLA-D RB1*08:03L
  source 1..13: note = Severe acute respiratory syndrome coronavirus 2
TDLMAAYVDNSSL

SEQ ID NO: 10840 - protein, 13 aa, Severe acute respiratory syndrome-related coronavirus
  REGION 1..13: note = Table B: HLA-DQA1*05:01-B1*03:01L HLA-DRB1*13:02L HLA-DRB1*13:03L HLA-DRB1*01:03L HLA-DRB1*08:04L HLA-DRB3*02:01L HLA-DPA1*01:03-B1*03:01L HLA-DRB1*14:01L HLA-DRB1*11:03L HLA-DRB1*11:04L HLA-DRB1*08:01L HLA-DQA1*05:05-B1*03:19L
  REGION 1..13: note = CONT. FROM ABOVE: HLA-DRB1*09:01L HLA-DQA1*05:05-B1*03:01L HLA-D RB1*10:01L HLA-DRB1*08:03L HLA-DRB1*15:01L
  source 1..13: note = Severe acute respiratory syndrome coronavirus 2
DLMAAYVDNSSLT

SEQ ID NO: 10841 - protein, 11 aa, Severe acute respiratory syndrome-related coronavirus
  REGION 1..11: note = Table B: HLA-DQA1*05:01-B1*03:01L HLA-DQA1*01:02-B1*06:02L HLA-DRB1*14:01L HLA-DQA1*05:01-B1*02:01L HLA-DQA1*03:01-B1*03:02L HLA-DRB1*16:01L HLA-DQA1*02:01-B1*03:03L
  source 1..11: note = Severe acute respiratory syndrome coronavirus 2
KPNELSRVLGL

SEQ ID NO: 10842 - protein, 11 aa, Severe acute respiratory syndrome-related coronavirus
  REGION 1..11: note = Table B: HLA-DQA1*05:01-B1*03:01L HLA-DRB1*01:03L HLA-DRB1*04:04L HLA-DRB1*04:05L HLA-DQA1*01:02-B1*06:02L HLA-DRB1*01:02L HLA-DRB4*03:01NL HLA-DRB1*14:01L HLA-DRB1*04:10L HLA-DRB1*12:01L HLA-DQA1*03:01-B1*03:02L HLA-DRB1*14:54L
  REGION 1..11: note = CONT. FROM ABOVE: HLA-DRB1*16:01L HLA-DRB1*04:08L HLA-DQA1*02:01 -B1*03:03L
  source 1..11: note = Severe acute respiratory syndrome coronavirus 2
VLGLKTLATHG

SEQ ID NO: 10843 - protein, 12 aa, Severe acute respiratory syndrome-related coronavirus
  REGION 1..12: note = Table B: HLA-DQA1*05:01-B1*03:01L HLA-DQA1*01:02-B1*06:02L HLA-DQA1*05:05-B1*03:19L HLA-DQA1*03:01-B1*03:02L HLA-DQA1*05:05-B1*03:01L HLA-DQA1*01:03-B1*06:01L HLA-DQA1*02:01-B1*03:03L
  source 1..12: note = Severe acute respiratory syndrome coronavirus 2
ATHGLAAVNSVP

SEQ ID NO: 10844 - protein, 13 aa, Severe acute respiratory syndrome-related coronavirus
  REGION 1..13: note = Table B: HLA-DQA1*05:01-B1*03:01L HLA-DRB1*01:03L HLA-DRB1*01:02L HLA-DRB3*02:01L HLA-DPA1*01:03-B1*03:01L HLA-DRB1*14:01L HLA-DRB1*12:01L HLA-DQA1*05:05-B1*03:01L HLA-DRB1*04:08L
  source 1..13: note = Severe acute respiratory syndrome coronavirus 2
LAAVNSVPWDTIA

SEQ ID NO: 10845 - protein, 12 aa, Severe acute respiratory syndrome-related coronavirus
  REGION 1..12: note = Table B: HLA-DQA1*05:01-B1*03:01L HLA-DRB1*01:03L HLA-DRB1*04:05L HLA-DRB1*01:02L HLA-DPA1*01:03-B1*03:01L HLA-DPA1*03:01-B1*04:02L HLA-DQA1*01:01-B1*05:01L HLA-DPA1*01:03-B1*04:01L HLA-DRB1*04:10L
  REGION 1..12: note = CONT. FROM ABOVE: HLA-DPA1*01:03-B1*04:02L HLA-DRB1*12:01L HLA-D QA1*05:05-B1*03:01L HLA-DRB1*04:08L
  source 1..12: note = Severe acute respiratory syndrome coronavirus 2
AVNSVPWDTIAN

SEQ ID NO: 10846 - protein, 10 aa, Severe acute respiratory syndrome-related coronavirus
  REGION 1..10: note = Table B: HLA-DQA1*05:01-B1*03:01L HLA-DRB1*13:02L HLA-DRB1*13:03L HLA-DRB1*01:03L HLA-DRB1*04:02L HLA-DQA1*01:02-B1*06:02L HLA-DRB1*01:01L HLA-DRB4*03:01NL HLA-DRB1*08:01L HLA-DRB1*12:01L HLA-DQA1*03:01-B1*03:02L
  REGION 1..10: note = CONT. FROM ABOVE: HLA-DQA1*05:05-B1*03:01L HLA-DRB1*14:17L HLA-D RB1*16:01L HLA-DQA1*01:03-B1*06:01L HLA-DQA1*02:01-B1*03:03L
  source 1..10: note = Severe acute respiratory syndrome coronavirus 2
ANYAKPFLNK

SEQ ID NO: 10847 - protein, 11 aa, Severe acute respiratory syndrome-related coronavirus
  REGION 1..11: note = Table B: HLA-DQA1*05:01-B1*03:01L HLA-DRB1*04:04L HLA-DRB1*01:02L HLA-DRB1*08:04L HLA-DPA1*01:03-B1*03:01L HLA-DPA1*03:01-B1*04:02L HLA-DRB1*14:02L HLA-DRB5*01:01L HLA-DQA1*05:05-B1*03:19L HLA-DRB1*09:01L
  REGION 1..11: note = CONT. FROM ABOVE: HLA-DPA1*03:01-B1*105:01L HLA-DQA1*05:05-B1*03 :01L HLA-DRB1*10:01L HLA-DQA1*01:03-B1*06:01L HLA-DRB1*04:08L HL A-DRB1*08:03L HLA-DRB1*15:03L
  source 1..11: note = Severe acute respiratory syndrome coronavirus 2
KVVSTTTNIVT

SEQ ID NO: 10848 - protein, 11 aa, Severe acute respiratory syndrome-related coronavirus
  REGION 1..11: note = Table B: HLA-DQA1*05:01-B1*03:01L HLA-DRB1*14:04L HLA-DQA1*01:02-B1*06:02L HLA-DRB1*01:02L HLA-DRB1*08:04L HLA-DPA1*01:03-B1*03:01L HLA-DRB1*03:01L HLA-DQA1*01:01-B1*05:01L HLA-DQA1*01-B1*05L
  REGION 1..11: note = CONT. FROM ABOVE: HLA-DQA1*05:05-B1*03:19L HLA-DRB5*02:02L HLA-D RB4*01:01L HLA-DPA1*01:03-B1*04:01L HLA-DRB1*09:01L HLA-DPA1*01: 02-B1*04:01L HLA-DRB1*10:01L HLA-DRB1*04:08L HLA-DRB1*15:03L
  source 1..11: note = Severe acute respiratory syndrome coronavirus 2
VVSTTTNIVTR

SEQ ID NO: 10849 - protein, 12 aa, Severe acute respiratory syndrome-related coronavirus
  REGION 1..12: note = Table B: HLA-DQA1*05:01-B1*03:01L HLA-DQA1*01:02-B1*06:02L HLA-DQA1*03:01-B1*03:02L HLA-DQA1*01:03-B1*06:01L HLA-DQA1*02:01-B1*03:03L
  source 1..12: note = Severe acute respiratory syndrome coronavirus 2
STNSRIKASMPT

SEQ ID NO: 10850 - protein, 12 aa, Severe acute respiratory syndrome-related coronavirus
  REGION 1..12: note = Table B: HLA-DQA1*05:01-B1*03:01L HLA-DRB1*13:02L HLA-DRB1*01:02L HLA-DRB3*02:01L HLA-DRB1*14:01L HLA-DQA1*05:01-B1*02:01L HLA-DRB1*12:01L HLA-DQA1*05:05-B1*03:01L HLA-DRB1*07:01L HLA-DRB1*15:03L
  source 1..12: note = Severe acute respiratory syndrome coronavirus 2
SRIKASMPTTIA

SEQ ID NO: 10851 - protein, 11 aa, Severe acute respiratory syndrome-related coronavirus
  REGION 1..11: note = Table B: HLA-DQA1*05:01-B1*03:01L HLA-DRB1*04:03L HLA-DRB1*01:03L HLA-DRB1*04:02L HLA-DQA1*01:02-B1*06:02L HLA-DRB1*01:02L HLA-DQA1*05:05-B1*03:19L HLA-DRB1*14:17L HLA-DQA1*01:03-B1*06:01L HLA-DQA1*02:01-B1*03:03L
  source 1..11: note = Severe acute respiratory syndrome coronavirus 2
IKASMPTTIAK

SEQ ID NO: 10852 - protein, 10 aa, Severe acute respiratory syndrome-related coronavirus
  REGION 1..10: note = Table B: HLA-DQA1*05:01-B1*03:01L HLA-DRB1*04:03L HLA-DRB1*13:03L HLA-DRB1*01:03L HLA-DRB1*04:02L HLA-DRB1*04:05L HLA-DRB1*01:02L HLA-DRB4*03:01NL HLA-DQA1*05:01-B1*02:01L HLA-DRB1*12:01L HLA-DQA1*03:01-B1*03:02L HLA-DRB1*14:54L
  REGION 1..10: note = CONT. FROM ABOVE: HLA-DQA1*05:05-B1*03:01L HLA-DRB1*14:17L HLA-D RB1*16:01L HLA-DQA1*01:03-B1*06:01L HLA-DQA1*02:01-B1*03:03L
  source 1..10: note = Severe acute respiratory syndrome coronavirus 2
ASMPTTIAKN

SEQ ID NO: 10853 - protein, 10 aa, Severe acute respiratory syndrome-related coronavirus
  REGION 1..10: note = Table B: HLA-DQA1*05:01-B1*03:01L HLA-DRB1*04:03L HLA-DRB1*13:03L HLA-DRB1*01:03L HLA-DRB1*04:02L HLA-DRB4*03:01NL HLA-DQA1*03:01-B1*03:02L HLA-DQA1*05:05-B1*03:01L HLA-DRB1*14:17L HLA-DRB1*16:01L HLA-DQA1*01:03-B1*06:01L
  REGION 1..10: note = CONT. FROM ABOVE: HLA-DQA1*02:01-B1*03:03L
  source 1..10: note = Severe acute respiratory syndrome coronavirus 2
PTTIAKNTVK

SEQ ID NO: 10854 - protein, 12 aa, Severe acute respiratory syndrome-related coronavirus
  REGION 1..12: note = Table B: HLA-DQA1*05:01-B1*03:01L HLA-DRB1*04:03L HLA-DRB1*13:02L HLA-DRB1*04:05L HLA-DRB1*01:02L HLA-DRB1*14:01L HLA-DRB1*04:08L HLA-DRB1*15:03L
  source 1..12: note = Severe acute respiratory syndrome coronavirus 2
TIAKNTVKSVGK

SEQ ID NO: 10855 - protein, 12 aa, Severe acute respiratory syndrome-related coronavirus
  REGION 1..12: note = Table B: HLA-DQA1*05:01-B1*03:01L HLA-DQA1*01:02-B1*06:02L HLA-DRB1*01:02L HLA-DRB1*14:01L HLA-DQA1*01:03-B1*06:01L HLA-DRB1*15:03L
  source 1..12: note = Severe acute respiratory syndrome coronavirus 2
IAKNTVKSVGKF

SEQ ID NO: 10856 - protein, 18 aa, Severe acute respiratory syndrome-related coronavirus
  REGION 1..18: note = Table B: HLA-DQA1*05:01-B1*03:01L HLA-DRB1*08:04L HLA-DRB1*11:02L HLA-DRB1*14:02L HLA-DQA1*05:01-B1*02:01L HLA-DPA1*01:03-B1*04:01L HLA-DRB3*01:01L HLA-DQA1*05:05-B1*03:01L
  source 1..18: note = Severe acute respiratory syndrome coronavirus 2
SVGKFCLEASFNYLKSPN

SEQ ID NO: 10857 - protein, 10 aa, Severe acute respiratory syndrome-related coronavirus
  REGION 1..10: note = Table B: HLA-DQA1*05:01-B1*03:01L HLA-DRB1*04:03L HLA-DRB1*04:02L HLA-DRB1*01:02L HLA-DRB3*02:01L HLA-DPA1*03:01-B1*04:02L HLA-DRB1*14:01L HLA-DQA1*01-B1*05L HLA-DQA1*05:01-B1*02:01L HLA-DRB1*12:01L
  REGION 1..10: note = CONT. FROM ABOVE: HLA-DPA1*03:01-B1*105:01L HLA-DQA1*03:01-B1*03 :02L HLA-DRB1*14:17L HLA-DPA1*01:02-B1*04:01L HLA-DRB1*16:01L HL A-DQA1*02:01-B1*03:03L HLA-DRB1*15:03L
  source 1..10: note = Severe acute respiratory syndrome coronavirus 2
FNYLKSPNFS

SEQ ID NO: 10858 - protein, 12 aa, Severe acute respiratory syndrome-related coronavirus
  REGION 1..12: note = Table B: HLA-DQA1*05:01-B1*03:01L HLA-DQA1*01:02-B1*06:02L HLA-DQA1*05:05-B1*03:19L HLA-DPA1*03:01-B1*105:01L HLA-DQA1*05:05-B1*03:01L HLA-DQA1*02:01-B1*03:03L
  source 1..12: note = Severe acute respiratory syndrome coronavirus 2
YSTAALGVLMSN

SEQ ID NO: 10859 - protein, 12 aa, Severe acute respiratory syndrome-related coronavirus
  REGION 1..12: note = Table B: HLA-DQA1*05:01-B1*03:01L HLA-DRB1*04:02L HLA-DQA1*05:05-B1*03:19L HLA-DQA1*05:01-B1*02:01L HLA-DRB1*04:10L HLA-DRB1*12:01L HLA-DPA1*03:01-B1*105:01L
  source 1..12: note = Severe acute respiratory syndrome coronavirus 2
TAALGVLMSNLG

SEQ ID NO: 10860 - protein, 11 aa, Severe acute respiratory syndrome-related coronavirus
  REGION 1..11: note = Table B: HLA-DQA1*05:01-B1*03:01L HLA-DRB1*13:02L HLA-DRB1*13:03L HLA-DRB1*01:03L HLA-DPA1*03:01-B1*04:02L HLA-DRB1*03:01L HLA-DRB1*14:01L HLA-DRB1*11:02L HLA-DRB1*14:02L HLA-DQA1*01-B1*05L HLA-DQA1*05:05-B1*03:116L
  REGION 1..11: note = CONT. FROM ABOVE: HLA-DPA1*01:03-B1*04:02L HLA-DRB1*12:01L HLA-D PA1*02:01-B1*13:01L HLA-DPA1*03:01-B1*105:01L HLA-DQA1*05:05-B1* 03:01L HLA-DRB1*10:01L HLA-DQA1*01:03-B1*06:01L HLA-DRB1*08:02L
  source 1..11: note = Severe acute respiratory syndrome coronavirus 2
VLMSNLGMPSY

SEQ ID NO: 10861 - protein, 14 aa, Severe acute respiratory syndrome-related coronavirus
  REGION 1..14: note = Table B: HLA-DQA1*05:01-B1*03:01L HLA-DQA1*02:01-B1*03:03L
  source 1..14: note = Severe acute respiratory syndrome coronavirus 2
MSNLGMPSYCTGYR

SEQ ID NO: 10862 - protein, 12 aa, Severe acute respiratory syndrome-related coronavirus
  REGION 1..12: note = Table B: HLA-DQA1*05:01-B1*03:01L HLA-DRB1*04:03L HLA-DQA1*01:02-B1*06:02L HLA-DQA1*05:01-B1*02:01L HLA-DPA1*03:01-B1*105:01L HLA-DQA1*05:05-B1*03:01L HLA-DPA1*01:02-B1*04:01L HLA-DQA1*01:03-B1*06:01L
  REGION 1..12: note = CONT. FROM ABOVE: HLA-DQA1*02:01-B1*03:03L
  source 1..12: note = Severe acute respiratory syndrome coronavirus 2
YREGYLNSTNVT

SEQ ID NO: 10863 - protein, 14 aa, Severe acute respiratory syndrome-related coronavirus
  REGION 1..14: note = Table B: HLA-DQA1*05:01-B1*03:01L HLA-DPA1*01:03-B1*03:01L
  source 1..14: note = Severe acute respiratory syndrome coronavirus 2
TNVTIATYCTGSIP

SEQ ID NO: 10864 - protein, 13 aa, Severe acute respiratory syndrome-related coronavirus
  REGION 1..13: note = Table B: HLA-DQA1*05:01-B1*03:01L HLA-DRB1*04:04L HLA-DRB1*01:02L HLA-DRB4*03:01NL HLA-DRB1*08:04L HLA-DQA1*05:05-B1*03:19L HLA-DRB1*12:01L HLA-DRB1*14:54L HLA-DRB1*10:01L HLA-DRB1*04:08L HLA-DRB1*15:03L
  source 1..13: note = Severe acute respiratory syndrome coronavirus 2
SGLDSLDTYPSLE

SEQ ID NO: 10865 - protein, 13 aa, Severe acute respiratory syndrome-related coronavirus
  REGION 1..13: note = Table B: HLA-DQA1*05:01-B1*03:01L HLA-DRB1*01:03L HLA-DRB1*04:04L HLA-DRB1*04:05L HLA-DRB3*02:01L HLA-DPA1*03:01-B1*04:02L HLA-DRB1*14:01L HLA-DRB1*04:10L HLA-DQA1*05:05-B1*03:01L HLA-DRB1*04:08L HLA-DRB1*15:01L
  source 1..13: note = Severe acute respiratory syndrome coronavirus 2
DSLDTYPSLETIQ

SEQ ID NO: 10866 - protein, 11 aa, Severe acute respiratory syndrome-related coronavirus
  REGION 1..11: note = Table B: HLA-DQA1*05:01-B1*03:01L HLA-DRB1*04:03L HLA-DRB1*01:02L HLA-DPA1*03:01-B1*04:02L HLA-DRB1*14:01L HLA-DQA1*05:01-B1*02:01L HLA-DRB1*12:01L HLA-DQA1*03:01-B1*03:02L HLA-DRB1*14:17L
  REGION 1..11: note = CONT. FROM ABOVE: HLA-DPA1*01:02-B1*04:01L HLA-DRB1*16:01L
  source 1..11: note = Severe acute respiratory syndrome coronavirus 2
IQITISSFKWD

SEQ ID NO: 10867 - protein, 11 aa, Severe acute respiratory syndrome-related coronavirus
  REGION 1..11: note = Table B: HLA-DQA1*05:01-B1*03:01L HLA-DRB1*04:03L HLA-DRB1*01:02L HLA-DQA1*05:01-B1*02:01L HLA-DPA1*01:03-B1*04:01L HLA-DRB1*12:01L HLA-DQA1*05:05-B1*03:01L HLA-DRB1*04:08L HLA-DRB1*15:03L
  source 1..11: note = Severe acute respiratory syndrome coronavirus 2
FSYFAVHFISN

SEQ ID NO: 10868 - protein, 11 aa, Severe acute respiratory syndrome-related coronavirus
  REGION 1..11: note = Table B: HLA-DQA1*05:01-B1*03:01L HLA-DRB1*04:03L HLA-DRB1*04:02L HLA-DQA1*01:02-B1*06:02L HLA-DRB1*01:02L HLA-DRB1*14:01L HLA-DQA1*05:01-B1*02:01L HLA-DRB1*12:01L HLA-DPA1*03:01-B1*105:01L HLA-DQA1*03:01-B1*03:02L
  REGION 1..11: note = CONT. FROM ABOVE: HLA-DQA1*05:05-B1*03:01L HLA-DRB1*14:17L HLA-D RB1*16:01L HLA-DQA1*01:03-B1*06:01L HLA-DQA1*02:01-B1*03:03L HLA -DRB1*15:03L
  source 1..11: note = Severe acute respiratory syndrome coronavirus 2
IINLVQMAPIS

SEQ ID NO: 10869 - protein, 11 aa, Severe acute respiratory syndrome-related coronavirus
  REGION 1..11: note = Table B: HLA-DQA1*05:01-B1*03:01L HLA-DRB1*04:03L HLA-DRB1*01:03L HLA-DRB1*04:02L HLA-DQA1*01:02-B1*06:02L HLA-DPA1*03:01-B1*105:01L HLA-DRB1*14:17L HLA-DPA1*01:02-B1*04:01L HLA-DRB1*16:01L
  source 1..11: note = Severe acute respiratory syndrome coronavirus 2
VQMAPISAMVR

SEQ ID NO: 10870 - protein, 10 aa, Severe acute respiratory syndrome-related coronavirus
  REGION 1..10: note = Table B: HLA-DQA1*05:01-B1*03:01L HLA-DRB1*13:03M HLA-DRB1*01:03L HLA-DQA1*01:02-B1*06:02M HLA-DRB1*08:77L HLA-DPA1*01:03-B1*03:01L HLA-DPA1*03:01-B1*04:02L HLA-DRB1*03:01L HLA-DRB1*14:01L HLA-DRB1*14:02L
  REGION 1..10: note = CONT. FROM ABOVE: HLA-DQA1*01-B1*05L HLA-DQA1*05:05-B1*03:19L HL A-DQA1*05:01-B1*02:01L HLA-DPA1*01:03-B1*04:01L HLA-DQA1*05:05-B 1*03:116L HLA-DPA1*01:03-B1*04:02L HLA-DPA1*02:01-B1*13:01L HLA- DPA1*03:01-B1*105:01M HLA-DPA1*01:02-B1*04:01L HLA-DRB1*16:01L
  REGION 1..10: note = CONT. FROM ABOVE: HLA-DQA1*01:03-B1*06:01L HLA-DQA1*02:01-B1*03: 03L HLA-DRB1*15:03L
  source 1..10: note = Severe acute respiratory syndrome coronavirus 2
APISAMVRMY

SEQ ID NO: 10871 - protein, 12 aa, Severe acute respiratory syndrome-related coronavirus
  REGION 1..12: note = Table B: HLA-DQA1*05:01-B1*03:01L HLA-DRB1*04:03L HLA-DRB1*13:02L HLA-DRB1*13:03L HLA-DRB1*04:02L HLA-DRB1*04:05L HLA-DRB1*01:02L HLA-DRB1*08:04L HLA-DPA1*03:01-B1*04:02L HLA-DRB1*14:01L HLA-DRB1*11:04L HLA-DRB1*11:01L
  REGION 1..12: note = CONT. FROM ABOVE: HLA-DPA1*01:03-B1*04:02L HLA-DRB1*12:01L HLA-D RB3*01:01L HLA-DPA1*02:01-B1*13:01L HLA-DPA1*03:01-B1*105:01L HL A-DQA1*03:01-B1*03:02L HLA-DRB1*14:54L HLA-DPA1*01:03-B1*02:01L HLA-DRB1*08:03L HLA-DRB1*15:03L
  source 1..12: note = Severe acute respiratory syndrome coronavirus 2
ASFYYVWKSYVH

SEQ ID NO: 10872 - protein, 12 aa, Severe acute respiratory syndrome-related coronavirus
  REGION 1..12: note = Table B: HLA-DQA1*05:01-B1*03:01L HLA-DRB1*13:02L HLA-DRB1*04:05L HLA-DRB1*08:04L HLA-DRB1*14:01L HLA-DRB1*11:04L HLA-DRB1*11:01L HLA-DQA1*01-B1*05L HLA-DRB3*01:01L HLA-DQA1*03:01-B1*03:02L
  source 1..12: note = Severe acute respiratory syndrome coronavirus 2
YYVWKSYVHVVD

SEQ ID NO: 10873 - protein, 11 aa, Severe acute respiratory syndrome-related coronavirus
  REGION 1..11: note = Table B: HLA-DQA1*05:01-B1*03:01L HLA-DRB1*04:03L HLA-DPA1*03:01-B1*105:01L HLA-DQA1*03:01-B1*03:02L HLA-DQA1*05:05-B1*03:01L
  source 1..11: note = Severe acute respiratory syndrome coronavirus 2
VECTTIVNGVR

SEQ ID NO: 10874 - protein, 10 aa, Severe acute respiratory syndrome-related coronavirus
  REGION 1..10: note = Table B: HLA-DQA1*05:01-B1*03:01L HLA-DRB1*01:03L HLA-DQA1*01:02-B1*06:02L HLA-DPA1*01:03-B1*03:01L HLA-DRB1*03:01L HLA-DRB1*14:02L HLA-DQA1*05:05-B1*03:19L HLA-DQA1*05:01-B1*02:01L HLA-DPA1*01:03-B1*04:01L
  REGION 1..10: note = CONT. FROM ABOVE: HLA-DPA1*01:03-B1*04:02L HLA-DRB1*16:01L HLA-D QA1*01:03-B1*06:01L HLA-DRB1*08:02L HLA-DQA1*02:01-B1*03:03L
  source 1..10: note = Severe acute respiratory syndrome coronavirus 2
IVNGVRRSFY

SEQ ID NO: 10875 - protein, 11 aa, Severe acute respiratory syndrome-related coronavirus
  REGION 1..11: note = Table B: HLA-DQA1*05:01-B1*03:01L HLA-DRB1*04:01L HLA-DRB1*04:04L HLA-DQA1*01:02-B1*06:02L HLA-DRB1*08:04L HLA-DRB1*08:77L HLA-DPA1*01:03-B1*03:01L HLA-DPA1*03:01-B1*04:02L HLA-DRB1*11:03L HLA-DRB1*14:02L
  REGION 1..11: note = CONT. FROM ABOVE: HLA-DRB1*11:01L HLA-DQA1*05:05-B1*03:19L HLA-D RB4*01:01L HLA-DRB1*09:01L HLA-DRB3*01:01L HLA-DPA1*02:01-B1*13: 01L HLA-DRB1*07:01L HLA-DRB1*08:03L
  source 1..11: note = Severe acute respiratory syndrome coronavirus 2
STFISDEVARD

SEQ ID NO: 10876 - protein, 11 aa, Severe acute respiratory syndrome-related coronavirus
  REGION 1..11: note = Table B: HLA-DQA1*05:01-B1*03:01L HLA-DQA1*05:05-B1*03:116L
  source 1..11: note = Severe acute respiratory syndrome coronavirus 2
ISDEVARDLSL

SEQ ID NO: 10877 - protein, 10 aa, Severe acute respiratory syndrome-related coronavirus
  REGION 1..10: note = Table B: HLA-DQA1*05:01-B1*03:01L HLA-DRB1*04:03L HLA-DRB1*13:03L HLA-DRB1*01:03L HLA-DQA1*01:02-B1*06:02L HLA-DRB4*03:01NL HLA-DRB1*08:77L HLA-DPA1*01:03-B1*03:01L HLA-DRB1*03:01L HLA-DRB1*11:02L HLA-DRB1*14:02L
  REGION 1..10: note = CONT. FROM ABOVE: HLA-DQA1*01-B1*05L HLA-DQA1*05:05-B1*03:19L HL A-DQA1*05:01-B1*02:01L HLA-DRB4*01:01L HLA-DPA1*01:03-B1*04:01L HLA-DPA1*01:03-B1*04:02L HLA-DRB1*12:01L HLA-DPA1*03:01-B1*105:0 1L HLA-DPA1*01:03-B1*104:01L HLA-DRB1*10:01L HLA-DRB1*16:01L
  REGION 1..10: note = CONT. FROM ABOVE: HLA-DRB1*08:02L HLA-DQA1*02:01-B1*03:03L HLA-D RB1*15:03L
  source 1..10: note = Severe acute respiratory syndrome coronavirus 2
PINPTDQSSY

SEQ ID NO: 10878 - protein, 14 aa, Severe acute respiratory syndrome-related coronavirus
  REGION 1..14: note = Table B: HLA-DQA1*05:01-B1*03:01L HLA-DRB1*01:03L HLA-DRB1*04:05L HLA-DPA1*01:03-B1*03:01L HLA-DQA1*01:01-B1*05:01L HLA-DQA1*05:05-B1*03:19L HLA-DPA1*01:03-B1*04:02L HLA-DRB1*12:01L
  REGION 1..14: note = CONT. FROM ABOVE: HLA-DPA1*02:01-B1*13:01L HLA-DPA1*03:01-B1*105 :01L HLA-DQA1*05:05-B1*03:01L HLA-DRB1*16:01L HLA-DRB1*04:08L
  source 1..14: note = Severe acute respiratory syndrome coronavirus 2
NPTDQSSYIVDSVT

SEQ ID NO: 10879 - protein, 13 aa, Severe acute respiratory syndrome-related coronavirus
  REGION 1..13: note = Table B: HLA-DQA1*05:01-B1*03:01L HLA-DRB1*04:05L HLA-DQA1*01:02-B1*06:02L HLA-DRB1*01:02L HLA-DRB1*08:04L HLA-DRB1*08:77L HLA-DRB3*02:01L HLA-DPA1*01:03-B1*03:01L HLA-DPA1*03:01-B1*04:02L HLA-DRB1*11:03L HLA-DRB1*11:04L
  REGION 1..13: note = CONT. FROM ABOVE: HLA-DQA1*01:01-B1*05:01L HLA-DRB5*01:01L HLA-D RB1*04:10L HLA-DRB1*12:02L HLA-DPA1*02:01-B1*13:01L HLA-DPA1*03: 01-B1*105:01L HLA-DRB1*10:01L HLA-DRB1*04:08L HLA-DRB1*08:03L HL A-DRB1*15:03L
  source 1..13: note = Severe acute respiratory syndrome coronavirus 2
DQSSYIVDSVTVK

SEQ ID NO: 10880 - protein, 10 aa, Severe acute respiratory syndrome-related coronavirus
  REGION 1..10: note = Table B: HLA-DQA1*05:01-B1*03:01L HLA-DRB1*04:01L HLA-DRB1*13:02L HLA-DRB1*13:03L HLA-DRB1*01:03M HLA-DQA1*01:02-B1*06:02M HLA-DRB4*03:01NL HLA-DRB1*08:77L HLA-DPA1*01:03-B1*03:01L HLA-DPA1*03:01-B1*04:02L
  REGION 1..10: note = CONT. FROM ABOVE: HLA-DRB1*03:01M HLA-DRB1*14:01L HLA-DRB1*11:02 L HLA-DRB1*14:02M HLA-DRB1*11:01L HLA-DRB5*01:01L HLA-DQA1*01-B1 *05L HLA-DQA1*05:05-B1*03:19M HLA-DQA1*05:01-B1*02:01M HLA-DRB4* 01:01L HLA-DPA1*01:03-B1*04:01M HLA-DQA1*05:05-B1*03:116L
  REGION 1..10: note = CONT. FROM ABOVE: HLA-DPA1*01:03-B1*04:02M HLA-DRB1*12:01L HLA-D PA1*02:01-B1*13:01L HLA-DPA1*03:01-B1*105:01L HLA-DPA1*01:03-B1* 104:01L HLA-DPA1*01:02-B1*04:01L HLA-DRB1*10:01L HLA-DRB1*16:01L HLA-DQA1*01:03-B1*06:01L HLA-DRB1*08:02L
  REGION 1..10: note = CONT. FROM ABOVE: HLA-DQA1*02:01-B1*03:03M HLA-DRB1*15:03L
  source 1..10: note = Severe acute respiratory syndrome coronavirus 2
TVKNGSIHLY

SEQ ID NO: 10881 - protein, 12 aa, Severe acute respiratory syndrome-related coronavirus
  REGION 1..12: note = Table B: HLA-DQA1*05:01-B1*03:01L HLA-DPA1*03:01-B1*105:01L HLA-DQA1*03:01-B1*03:02L
  source 1..12: note = Severe acute respiratory syndrome coronavirus 2
VKNGSIHLYFDK

SEQ ID NO: 10882 - protein, 13 aa, Severe acute respiratory syndrome-related coronavirus
  REGION 1..13: note = Table B: HLA-DQA1*05:01-B1*03:01L HLA-DRB1*08:04L HLA-DRB3*02:01L HLA-DRB1*03:01L HLA-DRB1*11:04L HLA-DQA1*05:01-B1*02:01L HLA-DPA1*03:01-B1*105:01L HLA-DQA1*01:03-B1*06:01L
  source 1..13: note = Severe acute respiratory syndrome coronavirus 2
SIHLYFDKAGQKT

SEQ ID NO: 10883 - protein, 11 aa, Severe acute respiratory syndrome-related coronavirus
  REGION 1..11: note = Table B: HLA-DQA1*05:01-B1*03:01L HLA-DRB1*03:01L HLA-DRB1*11:01L HLA-DPA1*01:02-B1*04:01L HLA-DRB1*15:03L
  source 1..11: note = Severe acute respiratory syndrome coronavirus 2
KTYERHSLSHF

SEQ ID NO: 10884 - protein, 13 aa, Severe acute respiratory syndrome-related coronavirus
  REGION 1..13: note = Table B: HLA-DQA1*05:01-B1*03:01L HLA-DRB1*01:03L HLA-DQA1*01:01-B1*05:01L HLA-DRB1*12:01L HLA-DRB1*15:03L
  source 1..13: note = Severe acute respiratory syndrome coronavirus 2
ERHSLSHFVNLDN

SEQ ID NO: 10885 - protein, 12 aa, Severe acute respiratory syndrome-related coronavirus
  REGION 1..12: note = Table B: HLA-DQA1*05:01-B1*03:01L HLA-DRB1*01:01L HLA-DRB1*08:77L HLA-DPA1*01:03-B1*03:01L HLA-DRB1*14:02L HLA-DQA1*05:05-B1*03:19L HLA-DRB4*01:01L HLA-DRB1*09:01L
  source 1..12: note = Severe acute respiratory syndrome coronavirus 2
FVNLDNLRANNT

SEQ ID NO: 10886 - protein, 12 aa, Severe acute respiratory syndrome-related coronavirus
  REGION 1..12: note = Table B: HLA-DQA1*05:01-B1*03:01L HLA-DRB1*01:03L HLA-DRB1*04:05L HLA-DQA1*01:02-B1*06:02L HLA-DRB1*01:02L HLA-DRB1*16:01L HLA-DQA1*01:03-B1*06:01L HLA-DRB1*04:08L HLA-DQA1*02:01-B1*03:03L
  source 1..12: note = Severe acute respiratory syndrome coronavirus 2
VNLDNLRANNTK

SEQ ID NO: 10887 - protein, 14 aa, Severe acute respiratory syndrome-related coronavirus
  REGION 1..14: note = Table B: HLA-DQA1*05:01-B1*03:01L HLA-DRB1*13:02L HLA-DRB1*13:03L HLA-DRB1*01:03L HLA-DRB1*04:02L HLA-DRB1*04:04L HLA-DRB1*04:05L HLA-DQA1*01:02-B1*06:02L HLA-DRB1*01:02L HLA-DRB1*08:04L HLA-DRB1*11:04L HLA-DRB1*12:01L
  REGION 1..14: note = CONT. FROM ABOVE: HLA-DQA1*03:01-B1*03:02L HLA-DRB1*14:54L HLA-D QA1*05:05-B1*03:01L HLA-DRB1*16:01L HLA-DQA1*01:03-B1*06:01L HLA -DRB1*04:08L HLA-DQA1*02:01-B1*03:03L HLA-DRB1*15:03L
  source 1..14: note = Severe acute respiratory syndrome coronavirus 2
LDNLRANNTKGSLP

SEQ ID NO: 10888 - protein, 14 aa, Severe acute respiratory syndrome-related coronavirus
  REGION 1..14: note = Table B: HLA-DQA1*05:01-B1*03:01L HLA-DRB1*08:01L HLA-DQA1*03:01-B1*03:02L HLA-DRB1*04:08L
  source 1..14: note = Severe acute respiratory syndrome coronavirus 2
VFDGKSKCEESSAK

SEQ ID NO: 10889 - protein, 11 aa, Severe acute respiratory syndrome-related coronavirus
  REGION 1..11: note = Table B: HLA-DQA1*05:01-B1*03:01L HLA-DQA1*01:02-B1*06:02L HLA-DQA1*05:05-B1*03:19L HLA-DQA1*03:01-B1*03:02L HLA-DQA1*05:05-B1*03:01L
  source 1..11: note = Severe acute respiratory syndrome coronavirus 2
SAKSASVYYSQ

SEQ ID NO: 10890 - protein, 13 aa, Severe acute respiratory syndrome-related coronavirus
  REGION 1..13: note = Table B: HLA-DQA1*05:01-B1*03:01L HLA-DRB1*13:03L HLA-DRB1*01:03L HLA-DRB1*04:04L HLA-DRB1*04:05L HLA-DRB1*01:02L HLA-DRB4*03:01NL HLA-DRB1*08:04L HLA-DRB1*08:77L HLA-DRB3*02:01L HLA-DPA1*01:03-B1*03:01L HLA-DPA1*03:01-B1*04:02L
  REGION 1..13: note = CONT. FROM ABOVE: HLA-DRB1*11:03L HLA-DRB1*11:04L HLA-DRB1*14:02 L HLA-DQA1*01-B1*05L HLA-DRB1*04:10L HLA-DRB3*01:01L HLA-DPA1*03 :01-B1*105:01L HLA-DQA1*03:01-B1*03:02L HLA-DRB1*10:01L HLA-DRB1 *04:08L HLA-DQA1*02:01-B1*03:03L
  source 1..13: note = Severe acute respiratory syndrome coronavirus 2
QPILLLDQALVSD

SEQ ID NO: 10891 - protein, 15 aa, Severe acute respiratory syndrome-related coronavirus
  REGION 1..15: note = Table B: HLA-DQA1*05:01-B1*03:01L HLA-DQA1*01:02-B1*06:02L HLA-DRB1*01:01L HLA-DRB3*02:01L HLA-DPA1*03:01-B1*04:02L HLA-DRB1*03:01L HLA-DQA1*01:01-B1*05:01L HLA-DRB1*08:01L HLA-DRB1*11:01L HLA-DQA1*05:05-B1*03:19L HLA-DRB1*13:01L
  REGION 1..15: note = CONT. FROM ABOVE: HLA-DRB1*09:01L HLA-DPA1*01:03-B1*04:02L HLA-D PA1*01:03-B1*104:01L HLA-DQA1*05:05-B1*03:01L HLA-DRB1*07:01L HL A-DQA1*01:03-B1*06:01L HLA-DRB1*15:01L
  source 1..15: note = Severe acute respiratory syndrome coronavirus 2
DQALVSDVGDSAEVA

SEQ ID NO: 10892 - protein, 12 aa, Severe acute respiratory syndrome-related coronavirus
  REGION 1..12: note = Table B: HLA-DQA1*05:01-B1*03:01L HLA-DRB1*13:02L HLA-DRB1*04:02L HLA-DRB4*03:01NL HLA-DRB3*02:01L HLA-DPA1*01:03-B1*03:01L HLA-DRB1*14:01L HLA-DRB1*04:10L HLA-DRB1*09:01L HLA-DRB1*12:02L HLA-DQA1*03:01-B1*03:02L
  REGION 1..12: note = CONT. FROM ABOVE: HLA-DRB1*14:54L HLA-DQA1*05:05-B1*03:01L HLA-D RB1*14:17L HLA-DRB1*07:01L HLA-DRB1*04:08L
  source 1..12: note = Severe acute respiratory syndrome coronavirus 2
DAYVNTFSSTFN

SEQ ID NO: 10893 - protein, 12 aa, Severe acute respiratory syndrome-related coronavirus
  REGION 1..12: note = Table B: HLA-DQA1*05:01-B1*03:01L HLA-DRB1*13:03L HLA-DRB1*01:03L HLA-DRB1*04:02L HLA-DRB1*04:05L HLA-DQA1*01:02-B1*06:02L HLA-DRB1*01:02L HLA-DRB1*08:04L HLA-DPA1*01:03-B1*03:01L HLA-DRB1*14:01L HLA-DRB1*11:03L
  REGION 1..12: note = CONT. FROM ABOVE: HLA-DRB1*11:04L HLA-DRB1*14:02L HLA-DRB1*08:01 L HLA-DRB5*01:01L HLA-DQA1*01-B1*05L HLA-DQA1*05:05-B1*03:19L HL A-DRB4*01:01L HLA-DPA1*01:03-B1*04:01L HLA-DRB1*04:10L HLA-DRB1* 09:01L HLA-DRB1*12:02L HLA-DRB3*01:01L HLA-DPA1*02:01-B1*13:01L
  REGION 1..12: note = CONT. FROM ABOVE: HLA-DPA1*03:01-B1*105:01L HLA-DQA1*03:01-B1*03 :02L HLA-DRB1*14:54L HLA-DPA1*01:03-B1*104:01L HLA-DQA1*05:05-B1 *03:01L HLA-DRB1*14:17L HLA-DPA1*01:02-B1*04:01L HLA-DRB1*10:01L HLA-DQA1*01:03-B1*06:01L HLA-DRB1*04:08L HLA-DRB1*08:03L
  source 1..12: note = Severe acute respiratory syndrome coronavirus 2
VNTFSSTFNVPM

SEQ ID NO: 10894 - protein, 11 aa, Severe acute respiratory syndrome-related coronavirus
  REGION 1..11: note = Table B: HLA-DQA1*05:01-B1*03:01L HLA-DRB1*13:02L HLA-DRB1*13:03L HLA-DRB1*04:02L HLA-DRB1*01:02L HLA-DRB4*03:01NL HLA-DRB1*08:77L HLA-DRB3*02:01L HLA-DPA1*03:01-B1*04:02L HLA-DPA1*03:01-B1*105:01L HLA-DRB1*14:17L HLA-DRB1*07:01L
  REGION 1..11: note = CONT. FROM ABOVE: HLA-DRB1*15:03L
  source 1..11: note = Severe acute respiratory syndrome coronavirus 2
TFSSTFNVPME

SEQ ID NO: 10895 - protein, 10 aa, Severe acute respiratory syndrome-related coronavirus
  REGION 1..10: note = Table B: HLA-DQA1*05:01-B1*03:01L HLA-DQA1*03:01-B1*03:02L HLA-DPA1*01:02-B1*04:01L HLA-DQA1*02:01-B1*03:03L
  source 1..10: note = Severe acute respiratory syndrome coronavirus 2
NVPMEKLKTL

SEQ ID NO: 10896 - protein, 14 aa, Severe acute respiratory syndrome-related coronavirus
  REGION 1..14: note = Table B: HLA-DQA1*05:01-B1*03:01L HLA-DRB1*13:02L HLA-DRB1*01:03L HLA-DRB1*04:02L HLA-DRB1*04:04L HLA-DRB1*04:05L HLA-DQA1*01:02-B1*06:02L HLA-DRB1*01:02L HLA-DRB1*08:04L HLA-DPA1*01:03-B1*03:01L HLA-DRB1*14:01L HLA-DRB1*11:04L
  REGION 1..14: note = CONT. FROM ABOVE: HLA-DRB1*08:01L HLA-DRB1*04:10L HLA-DRB1*12:01 L HLA-DPA1*02:01-B1*13:01L HLA-DPA1*03:01-B1*105:01L HLA-DQA1*03 :01-B1*03:02L HLA-DPA1*01:03-B1*104:01L HLA-DQA1*05:05-B1*03:01L HLA-DRB1*10:01L HLA-DRB1*16:01L HLA-DRB1*04:08L
  REGION 1..14: note = CONT. FROM ABOVE: HLA-DQA1*02:01-B1*03:03L HLA-DRB1*15:03L
  source 1..14: note = Severe acute respiratory syndrome coronavirus 2
VPMEKLKTLVATAE

SEQ ID NO: 10897 - protein, 12 aa, Severe acute respiratory syndrome-related coronavirus
  REGION 1..12: note = Table B: HLA-DQA1*05:01-B1*03:01L HLA-DRB1*13:02L HLA-DRB1*04:02L HLA-DRB1*04:05L HLA-DRB4*03:01NL HLA-DRB1*08:77L HLA-DRB3*02:01L HLA-DPA1*01:03-B1*03:01L HLA-DPA1*03:01-B1*04:02L HLA-DRB1*14:01L HLA-DRB1*04:10L
  REGION 1..12: note = CONT. FROM ABOVE: HLA-DRB1*12:02L HLA-DPA1*02:01-B1*13:01L HLA-D PA1*03:01-B1*105:01L HLA-DRB1*14:54L HLA-DRB1*14:17L HLA-DRB1*07 :01L HLA-DRB1*16:01L HLA-DQA1*01:03-B1*06:01L HLA-DRB1*15:03L
  source 1..12: note = Severe acute respiratory syndrome coronavirus 2
LKTLVATAEAEL

SEQ ID NO: 10898 - protein, 11 aa, Severe acute respiratory syndrome-related coronavirus
  REGION 1..11: note = Table B: HLA-DQA1*05:01-B1*03:01L HLA-DRB1*04:03L HLA-DQA1*01:02-B1*06:02L HLA-DQA1*05:01-B1*02:01L HLA-DPA1*03:01-B1*105:01L HLA-DQA1*05:05-B1*03:01L HLA-DRB1*14:17L HLA-DQA1*02:01-B1*03:03L
  source 1..11: note = Severe acute respiratory syndrome coronavirus 2
TAEAELAKNVS

SEQ ID NO: 10899 - protein, 11 aa, Severe acute respiratory syndrome-related coronavirus
  REGION 1..11: note = Table B: HLA-DQA1*05:01-B1*03:01L HLA-DPA1*03:01-B1*04:02L HLA-DPA1*01:02-B1*04:01L
  source 1..11: note = Severe acute respiratory syndrome coronavirus 2
TFISAARQGFV

SEQ ID NO: 10900 - protein, 12 aa, Severe acute respiratory syndrome-related coronavirus
  REGION 1..12: note = Table B: HLA-DQA1*05:01-B1*03:01L HLA-DRB1*13:02L HLA-DRB1*01:03L HLA-DRB1*04:02L HLA-DRB1*04:05L HLA-DQA1*01:02-B1*06:02L HLA-DRB1*01:02L HLA-DRB4*03:01NL HLA-DRB1*08:77L HLA-DPA1*01:03-B1*03:01L HLA-DRB1*11:04L
  REGION 1..12: note = CONT. FROM ABOVE: HLA-DRB1*14:02L HLA-DRB5*01:01L HLA-DQA1*05:05 -B1*03:19L HLA-DRB4*01:01L HLA-DRB1*04:10L HLA-DPA1*01:03-B1*04: 02L HLA-DRB1*12:01L HLA-DRB3*01:01L HLA-DPA1*02:01-B1*13:01L HLA -DPA1*03:01-B1*105:01L HLA-DRB1*14:54L HLA-DQA1*05:05-B1*03:01L
  REGION 1..12: note = CONT. FROM ABOVE: HLA-DRB1*14:17L HLA-DPA1*01:02-B1*04:01L HLA-D RB1*07:01L HLA-DRB1*04:08L HLA-DRB1*15:03L
  source 1..12: note = Severe acute respiratory syndrome coronavirus 2
VDSDVETKDVVE

SEQ ID NO: 10901 - protein, 13 aa, Severe acute respiratory syndrome-related coronavirus
  REGION 1..13: note = Table B: HLA-DQA1*05:01-B1*03:01L HLA-DRB1*01:03L HLA-DRB1*01:02L HLA-DPA1*03:01-B1*105:01L HLA-DRB1*04:08L
  source 1..13: note = Severe acute respiratory syndrome coronavirus 2
SDVETKDVVECLK

SEQ ID NO: 10902 - protein, 18 aa, Severe acute respiratory syndrome-related coronavirus
  REGION 1..18: note = Table B: HLA-DQA1*05:01-B1*03:01L HLA-DRB1*04:03L HLA-DPA1*03:01-B1*04:02L HLA-DRB1*14:02L HLA-DQA1*05:05-B1*03:116L HLA-DPA1*01:03-B1*04:02L HLA-DQA1*05:05-B1*03:01L HLA-DRB1*07:01L HLA-DRB1*08:03L
  source 1..18: note = Severe acute respiratory syndrome coronavirus 2
DVETKDVVECLKLSHQSD

SEQ ID NO: 10903 - protein, 15 aa, Severe acute respiratory syndrome-related coronavirus
  REGION 1..15: note = Table B: HLA-DQA1*05:01-B1*03:01L HLA-DPA1*02:01-B1*13:01L HLA-DQA1*05:05-B1*03:01L
  source 1..15: note = Severe acute respiratory syndrome coronavirus 2
DVVECLKLSHQSDIE

SEQ ID NO: 10904 - protein, 11 aa, Severe acute respiratory syndrome-related coronavirus
  REGION 1..11: note = Table B: HLA-DQA1*05:01-B1*03:01L HLA-DRB1*08:77L HLA-DPA1*03:01-B1*04:02L HLA-DQA1*01-B1*05L HLA-DRB4*01:01L HLA-DPA1*01:03-B1*104:01L HLA-DRB1*10:01L HLA-DRB1*16:01L
  source 1..11: note = Severe acute respiratory syndrome coronavirus 2
IEVTGDSCNNY

SEQ ID NO: 10905 - protein, 12 aa, Severe acute respiratory syndrome-related coronavirus
  REGION 1..12: note = Table B: HLA-DQA1*05:01-B1*03:01L HLA-DRB1*13:03L HLA-DRB1*01:03L HLA-DRB1*04:05L HLA-DRB1*01:02L HLA-DRB4*03:01NL HLA-DRB1*08:04L HLA-DRB1*14:01L HLA-DRB1*08:01L HLA-DQA1*05:01-B1*02:01L HLA-DRB1*04:10L HLA-DRB1*12:01L
  REGION 1..12: note = CONT. FROM ABOVE: HLA-DPA1*02:01-B1*13:01L HLA-DRB1*14:54L HLA-D QA1*05:05-B1*03:01L HLA-DRB1*04:08L HLA-DRB1*08:03L HLA-DRB1*15: 03L
  source 1..12: note = Severe acute respiratory syndrome coronavirus 2
NNYMLTYNKVEN

SEQ ID NO: 10906 - protein, 12 aa, Severe acute respiratory syndrome-related coronavirus
  REGION 1..12: note = Table B: HLA-DQA1*05:01-B1*03:01L HLA-DRB1*01:03L HLA-DRB1*01:02L HLA-DRB1*08:04L HLA-DRB3*02:01L HLA-DPA1*01:03-B1*03:01L HLA-DPA1*03:01-B1*04:02L HLA-DRB1*14:01L HLA-DQA1*05:01-B1*02:01L
  REGION 1..12: note = CONT. FROM ABOVE: HLA-DPA1*01:03-B1*04:01L HLA-DPA1*01:03-B1*04: 02L HLA-DRB1*12:01L HLA-DPA1*02:01-B1*13:01L HLA-DRB1*04:08L HLA -DRB1*15:03L
  source 1..12: note = Severe acute respiratory syndrome coronavirus 2
NYMLTYNKVENM

SEQ ID NO: 10907 - protein, 11 aa, Severe acute respiratory syndrome-related coronavirus
  REGION 1..11: note = Table B: HLA-DQA1*05:01-B1*03:01L HLA-DRB1*04:05L HLA-DRB4*03:01NL HLA-DRB1*16:01L HLA-DQA1*01:03-B1*06:01L
  source 1..11: note = Severe acute respiratory syndrome coronavirus 2
YNKVENMTPRD

SEQ ID NO: 10908 - protein, 14 aa, Severe acute respiratory syndrome-related coronavirus
  REGION 1..14: note = Table B: HLA-DQA1*05:01-B1*03:01L HLA-DRB1*01:03L HLA-DRB1*04:05L HLA-DRB1*01:02L HLA-DRB1*08:01L HLA-DRB1*12:01L HLA-DPA1*02:01-B1*13:01L HLA-DPA1*03:01-B1*105:01L HLA-DQA1*03:01-B1*03:02L HLA-DQA1*05:05-B1*03:01L
  REGION 1..14: note = CONT. FROM ABOVE: HLA-DRB1*16:01L HLA-DRB1*04:08L HLA-DQA1*02:01 -B1*03:03L
  source 1..14: note = Severe acute respiratory syndrome coronavirus 2
TPRDLGACIDCSAR

SEQ ID NO: 10909 - protein, 13 aa, Severe acute respiratory syndrome-related coronavirus
  REGION 1..13: note = Table B: HLA-DQA1*05:01-B1*03:01L HLA-DRB1*04:03L HLA-DRB1*01:03L HLA-DRB1*04:04L HLA-DRB1*04:05L HLA-DQA1*01:02-B1*06:02L HLA-DRB1*08:01L HLA-DRB1*12:01L HLA-DPA1*02:01-B1*13:01L HLA-DRB1*16:01L
  REGION 1..13: note = CONT. FROM ABOVE: HLA-DQA1*01:03-B1*06:01L HLA-DRB1*04:08L
  source 1..13: note = Severe acute respiratory syndrome coronavirus 2
SARHINAQVAKSH

SEQ ID NO: 10910 - protein, 13 aa, Severe acute respiratory syndrome-related coronavirus
  REGION 1..13: note = Table B: HLA-DQA1*05:01-B1*03:01L HLA-DRB1*04:03L HLA-DRB1*13:02L HLA-DRB1*04:02L HLA-DRB1*04:04L HLA-DRB1*04:05L HLA-DRB1*08:04L HLA-DRB1*14:01L HLA-DRB1*11:04L HLA-DRB1*14:02L HLA-DRB1*11:01L HLA-DQA1*05:05-B1*03:19L HLA-DRB3*01:01L
  REGION 1..13: note = CONT. FROM ABOVE: HLA-DQA1*03:01-B1*03:02L HLA-DPA1*01:03-B1*104 :01L HLA-DQA1*05:05-B1*03:01L
  source 1..13: note = Severe acute respiratory syndrome coronavirus 2
IWNVKDFMSLSEQ

SEQ ID NO: 10911 - protein, 13 aa, Severe acute respiratory syndrome-related coronavirus
  REGION 1..13: note = Table B: HLA-DQA1*05:01-B1*03:01L HLA-DRB1*01:03L HLA-DQA1*01:01-B1*05:01L HLA-DRB1*08:01L HLA-DRB1*04:10L HLA-DPA1*02:01-B1*13:01L HLA-DPA1*03:01-B1*105:01L
  source 1..13: note = Severe acute respiratory syndrome coronavirus 2
NVKDFMSLSEQLR

SEQ ID NO: 10912 - protein, 11 aa, Severe acute respiratory syndrome-related coronavirus
  REGION 1..11: note = Table B: HLA-DQA1*05:01-B1*03:01L HLA-DRB1*04:03L HLA-DRB1*01:03L HLA-DRB1*01:02L HLA-DRB1*12:01L HLA-DRB1*14:17L HLA-DRB1*16:01L HLA-DRB1*15:03L
  source 1..11: note = Severe acute respiratory syndrome coronavirus 2
DFMSLSEQLRK

SEQ ID NO: 10913 - protein, 16 aa, Severe acute respiratory syndrome-related coronavirus
  REGION 1..16: note = Table B: HLA-DQA1*05:01-B1*03:01L HLA-DRB1*08:04L
  source 1..16: note = Severe acute respiratory syndrome coronavirus 2
SEQLRKQIRSAAKKNN

SEQ ID NO: 10914 - protein, 11 aa, Severe acute respiratory syndrome-related coronavirus
  REGION 1..11: note = Table B: HLA-DQA1*05:01-B1*03:01L HLA-DRB1*04:03L HLA-DRB1*13:03L HLA-DRB1*04:02L HLA-DRB1*01:02L HLA-DRB1*08:01L HLA-DRB1*14:17L HLA-DPA1*01:02-B1*04:01L HLA-DRB1*16:01L
  source 1..11: note = Severe acute respiratory syndrome coronavirus 2
SAAKKNNLPFK

SEQ ID NO: 10915 - protein, 11 aa, Severe acute respiratory syndrome-related coronavirus
  REGION 1..11: note = Table B: HLA-DQA1*05:01-B1*03:01L HLA-DRB1*04:03L HLA-DQA1*05:05-B1*03:19L HLA-DPA1*03:01-B1*105:01L HLA-DQA1*03:01-B1*03:02L HLA-DQA1*05:05-B1*03:01L HLA-DQA1*02:01-B1*03:03L
  source 1..11: note = Severe acute respiratory syndrome coronavirus 2
LTCATTRQVVN

SEQ ID NO: 10916 - protein, 12 aa, Severe acute respiratory syndrome-related coronavirus
  REGION 1..12: note = Table B: HLA-DQA1*05:01-B1*03:01L HLA-DRB1*01:03L HLA-DRB1*04:05L HLA-DQA1*01:02-B1*06:02L HLA-DRB1*01:02L HLA-DRB1*14:01L HLA-DRB1*08:01L HLA-DRB1*12:01L HLA-DPA1*03:01-B1*105:01L HLA-DPA1*01:02-B1*04:01L
  REGION 1..12: note = CONT. FROM ABOVE: HLA-DRB1*16:01L HLA-DRB1*04:08L HLA-DRB1*15:03 L
  source 1..12: note = Severe acute respiratory syndrome coronavirus 2
VVTTKIALKGGK

SEQ ID NO: 10917 - protein, 10 aa, Severe acute respiratory syndrome-related coronavirus
  REGION 1..10: note = Table B: HLA-DQA1*05:01-B1*03:01L HLA-DRB1*04:03L HLA-DRB1*13:02L HLA-DRB1*13:03L HLA-DRB1*01:03L HLA-DRB1*04:02L HLA-DRB1*01:01L HLA-DRB1*01:02L HLA-DRB4*03:01NL HLA-DRB1*08:77L HLA-DRB1*14:01L HLA-DRB1*11:03L HLA-DRB1*14:02L HLA-DRB1*12:01L
  REGION 1..10: note = CONT. FROM ABOVE: HLA-DRB1*12:02L HLA-DQA1*03:01-B1*03:02L HLA-D RB1*14:54L HLA-DQA1*05:05-B1*03:01L HLA-DRB1*14:17L HLA-DRB1*07: 01L HLA-DRB1*16:01L HLA-DRB1*04:08L HLA-DQA1*02:01-B1*03:03L HLA -DRB1*15:03L
  source 1..10: note = Severe acute respiratory syndrome coronavirus 2
IALKGGKIVN

SEQ ID NO: 10918 - protein, 11 aa, Severe acute respiratory syndrome-related coronavirus
  REGION 1..11: note = Table B: HLA-DQA1*05:01-B1*03:01L HLA-DRB1*01:03L HLA-DRB1*14:02L HLA-DQA1*05:05-B1*03:19L HLA-DPA1*03:01-B1*105:01L
  source 1..11: note = Severe acute respiratory syndrome coronavirus 2
ALKGGKIVNNW

SEQ ID NO: 10919 - protein, 12 aa, Severe acute respiratory syndrome-related coronavirus
  REGION 1..12: note = Table B: HLA-DQA1*05:01-B1*03:01L HLA-DQA1*03:01-B1*03:02L HLA-DQA1*05:05-B1*03:01L
  source 1..12: note = Severe acute respiratory syndrome coronavirus 2
LKGGKIVNNWLK

SEQ ID NO: 10920 - protein, 13 aa, Severe acute respiratory syndrome-related coronavirus
  REGION 1..13: note = Table B: HLA-DQA1*05:01-B1*03:01L HLA-DRB1*04:03L HLA-DRB1*13:03L HLA-DRB1*04:02L HLA-DRB1*08:04L HLA-DPA1*03:01-B1*04:02L HLA-DRB1*11:03L HLA-DRB1*11:04L HLA-DRB1*11:01L HLA-DRB1*13:01L HLA-DPA1*02:01-B1*13:01L
  REGION 1..13: note = CONT. FROM ABOVE: HLA-DPA1*03:01-B1*105:01L HLA-DRB1*14:54L HLA- DPA1*01:03-B1*02:01L
  source 1..13: note = Severe acute respiratory syndrome coronavirus 2
GKIVNNWLKQLIK

SEQ ID NO: 10921 - protein, 10 aa, Severe acute respiratory syndrome-related coronavirus
  REGION 1..10: note = Table B: HLA-DQA1*05:01-B1*03:01L HLA-DRB1*04:03L HLA-DRB1*13:02L HLA-DRB1*01:03L HLA-DRB1*04:02L HLA-DRB1*01:02L HLA-DRB4*03:01NL HLA-DRB3*02:01L HLA-DPA1*03:01-B1*04:02L HLA-DRB1*14:01L HLA-DQA1*05:01-B1*02:01L HLA-DRB1*12:01L
  REGION 1..10: note = CONT. FROM ABOVE: HLA-DPA1*03:01-B1*105:01L HLA-DQA1*03:01-B1*03 :02L HLA-DRB1*14:17L HLA-DPA1*01:02-B1*04:01L HLA-DRB1*16:01L HL A-DQA1*02:01-B1*03:03L HLA-DRB1*15:03L
  source 1..10: note = Severe acute respiratory syndrome coronavirus 2
YLITPVHVMS

SEQ ID NO: 10922 - protein, 12 aa, Severe acute respiratory syndrome-related coronavirus
  REGION 1..12: note = Table B: HLA-DQA1*05:01-B1*03:01L HLA-DRB1*04:03L HLA-DRB1*13:02L HLA-DRB1*04:05L HLA-DQA1*01:02-B1*06:02L HLA-DRB1*01:02L HLA-DRB1*08:04L HLA-DRB1*11:04L HLA-DRB1*11:01L HLA-DRB1*12:01L HLA-DRB3*01:01L HLA-DRB1*14:54L
  REGION 1..12: note = CONT. FROM ABOVE: HLA-DPA1*01:02-B1*04:01L HLA-DQA1*01:03-B1*06: 01L HLA-DRB1*04:08L HLA-DQA1*02:01-B1*03:03L HLA-DRB1*15:03L
  source 1..12: note = Severe acute respiratory syndrome coronavirus 2
ITPVHVMSKHTD

SEQ ID NO: 10923 - protein, 15 aa, Severe acute respiratory syndrome-related coronavirus
  REGION 1..15: note = Table B: HLA-DQA1*05:01-B1*03:01L HLA-DPA1*03:01-B1*04:02L HLA-DRB1*14:02L HLA-DQA1*01-B1*05L HLA-DQA1*05:05-B1*03:19L HLA-DQA1*05:01-B1*02:01L HLA-DPA1*01:03-B1*04:02L HLA-DPA1*02:01-B1*13:01L HLA-DPA1*03:01-B1*105:01L
  REGION 1..15: note = CONT. FROM ABOVE: HLA-DPA1*01:03-B1*02:01L HLA-DPA1*01:02-B1*04: 01L HLA-DQA1*02:01-B1*03:03L
  source 1..15: note = Severe acute respiratory syndrome coronavirus 2
TPVHVMSKHTDFSSE

SEQ ID NO: 10924 - protein, 14 aa, Severe acute respiratory syndrome-related coronavirus
  REGION 1..14: note = Table B: HLA-DQA1*05:01-B1*03:01L HLA-DRB1*13:02L HLA-DRB1*13:03L HLA-DRB1*01:03L HLA-DRB1*01:02L HLA-DPA1*01:03-B1*03:01L HLA-DRB1*08:01L HLA-DQA1*05:05-B1*03:19L HLA-DRB1*04:10L
  REGION 1..14: note = CONT. FROM ABOVE: HLA-DPA1*03:01-B1*105:01L HLA-DQA1*05:05-B1*03 :01L HLA-DRB1*04:08L
  source 1..14: note = Severe acute respiratory syndrome coronavirus 2
VMSKHTDFSSEIIG

SEQ ID NO: 10925 - protein, 10 aa, Severe acute respiratory syndrome-related coronavirus
  REGION 1..10: note = Table B: HLA-DQA1*05:01-B1*03:01L HLA-DRB1*13:03L HLA-DQA1*01:02-B1*06:02L HLA-DRB4*03:01NL HLA-DRB1*08:77L HLA-DPA1*01:03-B1*03:01L HLA-DPA1*03:01-B1*04:02L HLA-DRB1*03:01L HLA-DRB1*11:02L HLA-DQA1*01-B1*05L
  REGION 1..10: note = CONT. FROM ABOVE: HLA-DQA1*05:05-B1*03:19M HLA-DQA1*05:01-B1*02: 01M HLA-DRB4*01:01L HLA-DPA1*01:03-B1*04:01L HLA-DQA1*05:05-B1*0 3:116L HLA-DRB1*12:01L HLA-DPA1*01:03-B1*104:01L HLA-DRB1*10:01L HLA-DRB1*16:01L HLA-DRB1*15:03L
  source 1..10: note = Severe acute respiratory syndrome coronavirus 2
TDFSSEIIGY

SEQ ID NO: 10926 - protein, 12 aa, Severe acute respiratory syndrome-related coronavirus
  REGION 1..12: note = Table B: HLA-DQA1*05:01-B1*03:01L HLA-DQA1*01:02-B1*06:02L HLA-DQA1*01:01-B1*05:01L HLA-DQA1*05:05-B1*03:19L HLA-DQA1*05:01-B1*02:01L HLA-DQA1*05:05-B1*03:01L HLA-DRB1*16:01L HLA-DQA1*01:03-B1*06:01L
  source 1..12: note = Severe acute respiratory syndrome coronavirus 2
DGGVTRDIASTD

SEQ ID NO: 10927 - protein, 12 aa, Severe acute respiratory syndrome-related coronavirus
  REGION 1..12: note = Table B: HLA-DQA1*05:01-B1*03:01L HLA-DRB1*01:03L HLA-DQA1*01:01-B1*05:01L HLA-DQA1*05:05-B1*03:19L HLA-DRB1*04:10L HLA-DRB1*14:54L HLA-DQA1*05:05-B1*03:01L
  source 1..12: note = Severe acute respiratory syndrome coronavirus 2
GGVTRDIASTDT

SEQ ID NO: 10928 - protein, 14 aa, Severe acute respiratory syndrome-related coronavirus
  REGION 1..14: note = Table B: HLA-DQA1*05:01-B1*03:01L HLA-DRB1*04:05L HLA-DRB1*01:02L HLA-DPA1*01:03-B1*03:01L HLA-DRB1*14:01L HLA-DQA1*05:05-B1*03:19L HLA-DQA1*05:01-B1*02:01L HLA-DRB1*12:01L HLA-DPA1*02:01-B1*13:01L
  REGION 1..14: note = CONT. FROM ABOVE: HLA-DPA1*03:01-B1*105:01L HLA-DQA1*05:05-B1*03 :01L HLA-DRB1*16:01L HLA-DRB1*15:03L
  source 1..14: note = Severe acute respiratory syndrome coronavirus 2
VTRDIASTDTCFAN

SEQ ID NO: 10929 - protein, 12 aa, Severe acute respiratory syndrome-related coronavirus
  REGION 1..12: note = Table B: HLA-DQA1*05:01-B1*03:01L HLA-DRB1*04:03L HLA-DRB1*04:02L HLA-DQA1*01:02-B1*06:02L HLA-DPA1*03:01-B1*105:01L HLA-DQA1*03:01-B1*03:02L HLA-DQA1*05:05-B1*03:01L HLA-DRB1*14:17L
  source 1..12: note = Severe acute respiratory syndrome coronavirus 2
DIASTDTCFANK

SEQ ID NO: 10930 - protein, 12 aa, Severe acute respiratory syndrome-related coronavirus
  REGION 1..12: note = Table B: HLA-DQA1*05:01-B1*03:01L HLA-DRB1*04:03L HLA-DQA1*01:02-B1*06:02L HLA-DPA1*03:01-B1*105:01L HLA-DQA1*03:01-B1*03:02L
  source 1..12: note = Severe acute respiratory syndrome coronavirus 2
IASTDTCFANKH

SEQ ID NO: 10931 - protein, 14 aa, Severe acute respiratory syndrome-related coronavirus
  REGION 1..14: note = Table B: HLA-DQA1*05:01-B1*03:01L HLA-DQA1*05:05-B1*03:01L
  source 1..14: note = Severe acute respiratory syndrome coronavirus 2
STDTCFANKHADFD

SEQ ID NO: 10932 - protein, 12 aa, Severe acute respiratory syndrome-related coronavirus
  REGION 1..12: note = Table B: HLA-DQA1*05:01-B1*03:01L HLA-DQA1*02:01-B1*03:03L
  source 1..12: note = Severe acute respiratory syndrome coronavirus 2
FSQRGGSYTNDK

SEQ ID NO: 10933 - protein, 12 aa, Severe acute respiratory syndrome-related coronavirus
  REGION 1..12: note = Table B: HLA-DQA1*05:01-B1*03:01L HLA-DQA1*01:02-B1*06:02L HLA-DQA1*05:05-B1*03:19L HLA-DPA1*03:01-B1*105:01L HLA-DQA1*05:05-B1*03:01L HLA-DQA1*01:03-B1*06:01L HLA-DQA1*02:01-B1*03:03L
  source 1..12: note = Severe acute respiratory syndrome coronavirus 2
DKACPLIAAVIT

SEQ ID NO: 10934 - protein, 12 aa, Severe acute respiratory syndrome-related coronavirus
  REGION 1..12: note = Table B: HLA-DQA1*05:01-B1*03:01L HLA-DRB1*13:02L HLA-DRB1*01:03L HLA-DRB1*04:02L HLA-DRB1*04:05L HLA-DQA1*01:02-B1*06:02L HLA-DRB1*01:01L HLA-DRB1*01:02M HLA-DRB4*03:01NL HLA-DRB3*02:01L HLA-DPA1*01:03-B1*03:01L
  REGION 1..12: note = CONT. FROM ABOVE: HLA-DRB1*14:01L HLA-DRB1*11:03L HLA-DQA1*01-B1 *05L HLA-DQA1*05:05-B1*03:19L HLA-DQA1*05:01-B1*02:01L HLA-DRB1* 12:01L HLA-DPA1*02:01-B1*13:01L HLA-DPA1*03:01-B1*105:01L HLA-DQ A1*03:01-B1*03:02L HLA-DQA1*05:05-B1*03:01L HLA-DRB1*14:17L
  REGION 1..12: note = CONT. FROM ABOVE: HLA-DRB1*07:01L HLA-DRB1*16:01L HLA-DQA1*01:03 -B1*06:01L HLA-DRB1*04:08L HLA-DQA1*02:01-B1*03:03L HLA-DRB1*15: 03L
  source 1..12: note = Severe acute respiratory syndrome coronavirus 2
VITREVGFVVPG

SEQ ID NO: 10935 - protein, 14 aa, Severe acute respiratory syndrome-related coronavirus
  REGION 1..14: note = Table B: HLA-DQA1*05:01-B1*03:01L HLA-DRB1*13:02L HLA-DRB1*01:03L HLA-DRB1*04:02L HLA-DRB1*04:05L HLA-DRB1*01:02L HLA-DPA1*01:03-B1*03:01L HLA-DQA1*01:01-B1*05:01L HLA-DQA1*05:01-B1*02:01L HLA-DRB1*04:10L HLA-DRB1*12:01L
  REGION 1..14: note = CONT. FROM ABOVE: HLA-DPA1*02:01-B1*13:01L HLA-DPA1*03:01-B1*105 :01L HLA-DQA1*05:05-B1*03:01L HLA-DRB1*16:01L HLA-DQA1*01:03-B1* 06:01L HLA-DRB1*04:08L HLA-DRB1*15:03L
  source 1..14: note = Severe acute respiratory syndrome coronavirus 2
ITREVGFVVPGLPG

SEQ ID NO: 10936 - protein, 13 aa, Severe acute respiratory syndrome-related coronavirus
  REGION 1..13: note = Table B: HLA-DQA1*05:01-B1*03:01L HLA-DRB1*13:02L HLA-DRB1*04:02L HLA-DQA1*01-B1*05L HLA-DQA1*03:01-B1*03:02L
  source 1..13: note = Severe acute respiratory syndrome coronavirus 2
NGDFLHFLPRVFS

SEQ ID NO: 10937 - protein, 14 aa, Severe acute respiratory syndrome-related coronavirus
  REGION 1..14: note = Table B: HLA-DQA1*05:01-B1*03:01L HLA-DRB1*13:02L HLA-DRB1*13:03L HLA-DRB1*04:02L HLA-DRB1*11:02L HLA-DRB1*11:03L HLA-DRB1*14:02L HLA-DQA1*05:05-B1*03:19L HLA-DQA1*05:05-B1*03:116L HLA-DRB3*01:01L
  REGION 1..14: note = CONT. FROM ABOVE: HLA-DQA1*05:05-B1*03:01L HLA-DRB1*08:02L HLA-D RB1*08:03L
  source 1..14: note = Severe acute respiratory syndrome coronavirus 2
DFLHFLPRVFSAVG

SEQ ID NO: 10938 - protein, 13 aa, Severe acute respiratory syndrome-related coronavirus
  REGION 1..13: note = Table B: HLA-DQA1*05:01-B1*03:01L HLA-DRB1*04:03L HLA-DRB1*13:02L HLA-DRB1*01:03L HLA-DRB1*01:02L HLA-DPA1*01:03-B1*03:01L HLA-DPA1*03:01-B1*04:02L HLA-DRB1*14:01L HLA-DRB1*12:01L HLA-DPA1*03:01-B1*105:01L
  REGION 1..13: note = CONT. FROM ABOVE: HLA-DPA1*01:03-B1*104:01L HLA-DQA1*05:05-B1*03 :01L HLA-DRB1*16:01L HLA-DRB1*15:03L
  source 1..13: note = Severe acute respiratory syndrome coronavirus 2
LPRVFSAVGNICY

SEQ ID NO: 10939 - protein, 14 aa, Severe acute respiratory syndrome-related coronavirus
  REGION 1..14: note = Table B: HLA-DQA1*05:01-B1*03:01L HLA-DRB1*01:02L HLA-DPA1*03:01-B1*105:01L
  source 1..14: note = Severe acute respiratory syndrome coronavirus 2
VFSAVGNICYTPSK

SEQ ID NO: 10940 - protein, 14 aa, Severe acute respiratory syndrome-related coronavirus
  REGION 1..14: note = Table B: HLA-DQA1*05:01-B1*03:01L HLA-DRB1*13:02L HLA-DRB1*01:03L HLA-DRB1*04:08L
  source 1..14: note = Severe acute respiratory syndrome coronavirus 2
NICYTPSKLIEYTD

SEQ ID NO: 10941 - protein, 14 aa, Severe acute respiratory syndrome-related coronavirus
  REGION 1..14: note = Table B: HLA-DQA1*05:01-B1*03:01L HLA-DRB1*13:02L HLA-DRB1*13:03L HLA-DRB4*03:01NL HLA-DRB1*08:04L HLA-DRB1*08:77L HLA-DRB1*11:02L HLA-DRB1*11:03L HLA-DRB1*11:04L HLA-DRB1*14:02L HLA-DQA1*01:01-B1*05:01L HLA-DRB1*11:01L
  REGION 1..14: note = CONT. FROM ABOVE: HLA-DQA1*05:05-B1*03:19L HLA-DRB1*09:01L HLA-D RB1*12:02L HLA-DRB3*01:01L HLA-DPA1*01:03-B1*02:01L HLA-DPA1*01: 03-B1*104:01L HLA-DQA1*05:05-B1*03:01L HLA-DRB1*07:01L HLA-DRB1* 10:01L HLA-DRB1*08:03L
  source 1..14: note = Severe acute respiratory syndrome coronavirus 2
TPSKLIEYTDFATS

SEQ ID NO: 10942 - protein, 12 aa, Severe acute respiratory syndrome-related coronavirus
  REGION 1..12: note = Table B: HLA-DQA1*05:01-B1*03:01L HLA-DRB1*13:02L HLA-DRB1*04:04L HLA-DRB1*04:05L HLA-DQA1*01:02-B1*06:02L HLA-DRB4*03:01NL HLA-DRB1*08:04L HLA-DRB3*02:01L HLA-DRB1*14:01L HLA-DRB1*11:03L HLA-DRB1*11:04L HLA-DRB1*14:02L HLA-DRB1*08:01L
  REGION 1..12: note = CONT. FROM ABOVE: HLA-DRB1*04:10L HLA-DRB3*01:01L HLA-DPA1*02:01 -B1*13:01L HLA-DRB1*14:54L HLA-DPA1*01:03-B1*02:01L HLA-DQA1*05: 05-B1*03:01L HLA-DRB1*07:01L HLA-DRB1*10:01L HLA-DRB1*08:03L HLA -DRB1*15:01L
  source 1..12: note = Severe acute respiratory syndrome coronavirus 2
KLIEYTDFATSA

SEQ ID NO: 10943 - protein, 12 aa, Severe acute respiratory syndrome-related coronavirus
  REGION 1..12: note = Table B: HLA-DQA1*05:01-B1*03:01L HLA-DQA1*05:05-B1*03:19L HLA-DPA1*03:01-B1*105:01L HLA-DQA1*05:05-B1*03:01L HLA-DQA1*02:01-B1*03:03L
  source 1..12: note = Severe acute respiratory syndrome coronavirus 2
DFATSACVLAAE

SEQ ID NO: 10944 - protein, 14 aa, Severe acute respiratory syndrome-related coronavirus
  REGION 1..14: note = Table B: HLA-DQA1*05:01-B1*03:01L HLA-DRB1*01:02L HLA-DQA1*05:05-B1*03:19L
  source 1..14: note = Severe acute respiratory syndrome coronavirus 2
VLAAECTIFKDASG

SEQ ID NO: 10945 - protein, 12 aa, Severe acute respiratory syndrome-related coronavirus
  REGION 1..12: note = Table B: HLA-DQA1*05:01-B1*03:01L
  source 1..12: note = Severe acute respiratory syndrome coronavirus 2
YDTNVLEGSVAY

SEQ ID NO: 10946 - protein, 11 aa, Severe acute respiratory syndrome-related coronavirus
  REGION 1..11: note = Table B: HLA-DQA1*05:01-B1*03:01L HLA-DQA1*01:02-B1*06:02L HLA-DQA1*05:05-B1*03:19L HLA-DQA1*05:01-B1*02:01L HLA-DQA1*05:05-B1*03:01L HLA-DQA1*01:03-B1*06:01L HLA-DQA1*02:01-B1*03:03L
  source 1..11: note = Severe acute respiratory syndrome coronavirus 2
VLEGSVAYESL

SEQ ID NO: 10947 - protein, 11 aa, Severe acute respiratory syndrome-related coronavirus
  REGION 1..11: note = Table B: HLA-DQA1*05:01-B1*03:01L HLA-DQA1*01:02-B1*06:02L HLA-DQA1*05:05-B1*03:19L
  source 1..11: note = Severe acute respiratory syndrome coronavirus 2
LEGSVAYESLR

SEQ ID NO: 10948 - protein, 11 aa, Severe acute respiratory syndrome-related coronavirus
  REGION 1..11: note = Table B: HLA-DQA1*05:01-B1*03:01L HLA-DRB1*04:02L HLA-DQA1*01:02-B1*06:02L
  source 1..11: note = Severe acute respiratory syndrome coronavirus 2
GSVAYESLRPD

SEQ ID NO: 10949 - protein, 11 aa, Severe acute respiratory syndrome-related coronavirus
  REGION 1..11: note = Table B: HLA-DQA1*05:01-B1*03:01L HLA-DRB1*13:03L HLA-DRB1*01:03L HLA-DRB1*04:05L HLA-DRB1*01:01L HLA-DRB3*02:01L HLA-DRB1*11:03L HLA-DQA1*05:05-B1*03:19L HLA-DRB1*12:02L HLA-DPA1*03:01-B1*105:01L HLA-DQA1*03:01-B1*03:02L
  REGION 1..11: note = CONT. FROM ABOVE: HLA-DRB1*14:54L HLA-DQA1*05:05-B1*03:01L HLA-D PA1*01:02-B1*04:01L HLA-DRB1*07:01L HLA-DRB1*10:01L HLA-DRB1*04: 08L
  source 1..11: note = Severe acute respiratory syndrome coronavirus 2
RYVLMDGSIIQ

SEQ ID NO: 10950 - protein, 11 aa, Severe acute respiratory syndrome-related coronavirus
  REGION 1..11: note = Table B: HLA-DQA1*05:01-B1*03:01L HLA-DRB1*13:02L HLA-DRB1*13:03L HLA-DRB1*01:03L HLA-DRB1*04:05L HLA-DRB4*03:01NL HLA-DRB3*02:01L HLA-DRB1*14:01L HLA-DRB1*11:03L HLA-DQA1*05:01-B1*02:01L HLA-DRB1*04:10L
  REGION 1..11: note = CONT. FROM ABOVE: HLA-DPA1*03:01-B1*105:01L HLA-DQA1*03:01-B1*03 :02L HLA-DRB1*14:54L HLA-DQA1*01:03-B1*06:01L
  source 1..11: note = Severe acute respiratory syndrome coronavirus 2
IIQFPNTYLEG

SEQ ID NO: 10951 - protein, 11 aa, Severe acute respiratory syndrome-related coronavirus
  REGION 1..11: note = Table B: HLA-DQA1*05:01-B1*03:01L HLA-DRB1*01:03L HLA-DRB1*04:02L HLA-DQA1*01:02-B1*06:02L HLA-DRB1*14:01L HLA-DQA1*02:01-B1*03:03L
  source 1..11: note = Severe acute respiratory syndrome coronavirus 2
YLEGSVRVVTT

SEQ ID NO: 10952 - protein, 12 aa, Severe acute respiratory syndrome-related coronavirus
  REGION 1..12: note = Table B: HLA-DQA1*05:01-B1*03:01L HLA-DQA1*05:05-B1*03:19L HLA-DPA1*03:01-B1*105:01L HLA-DQA1*05:05-B1*03:01L
  source 1..12: note = Severe acute respiratory syndrome coronavirus 2
LEGSVRVVTTFD

SEQ ID NO: 10953 - protein, 13 aa, Severe acute respiratory syndrome-related coronavirus
  REGION 1..13: note = Table B: HLA-DQA1*05:01-B1*03:01L HLA-DRB1*13:02L HLA-DRB1*04:02L HLA-DRB1*04:04L HLA-DPA1*03:01-B1*04:02L HLA-DRB1*14:01L HLA-DRB1*08:01L HLA-DQA1*05:05-B1*03:01L HLA-DPA1*01:02-B1*04:01L
  source 1..13: note = Severe acute respiratory syndrome coronavirus 2
VVTTFDSEYCRHG

SEQ ID NO: 10954 - protein, 16 aa, Severe acute respiratory syndrome-related coronavirus
  REGION 1..16: note = Table B: HLA-DQA1*05:01-B1*03:01L HLA-DRB1*13:02L HLA-DRB1*01:03L HLA-DRB1*14:01L HLA-DRB1*08:01L HLA-DRB1*12:01L HLA-DRB3*01:01L HLA-DPA1*03:01-B1*105:01L HLA-DQA1*05:05-B1*03:01L HLA-DRB1*16:01L HLA-DRB1*15:03L
  source 1..16: note = Severe acute respiratory syndrome coronavirus 2
DSEYCRHGTCERSEAG

SEQ ID NO: 10955 - protein, 12 aa, Severe acute respiratory syndrome-related coronavirus
  REGION 1..12: note = Table B: HLA-DQA1*05:01-B1*03:01L HLA-DQA1*01:02-B1*06:02L HLA-DQA1*05:05-B1*03:19L HLA-DQA1*05:05-B1*03:01L HLA-DQA1*01:03-B1*06:01L
  source 1..12: note = Severe acute respiratory syndrome coronavirus 2
RSEAGVCVSTSG

SEQ ID NO: 10956 - protein, 15 aa, Severe acute respiratory syndrome-related coronavirus
  REGION 1..15: note = Table B: HLA-DQA1*05:01-B1*03:01L HLA-DRB1*03:01L HLA-DRB1*11:01L
  source 1..15: note = Severe acute respiratory syndrome coronavirus 2
SGRWVLNNDYYRSLP

SEQ ID NO: 10957 - protein, 12 aa, Severe acute respiratory syndrome-related coronavirus
  REGION 1..12: note = Table B: HLA-DQA1*05:01-B1*03:01L HLA-DRB1*04:03L HLA-DRB1*01:03L HLA-DRB1*04:02L HLA-DRB1*04:05L HLA-DQA1*01:02-B1*06:02L HLA-DRB1*01:02L HLA-DPA1*01:03-B1*03:01L HLA-DPA1*03:01-B1*04:02L
  REGION 1..12: note = CONT. FROM ABOVE: HLA-DRB1*14:01L HLA-DRB1*08:01L HLA-DQA1*05:01 -B1*02:01L HLA-DPA1*01:03-B1*04:01L HLA-DPA1*01:03-B1*04:02L HLA -DRB1*12:01L HLA-DPA1*03:01-B1*105:01L HLA-DQA1*03:01-B1*03:02L HLA-DPA1*01:03-B1*02:01L HLA-DRB1*16:01L
  REGION 1..12: note = CONT. FROM ABOVE: HLA-DQA1*01:03-B1*06:01L HLA-DRB1*04:08L HLA-D QA1*02:01-B1*03:03L HLA-DRB1*15:03L
  source 1..12: note = Severe acute respiratory syndrome coronavirus 2
VLNNDYYRSLPG

SEQ ID NO: 10958 - protein, 11 aa, Severe acute respiratory syndrome-related coronavirus
  REGION 1..11: note = Table B: HLA-DQA1*05:01-B1*03:01L HLA-DQA1*05:01-B1*02:01L HLA-DPA1*03:01-B1*105:01L HLA-DQA1*02:01-B1*03:03L HLA-DRB1*15:03L
  source 1..11: note = Severe acute respiratory syndrome coronavirus 2
GVDAVNLLTNM

SEQ ID NO: 10959 - protein, 12 aa, Severe acute respiratory syndrome-related coronavirus
  REGION 1..12: note = Table B: HLA-DQA1*05:01-B1*03:01L HLA-DRB1*13:02L HLA-DQA1*01:02-B1*06:02L HLA-DRB1*01:02L HLA-DRB3*02:01L HLA-DPA1*01:03-B1*03:01L HLA-DRB1*14:01L HLA-DQA1*05:01-B1*02:01L HLA-DPA1*01:03-B1*04:01L
  REGION 1..12: note = CONT. FROM ABOVE: HLA-DPA1*03:01-B1*105:01L HLA-DRB1*14:17L HLA- DRB1*16:01L HLA-DQA1*02:01-B1*03:03L HLA-DRB1*15:03L
  source 1..12: note = Severe acute respiratory syndrome coronavirus 2
AVNLLTNMFTPL

SEQ ID NO: 10960 - protein, 15 aa, Severe acute respiratory syndrome-related coronavirus
  REGION 1..15: note = Table B: HLA-DQA1*05:01-B1*03:01L HLA-DRB1*13:02L HLA-DRB1*01:03L HLA-DRB1*08:04L HLA-DPA1*01:03-B1*03:01L HLA-DQA1*05:05-B1*03:19L HLA-DPA1*02:01-B1*13:01L HLA-DQA1*03:01-B1*03:02L HLA-DPA1*01:03-B1*02:01L
  REGION 1..15: note = CONT. FROM ABOVE: HLA-DQA1*05:05-B1*03:01L HLA-DRB1*10:01L HLA-D QA1*02:01-B1*03:03L
  source 1..15: note = Severe acute respiratory syndrome coronavirus 2
VNLLTNMFTPLIQPI

SEQ ID NO: 10961 - protein, 12 aa, Severe acute respiratory syndrome-related coronavirus
  REGION 1..12: note = Table B: HLA-DQA1*05:01-B1*03:01L HLA-DRB1*04:05L HLA-DQA1*01:02-B1*06:02L HLA-DRB1*01:02L HLA-DQA1*05:05-B1*03:19L HLA-DRB1*04:10L HLA-DRB1*12:01L HLA-DPA1*03:01-B1*105:01L HLA-DQA1*05:05-B1*03:01L
  REGION 1..12: note = CONT. FROM ABOVE: HLA-DRB1*10:01L HLA-DRB1*16:01L HLA-DQA1*01:03 -B1*06:01L HLA-DRB1*04:08L
  source 1..12: note = Severe acute respiratory syndrome coronavirus 2
FTPLIQPIGALD

SEQ ID NO: 10962 - protein, 12 aa, Severe acute respiratory syndrome-related coronavirus
  REGION 1..12: note = Table B: HLA-DQA1*05:01-B1*03:01L HLA-DRB1*01:02L HLA-DQA1*05:01-B1*02:01L HLA-DRB1*12:01L HLA-DPA1*03:01-B1*105:01L HLA-DRB1*16:01L HLA-DQA1*02:01-B1*03:03L HLA-DRB1*15:03L
  source 1..12: note = Severe acute respiratory syndrome coronavirus 2
PLIQPIGALDIS

SEQ ID NO: 10963 - protein, 11 aa, Severe acute respiratory syndrome-related coronavirus
  REGION 1..11: note = Table B: HLA-DQA1*05:01-B1*03:01L HLA-DQA1*01:02-B1*06:02L HLA-DQA1*05:05-B1*03:19L HLA-DQA1*05:05-B1*03:01L HLA-DQA1*01:03-B1*06:01L HLA-DQA1*02:01-B1*03:03L
  source 1..11: note = Severe acute respiratory syndrome coronavirus 2
ISASIVAGGIV

SEQ ID NO: 10964 - protein, 12 aa, Severe acute respiratory syndrome-related coronavirus
  REGION 1..12: note = Table B: HLA-DQA1*05:01-B1*03:01L HLA-DRB1*13:02L HLA-DRB1*01:03L HLA-DRB1*04:02L HLA-DRB1*04:04L HLA-DRB1*04:05L HLA-DRB1*01:02L HLA-DRB4*03:01NL HLA-DRB1*08:04L HLA-DRB1*08:77L HLA-DRB3*02:01L HLA-DPA1*03:01-B1*04:02L HLA-DRB1*14:01L
  REGION 1..12: note = CONT. FROM ABOVE: HLA-DRB1*11:03L HLA-DRB1*11:04L HLA-DQA1*01:01 -B1*05:01L HLA-DRB1*08:01L HLA-DRB5*01:01L HLA-DRB4*01:01L HLA-D RB1*04:10L HLA-DRB1*09:01L HLA-DPA1*01:03-B1*04:02L HLA-DRB1*12: 01L HLA-DRB1*12:02L HLA-DRB1*14:54L HLA-DPA1*01:03-B1*104:01L
  REGION 1..12: note = CONT. FROM ABOVE: HLA-DQA1*05:05-B1*03:01L HLA-DRB1*14:17L HLA-D PA1*01:02-B1*04:01L HLA-DRB1*07:01L HLA-DRB1*10:01L HLA-DRB1*04: 08L HLA-DRB1*08:03L
  source 1..12: note = Severe acute respiratory syndrome coronavirus 2
TPVYSFLPGVYS

SEQ ID NO: 10965 - protein, 11 aa, Severe acute respiratory syndrome-related coronavirus
  REGION 1..11: note = Table B: HLA-DQA1*05:01-B1*03:01L HLA-DRB1*04:05L HLA-DQA1*01:02-B1*06:02L HLA-DRB1*01:02L HLA-DRB1*08:04L HLA-DRB3*02:01L HLA-DPA1*01:03-B1*03:01L HLA-DPA1*03:01-B1*04:02L HLA-DRB1*14:02L
  REGION 1..11: note = CONT. FROM ABOVE: HLA-DPA1*01:02-B1*04:01L HLA-DRB1*04:08L HLA-D RB1*15:03L
  source 1..11: note = Severe acute respiratory syndrome coronavirus 2
YLTNDVSFLAH

SEQ ID NO: 10966 - protein, 11 aa, Severe acute respiratory syndrome-related coronavirus
  REGION 1..11: note = Table B: HLA-DQA1*05:01-B1*03:01L HLA-DRB1*04:02L HLA-DQA1*01:02-B1*06:02L HLA-DQA1*05:05-B1*03:01L HLA-DRB1*14:17L HLA-DRB1*16:01L
  source 1..11: note = Severe acute respiratory syndrome coronavirus 2
TNDVSFLAHIQ

SEQ ID NO: 10967 - protein, 11 aa, Severe acute respiratory syndrome-related coronavirus
  REGION 1..11: note = Table B: HLA-DQA1*05:01-B1*03:01L HLA-DRB1*04:03L HLA-DQA1*01:02-B1*06:02L HLA-DPA1*03:01-B1*105:01L HLA-DQA1*03:01-B1*03:02L HLA-DQA1*01:03-B1*06:01L HLA-DQA1*02:01-B1*03:03L
  source 1..11: note = Severe acute respiratory syndrome coronavirus 2
IAYIICISTKH

SEQ ID NO: 10968 - protein, 14 aa, Severe acute respiratory syndrome-related coronavirus
  REGION 1..14: note = Table B: HLA-DQA1*05:01-B1*03:01L HLA-DRB1*13:03L HLA-DRB1*11:04L HLA-DRB1*11:01L
  source 1..14: note = Severe acute respiratory syndrome coronavirus 2
TKHFYWFFSNYLKR

SEQ ID NO: 10969 - protein, 14 aa, Severe acute respiratory syndrome-related coronavirus
  REGION 1..14: note = Table B: HLA-DQA1*05:01-B1*03:01L HLA-DRB1*04:01L HLA-DRB1*11:04L HLA-DRB1*11:01L
  source 1..14: note = Severe acute respiratory syndrome coronavirus 2
KHFYWFFSNYLKRR

SEQ ID NO: 10970 - protein, 12 aa, Severe acute respiratory syndrome-related coronavirus
  REGION 1..12: note = Table B: HLA-DQA1*05:01-B1*03:01L HLA-DQA1*05:05-B1*03:19L HLA-DPA1*01:03-B1*04:01L HLA-DPA1*01:03-B1*04:02L HLA-DQA1*05:05-B1*03:01L
  source 1..12: note = Severe acute respiratory syndrome coronavirus 2
VFNGVSFSTFEE

SEQ ID NO: 10971 - protein, 11 aa, Severe acute respiratory syndrome-related coronavirus
  REGION 1..11: note = Table B: HLA-DQA1*05:01-B1*03:01L HLA-DRB1*04:03L HLA-DQA1*01:02-B1*06:02L HLA-DPA1*03:01-B1*04:02L HLA-DQA1*05:05-B1*03:19L HLA-DPA1*01:03-B1*04:01L HLA-DPA1*01:03-B1*04:02L HLA-DRB1*12:01L
  REGION 1..11: note = CONT. FROM ABOVE: HLA-DPA1*02:01-B1*13:01L HLA-DPA1*03:01-B1*105 :01L HLA-DQA1*03:01-B1*03:02L HLA-DPA1*01:02-B1*04:01L HLA-DRB1* 16:01L HLA-DQA1*02:01-B1*03:03L HLA-DRB1*15:03L
  source 1..11: note = Severe acute respiratory syndrome coronavirus 2
VSFSTFEEAAL

SEQ ID NO: 10972 - protein, 13 aa, Severe acute respiratory syndrome-related coronavirus
  REGION 1..13: note = Table B: HLA-DQA1*05:01-B1*03:01L HLA-DQA1*05:05-B1*03:19L HLA-DQA1*05:05-B1*03:01L
  source 1..13: note = Severe acute respiratory syndrome coronavirus 2
EEAALCTFLLNKE

SEQ ID NO: 10973 - protein, 10 aa, Severe acute respiratory syndrome-related coronavirus
  REGION 1..10: note = Table B: HLA-DQA1*05:01-B1*03:01L HLA-DRB1*13:02L HLA-DRB1*01:03L HLA-DRB1*01:02L HLA-DRB1*14:01L HLA-DRB1*12:01L HLA-DQA1*03:01-B1*03:02L HLA-DPA1*01:02-B1*04:01L HLA-DRB1*16:01L HLA-DQA1*02:01-B1*03:03L HLA-DRB1*15:03L
  source 1..10: note = Severe acute respiratory syndrome coronavirus 2
FLLNKEMYLK

SEQ ID NO: 10974 - protein, 14 aa, Severe acute respiratory syndrome-related coronavirus
  REGION 1..14: note = Table B: HLA-DQA1*05:01-B1*03:01L HLA-DRB1*04:03L HLA-DRB1*08:04L
  source 1..14: note = Severe acute respiratory syndrome coronavirus 2
YLKLRSDVLLPLTQ

SEQ ID NO: 10975 - protein, 10 aa, Severe acute respiratory syndrome-related coronavirus
  REGION 1..10: note = Table B: HLA-DQA1*05:01-B1*03:01L HLA-DRB1*13:03L HLA-DQA1*01:02-B1*06:02L HLA-DRB4*03:01NL HLA-DRB1*08:77M HLA-DPA1*01:03-B1*03:01M HLA-DPA1*03:01-B1*04:02L HLA-DRB1*03:01L HLA-DRB1*11:02L HLA-DQA1*01-B1*05L
  REGION 1..10: note = CONT. FROM ABOVE: HLA-DQA1*05:05-B1*03:19M HLA-DQA1*05:01-B1*02: 01M HLA-DRB4*01:01L HLA-DPA1*01:03-B1*04:01L HLA-DQA1*05:05-B1*0 3:116L HLA-DPA1*01:03-B1*04:02L HLA-DRB1*12:01L HLA-DPA1*01:03-B 1*104:01M HLA-DRB1*10:01L HLA-DRB1*16:01M HLA-DRB1*15:03L
  source 1..10: note = Severe acute respiratory syndrome coronavirus 2
SDVLLPLTQY

SEQ ID NO: 10976 - protein, 10 aa, Severe acute respiratory syndrome-related coronavirus
  REGION 1..10: note = Table B: HLA-DQA1*05:01-B1*03:01L HLA-DRB1*04:03L HLA-DRB1*13:03L HLA-DRB1*01:03L HLA-DQA1*01:02-B1*06:02L HLA-DRB1*08:77L HLA-DPA1*01:03-B1*03:01L HLA-DPA1*03:01-B1*04:02L HLA-DRB1*03:01L HLA-DRB1*14:01L
  REGION 1..10: note = CONT. FROM ABOVE: HLA-DRB1*11:02L HLA-DRB1*14:02L HLA-DQA1*01-B1 *05L HLA-DQA1*05:05-B1*03:19M HLA-DQA1*05:01-B1*02:01L HLA-DRB4* 01:01L HLA-DPA1*01:03-B1*04:01L HLA-DQA1*05:05-B1*03:116L HLA-DP A1*01:03-B1*04:02L HLA-DRB1*12:01L HLA-DPA1*02:01-B1*13:01L
  REGION 1..10: note = CONT. FROM ABOVE: HLA-DPA1*03:01-B1*105:01L HLA-DPA1*01:03-B1*10 4:01L HLA-DQA1*05:05-B1*03:01L HLA-DPA1*01:02-B1*04:01L HLA-DRB1 *10:01L HLA-DRB1*16:01L HLA-DQA1*01:03-B1*06:01L HLA-DRB1*08:02L HLA-DQA1*02:01-B1*03:03L HLA-DRB1*15:03L
  source 1..10: note = Severe acute respiratory syndrome coronavirus 2
LLPLTQYNRY

SEQ ID NO: 10977 - protein, 10 aa, Severe acute respiratory syndrome-related coronavirus
  REGION 1..10: note = Table B: HLA-DQA1*05:01-B1*03:01L HLA-DRB1*01:03L HLA-DQA1*01:02-B1*06:02L HLA-DRB1*03:01L HLA-DQA1*05:05-B1*03:19L HLA-DQA1*05:01-B1*02:01L HLA-DRB1*16:01L HLA-DQA1*01:03-B1*06:01L
  REGION 1..10: note = CONT. FROM ABOVE: HLA-DQA1*02:01-B1*03:03L
  source 1..10: note = Severe acute respiratory syndrome coronavirus 2
NRYLALYNKY

SEQ ID NO: 10978 - protein, 10 aa, Severe acute respiratory syndrome-related coronavirus
  REGION 1..10: note = Table B: HLA-DQA1*05:01-B1*03:01L HLA-DRB1*01:03L HLA-DQA1*01:02-B1*06:02L HLA-DRB1*08:77L HLA-DPA1*01:03-B1*03:01L HLA-DPA1*03:01-B1*04:02L HLA-DRB1*03:01L HLA-DRB1*14:01L HLA-DRB1*11:02L HLA-DRB1*14:02L
  REGION 1..10: note = CONT. FROM ABOVE: HLA-DQA1*01-B1*05L HLA-DQA1*05:05-B1*03:19M HL A-DQA1*05:01-B1*02:01L HLA-DRB4*01:01L HLA-DPA1*01:03-B1*04:01L HLA-DQA1*05:05-B1*03:116L HLA-DPA1*01:03-B1*04:02L HLA-DRB1*12:0 1L HLA-DPA1*02:01-B1*13:01L HLA-DPA1*03:01-B1*105:01L
  REGION 1..10: note = CONT. FROM ABOVE: HLA-DPA1*01:03-B1*104:01L HLA-DRB1*10:01L HLA- DRB1*16:01L HLA-DQA1*01:03-B1*06:01L HLA-DQA1*02:01-B1*03:03L HL A-DRB1*15:03L
  source 1..10: note = Severe acute respiratory syndrome coronavirus 2
YLALYNKYKY

SEQ ID NO: 10979 - protein, 11 aa, Severe acute respiratory syndrome-related coronavirus
  REGION 1..11: note = Table B: HLA-DQA1*05:01-B1*03:01L HLA-DRB1*01:03L HLA-DPA1*03:01-B1*04:02L HLA-DRB1*03:01L HLA-DRB1*11:02L HLA-DRB1*14:02L HLA-DRB4*01:01L HLA-DPA1*01:03-B1*04:02L HLA-DPA1*02:01-B1*13:01L HLA-DPA1*03:01-B1*105:01L
  REGION 1..11: note = CONT. FROM ABOVE: HLA-DRB1*10:01L HLA-DQA1*01:03-B1*06:01L HLA-D RB1*15:03L
  source 1..11: note = Severe acute respiratory syndrome coronavirus 2
YFSGAMDTTSY

SEQ ID NO: 10980 - protein, 10 aa, Severe acute respiratory syndrome-related coronavirus
  REGION 1..10: note = Table B: HLA-DQA1*05:01-B1*03:01L HLA-DRB1*04:03L HLA-DRB1*13:03L HLA-DRB1*04:02L HLA-DRB4*03:01NL HLA-DRB1*12:01L HLA-DQA1*03:01-B1*03:02L HLA-DQA1*05:05-B1*03:01L HLA-DRB1*14:17L HLA-DQA1*01:03-B1*06:01L
  REGION 1..10: note = CONT. FROM ABOVE: HLA-DQA1*02:01-B1*03:03L
  source 1..10: note = Severe acute respiratory syndrome coronavirus 2
SGAMDTTSYR

SEQ ID NO: 10981 - protein, 11 aa, Severe acute respiratory syndrome-related coronavirus
  REGION 1..11: note = Table B: HLA-DQA1*05:01-B1*03:01L HLA-DRB1*13:02L HLA-DRB1*04:05L HLA-DQA1*01:02-B1*06:02L HLA-DRB1*01:02L HLA-DRB1*08:77L HLA-DPA1*01:03-B1*03:01L HLA-DPA1*03:01-B1*04:02L HLA-DQA1*05:05-B1*03:19L
  REGION 1..11: note = CONT. FROM ABOVE: HLA-DPA1*01:03-B1*04:01L HLA-DRB1*04:10L HLA-D PA1*01:03-B1*04:02L HLA-DQA1*05:05-B1*03:01L HLA-DQA1*01:03-B1*0 6:01L HLA-DRB1*04:08L HLA-DRB1*15:03L
  source 1..11: note = Severe acute respiratory syndrome coronavirus 2
GAMDTTSYREA

SEQ ID NO: 10982 - protein, 11 aa, Severe acute respiratory syndrome-related coronavirus
  REGION 1..11: note = Table B: HLA-DQA1*05:01-B1*03:01L HLA-DQA1*01:02-B1*06:02L HLA-DQA1*05:05-B1*03:19L HLA-DPA1*01:03-B1*04:02L HLA-DQA1*05:05-B1*03:01L
  source 1..11: note = Severe acute respiratory syndrome coronavirus 2
AMDTTSYREAA

SEQ ID NO: 10983 - protein, 13 aa, Severe acute respiratory syndrome-related coronavirus
  REGION 1..13: note = Table B: HLA-DQA1*05:01-B1*03:01L HLA-DRB1*13:02L HLA-DRB1*04:04L HLA-DQA1*01:02-B1*06:02L HLA-DRB1*01:01L HLA-DPA1*01:03-B1*03:01L HLA-DRB1*11:04L HLA-DRB1*08:01L HLA-DRB1*11:01L HLA-DRB3*01:01L HLA-DPA1*02:01-B1*13:01L
  REGION 1..13: note = CONT. FROM ABOVE: HLA-DPA1*03:01-B1*105:01L HLA-DQA1*03:01-B1*03 :02L HLA-DPA1*01:02-B1*04:01L HLA-DRB1*07:01L HLA-DQA1*02:01-B1* 03:03L
  source 1..13: note = Severe acute respiratory syndrome coronavirus 2
TSYREAACCHLAK

SEQ ID NO: 10984 - protein, 13 aa, Severe acute respiratory syndrome-related coronavirus
  REGION 1..13: note = Table B: HLA-DQA1*05:01-B1*03:01L HLA-DPA1*03:01-B1*04:02L HLA-DPA1*02:01-B1*13:01L HLA-DPA1*03:01-B1*105:01L HLA-DQA1*05:05-B1*03:01L HLA-DQA1*01:03-B1*06:01L
  source 1..13: note = Severe acute respiratory syndrome coronavirus 2
ALNDFSNSGSDVL

SEQ ID NO: 10985 - protein, 14 aa, Severe acute respiratory syndrome-related coronavirus
  REGION 1..14: note = Table B: HLA-DQA1*05:01-B1*03:01L HLA-DPA1*03:01-B1*105:01L
  source 1..14: note = Severe acute respiratory syndrome coronavirus 2
DFSNSGSDVLYQPP

SEQ ID NO: 10986 - protein, 14 aa, Severe acute respiratory syndrome-related coronavirus
  REGION 1..14: note = Table B: HLA-DQA1*05:01-B1*03:01L HLA-DPA1*03:01-B1*105:01L
  source 1..14: note = Severe acute respiratory syndrome coronavirus 2
FSNSGSDVLYQPPQ

SEQ ID NO: 10987 - protein, 10 aa, Severe acute respiratory syndrome-related coronavirus
  REGION 1..10: note = Table B: HLA-DQA1*05:01-B1*03:01L HLA-DPA1*03:01-B1*04:02L HLA-DQA1*03:01-B1*03:02L HLA-DPA1*01:02-B1*04:01L HLA-DRB1*16:01L HLA-DQA1*01:03-B1*06:01L HLA-DQA1*02:01-B1*03:03L
  source 1..10: note = Severe acute respiratory syndrome coronavirus 2
AVLQSGFRKM

SEQ ID NO: 10988 - protein, 12 aa, Severe acute respiratory syndrome-related coronavirus
  REGION 1..12: note = Table B: HLA-DQA1*05:01-B1*03:01L HLA-DRB1*04:03L HLA-DRB1*01:03L HLA-DRB1*04:02L HLA-DRB1*04:04L HLA-DRB1*04:05L HLA-DQA1*01:02-B1*06:02L HLA-DRB1*01:02L HLA-DRB1*14:01L HLA-DRB1*08:01L HLA-DRB1*12:01L HLA-DRB1*14:17L HLA-DRB1*16:01L
  REGION 1..12: note = CONT. FROM ABOVE: HLA-DRB1*04:08L HLA-DQA1*02:01-B1*03:03L HLA-D RB1*15:03L
  source 1..12: note = Severe acute respiratory syndrome coronavirus 2
FRKMAFPSGKVE

SEQ ID NO: 10989 - protein, 14 aa, Severe acute respiratory syndrome-related coronavirus
  REGION 1..14: note = Table B: HLA-DQA1*05:01-B1*03:01L
  source 1..14: note = Severe acute respiratory syndrome coronavirus 2
TSEDMLNPNYEDLL

SEQ ID NO: 10990 - protein, 12 aa, Severe acute respiratory syndrome-related coronavirus
  REGION 1..12: note = Table B: HLA-DQA1*05:01-B1*03:01L HLA-DRB1*01:03L HLA-DRB1*04:05L HLA-DQA1*01:02-B1*06:02L HLA-DRB1*01:02L HLA-DRB1*08:01L HLA-DPA1*03:01-B1*105:01L HLA-DQA1*05:05-B1*03:01L HLA-DPA1*01:02-B1*04:01L
  REGION 1..12: note = CONT. FROM ABOVE: HLA-DRB1*16:01L HLA-DRB1*04:08L
  source 1..12: note = Severe acute respiratory syndrome coronavirus 2
YEDLLIRKSNHN

SEQ ID NO: 10991 - protein, 13 aa, Severe acute respiratory syndrome-related coronavirus
  REGION 1..13: note = Table B: HLA-DQA1*05:01-B1*03:01L HLA-DRB1*04:03L HLA-DRB1*13:03L HLA-DRB3*02:01L HLA-DRB1*11:04L HLA-DQA1*05:01-B1*02:01L HLA-DRB1*12:02L HLA-DRB3*01:01L HLA-DPA1*02:01-B1*13:01L HLA-DPA1*03:01-B1*105:01L
  REGION 1..13: note = CONT. FROM ABOVE: HLA-DRB1*14:17L HLA-DPA1*01:02-B1*04:01L
  source 1..13: note = Severe acute respiratory syndrome coronavirus 2
EDLLIRKSNHNFL

SEQ ID NO: 10992 - protein, 14 aa, Severe acute respiratory syndrome-related coronavirus
  REGION 1..14: note = Table B: HLA-DQA1*05:01-B1*03:01L HLA-DRB1*13:02L HLA-DRB1*04:05L HLA-DRB1*01:02L HLA-DPA1*01:03-B1*03:01L HLA-DRB1*08:01L HLA-DRB1*12:01L HLA-DPA1*02:01-B1*13:01L HLA-DPA1*03:01-B1*105:01L HLA-DPA1*01:02-B1*04:01L
  REGION 1..14: note = CONT. FROM ABOVE: HLA-DRB1*16:01L HLA-DRB1*04:08L HLA-DRB1*15:03 L
  source 1..14: note = Severe acute respiratory syndrome coronavirus 2
IRKSNHNFLVQAGN

SEQ ID NO: 10993 - protein, 11 aa, Severe acute respiratory syndrome-related coronavirus
  REGION 1..11: note = Table B: HLA-DQA1*05:01-B1*03:01L HLA-DRB1*13:03L HLA-DRB1*01:03L HLA-DRB1*04:02L HLA-DRB1*04:05L HLA-DQA1*01:02-B1*06:02L HLA-DRB4*03:01NL HLA-DPA1*01:03-B1*03:01L HLA-DQA1*01:01-B1*05:01L
  REGION 1..11: note = CONT. FROM ABOVE: HLA-DRB1*08:01L HLA-DQA1*05:05-B1*03:19L HLA-D RB1*04:10L HLA-DRB1*12:01L HLA-DPA1*03:01-B1*105:01L HLA-DRB1*14 :54L HLA-DQA1*05:05-B1*03:01L HLA-DRB1*14:17L HLA-DRB1*16:01L HL A-DQA1*01:03-B1*06:01L HLA-DRB1*04:08L
  source 1..11: note = Severe acute respiratory syndrome coronavirus 2
HNFLVQAGNVQ

SEQ ID NO: 10994 - protein, 10 aa, Severe acute respiratory syndrome-related coronavirus
  REGION 1..10: note = Table B: HLA-DQA1*05:01-B1*03:01L HLA-DRB1*04:03L HLA-DRB1*13:02L HLA-DRB1*13:03L HLA-DRB1*01:03L HLA-DRB1*04:02L HLA-DRB1*04:04L HLA-DQA1*01:02-B1*06:02L HLA-DRB1*01:01L HLA-DRB1*01:02L HLA-DRB4*03:01NL HLA-DRB1*08:77L HLA-DRB3*02:01L
  REGION 1..10: note = CONT. FROM ABOVE: HLA-DRB1*14:01L HLA-DRB1*11:04L HLA-DRB1*14:02 L HLA-DRB1*08:01L HLA-DRB5*01:01L HLA-DQA1*05:05-B1*03:19L HLA-D PA1*01:03-B1*04:02L HLA-DRB1*12:01L HLA-DRB1*12:02L HLA-DPA1*03: 01-B1*105:01L HLA-DQA1*03:01-B1*03:02M HLA-DRB1*14:54L
  REGION 1..10: note = CONT. FROM ABOVE: HLA-DQA1*05:05-B1*03:01L HLA-DRB1*14:17L HLA-D PA1*01:02-B1*04:01L HLA-DRB1*16:01L HLA-DQA1*01:03-B1*06:01L HLA -DQA1*02:01-B1*03:03L HLA-DRB1*15:01L HLA-DRB1*15:03L
  source 1..10: note = Severe acute respiratory syndrome coronavirus 2
LVQAGNVQLR

SEQ ID NO: 10995 - protein, 10 aa, Severe acute respiratory syndrome-related coronavirus
  REGION 1..10: note = Table B: HLA-DQA1*05:01-B1*03:01L HLA-DQA1*01:02-B1*06:02L HLA-DQA1*03:01-B1*03:02L HLA-DQA1*01:03-B1*06:01L HLA-DQA1*02:01-B1*03:03L
  source 1..10: note = Severe acute respiratory syndrome coronavirus 2
AGNVQLRVIG

SEQ ID NO: 10996 - protein, 12 aa, Severe acute respiratory syndrome-related coronavirus
  REGION 1..12: note = Table B: HLA-DQA1*05:01-B1*03:01L HLA-DRB1*13:02L HLA-DRB1*04:04L HLA-DRB1*04:05L HLA-DQA1*01:02-B1*06:02L HLA-DRB1*01:02L HLA-DRB4*03:01NL HLA-DRB1*08:04L HLA-DPA1*01:03-B1*03:01L HLA-DRB1*11:03L HLA-DRB1*11:04L
  REGION 1..12: note = CONT. FROM ABOVE: HLA-DRB1*11:01L HLA-DRB1*04:10L HLA-DRB1*12:01 L HLA-DRB3*01:01L HLA-DPA1*02:01-B1*13:01L HLA-DPA1*03:01-B1*105 :01L HLA-DRB1*14:54L HLA-DPA1*01:03-B1*104:01L HLA-DQA1*05:05-B1 *03:01L HLA-DPA1*01:02-B1*04:01L HLA-DQA1*01:03-B1*06:01L
  REGION 1..12: note = CONT. FROM ABOVE: HLA-DRB1*04:08L HLA-DRB1*08:03L HLA-DRB1*15:03 L
  source 1..12: note = Severe acute respiratory syndrome coronavirus 2
VQLRVIGHSMQN

SEQ ID NO: 10997 - protein, 15 aa, Severe acute respiratory syndrome-related coronavirus
  REGION 1..15: note = Table B: HLA-DQA1*05:01-B1*03:01L HLA-DRB1*13:02L HLA-DRB1*04:04L HLA-DRB1*08:04L HLA-DPA1*02:01-B1*13:01L HLA-DRB1*08:03L
  source 1..15: note = Severe acute respiratory syndrome coronavirus 2
NPKTPKYKFVRIQPG

SEQ ID NO: 10998 - protein, 13 aa, Severe acute respiratory syndrome-related coronavirus
  REGION 1..13: note = Table B: HLA-DQA1*05:01-B1*03:01L HLA-DRB1*04:03L HLA-DRB1*08:04L HLA-DPA1*03:01-B1*105:01L
  source 1..13: note = Severe acute respiratory syndrome coronavirus 2
TPKYKFVRIQPGQ

SEQ ID NO: 10999 - protein, 10 aa, Severe acute respiratory syndrome-related coronavirus
  REGION 1..10: note = Table B: HLA-DQA1*05:01-B1*03:01L HLA-DRB1*04:03L HLA-DQA1*01:02-B1*06:02L HLA-DQA1*03:01-B1*03:02L HLA-DRB1*14:17L HLA-DQA1*01:03-B1*06:01L HLA-DQA1*02:01-B1*03:03L
  source 1..10: note = Severe acute respiratory syndrome coronavirus 2
KFVRIQPGQT

SEQ ID NO: 11000 - protein, 10 aa, Severe acute respiratory syndrome-related coronavirus
  REGION 1..10: note = Table B: HLA-DQA1*05:01-B1*03:01L HLA-DRB1*04:03L HLA-DRB1*04:02L HLA-DRB1*01:02L HLA-DRB4*03:01NL HLA-DRB1*14:01L HLA-DRB1*12:01L HLA-DQA1*03:01-B1*03:02L HLA-DRB1*14:54L HLA-DRB1*14:17L HLA-DRB1*16:01L HLA-DQA1*02:01-B1*03:03L
  REGION 1..10: note = CONT. FROM ABOVE: HLA-DRB1*15:03L
  source 1..10: note = Severe acute respiratory syndrome coronavirus 2
VRIQPGQTFS

SEQ ID NO: 11001 - protein, 11 aa, Severe acute respiratory syndrome-related coronavirus
  REGION 1..11: note = Table B: HLA-DQA1*05:01-B1*03:01L HLA-DPA1*03:01-B1*105:01L HLA-DQA1*05:05-B1*03:01L HLA-DQA1*02:01-B1*03:03L
  source 1..11: note = Severe acute respiratory syndrome coronavirus 2
VYQCAMRPNFT

SEQ ID NO: 11002 - protein, 10 aa, Severe acute respiratory syndrome-related coronavirus
  REGION 1..10: note = Table B: HLA-DQA1*05:01-B1*03:01L HLA-DRB1*13:03L HLA-DRB1*01:03L HLA-DQA1*01:02-B1*06:02L HLA-DPA1*01:03-B1*03:01L HLA-DRB1*14:01L HLA-DPA1*03:01-B1*105:01L HLA-DQA1*02:01-B1*03:03L
  source 1..10: note = Severe acute respiratory syndrome coronavirus 2
RPNFTIKGSF

SEQ ID NO: 11003 - protein, 12 aa, Severe acute respiratory syndrome-related coronavirus
  REGION 1..12: note = Table B: HLA-DQA1*05:01-B1*03:01L HLA-DQA1*05:05-B1*03:19L HLA-DPA1*03:01-B1*105:01L HLA-DQA1*05:05-B1*03:01L HLA-DQA1*02:01-B1*03:03L
  source 1..12: note = Severe acute respiratory syndrome coronavirus 2
TIKGSFLNGSCG

SEQ ID NO: 11004 - protein, 13 aa, Severe acute respiratory syndrome-related coronavirus
  REGION 1..13: note = Table B: HLA-DQA1*05:01-B1*03:01L HLA-DQA1*01:02-B1*06:02L
  source 1..13: note = Severe acute respiratory syndrome coronavirus 2
KGSFLNGSCGSVG

SEQ ID NO: 11005 - protein, 14 aa, Severe acute respiratory syndrome-related coronavirus
  REGION 1..14: note = Table B: HLA-DQA1*05:01-B1*03:01L HLA-DPA1*03:01-B1*105:01L
  source 1..14: note = Severe acute respiratory syndrome coronavirus 2
GSFLNGSCGSVGFN

SEQ ID NO: 11006 - protein, 14 aa, Severe acute respiratory syndrome-related coronavirus
  REGION 1..14: note = Table B: HLA-DQA1*05:01-B1*03:01L HLA-DRB1*13:02L HLA-DRB1*04:05L HLA-DRB1*08:04L HLA-DRB1*11:04L HLA-DRB3*01:01L HLA-DPA1*02:01-B1*13:01L HLA-DPA1*01:03-B1*104:01L
  source 1..14: note = Severe acute respiratory syndrome coronavirus 2
NIDYDCVSFCYMHH

SEQ ID NO: 11007 - protein, 12 aa, Severe acute respiratory syndrome-related coronavirus
  REGION 1..12: note = Table B: HLA-DQA1*05:01-B1*03:01L HLA-DQA1*01:02-B1*06:02L HLA-DRB1*01:02L HLA-DPA1*03:01-B1*105:01L HLA-DQA1*01:03-B1*06:01L HLA-DQA1*02:01-B1*03:03L
  source 1..12: note = Severe acute respiratory syndrome coronavirus 2
YMHHMELPTGVH

SEQ ID NO: 11008 - protein, 11 aa, Severe acute respiratory syndrome-related coronavirus
  REGION 1..11: note = Table B: HLA-DQA1*05:01-B1*03:01L HLA-DQA1*05:01-B1*02:01L HLA-DQA1*05:05-B1*03:01L HLA-DQA1*01:03-B1*06:01L
  source 1..11: note = Severe acute respiratory syndrome coronavirus 2
ELPTGVHAGTD

SEQ ID NO: 11009 - protein, 11 aa, Severe acute respiratory syndrome-related coronavirus
  REGION 1..11: note = Table B: HLA-DQA1*05:01-B1*03:01L HLA-DRB1*01:03L HLA-DRB1*04:02L HLA-DQA1*01:02-B1*06:02L HLA-DRB4*03:01NL HLA-DRB1*14:01L HLA-DQA1*01:01-B1*05:01L HLA-DRB5*01:01L HLA-DQA1*05:05-B1*03:19L HLA-DQA1*05:01-B1*02:01L
  REGION 1..11: note = CONT. FROM ABOVE: HLA-DQA1*05:05-B1*03:01L HLA-DPA1*01:02-B1*04: 01L HLA-DRB1*16:01L
  source 1..11: note = Severe acute respiratory syndrome coronavirus 2
LPTGVHAGTDL

SEQ ID NO: 11010 - protein, 11 aa, Severe acute respiratory syndrome-related coronavirus
  REGION 1..11: note = Table B: HLA-DQA1*05:01-B1*03:01L HLA-DRB1*04:02L HLA-DQA1*01:02-B1*06:02L HLA-DQA1*01-B1*05L HLA-DQA1*05:05-B1*03:01L HLA-DRB1*16:01L
  source 1..11: note = Severe acute respiratory syndrome coronavirus 2
GVHAGTDLEGN

SEQ ID NO: 11011 - protein, 11 aa, Severe acute respiratory syndrome-related coronavirus
  REGION 1..11: note = Table B: HLA-DQA1*05:01-B1*03:01L HLA-DQA1*05:05-B1*03:19L HLA-DRB1*15:03L
  source 1..11: note = Severe acute respiratory syndrome coronavirus 2
VHAGTDLEGNF

SEQ ID NO: 11012 - protein, 11 aa, Severe acute respiratory syndrome-related coronavirus
  REGION 1..11: note = Table B: HLA-DQA1*05:01-B1*03:01L HLA-DRB1*01:03L HLA-DRB1*11:02L HLA-DRB1*14:02L HLA-DPA1*01:03-B1*04:01L HLA-DPA1*01:03-B1*04:02L HLA-DRB1*12:01L HLA-DRB1*10:01L HLA-DRB1*15:03L
  source 1..11: note = Severe acute respiratory syndrome coronavirus 2
HAGTDLEGNFY

SEQ ID NO: 11013 - protein, 13 aa, Severe acute respiratory syndrome-related coronavirus
  REGION 1..13: note = Table B: HLA-DQA1*05:01-B1*03:01L HLA-DRB1*04:03L HLA-DRB1*04:02L HLA-DQA1*01:01-B1*05:01L HLA-DPA1*03:01-B1*105:01L HLA-DPA1*01:02-B1*04:01L HLA-DRB1*16:01L
  source 1..13: note = Severe acute respiratory syndrome coronavirus 2
DLEGNFYGPFVDR

SEQ ID NO: 11014 - protein, 14 aa, Severe acute respiratory syndrome-related coronavirus
  REGION 1..14: note = Table B: HLA-DQA1*05:01-B1*03:01L HLA-DPA1*01:03-B1*03:01L HLA-DPA1*01:03-B1*04:02L
  source 1..14: note = Severe acute respiratory syndrome coronavirus 2
EGNFYGPFVDRQTA

SEQ ID NO: 11015 - protein, 12 aa, Severe acute respiratory syndrome-related coronavirus
  REGION 1..12: note = Table B: HLA-DQA1*05:01-B1*03:01L HLA-DQA1*01:02-B1*06:02L HLA-DRB1*01:02L HLA-DPA1*03:01-B1*105:01L HLA-DQA1*01:03-B1*06:01L HLA-DRB1*15:03L
  source 1..12: note = Severe acute respiratory syndrome coronavirus 2
FYGPFVDRQTAQ

SEQ ID NO: 11016 - protein, 12 aa, Severe acute respiratory syndrome-related coronavirus
  REGION 1..12: note = Table B: HLA-DQA1*05:01-B1*03:01L HLA-DQA1*05:01-B1*02:01L HLA-DQA1*03:01-B1*03:02L HLA-DQA1*05:05-B1*03:01L HLA-DQA1*02:01-B1*03:03L
  source 1..12: note = Severe acute respiratory syndrome coronavirus 2
TAQAAGTDTTIT

SEQ ID NO: 11017 - protein, 13 aa, Severe acute respiratory syndrome-related coronavirus
  REGION 1..13: note = Table B: HLA-DQA1*05:01-B1*03:01L HLA-DRB1*04:03L HLA-DQA1*01:02-B1*06:02L HLA-DQA1*01:01-B1*05:01L HLA-DQA1*01-B1*05L HLA-DQA1*05:01-B1*02:01L HLA-DQA1*05:05-B1*03:01L HLA-DRB1*16:01L
  REGION 1..13: note = CONT. FROM ABOVE: HLA-DQA1*01:03-B1*06:01L HLA-DQA1*02:01-B1*03: 03L
  source 1..13: note = Severe acute respiratory syndrome coronavirus 2
AQAAGTDTTITVN

SEQ ID NO: 11018 - protein, 11 aa, Severe acute respiratory syndrome-related coronavirus
  REGION 1..11: note = Table B: HLA-DQA1*05:01-B1*03:01L HLA-DRB1*13:03L HLA-DQA1*01-B1*05L HLA-DPA1*01:02-B1*04:01L
  source 1..11: note = Severe acute respiratory syndrome coronavirus 2
GTDTTITVNVL

SEQ ID NO: 11019 - protein, 10 aa, Severe acute respiratory syndrome-related coronavirus
  REGION 1..10: note = Table B: HLA-DQA1*05:01-B1*03:01L HLA-DQA1*01:02-B1*06:02L HLA-DQA1*05:05-B1*03:19L HLA-DQA1*05:01-B1*02:01L HLA-DPA1*03:01-B1*105:01L HLA-DQA1*01:03-B1*06:01L HLA-DQA1*02:01-B1*03:03L
  source 1..10: note = Severe acute respiratory syndrome coronavirus 2
AAVINGDRWF

SEQ ID NO: 11020 - protein, 12 aa, Severe acute respiratory syndrome-related coronavirus
  REGION 1..12: note = Table B: HLA-DQA1*05:01-B1*03:01L HLA-DRB1*04:05L HLA-DQA1*01:02-B1*06:02L HLA-DRB1*01:02L HLA-DRB1*14:01L HLA-DRB1*08:01L HLA-DRB1*11:01L HLA-DPA1*01:03-B1*04:02L HLA-DRB1*12:01L HLA-DPA1*02:01-B1*13:01L
  REGION 1..12: note = CONT. FROM ABOVE: HLA-DQA1*03:01-B1*03:02L HLA-DQA1*01:03-B1*06: 01L HLA-DQA1*02:01-B1*03:03L HLA-DRB1*15:03L
  source 1..12: note = Severe acute respiratory syndrome coronavirus 2
GDRWFLNRFTTT

SEQ ID NO: 11021 - protein, 12 aa, Severe acute respiratory syndrome-related coronavirus
  REGION 1..12: note = Table B: HLA-DQA1*05:01-B1*03:01L HLA-DRB1*13:02L HLA-DRB1*01:03L HLA-DRB1*04:02L HLA-DRB1*04:05L HLA-DRB1*01:02L HLA-DPA1*01:03-B1*03:01L HLA-DPA1*03:01-B1*04:02L HLA-DQA1*01:01-B1*05:01L HLA-DQA1*05:05-B1*03:19L
  REGION 1..12: note = CONT. FROM ABOVE: HLA-DRB1*04:10L HLA-DRB1*12:01L HLA-DPA1*01:03 -B1*104:01L HLA-DQA1*05:05-B1*03:01L HLA-DPA1*01:02-B1*04:01L HL A-DRB1*04:08L HLA-DRB1*15:03L
  source 1..12: note = Severe acute respiratory syndrome coronavirus 2
LNRFTTTLNDFN

SEQ ID NO: 11022 - protein, 14 aa, Severe acute respiratory syndrome-related coronavirus
  REGION 1..14: note = Table B: HLA-DQA1*05:01-B1*03:01L HLA-DRB1*13:02L HLA-DRB1*01:03L HLA-DRB1*04:02L HLA-DRB1*04:04L HLA-DPA1*01:03-B1*03:01L HLA-DRB1*08:01L HLA-DRB1*04:10L HLA-DPA1*01:03-B1*04:02L HLA-DPA1*01:03-B1*104:01L
  REGION 1..14: note = CONT. FROM ABOVE: HLA-DQA1*05:05-B1*03:01L HLA-DRB1*04:08L
  source 1..14: note = Severe acute respiratory syndrome coronavirus 2
NRFTTTLNDFNLVA

SEQ ID NO: 11023 - protein, 10 aa, Severe acute respiratory syndrome-related coronavirus
  REGION 1..10: note = Table B: HLA-DQA1*05:01-B1*03:01M HLA-DRB1*13:03L HLA-DQA1*01:02-B1*06:02L HLA-DRB4*03:01NL HLA-DRB1*08:77M HLA-DPA1*01:03-B1*03:01M HLA-DPA1*03:01-B1*04:02L HLA-DRB1*03:01L HLA-DRB1*11:02L HLA-DQA1*01-B1*05L
  REGION 1..10: note = CONT. FROM ABOVE: HLA-DQA1*05:05-B1*03:19M HLA-DQA1*05:01-B1*02: 01M HLA-DRB4*01:01M HLA-DPA1*01:03-B1*04:01M HLA-DQA1*05:05-B1*0 3:116L HLA-DPA1*01:03-B1*04:02L HLA-DRB1*12:01L HLA-DPA1*01:03-B 1*104:01M HLA-DPA1*01:02-B1*04:01L HLA-DRB1*10:01L
  REGION 1..10: note = CONT. FROM ABOVE: HLA-DRB1*16:01M HLA-DRB1*15:03L
  source 1..10: note = Severe acute respiratory syndrome coronavirus 2
NDFNLVAMKY

SEQ ID NO: 11024 - protein, 13 aa, Severe acute respiratory syndrome-related coronavirus
  REGION 1..13: note = Table B: HLA-DQA1*05:01-B1*03:01L HLA-DRB1*13:02L HLA-DRB1*04:04L HLA-DPA1*01:03-B1*03:01L HLA-DRB1*14:01L HLA-DRB1*11:04L HLA-DRB1*11:01L HLA-DPA1*01:03-B1*04:01L HLA-DPA1*01:03-B1*04:02L HLA-DRB3*01:01L HLA-DRB1*14:54L
  REGION 1..13: note = CONT. FROM ABOVE: HLA-DPA1*01:03-B1*02:01L
  source 1..13: note = Severe acute respiratory syndrome coronavirus 2
AMKYNYEPLTQDH

SEQ ID NO: 11025 - protein, 11 aa, Severe acute respiratory syndrome-related coronavirus
  REGION 1..11: note = Table B: HLA-DQA1*05:01-B1*03:01L HLA-DRB1*04:05L HLA-DQA1*01:02-B1*06:02L HLA-DRB1*12:01L HLA-DPA1*03:01-B1*105:01L HLA-DPA1*01:02-B1*04:01L HLA-DRB1*15:03L
  source 1..11: note = Severe acute respiratory syndrome coronavirus 2
NYEPLTQDHVD

SEQ ID NO: 11026 - protein, 12 aa, Severe acute respiratory syndrome-related coronavirus
  REGION 1..12: note = Table B: HLA-DQA1*05:01-B1*03:01L HLA-DRB1*13:02L HLA-DRB1*13:03L HLA-DRB1*04:02L HLA-DRB1*04:05L HLA-DQA1*01:02-B1*06:02L HLA-DRB1*01:02L HLA-DRB1*08:04L HLA-DRB3*02:01L HLA-DPA1*01:03-B1*03:01L
  REGION 1..12: note = CONT. FROM ABOVE: HLA-DPA1*03:01-B1*04:02L HLA-DRB1*14:01L HLA-D RB1*14:02L HLA-DRB1*12:01L HLA-DPA1*02:01-B1*13:01L HLA-DPA1*03: 01-B1*105:01L HLA-DRB1*15:03L
  source 1..12: note = Severe acute respiratory syndrome coronavirus 2
YEPLTQDHVDIL

SEQ ID NO: 11027 - protein, 14 aa, Severe acute respiratory syndrome-related coronavirus
  REGION 1..14: note = Table B: HLA-DQA1*05:01-B1*03:01L HLA-DRB1*04:01L HLA-DRB1*13:02L HLA-DRB1*13:03L HLA-DRB1*01:03L HLA-DRB1*04:04L HLA-DQA1*01:02-B1*06:02L HLA-DRB1*01:02L HLA-DRB4*03:01NL HLA-DRB1*08:04L HLA-DRB1*08:77L HLA-DRB3*02:01L
  REGION 1..14: note = CONT. FROM ABOVE: HLA-DPA1*01:03-B1*03:01L HLA-DPA1*03:01-B1*04: 02L HLA-DRB1*03:01L HLA-DRB1*14:01L HLA-DRB1*11:03L HLA-DRB1*11: 04L HLA-DRB1*14:02L HLA-DQA1*01:01-B1*05:01L HLA-DRB1*08:01L HLA -DRB5*01:01L HLA-DQA1*05:05-B1*03:19L HLA-DRB1*13:01L
  REGION 1..14: note = CONT. FROM ABOVE: HLA-DRB4*01:01L HLA-DRB1*04:10L HLA-DRB1*09:01 L HLA-DPA1*01:03-B1*04:02L HLA-DRB1*12:01L HLA-DRB1*12:02L HLA-D RB3*01:01L HLA-DPA1*02:01-B1*13:01L HLA-DRB1*14:54L HLA-DQA1*05: 05-B1*03:01L HLA-DRB1*14:17L HLA-DPA1*01:02-B1*04:01L
  REGION 1..14: note = CONT. FROM ABOVE: HLA-DRB1*10:01L HLA-DQA1*01:03-B1*06:01L HLA-D RB1*04:08L HLA-DRB1*08:03L HLA-DRB1*15:03L
  source 1..14: note = Severe acute respiratory syndrome coronavirus 2
EPLTQDHVDILGPL

SEQ ID NO: 11028 - protein, 14 aa, Severe acute respiratory syndrome-related coronavirus
  REGION 1..14: note = Table B: HLA-DQA1*05:01-B1*03:01L HLA-DRB1*01:03L HLA-DPA1*01:03-B1*03:01L HLA-DRB1*14:01L HLA-DQA1*05:01-B1*02:01L HLA-DPA1*02:01-B1*13:01L HLA-DPA1*03:01-B1*105:01L HLA-DQA1*05:05-B1*03:01L
  REGION 1..14: note = CONT. FROM ABOVE: HLA-DRB1*04:08L
  source 1..14: note = Severe acute respiratory syndrome coronavirus 2
TQDHVDILGPLSAQ

SEQ ID NO: 11029 - protein, 14 aa, Severe acute respiratory syndrome-related coronavirus
  REGION 1..14: note = Table B: HLA-DQA1*05:01-B1*03:01L HLA-DPA1*03:01-B1*105:01L
  source 1..14: note = Severe acute respiratory syndrome coronavirus 2
ELLQNGMNGRTILG

SEQ ID NO: 11030 - protein, 12 aa, Severe acute respiratory syndrome-related coronavirus
  REGION 1..12: note = Table B: HLA-DQA1*05:01-B1*03:01L HLA-DRB1*13:02L HLA-DRB1*13:03L HLA-DRB1*01:03L HLA-DRB1*04:02L HLA-DRB1*04:05L HLA-DRB1*01:02L HLA-DRB4*03:01NL HLA-DRB1*08:04L HLA-DRB3*02:01L HLA-DPA1*01:03-B1*03:01L HLA-DRB1*14:01L
  REGION 1..12: note = CONT. FROM ABOVE: HLA-DPA1*01:03-B1*04:01L HLA-DPA1*01:03-B1*04: 02L HLA-DRB1*12:01L HLA-DPA1*02:01-B1*13:01L HLA-DRB1*14:54L HLA -DRB1*14:17L HLA-DRB1*16:01L HLA-DRB1*04:08L
  source 1..12: note = Severe acute respiratory syndrome coronavirus 2
SALLEDEFTPFD

SEQ ID NO: 11031 - protein, 14 aa, Severe acute respiratory syndrome-related coronavirus
  REGION 1..14: note = Table B: HLA-DQA1*05:01-B1*03:01L HLA-DRB1*01:03L HLA-DRB1*01:02L HLA-DRB1*08:04L HLA-DRB1*08:01L HLA-DQA1*05:05-B1*03:19L HLA-DPA1*01:03-B1*04:02L HLA-DRB1*16:01L HLA-DRB1*15:03L
  source 1..14: note = Severe acute respiratory syndrome coronavirus 2
FTPFDVVRQCSGVT

SEQ ID NO: 11032 - protein, 15 aa, Severe acute respiratory syndrome-related coronavirus
  REGION 1..15: note = Table B: HLA-DQA1*05:01-B1*03:01L HLA-DRB1*13:02L HLA-DRB1*01:03L HLA-DRB1*04:05L HLA-DRB3*02:01L HLA-DPA1*01:03-B1*03:01L HLA-DPA1*03:01-B1*04:02L HLA-DRB1*14:01L HLA-DQA1*05:05-B1*03:19L
  REGION 1..15: note = CONT. FROM ABOVE: HLA-DQA1*05:01-B1*02:01L HLA-DPA1*02:01-B1*13: 01L HLA-DPA1*01:03-B1*104:01L HLA-DRB1*07:01L
  source 1..15: note = Severe acute respiratory syndrome coronavirus 2
TPFDVVRQCSGVTFQ

SEQ ID NO: 11033 - protein, 14 aa, Severe acute respiratory syndrome-related coronavirus
  REGION 1..14: note = Table B: HLA-DQA1*05:01-B1*03:01L HLA-DPA1*03:01-B1*105:01L HLA-DQA1*05:05-B1*03:01L HLA-DQA1*02:01-B1*03:03L
  source 1..14: note = Severe acute respiratory syndrome coronavirus 2
DVVRQCSGVTFQSA

SEQ ID NO: 11034 - protein, 12 aa, Severe acute respiratory syndrome-related coronavirus
  REGION 1..12: note = Table B: HLA-DQA1*05:01-B1*03:01L HLA-DRB1*13:03L HLA-DRB1*01:03L HLA-DRB1*04:05L HLA-DQA1*01:02-B1*06:02L HLA-DRB1*01:02L HLA-DRB1*14:01L HLA-DRB1*11:04L HLA-DRB1*11:01L HLA-DRB1*12:01L HLA-DPA1*01:02-B1*04:01L HLA-DRB1*04:08L
  REGION 1..12: note = CONT. FROM ABOVE: HLA-DRB1*15:03L
  source 1..12: note = Severe acute respiratory syndrome coronavirus 2
VTFQSAVKRTIK

SEQ ID NO: 11035 - protein, 11 aa, Severe acute respiratory syndrome-related coronavirus
  REGION 1..11: note = Table B: HLA-DQA1*05:01-B1*03:01L HLA-DPA1*01:03-B1*04:02L HLA-DRB1*12:01L HLA-DQA1*03:01-B1*03:02L
  source 1..11: note = Severe acute respiratory syndrome coronavirus 2
FLYENAFLPFA

SEQ ID NO: 11036 - protein, 11 aa, Severe acute respiratory syndrome-related coronavirus
  REGION 1..11: note = Table B: HLA-DQA1*05:01-B1*03:01L HLA-DRB1*13:02L HLA-DRB3*02:01L HLA-DPA1*01:03-B1*03:01L HLA-DQA1*01-B1*05L HLA-DQA1*05:05-B1*03:19L HLA-DPA1*01:03-B1*04:01L HLA-DPA1*01:03-B1*04:02L HLA-DQA1*05:05-B1*03:01L
  REGION 1..11: note = CONT. FROM ABOVE: HLA-DRB1*16:01L HLA-DQA1*02:01-B1*03:03L
  source 1..11: note = Severe acute respiratory syndrome coronavirus 2
GIIAMSAFAMM

SEQ ID NO: 11037 - protein, 12 aa, Severe acute respiratory syndrome-related coronavirus
  REGION 1..12: note = Table B: HLA-DQA1*05:01-B1*03:01L HLA-DRB1*13:02L HLA-DRB1*04:02L HLA-DRB1*04:05L HLA-DQA1*01:02-B1*06:02L HLA-DRB1*01:02L HLA-DRB1*14:01L HLA-DRB1*08:01L HLA-DRB1*11:01L HLA-DRB1*12:01L HLA-DRB3*01:01L HLA-DPA1*03:01-B1*105:01L
  REGION 1..12: note = CONT. FROM ABOVE: HLA-DRB1*14:17L HLA-DRB1*04:08L HLA-DRB1*15:03 L
  source 1..12: note = Severe acute respiratory syndrome coronavirus 2
SAFAMMFVKHKH

SEQ ID NO: 11038 - protein, 12 aa, Severe acute respiratory syndrome-related coronavirus
  REGION 1..12: note = Table B: HLA-DQA1*05:01-B1*03:01L HLA-DRB1*13:02L HLA-DRB1*04:05L HLA-DQA1*01:02-B1*06:02L HLA-DRB1*14:01L HLA-DRB1*11:01L HLA-DRB1*12:01L HLA-DRB3*01:01L HLA-DPA1*03:01-B1*105:01L HLA-DQA1*02:01-B1*03:03L
  REGION 1..12: note = CONT. FROM ABOVE: HLA-DRB1*15:03L
  source 1..12: note = Severe acute respiratory syndrome coronavirus 2
AFAMMFVKHKHA

SEQ ID NO: 11039 - protein, 12 aa, Severe acute respiratory syndrome-related coronavirus
  REGION 1..12: note = Table B: HLA-DQA1*05:01-B1*03:01L HLA-DRB1*04:03L HLA-DPA1*03:01-B1*04:02L HLA-DRB1*14:01L HLA-DQA1*05:01-B1*02:01L HLA-DPA1*01:03-B1*04:01L HLA-DRB1*12:01L HLA-DPA1*01:02-B1*04:01L HLA-DRB1*16:01L
  REGION 1..12: note = CONT. FROM ABOVE: HLA-DQA1*01:03-B1*06:01L HLA-DQA1*02:01-B1*03: 03L HLA-DRB1*15:03L
  source 1..12: note = Severe acute respiratory syndrome coronavirus 2
LPSLATVAYFNM

SEQ ID NO: 11040 - protein, 10 aa, Severe acute respiratory syndrome-related coronavirus
  REGION 1..10: note = Table B: HLA-DQA1*05:01-B1*03:01L HLA-DRB1*13:03L HLA-DQA1*01:02-B1*06:02L HLA-DRB1*08:77L HLA-DPA1*01:03-B1*03:01L HLA-DRB1*03:01L HLA-DRB1*11:02L HLA-DRB1*14:02L HLA-DQA1*01-B1*05L HLA-DQA1*05:05-B1*03:19M
  REGION 1..10: note = CONT. FROM ABOVE: HLA-DQA1*05:01-B1*02:01L HLA-DRB4*01:01L HLA-D PA1*01:03-B1*04:01L HLA-DQA1*05:05-B1*03:116L HLA-DPA1*01:03-B1* 04:02L HLA-DPA1*03:01-B1*105:01L HLA-DPA1*01:03-B1*104:01L HLA-D RB1*10:01L HLA-DRB1*16:01L HLA-DQA1*02:01-B1*03:03L
  REGION 1..10: note = CONT. FROM ABOVE: HLA-DRB1*15:03L
  source 1..10: note = Severe acute respiratory syndrome coronavirus 2
ATVAYFNMVY

SEQ ID NO: 11041 - protein, 11 aa, Severe acute respiratory syndrome-related coronavirus
  REGION 1..11: note = Table B: HLA-DQA1*05:01-B1*03:01L HLA-DRB1*04:03L HLA-DRB1*01:03L HLA-DRB1*01:02L HLA-DPA1*01:02-B1*04:01L
  source 1..11: note = Severe acute respiratory syndrome coronavirus 2
MVYMPASWVMR

SEQ ID NO: 11042 - protein, 11 aa, Severe acute respiratory syndrome-related coronavirus
  REGION 1..11: note = Table B: HLA-DQA1*05:01-B1*03:01L HLA-DRB1*04:03L HLA-DRB1*04:05L HLA-DRB1*08:77L HLA-DPA1*03:01-B1*04:02L HLA-DRB1*11:02L HLA-DRB1*14:02L HLA-DQA1*05:01-B1*02:01L HLA-DRB4*01:01L HLA-DRB1*09:01L HLA-DPA1*01:02-B1*04:01L
  source 1..11: note = Severe acute respiratory syndrome coronavirus 2
VYMPASWVMRI

SEQ ID NO: 11043 - protein, 10 aa, Severe acute respiratory syndrome-related coronavirus
  REGION 1..10: note = Table B: HLA-DQA1*05:01-B1*03:01L HLA-DRB1*13:03L HLA-DQA1*01:02-B1*06:02L HLA-DQA1*01-B1*05L HLA-DPA1*03:01-B1*105:01L HLA-DQA1*03:01-B1*03:02L HLA-DPA1*01:02-B1*04:01L HLA-DQA1*01:03-B1*06:01L
  REGION 1..10: note = CONT. FROM ABOVE: HLA-DRB1*15:03L
  source 1..10: note = Severe acute respiratory syndrome coronavirus 2
MPASWVMRIM

SEQ ID NO: 11044 - protein, 10 aa, Severe acute respiratory syndrome-related coronavirus
  REGION 1..10: note = Table B: HLA-DQA1*05:01-B1*03:01L HLA-DRB1*04:03L HLA-DRB1*01:03L HLA-DRB1*01:02L HLA-DRB1*12:01L HLA-DQA1*03:01-B1*03:02L HLA-DRB1*14:17L HLA-DRB1*16:01L HLA-DQA1*01:03-B1*06:01L HLA-DRB1*04:08L
  REGION 1..10: note = CONT. FROM ABOVE: HLA-DQA1*02:01-B1*03:03L HLA-DRB1*15:03L
  source 1..10: note = Severe acute respiratory syndrome coronavirus 2
TSLSGFKLKD

SEQ ID NO: 11045 - protein, 15 aa, Severe acute respiratory syndrome-related coronavirus
  REGION 1..15: note = Table B: HLA-DQA1*05:01-B1*03:01L
  source 1..15: note = Severe acute respiratory syndrome coronavirus 2
GFKLKDCVMYASAVV

SEQ ID NO: 11046 - protein, 10 aa, Severe acute respiratory syndrome-related coronavirus
  REGION 1..10: note = Table B: HLA-DQA1*05:01-B1*03:01L HLA-DRB1*04:03L HLA-DRB1*13:02L HLA-DRB1*13:03L HLA-DRB1*01:03L HLA-DRB1*04:02L HLA-DQA1*01:02-B1*06:02L HLA-DRB1*01:02L HLA-DRB4*03:01NL HLA-DRB1*14:01L HLA-DQA1*05:01-B1*02:01L HLA-DRB1*12:01L
  REGION 1..10: note = CONT. FROM ABOVE: HLA-DRB1*12:02L HLA-DPA1*03:01-B1*105:01L HLA- DQA1*03:01-B1*03:02L HLA-DRB1*14:54L HLA-DRB1*14:17L HLA-DPA1*01 :02-B1*04:01L HLA-DRB1*16:01L HLA-DQA1*02:01-B1*03:03L HLA-DRB1* 15:03L
  source 1..10: note = Severe acute respiratory syndrome coronavirus 2
ILMTARTVYD

SEQ ID NO: 11047 - protein, 10 aa, Severe acute respiratory syndrome-related coronavirus
  REGION 1..10: note = Table B: HLA-DQA1*05:01-B1*03:01L HLA-DRB1*13:03L HLA-DQA1*01:02-B1*06:02L HLA-DRB1*08:77L HLA-DPA1*01:03-B1*03:01L HLA-DPA1*03:01-B1*04:02L HLA-DRB1*03:01L HLA-DRB1*11:02L HLA-DRB1*14:02L
  REGION 1..10: note = CONT. FROM ABOVE: HLA-DQA1*01-B1*05L HLA-DQA1*05:05-B1*03:19M HL A-DQA1*05:01-B1*02:01L HLA-DRB4*01:01L HLA-DPA1*01:03-B1*04:01L HLA-DQA1*05:05-B1*03:116L HLA-DPA1*01:03-B1*04:02L HLA-DRB1*12:0 1L HLA-DPA1*02:01-B1*13:01L HLA-DPA1*03:01-B1*105:01L
  REGION 1..10: note = CONT. FROM ABOVE: HLA-DPA1*01:03-B1*104:01L HLA-DRB1*10:01L HLA- DRB1*16:01L HLA-DQA1*02:01-B1*03:03L HLA-DRB1*15:03L
  source 1..10: note = Severe acute respiratory syndrome coronavirus 2
TLMNVLTLVY

SEQ ID NO: 11048 - protein, 11 aa, Severe acute respiratory syndrome-related coronavirus
  REGION 1..11: note = Table B: HLA-DQA1*05:01-B1*03:01L HLA-DRB1*13:03L HLA-DRB1*01:03L HLA-DRB1*04:05L HLA-DRB4*03:01NL HLA-DRB1*12:01L HLA-DPA1*03:01-B1*105:01L HLA-DPA1*01:02-B1*04:01L HLA-DQA1*01:03-B1*06:01L
  source 1..11: note = Severe acute respiratory syndrome coronavirus 2
KVYYGNALDQA

SEQ ID NO: 11049 - protein, 12 aa, Severe acute respiratory syndrome-related coronavirus
  REGION 1..12: note = Table B: HLA-DQA1*05:01-B1*03:01L HLA-DRB1*13:02L HLA-DRB1*13:03L HLA-DRB1*01:03L HLA-DRB1*04:02L HLA-DRB1*04:04L HLA-DRB1*04:05L HLA-DQA1*01:02-B1*06:02L HLA-DRB1*01:02L HLA-DRB4*03:01NL HLA-DRB1*08:77L HLA-DRB3*02:01L
  REGION 1..12: note = CONT. FROM ABOVE: HLA-DPA1*01:03-B1*03:01L HLA-DPA1*03:01-B1*04: 02L HLA-DRB1*14:01L HLA-DRB1*11:03L HLA-DRB1*14:02L HLA-DQA1*01: 01-B1*05:01L HLA-DRB1*04:10L HLA-DRB1*09:01L HLA-DPA1*01:03-B1*0 4:02L HLA-DRB1*12:01L HLA-DPA1*03:01-B1*105:01L HLA-DRB1*14:54L
  REGION 1..12: note = CONT. FROM ABOVE: HLA-DQA1*05:05-B1*03:01L HLA-DPA1*01:02-B1*04: 01L HLA-DRB1*10:01L HLA-DRB1*16:01L HLA-DRB1*04:08L HLA-DRB1*15: 03L
  source 1..12: note = Severe acute respiratory syndrome coronavirus 2
VYYGNALDQAIS

SEQ ID NO: 11050 - protein, 10 aa, Severe acute respiratory syndrome-related coronavirus
  REGION 1..10: note = Table B: HLA-DQA1*05:01-B1*03:01L HLA-DRB1*13:03L HLA-DRB1*01:03L HLA-DQA1*01:02-B1*06:02L HLA-DRB1*08:77L HLA-DPA1*01:03-B1*03:01L HLA-DRB1*03:01L HLA-DRB1*14:02L HLA-DQA1*05:05-B1*03:19L HLA-DQA1*05:01-B1*02:01L
  REGION 1..10: note = CONT. FROM ABOVE: HLA-DRB4*01:01L HLA-DPA1*01:03-B1*04:01L HLA-D PA1*01:03-B1*04:02L HLA-DPA1*02:01-B1*13:01L HLA-DPA1*03:01-B1*1 05:01L HLA-DPA1*01:03-B1*104:01L HLA-DRB1*10:01L HLA-DQA1*01:03- B1*06:01L HLA-DQA1*02:01-B1*03:03L HLA-DRB1*15:03L
  source 1..10: note = Severe acute respiratory syndrome coronavirus 2
ALIISVTSNY

SEQ ID NO: 11051 - protein, 12 aa, Severe acute respiratory syndrome-related coronavirus
  REGION 1..12: note = Table B: HLA-DQA1*05:01-B1*03:01L HLA-DQA1*01:02-B1*06:02L HLA-DRB1*01:02L HLA-DRB1*08:04L HLA-DPA1*01:03-B1*03:01L HLA-DRB1*14:01L HLA-DQA1*01-B1*05L HLA-DQA1*05:05-B1*03:19L HLA-DRB4*01:01L HLA-DPA1*03:01-B1*105:01L
  REGION 1..12: note = CONT. FROM ABOVE: HLA-DQA1*05:05-B1*03:01L HLA-DQA1*01:03-B1*06: 01L HLA-DRB1*15:03L
  source 1..12: note = Severe acute respiratory syndrome coronavirus 2
IISVTSNYSGVV

SEQ ID NO: 11052 - protein, 10 aa, Severe acute respiratory syndrome-related coronavirus
  REGION 1..10: note = Table B: HLA-DQA1*05:01-B1*03:01L HLA-DQA1*01:02-B1*06:02L HLA-DRB1*12:01L HLA-DPA1*03:01-B1*105:01L HLA-DQA1*03:01-B1*03:02L HLA-DQA1*05:05-B1*03:01L HLA-DQA1*01:03-B1*06:01L HLA-DQA1*02:01-B1*03:03L
  source 1..10: note = Severe acute respiratory syndrome coronavirus 2
VVTTVMFLAR

SEQ ID NO: 11053 - protein, 12 aa, Severe acute respiratory syndrome-related coronavirus
  REGION 1..12: note = Table B: HLA-DQA1*05:01-B1*03:01L HLA-DPA1*03:01-B1*04:02L HLA-DRB1*14:01L HLA-DRB1*12:01L HLA-DQA1*05:05-B1*03:01L HLA-DPA1*01:02-B1*04:01L HLA-DRB1*15:03L
  source 1..12: note = Severe acute respiratory syndrome coronavirus 2
VTTVMFLARGIV

SEQ ID NO: 11054 - protein, 11 aa, Severe acute respiratory syndrome-related coronavirus
  REGION 1..11: note = Table B: HLA-DQA1*05:01-B1*03:01L HLA-DRB1*04:03L HLA-DRB1*13:02L HLA-DRB1*13:03L HLA-DRB1*01:03L HLA-DRB1*04:02L HLA-DRB1*04:04L HLA-DRB1*04:05L HLA-DQA1*01:02-B1*06:02L HLA-DRB4*03:01NL HLA-DRB1*08:77L HLA-DRB3*02:01L
  REGION 1..11: note = CONT. FROM ABOVE: HLA-DPA1*01:03-B1*03:01L HLA-DPA1*03:01-B1*04: 02L HLA-DRB1*14:01L HLA-DRB1*11:03L HLA-DQA1*01-B1*05L HLA-DQA1* 05:05-B1*03:19L HLA-DQA1*05:01-B1*02:01L HLA-DRB1*04:10L HLA-DRB 1*09:01L HLA-DRB1*12:02L HLA-DPA1*03:01-B1*105:01L
  REGION 1..11: note = CONT. FROM ABOVE: HLA-DQA1*03:01-B1*03:02L HLA-DRB1*14:54L HLA-D QA1*05:05-B1*03:01L HLA-DRB1*14:17L HLA-DPA1*01:02-B1*04:01L HLA -DRB1*07:01L HLA-DRB1*10:01L HLA-DRB1*16:01L HLA-DQA1*01:03-B1*0 6:01L HLA-DRB1*04:08L HLA-DQA1*02:01-B1*03:03L
  source 1..11: note = Severe acute respiratory syndrome coronavirus 2
PIFFITGNTLQ

SEQ ID NO: 11055 - protein, 12 aa, Severe acute respiratory syndrome-related coronavirus
  REGION 1..12: note = Table B: HLA-DQA1*05:01-B1*03:01L HLA-DPA1*01:03-B1*03:01L HLA-DPA1*03:01-B1*04:02L HLA-DQA1*05:05-B1*03:116L HLA-DPA1*01:03-B1*04:02L HLA-DRB1*12:01L HLA-DPA1*01:03-B1*104:01L HLA-DQA1*05:05-B1*03:01L
  REGION 1..12: note = CONT. FROM ABOVE: HLA-DPA1*01:02-B1*04:01L HLA-DRB1*10:01L HLA-D RB1*04:08L
  source 1..12: note = Severe acute respiratory syndrome coronavirus 2
GVYDYLVSTQEF

SEQ ID NO: 11056 - protein, 10 aa, Severe acute respiratory syndrome-related coronavirus
  REGION 1..10: note = Table B: HLA-DQA1*05:01-B1*03:01L HLA-DQA1*01:02-B1*06:02L HLA-DPA1*03:01-B1*04:02L HLA-DQA1*05:01-B1*02:01L HLA-DRB1*12:01L HLA-DPA1*03:01-B1*105:01L HLA-DPA1*01:02-B1*04:01L HLA-DQA1*01:03-B1*06:01L
  REGION 1..10: note = CONT. FROM ABOVE: HLA-DQA1*02:01-B1*03:03L HLA-DRB1*15:03L
  source 1..10: note = Severe acute respiratory syndrome coronavirus 2
LVSTQEFRYM

SEQ ID NO: 11057 - protein, 12 aa, Severe acute respiratory syndrome-related coronavirus
  REGION 1..12: note = Table B: HLA-DQA1*05:01-B1*03:01L HLA-DRB1*04:03L HLA-DRB1*01:03L HLA-DRB1*04:02L HLA-DRB1*04:05L HLA-DQA1*01:02-B1*06:02L HLA-DRB1*01:01L HLA-DRB1*01:02M HLA-DRB1*11:03L HLA-DRB1*14:02L HLA-DQA1*01-B1*05L
  REGION 1..12: note = CONT. FROM ABOVE: HLA-DQA1*05:05-B1*03:19L HLA-DRB1*12:01L HLA-D PA1*03:01-B1*105:01L HLA-DQA1*03:01-B1*03:02L HLA-DQA1*05:05-B1* 03:01L HLA-DRB1*07:01L HLA-DRB1*10:01L HLA-DRB1*16:01L HLA-DRB1* 04:08L HLA-DQA1*02:01-B1*03:03L HLA-DRB1*15:03L
  source 1..12: note = Severe acute respiratory syndrome coronavirus 2
FRYMNSQGLLPP

SEQ ID NO: 11058 - protein, 11 aa, Severe acute respiratory syndrome-related coronavirus
  REGION 1..11: note = Table B: HLA-DQA1*05:01-B1*03:01L HLA-DRB1*13:02L HLA-DRB1*01:03L HLA-DRB1*14:01L HLA-DRB1*12:01L HLA-DPA1*03:01-B1*105:01L HLA-DQA1*05:05-B1*03:01L HLA-DPA1*01:02-B1*04:01L HLA-DRB1*16:01L
  source 1..11: note = Severe acute respiratory syndrome coronavirus 2
YMNSQGLLPPK

SEQ ID NO: 11059 - protein, 10 aa, Severe acute respiratory syndrome-related coronavirus
  REGION 1..10: note = Table B: HLA-DQA1*05:01-B1*03:01L HLA-DQA1*03:01-B1*03:02L HLA-DQA1*05:05-B1*03:01L HLA-DQA1*01:03-B1*06:01L HLA-DQA1*02:01-B1*03:03L
  source 1..10: note = Severe acute respiratory syndrome coronavirus 2
NSQGLLPPKN

SEQ ID NO: 11060 - protein, 10 aa, Severe acute respiratory syndrome-related coronavirus
  REGION 1..10: note = Table B: HLA-DQA1*05:01-B1*03:01L HLA-DRB1*13:03L HLA-DQA1*01:02-B1*06:02M HLA-DRB1*14:01L HLA-DPA1*02:01-B1*13:01L HLA-DPA1*03:01-B1*105:01L HLA-DRB1*15:03L
  source 1..10: note = Severe acute respiratory syndrome coronavirus 2
LPPKNSIDAF

SEQ ID NO: 11061 - protein, 16 aa, Severe acute respiratory syndrome-related coronavirus
  REGION 1..16: note = Table B: HLA-DQA1*05:01-B1*03:01L HLA-DRB1*01:01L HLA-DRB3*02:01L HLA-DRB1*03:01L HLA-DRB1*14:54L HLA-DPA1*01:03-B1*104:01L HLA-DQA1*05:05-B1*03:01L HLA-DQA1*01:03-B1*06:01L HLA-DRB1*08:03L
  source 1..16: note = Severe acute respiratory syndrome coronavirus 2
DAFKLNIKLLGVGGKP

SEQ ID NO: 11062 - protein, 14 aa, Severe acute respiratory syndrome-related coronavirus
  REGION 1..14: note = Table B: HLA-DQA1*05:01-B1*03:01L HLA-DRB1*07:01L HLA-DQA1*01:03-B1*06:01L
  source 1..14: note = Severe acute respiratory syndrome coronavirus 2
NIKLLGVGGKPCIK

SEQ ID NO: 11063 - protein, 10 aa, Severe acute respiratory syndrome-related coronavirus
  REGION 1..10: note = Table B: HLA-DQA1*05:01-B1*03:01L HLA-DRB1*04:03L HLA-DRB1*13:02L HLA-DRB1*13:03L HLA-DRB1*01:03L HLA-DRB1*04:02L HLA-DQA1*01:02-B1*06:02L HLA-DRB4*03:01NL HLA-DRB1*14:01L HLA-DQA1*01:01-B1*05:01L HLA-DRB1*08:01L HLA-DRB1*12:01L
  REGION 1..10: note = CONT. FROM ABOVE: HLA-DPA1*03:01-B1*105:01L HLA-DQA1*03:01-B1*03 :02L HLA-DQA1*05:05-B1*03:01L HLA-DRB1*14:17L HLA-DPA1*01:02-B1* 04:01L HLA-DRB1*16:01L HLA-DQA1*01:03-B1*06:01L HLA-DQA1*02:01-B 1*03:03L
  source 1..10: note = Severe acute respiratory syndrome coronavirus 2
TVQSKMSDVK

SEQ ID NO: 11064 - protein, 11 aa, Severe acute respiratory syndrome-related coronavirus
  REGION 1..11: note = Table B: HLA-DQA1*05:01-B1*03:01L HLA-DQA1*01:02-B1*06:02L HLA-DQA1*03:01-B1*03:02L
  source 1..11: note = Severe acute respiratory syndrome coronavirus 2
SVVLLSVLQQL

SEQ ID NO: 11065 - protein, 13 aa, Severe acute respiratory syndrome-related coronavirus
  REGION 1..13: note = Table B: HLA-DQA1*05:01-B1*03:01L HLA-DRB1*13:02L HLA-DRB3*02:01L HLA-DPA1*01:03-B1*03:01L HLA-DQA1*05:01-B1*02:01L HLA-DQA1*05:05-B1*03:01L HLA-DRB1*16:01L
  source 1..13: note = Severe acute respiratory syndrome coronavirus 2
VVLLSVLQQLRVE

SEQ ID NO: 11066 - protein, 12 aa, Severe acute respiratory syndrome-related coronavirus
  REGION 1..12: note = Table B: HLA-DQA1*05:01-B1*03:01L HLA-DRB1*04:05L HLA-DQA1*01:02-B1*06:02L HLA-DRB1*01:02L HLA-DPA1*03:01-B1*105:01L HLA-DRB1*14:54L
  source 1..12: note = Severe acute respiratory syndrome coronavirus 2
LSVLQQLRVESS

SEQ ID NO: 11067 - protein, 12 aa, Severe acute respiratory syndrome-related coronavirus
  REGION 1..12: note = Table B: HLA-DQA1*05:01-B1*03:01L HLA-DRB1*01:03L HLA-DRB1*04:05L HLA-DQA1*01:02-B1*06:02L HLA-DRB1*01:02L HLA-DPA1*03:01-B1*105:01L HLA-DQA1*01:03-B1*06:01L HLA-DRB1*04:08L HLA-DQA1*02:01-B1*03:03L
  source 1..12: note = Severe acute respiratory syndrome coronavirus 2
VLQQLRVESSSK

SEQ ID NO: 11068 - protein, 11 aa, Severe acute respiratory syndrome-related coronavirus
  REGION 1..11: note = Table B: HLA-DQA1*05:01-B1*03:01L HLA-DRB1*04:03L HLA-DRB1*01:02L HLA-DRB1*14:01L HLA-DRB1*12:01L HLA-DRB1*16:01L HLA-DQA1*02:01-B1*03:03L HLA-DRB1*15:03L
  source 1..11: note = Severe acute respiratory syndrome coronavirus 2
QQLRVESSSKL

SEQ ID NO: 11069 - protein, 15 aa, Severe acute respiratory syndrome-related coronavirus
  REGION 1..15: note = Table B: HLA-DQA1*05:01-B1*03:01L HLA-DQA1*05:05-B1*03:19L
  source 1..15: note = Severe acute respiratory syndrome coronavirus 2
SSSKLWAQCVQLHND

SEQ ID NO: 11070 - protein, 13 aa, Severe acute respiratory syndrome-related coronavirus
  REGION 1..13: note = Table B: HLA-DQA1*05:01-B1*03:01L HLA-DQA1*01:01-B1*05:01L HLA-DPA1*03:01-B1*105:01L HLA-DQA1*05:05-B1*03:01L HLA-DRB1*15:03L
  source 1..13: note = Severe acute respiratory syndrome coronavirus 2
LHNDILLAKDTTE

SEQ ID NO: 11071 - protein, 12 aa, Severe acute respiratory syndrome-related coronavirus
  REGION 1..12: note = Table B: HLA-DQA1*05:01-B1*03:01L HLA-DRB1*04:04L HLA-DQA1*01:02-B1*06:02L HLA-DRB1*01:02L HLA-DRB1*08:04L HLA-DRB1*14:01L HLA-DRB1*11:04L HLA-DQA1*01:01-B1*05:01L HLA-DRB1*08:01L HLA-DRB1*12:02L HLA-DPA1*02:01-B1*13:01L
  REGION 1..12: note = CONT. FROM ABOVE: HLA-DPA1*03:01-B1*105:01L HLA-DQA1*05:05-B1*03 :01L HLA-DRB1*08:03L HLA-DRB1*15:03L
  source 1..12: note = Severe acute respiratory syndrome coronavirus 2
NDILLAKDTTEA

SEQ ID NO: 11072 - protein, 11 aa, Severe acute respiratory syndrome-related coronavirus
  REGION 1..11: note = Table B: HLA-DQA1*05:01-B1*03:01L HLA-DRB1*08:77L HLA-DPA1*03:01-B1*04:02L HLA-DRB1*14:01L HLA-DQA1*05:05-B1*03:19L HLA-DQA1*05:01-B1*02:01L HLA-DRB1*12:01L
  source 1..11: note = Severe acute respiratory syndrome coronavirus 2
ILLAKDTTEAF

SEQ ID NO: 11073 - protein, 14 aa, Severe acute respiratory syndrome-related coronavirus
  REGION 1..14: note = Table B: HLA-DQA1*05:01-B1*03:01L HLA-DPA1*01:03-B1*04:02L HLA-DQA1*05:05-B1*03:01L
  source 1..14: note = Severe acute respiratory syndrome coronavirus 2
LAKDTTEAFEKMVS

SEQ ID NO: 11074 - protein, 11 aa, Severe acute respiratory syndrome-related coronavirus
  REGION 1..11: note = Table B: HLA-DQA1*05:01-B1*03:01L HLA-DRB1*01:02L
  source 1..11: note = Severe acute respiratory syndrome coronavirus 2
LSMQGAVDINK

SEQ ID NO: 11075 - protein, 13 aa, Severe acute respiratory syndrome-related coronavirus
  REGION 1..13: note = Table B: HLA-DQA1*05:01-B1*03:01L HLA-DRB1*01:02L HLA-DQA1*05:01-B1*02:01L HLA-DPA1*03:01-B1*105:01L HLA-DQA1*03:01-B1*03:02L HLA-DQA1*05:05-B1*03:01L HLA-DRB1*16:01L HLA-DQA1*02:01-B1*03:03L
  source 1..13: note = Severe acute respiratory syndrome coronavirus 2
VDINKLCEEMLDN

SEQ ID NO: 11076 - protein, 13 aa, Severe acute respiratory syndrome-related coronavirus
  REGION 1..13: note = Table B: HLA-DQA1*05:01-B1*03:01L
  source 1..13: note = Severe acute respiratory syndrome coronavirus 2
EMLDNRATLQAIA

SEQ ID NO: 11077 - protein, 11 aa, Severe acute respiratory syndrome-related coronavirus
  REGION 1..11: note = Table B: HLA-DQA1*05:01-B1*03:01L HLA-DRB1*04:03L HLA-DRB1*13:03L HLA-DRB1*04:02L HLA-DRB1*04:05L HLA-DRB4*03:01NL HLA-DRB1*14:01L HLA-DQA1*01-B1*05L HLA-DQA1*05:01-B1*02:01L HLA-DRB1*12:01L HLA-DPA1*03:01-B1*105:01L
  REGION 1..11: note = CONT. FROM ABOVE: HLA-DPA1*01:03-B1*104:01L HLA-DRB1*14:17L HLA- DRB1*10:01L HLA-DRB1*16:01L HLA-DQA1*02:01-B1*03:03L HLA-DRB1*15 :03L
  source 1..11: note = Severe acute respiratory syndrome coronavirus 2
SEFSSLPSYAA

SEQ ID NO: 11078 - protein, 14 aa, Severe acute respiratory syndrome-related coronavirus
  REGION 1..14: note = Table B: HLA-DQA1*05:01-B1*03:01L HLA-DQA1*01:02-B1*06:02L HLA-DQA1*05:05-B1*03:19L HLA-DRB1*12:01L HLA-DPA1*03:01-B1*105:01L HLA-DQA1*05:05-B1*03:01L
  source 1..14: note = Severe acute respiratory syndrome coronavirus 2
ATAQEAYEQAVANG

SEQ ID NO: 11079 - protein, 14 aa, Severe acute respiratory syndrome-related coronavirus
  REGION 1..14: note = Table B: HLA-DQA1*05:01-B1*03:01L HLA-DRB1*13:03L HLA-DQA1*01:02-B1*06:02L HLA-DRB1*01:02L HLA-DPA1*01:03-B1*03:01L HLA-DQA1*01:01-B1*05:01L HLA-DQA1*05:05-B1*03:19L HLA-DRB1*12:01L
  REGION 1..14: note = CONT. FROM ABOVE: HLA-DPA1*02:01-B1*13:01L HLA-DPA1*03:01-B1*105 :01L HLA-DQA1*05:05-B1*03:01L HLA-DQA1*01:03-B1*06:01L HLA-DRB1* 15:03L
  source 1..14: note = Severe acute respiratory syndrome coronavirus 2
TAQEAYEQAVANGD

SEQ ID NO: 11080 - protein, 12 aa, Severe acute respiratory syndrome-related coronavirus
  REGION 1..12: note = Table B: HLA-DQA1*05:01-B1*03:01L HLA-DRB1*13:02L HLA-DRB1*04:04L HLA-DQA1*01:02-B1*06:02L HLA-DRB1*08:04L HLA-DRB1*08:77L HLA-DRB1*14:01L HLA-DRB1*11:03L HLA-DRB1*11:04L HLA-DRB1*14:02L HLA-DQA1*01:01-B1*05:01L HLA-DRB1*08:01L
  REGION 1..12: note = CONT. FROM ABOVE: HLA-DRB5*01:01L HLA-DQA1*05:05-B1*03:19L HLA-D RB1*09:01L HLA-DRB1*12:02L HLA-DPA1*02:01-B1*13:01L HLA-DPA1*03: 01-B1*105:01L HLA-DQA1*05:05-B1*03:01L HLA-DQA1*01:03-B1*06:01L HLA-DRB1*08:03L
  source 1..12: note = Severe acute respiratory syndrome coronavirus 2
EAYEQAVANGDS

SEQ ID NO: 11081 - protein, 11 aa, Severe acute respiratory syndrome-related coronavirus
  REGION 1..11: note = Table B: HLA-DQA1*05:01-B1*03:01L HLA-DRB1*13:03L HLA-DQA1*05:05-B1*03:19L HLA-DQA1*05:01-B1*02:01L HLA-DPA1*01:02-B1*04:01L HLA-DQA1*01:03-B1*06:01L HLA-DQA1*02:01-B1*03:03L HLA-DRB1*15:03L
  source 1..11: note = Severe acute respiratory syndrome coronavirus 2
AVANGDSEVVL

SEQ ID NO: 11082 - protein, 11 aa, Severe acute respiratory syndrome-related coronavirus
  REGION 1..11: note = Table B: HLA-DQA1*05:01-B1*03:01L HLA-DRB1*04:01L HLA-DRB1*04:03L HLA-DRB1*13:02L HLA-DRB1*01:03L HLA-DRB1*04:02L HLA-DRB1*04:05L HLA-DQA1*01:02-B1*06:02L HLA-DRB1*01:01L HLA-DRB1*08:77L HLA-DRB3*02:01L HLA-DPA1*01:03-B1*03:01L
  REGION 1..11: note = CONT. FROM ABOVE: HLA-DRB1*14:01L HLA-DRB1*11:04L HLA-DRB1*14:02 L HLA-DQA1*01:01-B1*05:01L HLA-DRB1*08:01L HLA-DRB5*01:01L HLA-D QA1*01-B1*05L HLA-DQA1*05:05-B1*03:19L HLA-DQA1*05:01-B1*02:01L HLA-DPA1*01:03-B1*04:02L HLA-DRB1*12:02L
  REGION 1..11: note = CONT. FROM ABOVE: HLA-DPA1*03:01-B1*105:01L HLA-DRB1*14:54L HLA- DRB1*14:17L HLA-DPA1*01:02-B1*04:01L HLA-DRB1*16:01L
  source 1..11: note = Severe acute respiratory syndrome coronavirus 2
VANGDSEVVLK

SEQ ID NO: 11083 - protein, 14 aa, Severe acute respiratory syndrome-related coronavirus
  REGION 1..14: note = Table B: HLA-DQA1*05:01-B1*03:01L HLA-DRB1*13:02L HLA-DRB1*13:03L HLA-DRB1*04:02L HLA-DRB1*04:05L HLA-DRB1*11:03L HLA-DRB1*11:04L HLA-DRB1*11:01L HLA-DPA1*02:01-B1*13:01L HLA-DPA1*03:01-B1*105:01L HLA-DPA1*01:02-B1*04:01L
  REGION 1..14: note = CONT. FROM ABOVE: HLA-DQA1*01:03-B1*06:01L HLA-DRB1*08:03L HLA-D QA1*02:01-B1*03:03L
  source 1..14: note = Severe acute respiratory syndrome coronavirus 2
DSEVVLKKLKKSLN

SEQ ID NO: 11084 - protein, 10 aa, Severe acute respiratory syndrome-related coronavirus
  REGION 1..10: note = Table B: HLA-DQA1*05:01-B1*03:01L HLA-DRB1*01:03L HLA-DQA1*01:02-B1*06:02L HLA-DRB1*14:02L HLA-DQA1*05:01-B1*02:01L HLA-DPA1*01:03-B1*04:01L HLA-DPA1*02:01-B1*13:01L HLA-DQA1*01:03-B1*06:01L
  REGION 1..10: note = CONT. FROM ABOVE: HLA-DQA1*02:01-B1*03:03L
  source 1..10: note = Severe acute respiratory syndrome coronavirus 2
KSLNVAKSEF

SEQ ID NO: 11085 - protein, 12 aa, Severe acute respiratory syndrome-related coronavirus
  REGION 1..12: note = Table B: HLA-DQA1*05:01-B1*03:01L HLA-DRB1*04:01L HLA-DRB1*04:04L HLA-DQA1*01:02-B1*06:02L HLA-DRB1*08:04L HLA-DRB1*08:77L HLA-DPA1*03:01-B1*04:02L HLA-DRB1*11:03L HLA-DRB1*14:02L HLA-DRB1*11:01L HLA-DRB1*13:01L
  REGION 1..12: note = CONT. FROM ABOVE: HLA-DPA1*02:01-B1*13:01L HLA-DPA1*03:01-B1*105 :01L HLA-DRB1*14:54L HLA-DRB1*07:01L HLA-DRB1*10:01L HLA-DQA1*01 :03-B1*06:01L HLA-DRB1*08:03L
  source 1..12: note = Severe acute respiratory syndrome coronavirus 2
SEFDRDAAMQRK

SEQ ID NO: 11086 - protein, 13 aa, Severe acute respiratory syndrome-related coronavirus
  REGION 1..13: note = Table B: HLA-DQA1*05:01-B1*03:01L HLA-DRB1*04:05L
  source 1..13: note = Severe acute respiratory syndrome coronavirus 2
FDRDAAMQRKLEK

SEQ ID NO: 11087 - protein, 13 aa, Severe acute respiratory syndrome-related coronavirus
  REGION 1..13: note = Table B: HLA-DQA1*05:01-B1*03:01L HLA-DRB1*04:01L HLA-DRB1*01:01L HLA-DRB1*11:04L HLA-DRB1*08:01L HLA-DRB1*11:01L HLA-DRB3*01:01L HLA-DPA1*03:01-B1*105:01L HLA-DPA1*01:02-B1*04:01L HLA-DRB1*10:01L
  REGION 1..13: note = CONT. FROM ABOVE: HLA-DQA1*01:03-B1*06:01L
  source 1..13: note = Severe acute respiratory syndrome coronavirus 2
RKLEKMADQAMTQ

SEQ ID NO: 11088 - protein, 10 aa, Severe acute respiratory syndrome-related coronavirus
  REGION 1..10: note = Table B: HLA-DQA1*05:01-B1*03:01L HLA-DRB1*04:03L HLA-DRB1*13:02L HLA-DRB1*13:03M HLA-DRB1*01:03M HLA-DRB1*04:02L HLA-DRB1*04:05L HLA-DQA1*01:02-B1*06:02M HLA-DRB4*03:01NL HLA-DRB1*08:77H HLA-DPA1*01:03-B1*03:01H
  REGION 1..10: note = CONT. FROM ABOVE: HLA-DPA1*03:01-B1*04:02L HLA-DRB1*03:01M HLA-D RB1*14:01L HLA-DRB1*11:02H HLA-DRB1*11:03M HLA-DRB1*11:04L HLA-D RB1*14:02L HLA-DRB1*11:01L HLA-DRB5*01:01L HLA-DQA1*01-B1*05H HL A-DQA1*05:05-B1*03:19H HLA-DQA1*05:01-B1*02:01H HLA-DRB4*01:01M
  REGION 1..10: note = CONT. FROM ABOVE: HLA-DPA1*01:03-B1*04:01M HLA-DQA1*05:05-B1*03: 116M HLA-DPA1*01:03-B1*04:02M HLA-DRB1*12:01M HLA-DPA1*03:01-B1* 105:01L HLA-DRB1*14:54L HLA-DPA1*01:03-B1*104:01H HLA-DPA1*01:02 -B1*04:01L HLA-DRB1*10:01M HLA-DRB1*16:01H HLA-DRB1*08:02L
  REGION 1..10: note = CONT. FROM ABOVE: HLA-DQA1*02:01-B1*03:03L HLA-DRB1*15:01L HLA-D RB1*15:03L
  source 1..10: note = Severe acute respiratory syndrome coronavirus 2
MADQAMTQMY

SEQ ID NO: 11089 - protein, 12 aa, Severe acute respiratory syndrome-related coronavirus
  REGION 1..12: note = Table B: HLA-DQA1*05:01-B1*03:01L HLA-DRB1*04:02L HLA-DQA1*01:02-B1*06:02L HLA-DRB1*08:01L HLA-DQA1*02:01-B1*03:03L
  source 1..12: note = Severe acute respiratory syndrome coronavirus 2
DQAMTQMYKQAR

SEQ ID NO: 11090 - protein, 12 aa, Severe acute respiratory syndrome-related coronavirus
  REGION 1..12: note = Table B: HLA-DQA1*05:01-B1*03:01L HLA-DRB1*04:03L HLA-DRB1*13:02L HLA-DRB1*13:03L HLA-DRB1*01:03L HLA-DRB1*04:02L HLA-DRB1*04:04L HLA-DRB1*04:05L HLA-DQA1*01:02-B1*06:02L HLA-DRB1*01:02L HLA-DRB4*03:01NL HLA-DRB1*08:04L HLA-DRB1*14:01L
  REGION 1..12: note = CONT. FROM ABOVE: HLA-DRB1*11:04L HLA-DQA1*01:01-B1*05:01L HLA-D RB1*08:01M HLA-DRB1*11:01L HLA-DRB1*04:10L HLA-DRB1*12:01L HLA-D RB3*01:01L HLA-DPA1*02:01-B1*13:01L HLA-DQA1*03:01-B1*03:02L HLA -DRB1*14:17L HLA-DPA1*01:02-B1*04:01L HLA-DRB1*16:01L
  REGION 1..12: note = CONT. FROM ABOVE: HLA-DRB1*04:08L HLA-DRB1*08:03L HLA-DQA1*02:01 -B1*03:03L HLA-DRB1*15:03L
  source 1..12: note = Severe acute respiratory syndrome coronavirus 2
TQMYKQARSEDK

SEQ ID NO: 11091 - protein, 12 aa, Severe acute respiratory syndrome-related coronavirus
  REGION 1..12: note = Table B: HLA-DQA1*05:01-B1*03:01L HLA-DQA1*01:02-B1*06:02L HLA-DQA1*05:05-B1*03:01L HLA-DQA1*01:03-B1*06:01L
  source 1..12: note = Severe acute respiratory syndrome coronavirus 2
EDKRAKVTSAMQ

SEQ ID NO: 11092 - protein, 12 aa, Severe acute respiratory syndrome-related coronavirus
  REGION 1..12: note = Table B: HLA-DQA1*05:01-B1*03:01L HLA-DRB1*04:03L HLA-DRB1*04:02L HLA-DQA1*01:02-B1*06:02L HLA-DQA1*01:01-B1*05:01L HLA-DQA1*05:05-B1*03:01L HLA-DRB1*16:01L HLA-DQA1*01:03-B1*06:01L
  source 1..12: note = Severe acute respiratory syndrome coronavirus 2
LDNDALNNIINN

SEQ ID NO: 11093 - protein, 13 aa, Severe acute respiratory syndrome-related coronavirus
  REGION 1..13: note = Table B: HLA-DQA1*05:01-B1*03:01L HLA-DRB1*14:04L HLA-DRB1*01:03L HLA-DRB1*04:04L HLA-DRB1*04:05L HLA-DRB1*01:02L HLA-DRB1*08:04L HLA-DRB1*08:77L HLA-DPA1*01:03-B1*03:01L HLA-DPA1*03:01-B1*04:02L HLA-DRB1*11:03L
  REGION 1..13: note = CONT. FROM ABOVE: HLA-DQA1*01:01-B1*05:01L HLA-DRB5*01:01L HLA-D QA1*05:05-B1*03:19L HLA-DQA1*05:01-B1*02:01L HLA-DRB1*04:10M HLA -DRB1*09:01L HLA-DRB1*12:02L HLA-DPA1*02:01-B1*13:01L HLA-DRB1*1 4:54L HLA-DPA1*01:03-B1*104:01L HLA-DRB1*10:01L
  REGION 1..13: note = CONT. FROM ABOVE: HLA-DQA1*01:03-B1*06:01L HLA-DRB1*04:08L HLA-D RB1*08:03L HLA-DRB1*15:03L
  source 1..13: note = Severe acute respiratory syndrome coronavirus 2
VPLNIIPLTTAAK

SEQ ID NO: 11094 - protein, 11 aa, Severe acute respiratory syndrome-related coronavirus
  REGION 1..11: note = Table B: HLA-DQA1*05:01-B1*03:01L HLA-DRB1*13:02L HLA-DQA1*01:02-B1*06:02L HLA-DRB1*01:02L HLA-DRB1*08:04L HLA-DRB1*14:01L HLA-DRB1*11:03L HLA-DQA1*01:01-B1*05:01L HLA-DRB5*01:01L HLA-DRB1*12:02L HLA-DPA1*03:01-B1*105:01L
  REGION 1..11: note = CONT. FROM ABOVE: HLA-DQA1*05:05-B1*03:01L HLA-DQA1*01:03-B1*06: 01L HLA-DRB1*15:03L
  source 1..11: note = Severe acute respiratory syndrome coronavirus 2
EIQQVVDADSK

SEQ ID NO: 11095 - protein, 13 aa, Severe acute respiratory syndrome-related coronavirus
  REGION 1..13: note = Table B: HLA-DQA1*05:01-B1*03:01L HLA-DQA1*05:05-B1*03:01L
  source 1..13: note = Severe acute respiratory syndrome coronavirus 2
DADSKIVQLSEIS

SEQ ID NO: 11096 - protein, 13 aa, Severe acute respiratory syndrome-related coronavirus
  REGION 1..13: note = Table B: HLA-DQA1*05:01-B1*03:01L HLA-DRB1*13:02L HLA-DRB1*13:03L HLA-DRB1*01:03L HLA-DRB1*04:02L HLA-DRB1*04:04L HLA-DRB1*04:05L HLA-DQA1*01:02-B1*06:02L HLA-DRB4*03:01NL HLA-DQA1*01:01-B1*05:01L HLA-DQA1*05:05-B1*03:19L
  REGION 1..13: note = CONT. FROM ABOVE: HLA-DRB1*04:10L HLA-DRB1*12:01L HLA-DRB1*12:02 L HLA-DRB1*14:54L HLA-DQA1*05:05-B1*03:01L HLA-DRB1*16:01L HLA-D QA1*01:03-B1*06:01L HLA-DRB1*04:08L
  source 1..13: note = Severe acute respiratory syndrome coronavirus 2
VQLSEISMDNSPN

SEQ ID NO: 11097 - protein, 11 aa, Severe acute respiratory syndrome-related coronavirus
  REGION 1..11: note = Table B: HLA-DQA1*05:01-B1*03:01L HLA-DRB1*04:01L HLA-DRB1*04:03L HLA-DRB1*13:02L HLA-DRB1*13:03L HLA-DRB1*01:03L HLA-DRB1*04:02L HLA-DRB4*03:01NL HLA-DRB1*08:77L HLA-DRB3*02:01L HLA-DPA1*03:01-B1*04:02L HLA-DRB1*14:01L HLA-DRB1*11:02L
  REGION 1..11: note = CONT. FROM ABOVE: HLA-DRB1*11:03L HLA-DRB1*11:04L HLA-DRB1*14:02 L HLA-DRB1*11:01L HLA-DRB5*01:01L HLA-DQA1*01-B1*05L HLA-DQA1*05 :05-B1*03:19L HLA-DQA1*05:01-B1*02:01L HLA-DRB4*01:01L HLA-DPA1* 01:03-B1*04:01L HLA-DQA1*05:05-B1*03:116L HLA-DRB1*09:01L
  REGION 1..11: note = CONT. FROM ABOVE: HLA-DPA1*01:03-B1*04:02L HLA-DRB1*12:01L HLA-D PA1*03:01-B1*105:01L HLA-DRB1*14:54L HLA-DPA1*01:03-B1*104:01L H LA-DRB1*14:17L HLA-DPA1*01:02-B1*04:01L HLA-DRB1*07:01L HLA-DRB1 *10:01L HLA-DRB1*16:01L HLA-DRB1*08:03L HLA-DQA1*02:01-B1*03:03L
  REGION 1..11: note = CONT. FROM ABOVE: HLA-DRB1*15:03L
  source 1..11: note = Severe acute respiratory syndrome coronavirus 2
SEISMDNSPNL

SEQ ID NO: 11098 - protein, 14 aa, Severe acute respiratory syndrome-related coronavirus
  REGION 1..14: note = Table B: HLA-DQA1*05:01-B1*03:01L HLA-DRB1*13:02L HLA-DQA1*01:02-B1*06:02L HLA-DRB1*01:02L HLA-DPA1*01:03-B1*03:01L HLA-DRB1*03:01L HLA-DRB1*14:02L HLA-DRB1*12:01L HLA-DQA1*05:05-B1*03:01L
  REGION 1..14: note = CONT. FROM ABOVE: HLA-DQA1*01:03-B1*06:01L HLA-DQA1*02:01-B1*03: 03L
  source 1..14: note = Severe acute respiratory syndrome coronavirus 2
EISMDNSPNLAWPL

SEQ ID NO: 11099 - protein, 12 aa, Severe acute respiratory syndrome-related coronavirus
  REGION 1..12: note = Table B: HLA-DQA1*05:01-B1*03:01L HLA-DQA1*01:02-B1*06:02L HLA-DQA1*01:03-B1*06:01L
  source 1..12: note = Severe acute respiratory syndrome coronavirus 2
NSPNLAWPLIVT

SEQ ID NO: 11100 - protein, 14 aa, Severe acute respiratory syndrome-related coronavirus
  REGION 1..14: note = Table B: HLA-DQA1*05:01-B1*03:01L HLA-DRB1*04:03L HLA-DRB1*01:03L HLA-DRB1*04:05L HLA-DRB1*01:02L HLA-DPA1*01:03-B1*03:01L HLA-DRB1*08:01L HLA-DPA1*01:03-B1*04:02L HLA-DRB1*12:01L
  REGION 1..14: note = CONT. FROM ABOVE: HLA-DPA1*02:01-B1*13:01L HLA-DPA1*01:03-B1*104 :01L HLA-DRB1*16:01L HLA-DQA1*01:03-B1*06:01L HLA-DRB1*04:08L
  source 1..14: note = Severe acute respiratory syndrome coronavirus 2
SPNLAWPLIVTALR

SEQ ID NO: 11101 - protein, 13 aa, Severe acute respiratory syndrome-related coronavirus
  REGION 1..13: note = Table B: HLA-DQA1*05:01-B1*03:01L HLA-DRB1*01:03L HLA-DRB1*04:04L HLA-DRB1*01:02L HLA-DPA1*03:01-B1*04:02L HLA-DRB1*11:04L HLA-DRB1*08:01L HLA-DRB1*04:10L HLA-DPA1*03:01-B1*105:01L HLA-DQA1*05:05-B1*03:01L
  REGION 1..13: note = CONT. FROM ABOVE: HLA-DPA1*01:02-B1*04:01L HLA-DQA1*01:03-B1*06: 01L HLA-DRB1*04:08L HLA-DRB1*15:03L
  source 1..13: note = Severe acute respiratory syndrome coronavirus 2
WPLIVTALRANSA

SEQ ID NO: 11102 - protein, 11 aa, Severe acute respiratory syndrome-related coronavirus
  REGION 1..11: note = Table B: HLA-DQA1*05:01-B1*03:01L HLA-DRB1*13:03L HLA-DRB1*04:04L HLA-DRB1*04:05L HLA-DQA1*01:02-B1*06:02L HLA-DRB1*01:01L HLA-DRB4*03:01NL HLA-DRB1*12:01L HLA-DRB1*14:54L HLA-DQA1*05:05-B1*03:01L HLA-DRB1*10:01L HLA-DRB1*16:01L
  REGION 1..11: note = CONT. FROM ABOVE: HLA-DQA1*01:03-B1*06:01L HLA-DRB1*04:08L HLA-D RB1*15:03L
  source 1..11: note = Severe acute respiratory syndrome coronavirus 2
VTALRANSAVK

SEQ ID NO: 11103 - protein, 12 aa, Severe acute respiratory syndrome-related coronavirus
  REGION 1..12: note = Table B: HLA-DQA1*05:01-B1*03:01L HLA-DRB4*03:01NL HLA-DRB1*11:03L HLA-DRB1*14:02L
  source 1..12: note = Severe acute respiratory syndrome coronavirus 2
TALRANSAVKLQ

SEQ ID NO: 11104 - protein, 11 aa, Severe acute respiratory syndrome-related coronavirus
  REGION 1..11: note = Table B: HLA-DQA1*05:01-B1*03:01L HLA-DRB1*04:03L HLA-DRB1*13:03L HLA-DRB1*01:03L HLA-DRB1*04:02L HLA-DRB1*01:02L HLA-DRB4*03:01NL HLA-DRB1*08:04L HLA-DRB1*08:77L HLA-DRB1*11:03L HLA-DRB1*11:04L HLA-DRB1*14:02L HLA-DRB1*12:02L HLA-DRB1*14:54L
  REGION 1..11: note = CONT. FROM ABOVE: HLA-DRB1*14:17L HLA-DRB1*04:08L HLA-DQA1*02:01 -B1*03:03L
  source 1..11: note = Severe acute respiratory syndrome coronavirus 2
LRANSAVKLQN

SEQ ID NO: 11105 - protein, 12 aa, Severe acute respiratory syndrome-related coronavirus
  REGION 1..12: note = Table B: HLA-DQA1*05:01-B1*03:01L HLA-DQA1*01:02-B1*06:02L HLA-DPA1*03:01-B1*105:01L HLA-DQA1*01:03-B1*06:01L
  source 1..12: note = Severe acute respiratory syndrome coronavirus 2
LQNNELSPVALR

SEQ ID NO: 11106 - protein, 14 aa, Severe acute respiratory syndrome-related coronavirus
  REGION 1..14: note = Table B: HLA-DQA1*05:01-B1*03:01L HLA-DRB1*01:02L HLA-DQA1*05:05-B1*03:19L HLA-DPA1*03:01-B1*105:01L HLA-DRB1*04:08L
  source 1..14: note = Severe acute respiratory syndrome coronavirus 2
LRQMSCAAGTTQTA

SEQ ID NO: 11107 - protein, 13 aa, Severe acute respiratory syndrome-related coronavirus
  REGION 1..13: note = Table B: HLA-DQA1*05:01-B1*03:01L HLA-DQA1*01:02-B1*06:02L HLA-DQA1*01:01-B1*05:01L HLA-DQA1*05:01-B1*02:01L
  source 1..13: note = Severe acute respiratory syndrome coronavirus 2
AAGTTQTACTDDN

SEQ ID NO: 11108 - protein, 13 aa, Severe acute respiratory syndrome-related coronavirus
  REGION 1..13: note = Table B: HLA-DQA1*05:01-B1*03:01L HLA-DQA1*05:05-B1*03:01L
  source 1..13: note = Severe acute respiratory syndrome coronavirus 2
TDDNALAYYNTTK

SEQ ID NO: 11109 - protein, 10 aa, Severe acute respiratory syndrome-related coronavirus
  REGION 1..10: note = Table B: HLA-DQA1*05:01-B1*03:01L HLA-DQA1*03:01-B1*03:02L HLA-DRB1*16:01L HLA-DQA1*02:01-B1*03:03L
  source 1..10: note = Severe acute respiratory syndrome coronavirus 2
NTTKGGRFVL

SEQ ID NO: 11110 - protein, 13 aa, Severe acute respiratory syndrome-related coronavirus
  REGION 1..13: note = Table B: HLA-DQA1*05:01-B1*03:01L HLA-DRB1*13:02L HLA-DRB1*04:05L HLA-DRB1*14:01L HLA-DRB1*11:04L HLA-DRB1*08:01L HLA-DRB1*11:01L HLA-DPA1*01:03-B1*04:01L HLA-DPA1*01:03-B1*04:02L HLA-DPA1*02:01-B1*13:01L
  REGION 1..13: note = CONT. FROM ABOVE: HLA-DQA1*03:01-B1*03:02L HLA-DPA1*01:03-B1*02: 01L HLA-DQA1*02:01-B1*03:03L HLA-DRB1*15:03L
  source 1..13: note = Severe acute respiratory syndrome coronavirus 2
LQDLKWARFPKSD

SEQ ID NO: 11111 - protein, 12 aa, Severe acute respiratory syndrome-related coronavirus
  REGION 1..12: note = Table B: HLA-DQA1*05:01-B1*03:01L HLA-DRB1*04:05L HLA-DRB1*01:02L HLA-DPA1*03:01-B1*04:02L HLA-DPA1*01:03-B1*04:02L HLA-DRB1*12:01L HLA-DPA1*03:01-B1*105:01L HLA-DQA1*03:01-B1*03:02L
  REGION 1..12: note = CONT. FROM ABOVE: HLA-DRB1*16:01L HLA-DQA1*02:01-B1*03:03L
  source 1..12: note = Severe acute respiratory syndrome coronavirus 2
DLKWARFPKSDG

SEQ ID NO: 11112 - protein, 10 aa, Severe acute respiratory syndrome-related coronavirus
  REGION 1..10: note = Table B: HLA-DQA1*05:01-B1*03:01L HLA-DRB1*13:03L HLA-DRB1*04:05L HLA-DRB4*03:01NL HLA-DRB1*14:01L HLA-DQA1*01-B1*05L
  source 1..10: note = Severe acute respiratory syndrome coronavirus 2
FPKSDGTGTI

SEQ ID NO: 11113 - protein, 13 aa, Severe acute respiratory syndrome-related coronavirus
  REGION 1..13: note = Table B: HLA-DQA1*05:01-B1*03:01L HLA-DQA1*01:01-B1*05:01L HLA-DQA1*01-B1*05L HLA-DQA1*05:05-B1*03:19L HLA-DPA1*03:01-B1*105:01L HLA-DQA1*05:05-B1*03:01L
  source 1..13: note = Severe acute respiratory syndrome coronavirus 2
DGTGTIYTELEPP

SEQ ID NO: 11114 - protein, 10 aa, Severe acute respiratory syndrome-related coronavirus
  REGION 1..10: note = Table B: HLA-DQA1*05:01-B1*03:01L HLA-DQA1*01:02-B1*06:02L HLA-DRB1*01:02L HLA-DQA1*01-B1*05L HLA-DQA1*05:01-B1*02:01L HLA-DPA1*03:01-B1*105:01L HLA-DQA1*03:01-B1*03:02L HLA-DQA1*05:05-B1*03:01L HLA-DPA1*01:02-B1*04:01L
  REGION 1..10: note = CONT. FROM ABOVE: HLA-DRB1*16:01L HLA-DQA1*01:03-B1*06:01L HLA-D QA1*02:01-B1*03:03L HLA-DRB1*15:03L
  source 1..10: note = Severe acute respiratory syndrome coronavirus 2
IYTELEPPCR

SEQ ID NO: 11115 - protein, 10 aa, Severe acute respiratory syndrome-related coronavirus
  REGION 1..10: note = Table B: HLA-DQA1*05:01-B1*03:01L HLA-DRB1*13:03M HLA-DRB1*01:03L HLA-DQA1*01:02-B1*06:02M HLA-DRB4*03:01NL HLA-DRB1*08:77L HLA-DPA1*01:03-B1*03:01L HLA-DPA1*03:01-B1*04:02L HLA-DRB1*03:01L HLA-DRB1*14:01L
  REGION 1..10: note = CONT. FROM ABOVE: HLA-DRB1*14:02L HLA-DRB1*11:01L HLA-DRB5*01:01 L HLA-DQA1*01-B1*05L HLA-DQA1*05:05-B1*03:19L HLA-DQA1*05:01-B1* 02:01M HLA-DPA1*01:03-B1*04:01L HLA-DPA1*01:03-B1*04:02L HLA-DPA 1*02:01-B1*13:01L HLA-DPA1*03:01-B1*105:01M
  REGION 1..10: note = CONT. FROM ABOVE: HLA-DPA1*01:02-B1*04:01L HLA-DRB1*10:01L HLA-D RB1*16:01L HLA-DQA1*01:03-B1*06:01L HLA-DRB1*08:02L HLA-DQA1*02: 01-B1*03:03L HLA-DRB1*15:03L
  source 1..10: note = Severe acute respiratory syndrome coronavirus 2
DTPKGPKVKY

SEQ ID NO: 11116 - protein, 10 aa, Severe acute respiratory syndrome-related coronavirus
  REGION 1..10: note = Table B: HLA-DQA1*05:01-B1*03:01L HLA-DQA1*05:01-B1*02:01L
  source 1..10: note = Severe acute respiratory syndrome coronavirus 2
TPKGPKVKYL

SEQ ID NO: 11117 - protein, 15 aa, Severe acute respiratory syndrome-related coronavirus
  REGION 1..15: note = Table B: HLA-DQA1*05:01-B1*03:01L HLA-DRB1*04:03L HLA-DRB1*13:02L HLA-DRB1*04:02L HLA-DRB1*04:04L HLA-DPA1*01:03-B1*03:01L HLA-DRB1*11:02L HLA-DRB1*11:03L HLA-DRB1*14:02L HLA-DQA1*05:05-B1*03:19L
  REGION 1..15: note = CONT. FROM ABOVE: HLA-DPA1*01:03-B1*04:01L HLA-DQA1*05:05-B1*03: 116L HLA-DRB3*01:01L HLA-DQA1*03:01-B1*03:02L HLA-DPA1*01:03-B1* 104:01L HLA-DQA1*05:05-B1*03:01L HLA-DRB1*07:01L HLA-DQA1*01:03- B1*06:01L HLA-DRB1*08:02L
  source 1..15: note = Severe acute respiratory syndrome coronavirus 2
GPKVKYLYFIKGLNN

SEQ ID NO: 11118 - protein, 12 aa, Severe acute respiratory syndrome-related coronavirus
  REGION 1..12: note = Table B: HLA-DQA1*05:01-B1*03:01L HLA-DRB1*01:03L HLA-DRB1*04:05L HLA-DRB1*01:02L HLA-DRB1*08:04L HLA-DPA1*01:03-B1*03:01L HLA-DQA1*05:05-B1*03:19L HLA-DPA1*01:03-B1*04:02L HLA-DRB1*12:01L
  REGION 1..12: note = CONT. FROM ABOVE: HLA-DQA1*05:05-B1*03:01L HLA-DRB1*04:08L
  source 1..12: note = Severe acute respiratory syndrome coronavirus 2
YLYFIKGLNNLN

SEQ ID NO: 11119 - protein, 11 aa, Severe acute respiratory syndrome-related coronavirus
  REGION 1..11: note = Table B: HLA-DQA1*05:01-B1*03:01L HLA-DRB1*13:02L HLA-DRB1*04:04L HLA-DRB1*04:05L HLA-DQA1*01:02-B1*06:02L HLA-DRB1*01:02L HLA-DRB1*14:01L HLA-DRB1*11:04L HLA-DQA1*01-B1*05L HLA-DRB1*04:10L HLA-DPA1*03:01-B1*105:01L
  REGION 1..11: note = CONT. FROM ABOVE: HLA-DRB1*14:54L HLA-DPA1*01:02-B1*04:01L HLA-D RB1*10:01L HLA-DRB1*16:01L HLA-DQA1*01:03-B1*06:01L HLA-DRB1*04: 08L HLA-DRB1*15:03L
  source 1..11: note = Severe acute respiratory syndrome coronavirus 2
FIKGLNNLNRG

SEQ ID NO: 11120 - protein, 11 aa, Severe acute respiratory syndrome-related coronavirus
  REGION 1..11: note = Table B: HLA-DQA1*05:01-B1*03:01L HLA-DQA1*05:05-B1*03:01L
  source 1..11: note = Severe acute respiratory syndrome coronavirus 2
LNRGMVLGSLA

SEQ ID NO: 11121 - protein, 11 aa, Severe acute respiratory syndrome-related coronavirus
  REGION 1..11: note = Table B: HLA-DQA1*05:01-B1*03:01L HLA-DRB1*13:03L HLA-DRB1*08:04L HLA-DRB1*11:04L HLA-DQA1*05:05-B1*03:19L HLA-DRB1*14:54L HLA-DQA1*05:05-B1*03:01L
  source 1..11: note = Severe acute respiratory syndrome coronavirus 2
SLAATVRLQAG

SEQ ID NO: 11122 - protein, 10 aa, Severe acute respiratory syndrome-related coronavirus
  REGION 1..10: note = Table B: HLA-DQA1*05:01-B1*03:01L HLA-DRB1*04:03L HLA-DQA1*01:02-B1*06:02L HLA-DQA1*03:01-B1*03:02L HLA-DQA1*05:05-B1*03:01L HLA-DQA1*01:03-B1*06:01L HLA-DQA1*02:01-B1*03:03L
  source 1..10: note = Severe acute respiratory syndrome coronavirus 2
AATVRLQAGN

SEQ ID NO: 11123 - protein, 12 aa, Severe acute respiratory syndrome-related coronavirus
  REGION 1..12: note = Table B: HLA-DQA1*05:01-B1*03:01L HLA-DQA1*01:02-B1*06:02L HLA-DRB1*01:02L HLA-DRB4*03:01NL HLA-DRB1*12:01L HLA-DQA1*03:01-B1*03:02L HLA-DQA1*05:05-B1*03:01L HLA-DQA1*01:03-B1*06:01L
  source 1..12: note = Severe acute respiratory syndrome coronavirus 2
ATVRLQAGNATE

SEQ ID NO: 11124 - protein, 13 aa, Severe acute respiratory syndrome-related coronavirus
  REGION 1..13: note = Table B: HLA-DQA1*05:01-B1*03:01L HLA-DRB1*01:02L HLA-DQA1*05:05-B1*03:19L HLA-DQA1*03:01-B1*03:02L HLA-DQA1*05:05-B1*03:01L HLA-DQA1*01:03-B1*06:01L HLA-DRB1*15:03L
  source 1..13: note = Severe acute respiratory syndrome coronavirus 2
TVRLQAGNATEVP

SEQ ID NO: 11125 - protein, 13 aa, Severe acute respiratory syndrome-related coronavirus
  REGION 1..13: note = Table B: HLA-DQA1*05:01-B1*03:01L HLA-DRB1*04:03L HLA-DRB1*04:02L HLA-DQA1*05:05-B1*03:19L HLA-DQA1*03:01-B1*03:02L HLA-DQA1*05:05-B1*03:01L HLA-DRB1*14:17L
  source 1..13: note = Severe acute respiratory syndrome coronavirus 2
VRLQAGNATEVPA

SEQ ID NO: 11126 - protein, 10 aa, Severe acute respiratory syndrome-related coronavirus
  REGION 1..10: note = Table B: HLA-DQA1*05:01-B1*03:01L HLA-DRB1*13:03M HLA-DQA1*01:02-B1*06:02M HLA-DPA1*03:01-B1*04:02L HLA-DRB1*14:01L HLA-DRB1*14:02L HLA-DQA1*01-B1*05L HLA-DQA1*05:01-B1*02:01L HLA-DQA1*05:05-B1*03:116L
  REGION 1..10: note = CONT. FROM ABOVE: HLA-DPA1*02:01-B1*13:01L HLA-DPA1*03:01-B1*105 :01M HLA-DPA1*01:02-B1*04:01L HLA-DQA1*01:03-B1*06:01L HLA-DRB1* 15:03L
  source 1..10: note = Severe acute respiratory syndrome coronavirus 2
VPANSTVLSF

SEQ ID NO: 11127 - protein, 13 aa, Severe acute respiratory syndrome-related coronavirus
  REGION 1..13: note = Table B: HLA-DQA1*05:01-B1*03:01L HLA-DRB1*04:03L HLA-DRB1*01:03L HLA-DRB1*04:05L HLA-DRB1*01:02L HLA-DRB1*08:01L HLA-DQA1*01-B1*05L HLA-DPA1*01:03-B1*04:01L HLA-DPA1*02:01-B1*13:01L HLA-DQA1*03:01-B1*03:02L
  REGION 1..13: note = CONT. FROM ABOVE: HLA-DPA1*01:03-B1*02:01L HLA-DQA1*05:05-B1*03: 01L HLA-DRB1*16:01L HLA-DRB1*15:03L
  source 1..13: note = Severe acute respiratory syndrome coronavirus 2
VLSFCAFAVDAAK

SEQ ID NO: 11128 - protein, 10 aa, Severe acute respiratory syndrome-related coronavirus
  REGION 1..10: note = Table B: HLA-DQA1*05:01-B1*03:01L HLA-DRB1*04:01L HLA-DRB1*04:03L HLA-DRB1*13:02L HLA-DRB1*13:03L HLA-DRB1*01:03L HLA-DRB1*04:02L HLA-DRB1*04:04L HLA-DRB1*04:05L HLA-DRB1*01:01L HLA-DRB1*01:02L HLA-DRB4*03:01NL HLA-DRB1*08:04L HLA-DRB1*08:77L
  REGION 1..10: note = CONT. FROM ABOVE: HLA-DRB3*02:01L HLA-DPA1*01:03-B1*03:01L HLA-D RB1*03:01L HLA-DRB1*14:01L HLA-DRB1*11:03L HLA-DRB1*11:04L HLA-D RB1*14:02L HLA-DRB1*08:01L HLA-DRB1*11:01L HLA-DRB5*01:01L HLA-D QA1*01-B1*05L HLA-DQA1*05:01-B1*02:01L HLA-DRB1*13:01L
  REGION 1..10: note = CONT. FROM ABOVE: HLA-DRB1*12:01L HLA-DRB1*12:02L HLA-DRB3*01:01 L HLA-DPA1*03:01-B1*105:01L HLA-DQA1*03:01-B1*03:02L HLA-DRB1*14 :54L HLA-DQA1*05:05-B1*03:01L HLA-DRB1*14:17L HLA-DPA1*01:02-B1* 04:01L HLA-DRB1*10:01L HLA-DRB1*16:01L HLA-DRB1*04:08L
  REGION 1..10: note = CONT. FROM ABOVE: HLA-DRB1*08:03L HLA-DQA1*02:01-B1*03:03L HLA-D RB1*15:03L
  source 1..10: note = Severe acute respiratory syndrome coronavirus 2
FAVDAAKAYK

SEQ ID NO: 11129 - protein, 12 aa, Severe acute respiratory syndrome-related coronavirus
  REGION 1..12: note = Table B: HLA-DQA1*05:01-B1*03:01L HLA-DRB1*01:03L HLA-DRB1*04:05L HLA-DRB1*01:02L HLA-DRB1*08:04L HLA-DPA1*01:03-B1*03:01L HLA-DPA1*03:01-B1*04:02L HLA-DRB1*14:01L HLA-DRB1*11:04L HLA-DRB1*14:02L HLA-DRB5*01:01L
  REGION 1..12: note = CONT. FROM ABOVE: HLA-DQA1*01-B1*05L HLA-DQA1*05:05-B1*03:19L HL A-DPA1*01:03-B1*04:01L HLA-DRB1*04:10L HLA-DRB3*01:01L HLA-DPA1* 03:01-B1*105:01L HLA-DRB1*14:54L HLA-DQA1*05:05-B1*03:01L HLA-DR B1*14:17L HLA-DPA1*01:02-B1*04:01L HLA-DRB1*10:01L
  REGION 1..12: note = CONT. FROM ABOVE: HLA-DRB1*04:08L HLA-DRB1*08:03L
  source 1..12: note = Severe acute respiratory syndrome coronavirus 2
YKDYLASGGQPI

SEQ ID NO: 11130 - protein, 11 aa, Severe acute respiratory syndrome-related coronavirus
  REGION 1..11: note = Table B: HLA-DQA1*05:01-B1*03:01L HLA-DQA1*05:05-B1*03:19L HLA-DQA1*05:05-B1*03:01L HLA-DQA1*01:03-B1*06:01L HLA-DQA1*02:01-B1*03:03L
  source 1..11: note = Severe acute respiratory syndrome coronavirus 2
SGGQPITNCVK

SEQ ID NO: 11131 - protein, 12 aa, Severe acute respiratory syndrome-related coronavirus
  REGION 1..12: note = Table B: HLA-DQA1*05:01-B1*03:01L HLA-DQA1*01:02-B1*06:02L HLA-DQA1*05:05-B1*03:19L HLA-DQA1*05:05-B1*03:01L
  source 1..12: note = Severe acute respiratory syndrome coronavirus 2
TGTGQAITVTPE

SEQ ID NO: 11132 - protein, 12 aa, Severe acute respiratory syndrome-related coronavirus
  REGION 1..12: note = Table B: HLA-DQA1*05:01-B1*03:01L HLA-DQA1*01:02-B1*06:02L HLA-DQA1*01:01-B1*05:01L HLA-DQA1*01-B1*05L HLA-DQA1*05:05-B1*03:19L HLA-DQA1*05:05-B1*03:01L HLA-DRB1*16:01L
  source 1..12: note = Severe acute respiratory syndrome coronavirus 2
TGQAITVTPEAN

SEQ ID NO: 11133 - protein, 13 aa, Severe acute respiratory syndrome-related coronavirus
  REGION 1..13: note = Table B: HLA-DQA1*05:01-B1*03:01L HLA-DRB1*13:03L HLA-DRB1*01:03L HLA-DRB1*04:05L HLA-DQA1*01:02-B1*06:02L HLA-DRB1*01:02L HLA-DRB1*08:04L HLA-DPA1*01:03-B1*03:01L HLA-DPA1*03:01-B1*04:02L HLA-DRB1*11:03L
  REGION 1..13: note = CONT. FROM ABOVE: HLA-DQA1*01:01-B1*05:01L HLA-DQA1*05:05-B1*03: 19L HLA-DRB1*09:01L HLA-DPA1*03:01-B1*105:01L HLA-DQA1*05:05-B1* 03:01L HLA-DRB1*04:08L HLA-DRB1*08:03L
  source 1..13: note = Severe acute respiratory syndrome coronavirus 2
GQAITVTPEANMD

SEQ ID NO: 11134 - protein, 12 aa, Severe acute respiratory syndrome-related coronavirus
  REGION 1..12: note = Table B: HLA-DQA1*05:01-B1*03:01L HLA-DQA1*01:02-B1*06:02L HLA-DQA1*01:01-B1*05:01L HLA-DQA1*05:05-B1*03:19L HLA-DRB1*12:02L HLA-DPA1*03:01-B1*105:01L HLA-DQA1*05:05-B1*03:01L
  source 1..12: note = Severe acute respiratory syndrome coronavirus 2
AITVTPEANMDQ

SEQ ID NO: 11135 - protein, 13 aa, Severe acute respiratory syndrome-related coronavirus
  REGION 1..13: note = Table B: HLA-DQA1*05:01-B1*03:01L HLA-DRB1*13:02L HLA-DRB1*01:03L HLA-DRB1*04:02L HLA-DRB1*04:05L HLA-DRB4*03:01NL HLA-DRB1*14:02L HLA-DRB1*04:10L HLA-DPA1*02:01-B1*13:01L HLA-DQA1*05:05-B1*03:01L HLA-DRB1*04:08L HLA-DRB1*15:03L
  source 1..13: note = Severe acute respiratory syndrome coronavirus 2
VTPEANMDQESFG

SEQ ID NO: 11136 - protein, 15 aa, Severe acute respiratory syndrome-related coronavirus
  REGION 1..15: note = Table B: HLA-DQA1*05:01-B1*03:01L HLA-DRB1*13:02L HLA-DRB1*01:03L HLA-DRB1*04:04L HLA-DRB1*01:02L HLA-DRB4*03:01NL HLA-DPA1*01:03-B1*03:01L HLA-DRB1*14:02L HLA-DRB1*04:10L HLA-DPA1*01:03-B1*04:02L HLA-DRB3*01:01L
  REGION 1..15: note = CONT. FROM ABOVE: HLA-DPA1*02:01-B1*13:01L HLA-DRB1*14:54L HLA-D RB1*04:08L HLA-DRB1*15:03L
  source 1..15: note = Severe acute respiratory syndrome coronavirus 2
TPEANMDQESFGGAS

SEQ ID NO: 11137 - protein, 15 aa, Severe acute respiratory syndrome-related coronavirus
  REGION 1..15: note = Table B: HLA-DQA1*05:01-B1*03:01L HLA-DPA1*03:01-B1*105:01L
  source 1..15: note = Severe acute respiratory syndrome coronavirus 2
DQESFGGASCCLYCR

SEQ ID NO: 11138 - protein, 17 aa, Severe acute respiratory syndrome-related coronavirus
  REGION 1..17: note = Table B: HLA-DQA1*05:01-B1*03:01L HLA-DPA1*03:01-B1*105:01L
  source 1..17: note = Severe acute respiratory syndrome coronavirus 2
DHPNPKGFCDLKGKYVQ

SEQ ID NO: 11139 - protein, 15 aa, Severe acute respiratory syndrome-related coronavirus
  REGION 1..15: note = Table B: HLA-DQA1*05:01-B1*03:01L HLA-DPA1*03:01-B1*04:02L HLA-DQA1*05:05-B1*03:01L
  source 1..15: note = Severe acute respiratory syndrome coronavirus 2
DLKGKYVQIPTTCAN

SEQ ID NO: 11140 - protein, 14 aa, Severe acute respiratory syndrome-related coronavirus
  REGION 1..14: note = Table B: HLA-DQA1*05:01-B1*03:01L HLA-DRB1*13:02L HLA-DRB1*01:01L HLA-DPA1*01:03-B1*03:01L HLA-DRB1*14:01L HLA-DQA1*01-B1*05L HLA-DQA1*05:05-B1*03:19L HLA-DQA1*05:01-B1*02:01L HLA-DRB4*01:01L
  REGION 1..14: note = CONT. FROM ABOVE: HLA-DPA1*01:03-B1*04:02L HLA-DRB3*01:01L HLA-D PA1*02:01-B1*13:01L HLA-DPA1*03:01-B1*105:01L HLA-DQA1*05:05-B1* 03:01L
  source 1..14: note = Severe acute respiratory syndrome coronavirus 2
GKYVQIPTTCANDP

SEQ ID NO: 11141 - protein, 13 aa, Severe acute respiratory syndrome-related coronavirus
  REGION 1..13: note = Table B: HLA-DQA1*05:01-B1*03:01L HLA-DRB1*04:03L HLA-DRB1*01:03L HLA-DRB1*04:02L HLA-DRB1*04:05L HLA-DQA1*01:02-B1*06:02L HLA-DRB4*03:01NL HLA-DPA1*01:03-B1*03:01L HLA-DQA1*01:01-B1*05:01L
  REGION 1..13: note = CONT. FROM ABOVE: HLA-DQA1*05:05-B1*03:19L HLA-DRB1*04:10L HLA-D RB1*12:01L HLA-DPA1*02:01-B1*13:01L HLA-DPA1*03:01-B1*105:01L HL A-DQA1*05:05-B1*03:01L HLA-DRB1*14:17L HLA-DRB1*16:01L HLA-DQA1* 01:03-B1*06:01L HLA-DRB1*04:08L
  source 1..13: note = Severe acute respiratory syndrome coronavirus 2
VQIPTTCANDPVG

SEQ ID NO: 11142 - protein, 14 aa, Severe acute respiratory syndrome-related coronavirus
  REGION 1..14: note = Table B: HLA-DQA1*05:01-B1*03:01L HLA-DRB1*13:02L HLA-DRB1*01:03L HLA-DRB1*04:05L HLA-DRB1*01:02L HLA-DPA1*01:03-B1*03:01L HLA-DQA1*01:01-B1*05:01L HLA-DQA1*05:05-B1*03:19L HLA-DQA1*05:01-B1*02:01L
  REGION 1..14: note = CONT. FROM ABOVE: HLA-DRB1*12:01L HLA-DPA1*02:01-B1*13:01L HLA-D PA1*03:01-B1*105:01L HLA-DQA1*05:05-B1*03:01L HLA-DRB1*16:01L HL A-DRB1*15:03L
  source 1..14: note = Severe acute respiratory syndrome coronavirus 2
DQLREPMLQSADAQ

SEQ ID NO: 11143 - protein, 12 aa, Severe acute respiratory syndrome-related coronavirus
  REGION 1..12: note = Table B: HLA-DQA1*05:01-B1*03:01L HLA-DRB1*04:03L HLA-DQA1*05:05-B1*03:19L HLA-DQA1*05:01-B1*02:01L HLA-DQA1*05:05-B1*03:01L
  source 1..12: note = Severe acute respiratory syndrome coronavirus 2
PMLQSADAQSFL

SEQ ID NO: 11144 - protein, 11 aa, Severe acute respiratory syndrome-related coronavirus
  REGION 1..11: note = Table B: HLA-DQA1*05:01-B1*03:01L HLA-DQA1*01:02-B1*06:02L HLA-DQA1*05:05-B1*03:19L HLA-DPA1*03:01-B1*105:01L HLA-DQA1*03:01-B1*03:02L HLA-DQA1*05:05-B1*03:01L HLA-DQA1*02:01-B1*03:03L
  source 1..11: note = Severe acute respiratory syndrome coronavirus 2
LQSADAQSFLN

SEQ ID NO: 11145 - protein, 15 aa, Severe acute respiratory syndrome-related coronavirus
  REGION 1..15: note = Table B: HLA-DQA1*05:01-B1*03:01L HLA-DRB1*12:01L HLA-DPA1*03:01-B1*105:01L HLA-DQA1*05:05-B1*03:01L HLA-DRB1*16:01L HLA-DRB1*15:03L
  source 1..15: note = Severe acute respiratory syndrome coronavirus 2
AQSFLNRVCGVSAAR

SEQ ID NO: 11146 - protein, 14 aa, Severe acute respiratory syndrome-related coronavirus
  REGION 1..14: note = Table B: HLA-DQA1*05:01-B1*03:01L HLA-DRB1*01:02L HLA-DRB1*12:01L HLA-DPA1*03:01-B1*105:01L HLA-DQA1*05:05-B1*03:01L HLA-DQA1*02:01-B1*03:03L HLA-DRB1*15:03L
  source 1..14: note = Severe acute respiratory syndrome coronavirus 2
LNRVCGVSAARLTP

SEQ ID NO: 11147 - protein, 10 aa, Severe acute respiratory syndrome-related coronavirus
  REGION 1..10: note = Table B: HLA-DQA1*05:01-B1*03:01L HLA-DQA1*01:02-B1*06:02L HLA-DQA1*05:05-B1*03:19L HLA-DQA1*05:05-B1*03:01L HLA-DQA1*01:03-B1*06:01L HLA-DQA1*02:01-B1*03:03L
  source 1..10: note = Severe acute respiratory syndrome coronavirus 2
VSAARLTPCG

SEQ ID NO: 11148 - protein, 14 aa, Severe acute respiratory syndrome-related coronavirus
  REGION 1..14: note = Table B: HLA-DQA1*05:01-B1*03:01L HLA-DRB1*04:01L HLA-DRB1*01:03L HLA-DRB1*04:04L HLA-DRB1*01:02L HLA-DRB4*03:01NL HLA-DRB1*08:04L HLA-DPA1*01:03-B1*03:01L HLA-DRB1*11:04L HLA-DQA1*05:05-B1*03:19L HLA-DRB1*12:01L
  REGION 1..14: note = CONT. FROM ABOVE: HLA-DPA1*03:01-B1*105:01L HLA-DQA1*03:01-B1*03 :02L HLA-DRB1*10:01L HLA-DRB1*16:01L HLA-DRB1*04:08L HLA-DQA1*02 :01-B1*03:03L HLA-DRB1*15:03L
  source 1..14: note = Severe acute respiratory syndrome coronavirus 2
AARLTPCGTGTSTD

SEQ ID NO: 11149 - protein, 11 aa, Severe acute respiratory syndrome-related coronavirus
  REGION 1..11: note = Table B: HLA-DQA1*05:01-B1*03:01L HLA-DRB1*04:01L HLA-DRB1*13:02L HLA-DRB1*13:03L HLA-DRB1*01:03L HLA-DRB1*04:02L HLA-DRB1*04:05L HLA-DRB1*01:02L HLA-DRB4*03:01NL HLA-DRB1*08:04L HLA-DPA1*01:03-B1*03:01L HLA-DRB1*03:01L HLA-DRB1*11:04L
  REGION 1..11: note = CONT. FROM ABOVE: HLA-DRB1*14:02L HLA-DRB1*08:01L HLA-DRB1*11:01 L HLA-DRB1*12:01L HLA-DRB3*01:01L HLA-DRB1*14:54L HLA-DRB1*14:17 L HLA-DRB1*04:08L HLA-DQA1*02:01-B1*03:03L
  source 1..11: note = Severe acute respiratory syndrome coronavirus 2
IYNDKVAGFAK

SEQ ID NO: 11150 - protein, 11 aa, Severe acute respiratory syndrome-related coronavirus
  REGION 1..11: note = Table B: HLA-DQA1*05:01-B1*03:01L HLA-DRB1*01:03L HLA-DQA1*01:02-B1*06:02L HLA-DPA1*03:01-B1*04:02L HLA-DPA1*01:03-B1*04:01L HLA-DPA1*01:03-B1*04:02L HLA-DQA1*03:01-B1*03:02L HLA-DRB1*16:01L HLA-DRB1*04:08L
  source 1..11: note = Severe acute respiratory syndrome coronavirus 2
VAGFAKFLKTN

SEQ ID NO: 11151 - protein, 10 aa, Severe acute respiratory syndrome-related coronavirus
  REGION 1..10: note = Table B: HLA-DQA1*05:01-B1*03:01L HLA-DRB1*13:03L HLA-DRB1*01:03L HLA-DQA1*01:02-B1*06:02L HLA-DRB4*03:01NL HLA-DRB1*08:77M HLA-DPA1*01:03-B1*03:01M HLA-DPA1*03:01-B1*04:02L HLA-DRB1*03:01L HLA-DRB1*11:02L
  REGION 1..10: note = CONT. FROM ABOVE: HLA-DQA1*01-B1*05L HLA-DQA1*05:05-B1*03:19M HL A-DQA1*05:01-B1*02:01M HLA-DRB4*01:01L HLA-DPA1*01:03-B1*04:01L HLA-DRB1*12:01L HLA-DPA1*01:03-B1*104:01M HLA-DPA1*01:02-B1*04:0 1L HLA-DRB1*10:01L HLA-DRB1*16:01M HLA-DRB1*15:03L
  source 1..10: note = Severe acute respiratory syndrome coronavirus 2
DEDDNLIDSY

SEQ ID NO: 11152 - protein, 13 aa, Severe acute respiratory syndrome-related coronavirus
  REGION 1..13: note = Table B: HLA-DQA1*05:01-B1*03:01L HLA-DRB1*04:03L HLA-DRB1*04:05L HLA-DRB1*01:02L HLA-DPA1*03:01-B1*04:02L HLA-DPA1*01:03-B1*04:02L HLA-DRB1*14:17L HLA-DRB1*15:03L
  source 1..13: note = Severe acute respiratory syndrome coronavirus 2
DDNLIDSYFVVKR

SEQ ID NO: 11153 - protein, 14 aa, Severe acute respiratory syndrome-related coronavirus
  REGION 1..14: note = Table B: HLA-DQA1*05:01-B1*03:01L HLA-DRB1*04:03L HLA-DRB1*04:04L HLA-DRB1*08:04L HLA-DPA1*03:01-B1*04:02L HLA-DRB1*11:04L HLA-DRB1*11:01L HLA-DPA1*01:03-B1*04:01L HLA-DPA1*01:03-B1*04:02L HLA-DPA1*02:01-B1*13:01L
  REGION 1..14: note = CONT. FROM ABOVE: HLA-DPA1*01:03-B1*02:01L
  source 1..14: note = Severe acute respiratory syndrome coronavirus 2
DNLIDSYFVVKRHT

SEQ ID NO: 11154 - protein, 11 aa, Severe acute respiratory syndrome-related coronavirus
  REGION 1..11: note = Table B: HLA-DQA1*05:01-B1*03:01L HLA-DPA1*03:01-B1*04:02L HLA-DRB1*14:01L HLA-DRB1*08:01L HLA-DRB1*04:08L
  source 1..11: note = Severe acute respiratory syndrome coronavirus 2
DSYFVVKRHTF

SEQ ID NO: 11155 - protein, 15 aa, Severe acute respiratory syndrome-related coronavirus
  REGION 1..15: note = Table B: HLA-DQA1*05:01-B1*03:01L HLA-DRB1*04:04L HLA-DQA1*01-B1*05L HLA-DPA1*03:01-B1*105:01L
  source 1..15: note = Severe acute respiratory syndrome coronavirus 2
FVVKRHTFSNYQHEE

SEQ ID NO: 11156 - protein, 12 aa, Severe acute respiratory syndrome-related coronavirus
  REGION 1..12: note = Table B: HLA-DQA1*05:01-B1*03:01L HLA-DRB1*01:03L HLA-DRB1*04:05L HLA-DRB1*01:02L HLA-DRB1*14:01L HLA-DQA1*01:01-B1*05:01L HLA-DRB1*08:01L HLA-DRB1*04:10L HLA-DRB1*12:01L HLA-DPA1*02:01-B1*13:01L
  REGION 1..12: note = CONT. FROM ABOVE: HLA-DPA1*01:02-B1*04:01L HLA-DRB1*04:08L HLA-D RB1*08:03L HLA-DRB1*15:03L
  source 1..12: note = Severe acute respiratory syndrome coronavirus 2
RHTFSNYQHEET

SEQ ID NO: 11157 - protein, 13 aa, Severe acute respiratory syndrome-related coronavirus
  REGION 1..13: note = Table B: HLA-DQA1*05:01-B1*03:01L HLA-DRB1*13:02L HLA-DRB1*13:03L HLA-DRB4*03:01NL HLA-DPA1*01:03-B1*03:01L HLA-DPA1*03:01-B1*04:02L HLA-DRB1*11:03L HLA-DRB1*14:02L HLA-DRB4*01:01L HLA-DRB3*01:01L HLA-DPA1*02:01-B1*13:01L
  REGION 1..13: note = CONT. FROM ABOVE: HLA-DRB1*14:54L HLA-DRB1*08:02L HLA-DRB1*08:03 L
  source 1..13: note = Severe acute respiratory syndrome coronavirus 2
TIYNLLKDCPAVA

SEQ ID NO: 11158 - protein, 14 aa, Severe acute respiratory syndrome-related coronavirus
  REGION 1..14: note = Table B: HLA-DQA1*05:01-B1*03:01L HLA-DRB1*13:02L HLA-DRB3*01:01L HLA-DPA1*02:01-B1*13:01L
  source 1..14: note = Severe acute respiratory syndrome coronavirus 2
IYNLLKDCPAVAKH

SEQ ID NO: 11159 - protein, 13 aa, Severe acute respiratory syndrome-related coronavirus
  REGION 1..13: note = Table B: HLA-DQA1*05:01-B1*03:01L HLA-DRB1*04:03L HLA-DRB1*13:02L HLA-DPA1*02:01-B1*13:01L HLA-DQA1*01:03-B1*06:01L
  source 1..13: note = Severe acute respiratory syndrome coronavirus 2
NLLKDCPAVAKHD

SEQ ID NO: 11160 - protein, 13 aa, Severe acute respiratory syndrome-related coronavirus
  REGION 1..13: note = Table B: HLA-DQA1*05:01-B1*03:01L HLA-DRB1*14:01L HLA-DPA1*02:01-B1*13:01L HLA-DPA1*03:01-B1*105:01L
  source 1..13: note = Severe acute respiratory syndrome coronavirus 2
LLKDCPAVAKHDF

SEQ ID NO: 11161 - protein, 11 aa, Severe acute respiratory syndrome-related coronavirus
  REGION 1..11: note = Table B: HLA-DQA1*05:01-B1*03:01L HLA-DRB1*13:03L HLA-DRB1*01:03L HLA-DRB1*04:02L HLA-DQA1*01:02-B1*06:02L HLA-DQA1*01:01-B1*05:01L HLA-DRB1*08:01L HLA-DQA1*05:05-B1*03:19L HLA-DRB1*12:01L
  REGION 1..11: note = CONT. FROM ABOVE: HLA-DQA1*05:05-B1*03:01L HLA-DQA1*01:03-B1*06: 01L
  source 1..11: note = Severe acute respiratory syndrome coronavirus 2
IDGDMVPHISR

SEQ ID NO: 11162 - protein, 12 aa, Severe acute respiratory syndrome-related coronavirus
  REGION 1..12: note = Table B: HLA-DQA1*05:01-B1*03:01L HLA-DQA1*01:02-B1*06:02L HLA-DRB1*01:02L HLA-DRB1*04:08L
  source 1..12: note = Severe acute respiratory syndrome coronavirus 2
DGDMVPHISRQR

SEQ ID NO: 11163 - protein, 17 aa, Severe acute respiratory syndrome-related coronavirus
  REGION 1..17: note = Table B: HLA-DQA1*05:01-B1*03:01L HLA-DRB3*02:01L HLA-DRB1*14:01L HLA-DRB3*01:01L HLA-DQA1*05:05-B1*03:01L
  source 1..17: note = Severe acute respiratory syndrome coronavirus 2
DDYFNKKDWYDFVENPD

SEQ ID NO: 11164 - protein, 13 aa, Severe acute respiratory syndrome-related coronavirus
  REGION 1..13: note = Table B: HLA-DQA1*05:01-B1*03:01L HLA-DRB1*13:02L HLA-DRB1*01:03L HLA-DRB1*04:02L HLA-DRB1*01:02L HLA-DRB1*08:04L HLA-DRB3*02:01L HLA-DPA1*01:03-B1*03:01L HLA-DRB1*14:02L HLA-DQA1*01:01-B1*05:01L HLA-DRB1*08:01L
  REGION 1..13: note = CONT. FROM ABOVE: HLA-DQA1*05:05-B1*03:19L HLA-DPA1*01:03-B1*04: 01L HLA-DRB1*09:01L HLA-DPA1*01:03-B1*04:02L HLA-DPA1*01:03-B1*1 04:01L HLA-DQA1*05:05-B1*03:01L HLA-DPA1*01:02-B1*04:01L HLA-DRB 1*08:03L HLA-DQA1*02:01-B1*03:03L
  source 1..13: note = Severe acute respiratory syndrome coronavirus 2
KDWYDFVENPDIL

SEQ ID NO: 11165 - protein, 10 aa, Severe acute respiratory syndrome-related coronavirus
  REGION 1..10: note = Table B: HLA-DQA1*05:01-B1*03:01L HLA-DRB1*13:02L HLA-DRB1*13:03L HLA-DRB1*01:03L HLA-DRB1*01:02L HLA-DRB1*14:01L HLA-DRB1*08:01L HLA-DRB1*12:01L HLA-DRB1*12:02L HLA-DQA1*03:01-B1*03:02L HLA-DPA1*01:02-B1*04:01L
  REGION 1..10: note = CONT. FROM ABOVE: HLA-DRB1*16:01L HLA-DQA1*01:03-B1*06:01L HLA-D RB1*04:08L HLA-DQA1*02:01-B1*03:03L HLA-DRB1*15:03L
  source 1..10: note = Severe acute respiratory syndrome coronavirus 2
VYANLGERVR

SEQ ID NO: 11166 - protein, 10 aa, Severe acute respiratory syndrome-related coronavirus
  REGION 1..10: note = Table B: HLA-DQA1*05:01-B1*03:01L HLA-DRB1*13:02L HLA-DRB1*01:03L HLA-DRB1*08:01L HLA-DQA1*03:01-B1*03:02L HLA-DRB1*16:01L HLA-DQA1*01:03-B1*06:01L HLA-DQA1*02:01-B1*03:03L
  source 1..10: note = Severe acute respiratory syndrome coronavirus 2
RVRQALLKTV

SEQ ID NO: 11167 - protein, 10 aa, Severe acute respiratory syndrome-related coronavirus
  REGION 1..10: note = Table B: HLA-DQA1*05:01-B1*03:01L HLA-DRB1*13:02L HLA-DRB1*13:03L HLA-DRB1*01:03M HLA-DRB1*04:05L HLA-DQA1*01:02-B1*06:02L HLA-DRB1*08:77L HLA-DPA1*01:03-B1*03:01L HLA-DRB1*03:01L HLA-DRB1*14:01L
  REGION 1..10: note = CONT. FROM ABOVE: HLA-DRB1*14:02L HLA-DQA1*01:01-B1*05:01L HLA-D RB1*11:01L HLA-DQA1*05:05-B1*03:19L HLA-DQA1*05:01-B1*02:01L HLA -DPA1*01:03-B1*04:01L HLA-DQA1*05:05-B1*03:116L HLA-DPA1*01:03-B 1*04:02L HLA-DPA1*02:01-B1*13:01L HLA-DPA1*03:01-B1*105:01L
  REGION 1..10: note = CONT. FROM ABOVE: HLA-DQA1*03:01-B1*03:02L HLA-DRB1*16:01L HLA-D QA1*01:03-B1*06:01L HLA-DRB1*08:02L HLA-DQA1*02:01-B1*03:03M HLA -DRB1*15:03L
  source 1..10: note = Severe acute respiratory syndrome coronavirus 2
RQALLKTVQF

SEQ ID NO: 11168 - protein, 12 aa, Severe acute respiratory syndrome-related coronavirus
  REGION 1..12: note = Table B: HLA-DQA1*05:01-B1*03:01L HLA-DRB1*01:02L HLA-DQA1*05:05-B1*03:19L HLA-DPA1*03:01-B1*105:01L HLA-DRB1*04:08L HLA-DRB1*15:03L
  source 1..12: note = Severe acute respiratory syndrome coronavirus 2
TVQFCDAMRNAG

SEQ ID NO: 11169 - protein, 13 aa, Severe acute respiratory syndrome-related coronavirus
  REGION 1..13: note = Table B: HLA-DQA1*05:01-B1*03:01L HLA-DRB1*01:03L HLA-DRB1*04:04L HLA-DRB1*01:02L HLA-DPA1*01:03-B1*03:01L HLA-DQA1*05:05-B1*03:19L HLA-DRB1*12:01L HLA-DRB1*14:54L HLA-DRB1*10:01L HLA-DRB1*04:08L HLA-DRB1*15:03L
  source 1..13: note = Severe acute respiratory syndrome coronavirus 2
AGIVGVLTLDNQD

SEQ ID NO: 11170 - protein, 13 aa, Severe acute respiratory syndrome-related coronavirus
  REGION 1..13: note = Table B: HLA-DQA1*05:01-B1*03:01L HLA-DRB1*15:03L
  source 1..13: note = Severe acute respiratory syndrome coronavirus 2
GIVGVLTLDNQDL

SEQ ID NO: 11171 - protein, 13 aa, Severe acute respiratory syndrome-related coronavirus
  REGION 1..13: note = Table B: HLA-DQA1*05:01-B1*03:01L HLA-DRB1*13:02L HLA-DRB1*13:03L HLA-DRB1*01:03L HLA-DRB1*04:04L HLA-DRB1*01:02L HLA-DRB1*08:04L HLA-DRB1*08:77L HLA-DRB3*02:01L HLA-DPA1*01:03-B1*03:01L HLA-DPA1*03:01-B1*04:02L
  REGION 1..13: note = CONT. FROM ABOVE: HLA-DRB1*14:01L HLA-DRB1*14:02L HLA-DQA1*01:01 -B1*05:01L HLA-DQA1*05:05-B1*03:19L HLA-DRB4*01:01L HLA-DRB1*09: 01L HLA-DRB1*12:02L HLA-DPA1*02:01-B1*13:01L HLA-DPA1*01:03-B1*1 04:01L HLA-DRB1*07:01L HLA-DRB1*10:01L HLA-DRB1*04:08L
  REGION 1..13: note = CONT. FROM ABOVE: HLA-DRB1*08:03L HLA-DRB1*15:03L
  source 1..13: note = Severe acute respiratory syndrome coronavirus 2
IVGVLTLDNQDLN

SEQ ID NO: 11172 - protein, 14 aa, Severe acute respiratory syndrome-related coronavirus
  REGION 1..14: note = Table B: HLA-DQA1*05:01-B1*03:01L HLA-DRB1*01:01L HLA-DPA1*03:01-B1*04:02L HLA-DRB1*03:01L HLA-DRB1*08:01L HLA-DRB1*11:01L HLA-DQA1*05:05-B1*03:19L HLA-DRB4*01:01L HLA-DRB1*09:01L HLA-DPA1*02:01-B1*13:01L
  REGION 1..14: note = CONT. FROM ABOVE: HLA-DQA1*05:05-B1*03:01L HLA-DRB1*07:01L
  source 1..14: note = Severe acute respiratory syndrome coronavirus 2
VGVLTLDNQDLNGN

SEQ ID NO: 11173 - protein, 11 aa, Severe acute respiratory syndrome-related coronavirus
  REGION 1..11: note = Table B: HLA-DQA1*05:01-B1*03:01L HLA-DQA1*01:02-B1*06:02L HLA-DRB1*08:77L HLA-DPA1*01:03-B1*03:01L HLA-DPA1*03:01-B1*04:02L HLA-DRB1*03:01L HLA-DQA1*01-B1*05L HLA-DRB4*01:01L HLA-DPA1*01:03-B1*04:01L
  REGION 1..11: note = CONT. FROM ABOVE: HLA-DPA1*03:01-B1*105:01L HLA-DPA1*01:03-B1*10 4:01L HLA-DRB1*10:01L HLA-DRB1*16:01L HLA-DRB1*15:03L
  source 1..11: note = Severe acute respiratory syndrome coronavirus 2
TLDNQDLNGNW

SEQ ID NO: 11174 - protein, 12 aa, Severe acute respiratory syndrome-related coronavirus
  REGION 1..12: note = Table B: HLA-DQA1*05:01-B1*03:01L HLA-DQA1*01:02-B1*06:02L HLA-DRB1*08:77L HLA-DRB3*02:01L HLA-DPA1*01:03-B1*03:01L HLA-DRB1*11:03L HLA-DRB1*11:04L HLA-DQA1*01:01-B1*05:01L HLA-DRB5*01:01L HLA-DQA1*05:05-B1*03:19L HLA-DRB1*09:01L
  REGION 1..12: note = CONT. FROM ABOVE: HLA-DRB1*12:02L HLA-DPA1*03:01-B1*105:01L HLA- DQA1*05:05-B1*03:01L HLA-DRB1*10:01L HLA-DRB1*04:08L
  source 1..12: note = Severe acute respiratory syndrome coronavirus 2
FGDFIQTTPGSG

SEQ ID NO: 11175 - protein, 10 aa, Severe acute respiratory syndrome-related coronavirus
  REGION 1..10: note = Table B: HLA-DQA1*05:01-B1*03:01L
  source 1..10: note = Severe acute respiratory syndrome coronavirus 2
MPILTLTRAL

SEQ ID NO: 11176 - protein, 12 aa, Severe acute respiratory syndrome-related coronavirus
  REGION 1..12: note = Table B: HLA-DQA1*05:01-B1*03:01L HLA-DRB1*01:03L HLA-DRB1*04:04L HLA-DRB1*04:05L HLA-DQA1*01:02-B1*06:02L HLA-DRB1*01:02L HLA-DRB1*04:10L HLA-DRB1*12:01L HLA-DRB1*16:01L HLA-DQA1*01:03-B1*06:01L HLA-DRB1*04:08L
  source 1..12: note = Severe acute respiratory syndrome coronavirus 2
LTLTRALTAESH

SEQ ID NO: 11177 - protein, 12 aa, Severe acute respiratory syndrome-related coronavirus
  REGION 1..12: note = Table B: HLA-DQA1*05:01-B1*03:01L HLA-DRB1*04:05L HLA-DQA1*01:02-B1*06:02L HLA-DRB1*04:10L HLA-DRB1*16:01L
  source 1..12: note = Severe acute respiratory syndrome coronavirus 2
TRALTAESHVDT

SEQ ID NO: 11178 - protein, 11 aa, Severe acute respiratory syndrome-related coronavirus
  REGION 1..11: note = Table B: HLA-DQA1*05:01-B1*03:01L HLA-DQA1*01:02-B1*06:02L HLA-DQA1*01-B1*05L HLA-DQA1*05:05-B1*03:19L HLA-DPA1*03:01-B1*105:01L HLA-DQA1*05:05-B1*03:01L HLA-DRB1*16:01L
  source 1..11: note = Severe acute respiratory syndrome coronavirus 2
ALTAESHVDTD

SEQ ID NO: 11179 - protein, 10 aa, Severe acute respiratory syndrome-related coronavirus
  REGION 1..10: note = Table B: HLA-DQA1*05:01-B1*03:01L HLA-DPA1*01:03-B1*03:01L HLA-DQA1*01-B1*05L HLA-DQA1*05:05-B1*03:19L HLA-DQA1*05:01-B1*02:01L HLA-DPA1*01:03-B1*04:01L HLA-DPA1*01:03-B1*104:01L HLA-DRB1*16:01L
  source 1..10: note = Severe acute respiratory syndrome coronavirus 2
TDLTKPYIKW

SEQ ID NO: 11180 - protein, 10 aa, Severe acute respiratory syndrome-related coronavirus
  REGION 1..10: note = Table B: HLA-DQA1*05:01-B1*03:01L HLA-DRB1*03:01L HLA-DQA1*05:05-B1*03:19L HLA-DQA1*05:01-B1*02:01L HLA-DRB1*16:01L HLA-DQA1*02:01-B1*03:03L
  source 1..10: note = Severe acute respiratory syndrome coronavirus 2
EERLKLFDRY

SEQ ID NO: 11181 - protein, 15 aa, Severe acute respiratory syndrome-related coronavirus
  REGION 1..15: note = Table B: HLA-DQA1*05:01-B1*03:01L HLA-DRB1*04:03L HLA-DRB1*13:02L HLA-DRB1*01:03L HLA-DRB1*04:05L HLA-DRB1*08:04L HLA-DPA1*01:03-B1*03:01L HLA-DPA1*03:01-B1*04:02L HLA-DRB1*03:01L HLA-DRB1*11:04L HLA-DRB1*08:01L HLA-DRB1*11:01L
  REGION 1..15: note = CONT. FROM ABOVE: HLA-DQA1*05:05-B1*03:19L HLA-DQA1*05:01-B1*02: 01L HLA-DRB1*12:01L HLA-DRB3*01:01L HLA-DPA1*02:01-B1*13:01L HLA -DPA1*03:01-B1*105:01L HLA-DQA1*03:01-B1*03:02L HLA-DQA1*05:05-B 1*03:01L HLA-DPA1*01:02-B1*04:01L HLA-DRB1*07:01L
  REGION 1..15: note = CONT. FROM ABOVE: HLA-DRB1*16:01L HLA-DQA1*01:03-B1*06:01L HLA-D RB1*04:08L HLA-DQA1*02:01-B1*03:03L
  source 1..15: note = Severe acute respiratory syndrome coronavirus 2
DQTYHPNCVNCLDDR

SEQ ID NO: 11182 - protein, 15 aa, Severe acute respiratory syndrome-related coronavirus
  REGION 1..15: note = Table B: HLA-DQA1*05:01-B1*03:01L HLA-DRB1*04:03L HLA-DPA1*01:03-B1*03:01L HLA-DQA1*05:01-B1*02:01L HLA-DRB1*12:01L HLA-DRB1*16:01L HLA-DRB1*04:08L
  source 1..15: note = Severe acute respiratory syndrome coronavirus 2
NVLFSTVFPPTSFGP

SEQ ID NO: 11183 - protein, 11 aa, Severe acute respiratory syndrome-related coronavirus
  REGION 1..11: note = Table B: HLA-DQA1*05:01-B1*03:01L HLA-DRB1*13:03L HLA-DRB1*04:02L HLA-DQA1*01:02-B1*06:02L HLA-DRB4*03:01NL HLA-DPA1*03:01-B1*04:02L HLA-DRB1*14:01L HLA-DQA1*05:05-B1*03:19L HLA-DQA1*05:01-B1*02:01L
  REGION 1..11: note = CONT. FROM ABOVE: HLA-DRB1*12:01L HLA-DPA1*02:01-B1*13:01L HLA-D PA1*03:01-B1*105:01L HLA-DRB1*14:17L HLA-DPA1*01:02-B1*04:01L HL A-DRB1*16:01L HLA-DQA1*01:03-B1*06:01L HLA-DRB1*15:03L
  source 1..11: note = Severe acute respiratory syndrome coronavirus 2
TVFPPTSFGPL

SEQ ID NO: 11184 - protein, 17 aa, Severe acute respiratory syndrome-related coronavirus
  REGION 1..17: note = Table B: HLA-DQA1*05:01-B1*03:01L HLA-DRB1*13:02L HLA-DRB1*13:03L HLA-DRB1*04:02L HLA-DRB1*04:05L HLA-DPA1*03:01-B1*04:02L HLA-DRB1*11:02L HLA-DRB1*11:03L HLA-DRB1*14:02L HLA-DQA1*05:05-B1*03:116L
  REGION 1..17: note = CONT. FROM ABOVE: HLA-DPA1*01:03-B1*04:02L HLA-DRB1*12:01L HLA-D RB3*01:01L HLA-DPA1*02:01-B1*13:01L HLA-DPA1*03:01-B1*105:01L HL A-DQA1*05:05-B1*03:01L HLA-DPA1*01:02-B1*04:01L HLA-DRB1*04:08L HLA-DRB1*08:02L HLA-DRB1*08:03L
  source 1..17: note = Severe acute respiratory syndrome coronavirus 2
FPPTSFGPLVRKIFVDG

SEQ ID NO: 11185 - protein, 12 aa, Severe acute respiratory syndrome-related coronavirus
  REGION 1..12: note = Table B: HLA-DQA1*05:01-B1*03:01L HLA-DQA1*01:02-B1*06:02L HLA-DRB1*01:02L HLA-DPA1*03:01-B1*105:01L HLA-DQA1*03:01-B1*03:02L HLA-DPA1*01:02-B1*04:01L HLA-DRB1*16:01L HLA-DQA1*02:01-B1*03:03L
  source 1..12: note = Severe acute respiratory syndrome coronavirus 2
VVSTGYHFRELG

SEQ ID NO: 11186 - protein, 13 aa, Severe acute respiratory syndrome-related coronavirus
  REGION 1..13: note = Table B: HLA-DQA1*05:01-B1*03:01L HLA-DRB1*04:01L HLA-DRB1*04:04L HLA-DRB1*08:04L HLA-DRB1*11:04L HLA-DPA1*02:01-B1*13:01L HLA-DRB1*15:03L
  source 1..13: note = Severe acute respiratory syndrome coronavirus 2
YHFRELGVVHNQD

SEQ ID NO: 11187 - protein, 10 aa, Severe acute respiratory syndrome-related coronavirus
  REGION 1..10: note = Table B: HLA-DQA1*05:01-B1*03:01L HLA-DRB1*04:03L HLA-DRB1*13:03L HLA-DRB1*01:03L HLA-DRB1*04:02L HLA-DRB1*04:05L HLA-DRB1*01:02L HLA-DRB4*03:01NL HLA-DRB1*14:01L HLA-DQA1*01-B1*05L HLA-DRB1*12:01L HLA-DQA1*03:01-B1*03:02L
  REGION 1..10: note = CONT. FROM ABOVE: HLA-DRB1*14:54L HLA-DRB1*14:17L HLA-DPA1*01:02 -B1*04:01L HLA-DRB1*16:01L HLA-DQA1*01:03-B1*06:01L HLA-DQA1*02: 01-B1*03:03L HLA-DRB1*15:03L
  source 1..10: note = Severe acute respiratory syndrome coronavirus 2
VVHNQDVNLH

SEQ ID NO: 11188 - protein, 12 aa, Severe acute respiratory syndrome-related coronavirus
  REGION 1..12: note = Table B: HLA-DQA1*05:01-B1*03:01L HLA-DRB1*04:03L HLA-DQA1*01:02-B1*06:02L HLA-DRB1*14:01L HLA-DPA1*03:01-B1*105:01L HLA-DRB1*15:03L
  source 1..12: note = Severe acute respiratory syndrome coronavirus 2
NQDVNLHSSRLS

SEQ ID NO: 11189 - protein, 12 aa, Severe acute respiratory syndrome-related coronavirus
  REGION 1..12: note = Table B: HLA-DQA1*05:01-B1*03:01L HLA-DRB1*01:03L HLA-DQA1*01:02-B1*06:02L HLA-DRB1*01:02L HLA-DRB1*12:01L HLA-DQA1*03:01-B1*03:02L HLA-DRB1*16:01L HLA-DQA1*01:03-B1*06:01L HLA-DRB1*04:08L
  source 1..12: note = Severe acute respiratory syndrome coronavirus 2
VNLHSSRLSFKE

SEQ ID NO: 11190 - protein, 14 aa, Severe acute respiratory syndrome-related coronavirus
  REGION 1..14: note = Table B: HLA-DQA1*05:01-B1*03:01L HLA-DRB1*13:02L HLA-DRB1*01:03L HLA-DRB1*04:04L HLA-DRB1*08:04L HLA-DPA1*01:03-B1*03:01L HLA-DPA1*03:01-B1*04:02L HLA-DRB1*08:01L HLA-DRB1*11:01L HLA-DQA1*05:05-B1*03:19L
  REGION 1..14: note = CONT. FROM ABOVE: HLA-DQA1*05:01-B1*02:01L HLA-DPA1*01:03-B1*04: 01L HLA-DPA1*01:03-B1*04:02L HLA-DPA1*02:01-B1*13:01L HLA-DPA1*0 1:03-B1*02:01L HLA-DPA1*01:03-B1*104:01L HLA-DQA1*05:05-B1*03:01 L HLA-DPA1*01:02-B1*04:01L HLA-DRB1*10:01L
  REGION 1..14: note = CONT. FROM ABOVE: HLA-DQA1*01:03-B1*06:01L
  source 1..14: note = Severe acute respiratory syndrome coronavirus 2
LSFKELLVYAADPA

SEQ ID NO: 11191 - protein, 10 aa, Severe acute respiratory syndrome-related coronavirus
  REGION 1..10: note = Table B: HLA-DQA1*05:01-B1*03:01L HLA-DQA1*01:02-B1*06:02L HLA-DRB4*03:01NL HLA-DRB1*12:01L HLA-DQA1*03:01-B1*03:02L HLA-DQA1*05:05-B1*03:01L HLA-DQA1*01:03-B1*06:01L HLA-DQA1*02:01-B1*03:03L
  source 1..10: note = Severe acute respiratory syndrome coronavirus 2
AASGNLLLDK

SEQ ID NO: 11192 - protein, 12 aa, Severe acute respiratory syndrome-related coronavirus
  REGION 1..12: note = Table B: HLA-DQA1*05:01-B1*03:01L HLA-DQA1*01:02-B1*06:02L
  source 1..12: note = Severe acute respiratory syndrome coronavirus 2
ASGNLLLDKRTT

SEQ ID NO: 11193 - protein, 14 aa, Severe acute respiratory syndrome-related coronavirus
  REGION 1..14: note = Table B: HLA-DQA1*05:01-B1*03:01L HLA-DRB1*04:01L HLA-DRB1*04:05L HLA-DRB1*01:01L HLA-DRB4*03:01NL HLA-DPA1*03:01-B1*04:02L HLA-DRB1*11:02L HLA-DQA1*05:05-B1*03:19L HLA-DRB1*13:01L
  REGION 1..14: note = CONT. FROM ABOVE: HLA-DPA1*01:03-B1*04:02L HLA-DPA1*03:01-B1*105 :01L HLA-DRB1*14:17L HLA-DPA1*01:02-B1*04:01L HLA-DRB1*10:01L HL A-DRB1*08:03L
  source 1..14: note = Severe acute respiratory syndrome coronavirus 2
SGNLLLDKRTTCFS

SEQ ID NO: 11194 - protein, 11 aa, Severe acute respiratory syndrome-related coronavirus
  REGION 1..11: note = Table B: HLA-DQA1*05:01-B1*03:01L HLA-DRB1*04:02L HLA-DRB1*04:05L HLA-DQA1*01:02-B1*06:02L HLA-DRB4*03:01NL HLA-DQA1*05:01-B1*02:01L HLA-DRB1*04:10L HLA-DRB1*12:01L HLA-DRB1*14:54L HLA-DQA1*05:05-B1*03:01L HLA-DRB1*16:01L
  REGION 1..11: note = CONT. FROM ABOVE: HLA-DQA1*01:03-B1*06:01L
  source 1..11: note = Severe acute respiratory syndrome coronavirus 2
FSVAALTNNVA

SEQ ID NO: 11195 - protein, 14 aa, Severe acute respiratory syndrome-related coronavirus
  REGION 1..14: note = Table B: HLA-DQA1*05:01-B1*03:01L HLA-DRB1*13:02L HLA-DRB1*01:02L HLA-DRB1*14:01L HLA-DRB1*12:01L HLA-DRB1*15:03L
  source 1..14: note = Severe acute respiratory syndrome coronavirus 2
AALTNNVAFQTVKP

SEQ ID NO: 11196 - protein, 11 aa, Severe acute respiratory syndrome-related coronavirus
  REGION 1..11: note = Table B: HLA-DQA1*05:01-B1*03:01L HLA-DQA1*01:02-B1*06:02L HLA-DPA1*03:01-B1*105:01L HLA-DQA1*01:03-B1*06:01L
  source 1..11: note = Severe acute respiratory syndrome coronavirus 2
TVKPGNFNKDF

SEQ ID NO: 11197 - protein, 17 aa, Severe acute respiratory syndrome-related coronavirus
  REGION 1..17: note = Table B: HLA-DQA1*05:01-B1*03:01L HLA-DRB1*04:01L HLA-DRB3*02:01L HLA-DRB1*03:01L HLA-DRB1*11:02L HLA-DQA1*05:05-B1*03:19L HLA-DQA1*05:05-B1*03:01L HLA-DRB1*07:01L HLA-DRB1*10:01L HLA-DRB1*08:02L
  source 1..17: note = Severe acute respiratory syndrome coronavirus 2
KPGNFNKDFYDFAVSKG

SEQ ID NO: 11198 - protein, 12 aa, Severe acute respiratory syndrome-related coronavirus
  REGION 1..12: note = Table B: HLA-DQA1*05:01-B1*03:01L HLA-DRB1*13:02L HLA-DRB1*01:03L HLA-DRB1*04:05L HLA-DQA1*01:02-B1*06:02L HLA-DRB1*14:01L HLA-DRB1*08:01L HLA-DQA1*01-B1*05L HLA-DRB1*12:01L HLA-DPA1*03:01-B1*105:01L
  REGION 1..12: note = CONT. FROM ABOVE: HLA-DQA1*05:05-B1*03:01L HLA-DRB1*07:01L HLA-D RB1*04:08L HLA-DRB1*15:03L
  source 1..12: note = Severe acute respiratory syndrome coronavirus 2
DFAVSKGFFKEG

SEQ ID NO: 11199 - protein, 14 aa, Severe acute respiratory syndrome-related coronavirus
  REGION 1..14: note = Table B: HLA-DQA1*05:01-B1*03:01L HLA-DPA1*03:01-B1*105:01L HLA-DRB1*15:03L
  source 1..14: note = Severe acute respiratory syndrome coronavirus 2
AVSKGFFKEGSSVE

SEQ ID NO: 11200 - protein, 13 aa, Severe acute respiratory syndrome-related coronavirus
  REGION 1..13: note = Table B: HLA-DQA1*05:01-B1*03:01L HLA-DRB1*04:04L HLA-DQA1*01:02-B1*06:02L HLA-DRB1*01:01L HLA-DRB3*02:01L HLA-DPA1*01:03-B1*03:01L HLA-DPA1*03:01-B1*04:02L HLA-DRB1*03:01L HLA-DRB1*11:04L HLA-DRB1*11:01L HLA-DRB5*01:01L
  REGION 1..13: note = CONT. FROM ABOVE: HLA-DRB4*01:01L HLA-DRB1*04:10L HLA-DRB1*09:01 L HLA-DRB1*12:02L HLA-DRB3*01:01L HLA-DPA1*03:01-B1*105:01L HLA- DQA1*05:05-B1*03:01L HLA-DRB1*08:03L HLA-DQA1*02:01-B1*03:03L
  source 1..13: note = Severe acute respiratory syndrome coronavirus 2
HFFFAQDGNAAIS

SEQ ID NO: 11201 - protein, 12 aa, Severe acute respiratory syndrome-related coronavirus
  REGION 1..12: note = Table B: HLA-DQA1*05:01-B1*03:01L HLA-DRB1*04:01L HLA-DRB1*04:04L HLA-DRB1*04:05L HLA-DRB1*01:01L HLA-DRB1*01:02L HLA-DRB1*08:04L HLA-DRB3*02:01L HLA-DPA1*01:03-B1*03:01L HLA-DRB1*11:04L HLA-DRB1*11:01L HLA-DRB4*01:01L HLA-DRB1*04:10L
  REGION 1..12: note = CONT. FROM ABOVE: HLA-DRB1*12:02L HLA-DRB3*01:01L HLA-DPA1*03:01 -B1*105:01L HLA-DQA1*03:01-B1*03:02L HLA-DQA1*05:05-B1*03:01L HL A-DQA1*02:01-B1*03:03L HLA-DRB1*15:03L
  source 1..12: note = Severe acute respiratory syndrome coronavirus 2
FFAQDGNAAISD

SEQ ID NO: 11202 - protein, 11 aa, Severe acute respiratory syndrome-related coronavirus
  REGION 1..11: note = Table B: HLA-DQA1*05:01-B1*03:01L HLA-DRB1*13:03L HLA-DRB1*01:03L HLA-DQA1*01:02-B1*06:02L HLA-DRB1*08:77L HLA-DPA1*01:03-B1*03:01L HLA-DPA1*03:01-B1*04:02L HLA-DRB1*03:01L HLA-DRB1*11:02L HLA-DRB1*14:02L
  REGION 1..11: note = CONT. FROM ABOVE: HLA-DQA1*01-B1*05L HLA-DQA1*05:01-B1*02:01L HL A-DRB4*01:01L HLA-DPA1*01:03-B1*04:01L HLA-DPA1*01:03-B1*04:02L HLA-DRB1*12:01L HLA-DPA1*01:03-B1*104:01L HLA-DRB1*10:01L HLA-DR B1*16:01L HLA-DRB1*08:02L HLA-DQA1*02:01-B1*03:03L
  REGION 1..11: note = CONT. FROM ABOVE: HLA-DRB1*15:03L
  source 1..11: note = Severe acute respiratory syndrome coronavirus 2
AQDGNAAISDY

SEQ ID NO: 11203 - protein, 13 aa, Severe acute respiratory syndrome-related coronavirus
  REGION 1..13: note = Table B: HLA-DQA1*05:01-B1*03:01L HLA-DRB1*01:03L HLA-DRB1*04:05L HLA-DQA1*01:01-B1*05:01L HLA-DPA1*02:01-B1*13:01L HLA-DRB1*04:08L HLA-DRB1*15:03L
  source 1..13: note = Severe acute respiratory syndrome coronavirus 2
DGNAAISDYDYYR

SEQ ID NO: 11204 - protein, 10 aa, Severe acute respiratory syndrome-related coronavirus
  REGION 1..10: note = Table B: HLA-DQA1*05:01-B1*03:01L HLA-DRB1*13:03L HLA-DRB1*01:03L HLA-DQA1*01:02-B1*06:02M HLA-DRB4*03:01NL HLA-DRB1*08:77M HLA-DPA1*01:03-B1*03:01M HLA-DPA1*03:01-B1*04:02L HLA-DRB1*03:01L HLA-DRB1*11:02M
  REGION 1..10: note = CONT. FROM ABOVE: HLA-DRB1*14:02L HLA-DQA1*01-B1*05M HLA-DQA1*05 :05-B1*03:19H HLA-DQA1*05:01-B1*02:01M HLA-DRB4*01:01L HLA-DPA1* 01:03-B1*04:01L HLA-DQA1*05:05-B1*03:116L HLA-DPA1*01:03-B1*04:0 2L HLA-DRB1*12:01L HLA-DPA1*02:01-B1*13:01L
  REGION 1..10: note = CONT. FROM ABOVE: HLA-DPA1*03:01-B1*105:01L HLA-DPA1*01:03-B1*10 4:01M HLA-DRB1*10:01L HLA-DRB1*16:01M HLA-DRB1*08:02L HLA-DQA1*0 2:01-B1*03:03L HLA-DRB1*15:03L
  source 1..10: note = Severe acute respiratory syndrome coronavirus 2
AISDYDYYRY

SEQ ID NO: 11205 - protein, 12 aa, Severe acute respiratory syndrome-related coronavirus
  REGION 1..12: note = Table B: HLA-DQA1*05:01-B1*03:01L HLA-DRB1*13:02L HLA-DRB1*01:03L HLA-DQA1*01:02-B1*06:02L HLA-DRB1*01:02L HLA-DPA1*01:03-B1*03:01L HLA-DPA1*03:01-B1*04:02L HLA-DRB1*14:01L HLA-DRB1*14:02L HLA-DQA1*05:05-B1*03:19L
  REGION 1..12: note = CONT. FROM ABOVE: HLA-DQA1*05:01-B1*02:01L HLA-DRB1*12:01L HLA-D PA1*02:01-B1*13:01L HLA-DPA1*03:01-B1*105:01L HLA-DQA1*05:05-B1* 03:01L HLA-DRB1*15:03L
  source 1..12: note = Severe acute respiratory syndrome coronavirus 2
DYYRYNLPTMCD

SEQ ID NO: 11206 - protein, 12 aa, Severe acute respiratory syndrome-related coronavirus
  REGION 1..12: note = Table B: HLA-DQA1*05:01-B1*03:01L HLA-DRB1*13:02L HLA-DRB1*01:03L HLA-DRB1*04:05L HLA-DQA1*01:02-B1*06:02L HLA-DRB1*01:02L HLA-DPA1*01:03-B1*03:01L HLA-DPA1*03:01-B1*04:02L HLA-DRB1*14:01L HLA-DRB1*11:04L
  REGION 1..12: note = CONT. FROM ABOVE: HLA-DRB1*08:01L HLA-DRB1*11:01L HLA-DPA1*01:03 -B1*04:02L HLA-DRB1*12:01L HLA-DRB3*01:01L HLA-DPA1*02:01-B1*13: 01L HLA-DPA1*03:01-B1*105:01L HLA-DQA1*03:01-B1*03:02L HLA-DQA1* 05:05-B1*03:01L HLA-DPA1*01:02-B1*04:01L HLA-DRB1*16:01L
  REGION 1..12: note = CONT. FROM ABOVE: HLA-DQA1*01:03-B1*06:01L HLA-DRB1*04:08L HLA-D QA1*02:01-B1*03:03L HLA-DRB1*15:03L
  source 1..12: note = Severe acute respiratory syndrome coronavirus 2
YRYNLPTMCDIR

SEQ ID NO: 11207 - protein, 10 aa, Severe acute respiratory syndrome-related coronavirus
  REGION 1..10: note = Table B: HLA-DQA1*05:01-B1*03:01L HLA-DRB1*13:03L HLA-DQA1*01:02-B1*06:02M HLA-DRB1*08:77L HLA-DPA1*01:03-B1*03:01L HLA-DRB1*03:01L HLA-DRB1*14:02L HLA-DQA1*01-B1*05L HLA-DQA1*05:05-B1*03:19L
  REGION 1..10: note = CONT. FROM ABOVE: HLA-DQA1*05:01-B1*02:01L HLA-DRB4*01:01L HLA-D PA1*01:03-B1*04:01M HLA-DPA1*02:01-B1*13:01L HLA-DPA1*03:01-B1*1 05:01M HLA-DQA1*02:01-B1*03:03L HLA-DRB1*15:03L
  source 1..10: note = Severe acute respiratory syndrome coronavirus 2
EVVDKYFDCY

SEQ ID NO: 11208 - protein, 10 aa, Severe acute respiratory syndrome-related coronavirus
  REGION 1..10: note = Table B: HLA-DQA1*05:01-B1*03:01L HLA-DRB1*01:03L HLA-DQA1*01:02-B1*06:02L HLA-DPA1*01:03-B1*03:01L HLA-DRB1*03:01L HLA-DRB1*14:02L HLA-DQA1*05:05-B1*03:19L HLA-DQA1*05:01-B1*02:01L HLA-DPA1*01:03-B1*04:01L
  REGION 1..10: note = CONT. FROM ABOVE: HLA-DPA1*01:03-B1*04:02L HLA-DPA1*02:01-B1*13: 01L HLA-DPA1*03:01-B1*105:01L HLA-DQA1*01:03-B1*06:01L HLA-DQA1* 02:01-B1*03:03L HLA-DRB1*15:03L
  source 1..10: note = Severe acute respiratory syndrome coronavirus 2
KSAGFPFNKW

SEQ ID NO: 11209 - protein, 14 aa, Severe acute respiratory syndrome-related coronavirus
  REGION 1..14: note = Table B: HLA-DQA1*05:01-B1*03:01L HLA-DRB1*04:05L HLA-DRB1*08:04L HLA-DRB1*11:04L HLA-DRB1*11:01L HLA-DQA1*05:05-B1*03:19L HLA-DRB3*01:01L HLA-DQA1*05:05-B1*03:01L
  source 1..14: note = Severe acute respiratory syndrome coronavirus 2
FPFNKWGKARLYYD

SEQ ID NO: 11210 - protein, 15 aa, Severe acute respiratory syndrome-related coronavirus
  REGION 1..15: note = Table B: HLA-DQA1*05:01-B1*03:01L HLA-DRB3*02:01L HLA-DRB1*14:01L HLA-DRB1*14:02L HLA-DQA1*01:01-B1*05:01L HLA-DPA1*01:03-B1*04:01L HLA-DPA1*01:03-B1*04:02L HLA-DRB3*01:01L HLA-DPA1*01:03-B1*104:01L
  REGION 1..15: note = CONT. FROM ABOVE: HLA-DQA1*05:05-B1*03:01L HLA-DRB1*10:01L
  source 1..15: note = Severe acute respiratory syndrome coronavirus 2
GKARLYYDSMSYEDQ

SEQ ID NO: 11211 - protein, 13 aa, Severe acute respiratory syndrome-related coronavirus
  REGION 1..13: note = Table B: HLA-DQA1*05:01-B1*03:01L
  source 1..13: note = Severe acute respiratory syndrome coronavirus 2
EDQDALFAYTKRN

SEQ ID NO: 11212 - protein, 13 aa, Severe acute respiratory syndrome-related coronavirus
  REGION 1..13: note = Table B: HLA-DQA1*05:01-B1*03:01L HLA-DRB1*13:02L HLA-DRB1*13:03L HLA-DRB1*04:02L HLA-DRB1*04:05L HLA-DQA1*01:02-B1*06:02L HLA-DRB3*02:01L HLA-DRB1*11:03L HLA-DRB1*11:04L HLA-DRB1*14:02L HLA-DPA1*01:03-B1*04:01L
  REGION 1..13: note = CONT. FROM ABOVE: HLA-DPA1*01:03-B1*04:02L HLA-DRB3*01:01L HLA-D PA1*02:01-B1*13:01L HLA-DPA1*03:01-B1*105:01L HLA-DRB1*08:03L HL A-DQA1*02:01-B1*03:03L
  source 1..13: note = Severe acute respiratory syndrome coronavirus 2
DALFAYTKRNVIP

SEQ ID NO: 11213 - protein, 12 aa, Severe acute respiratory syndrome-related coronavirus
  REGION 1..12: note = Table B: HLA-DQA1*05:01-B1*03:01L HLA-DRB1*04:03L HLA-DRB1*01:03L HLA-DRB1*04:05L HLA-DQA1*01:02-B1*06:02L HLA-DRB1*01:02L HLA-DRB1*14:01L HLA-DRB1*08:01L HLA-DRB1*12:01L HLA-DPA1*02:01-B1*13:01L HLA-DRB1*16:01L
  source 1..12: note = Severe acute respiratory syndrome coronavirus 2
YTKRNVIPTITQ

SEQ ID NO: 11214 - protein, 10 aa, Severe acute respiratory syndrome-related coronavirus
  REGION 1..10: note = Table B: HLA-DQA1*05:01-B1*03:01L HLA-DQA1*01:02-B1*06:02L HLA-DRB1*08:77L HLA-DPA1*01:03-B1*03:01L HLA-DRB1*03:01L HLA-DRB1*11:02L HLA-DQA1*01-B1*05L HLA-DQA1*05:05-B1*03:19M HLA-DQA1*05:01-B1*02:01L HLA-DPA1*01:03-B1*04:01L
  REGION 1..10: note = CONT. FROM ABOVE: HLA-DRB1*12:01L HLA-DPA1*01:03-B1*104:01L HLA- DRB1*16:01L HLA-DQA1*02:01-B1*03:03L
  source 1..10: note = Severe acute respiratory syndrome coronavirus 2
PTITQMNLKY

SEQ ID NO: 11215 - protein, 14 aa, Severe acute respiratory syndrome-related coronavirus
  REGION 1..14: note = Table B: HLA-DQA1*05:01-B1*03:01L HLA-DRB1*13:02L HLA-DRB1*01:03L HLA-DRB1*04:02L HLA-DRB1*08:04L HLA-DRB1*14:01L HLA-DPA1*03:01-B1*105:01L HLA-DQA1*03:01-B1*03:02L HLA-DQA1*05:05-B1*03:01L HLA-DRB1*16:01L HLA-DRB1*04:08L
  REGION 1..14: note = CONT. FROM ABOVE: HLA-DRB1*15:03L
  source 1..14: note = Severe acute respiratory syndrome coronavirus 2
ITQMNLKYAISAKN

SEQ ID NO: 11216 - protein, 12 aa, Severe acute respiratory syndrome-related coronavirus
  REGION 1..12: note = Table B: HLA-DQA1*05:01-B1*03:01L HLA-DRB1*13:02L HLA-DRB1*04:02L HLA-DRB1*04:04L HLA-DRB1*04:05M HLA-DQA1*01:02-B1*06:02L HLA-DRB1*01:01L HLA-DPA1*01:03-B1*03:01L HLA-DRB1*11:01L HLA-DRB1*04:10L
  REGION 1..12: note = CONT. FROM ABOVE: HLA-DPA1*02:01-B1*13:01L HLA-DPA1*01:03-B1*104 :01L HLA-DPA1*01:02-B1*04:01L HLA-DRB1*07:01L HLA-DQA1*01:03-B1* 06:01L HLA-DRB1*15:03L
  source 1..12: note = Severe acute respiratory syndrome coronavirus 2
MNLKYAISAKNR

SEQ ID NO: 11217 - protein, 12 aa, Severe acute respiratory syndrome-related coronavirus
  REGION 1..12: note = Table B: HLA-DQA1*05:01-B1*03:01L HLA-DRB1*13:02L HLA-DRB1*04:04L HLA-DQA1*01:02-B1*06:02L HLA-DRB4*03:01NL HLA-DRB1*08:04L HLA-DRB1*11:04L HLA-DRB1*11:01L HLA-DRB1*04:10L HLA-DRB3*01:01L HLA-DPA1*02:01-B1*13:01L HLA-DRB1*14:54L
  REGION 1..12: note = CONT. FROM ABOVE: HLA-DPA1*01:02-B1*04:01L HLA-DRB1*15:03L
  source 1..12: note = Severe acute respiratory syndrome coronavirus 2
NLKYAISAKNRA

SEQ ID NO: 11218 - protein, 10 aa, Severe acute respiratory syndrome-related coronavirus
  REGION 1..10: note = Table B: HLA-DQA1*05:01-B1*03:01L HLA-DRB1*04:03L HLA-DRB1*13:02L HLA-DRB1*13:03L HLA-DRB1*01:03L HLA-DRB1*04:02L HLA-DRB1*04:05L HLA-DQA1*01:02-B1*06:02L HLA-DRB1*01:01L HLA-DRB1*01:02L HLA-DRB4*03:01NL HLA-DRB1*14:01L HLA-DRB1*11:04L
  REGION 1..10: note = CONT. FROM ABOVE: HLA-DRB1*08:01L HLA-DRB1*11:01L HLA-DRB1*12:01 L HLA-DRB3*01:01L HLA-DQA1*03:01-B1*03:02L HLA-DRB1*14:54L HLA-D RB1*14:17L HLA-DRB1*16:01L HLA-DRB1*04:08L HLA-DQA1*02:01-B1*03: 03L
  source 1..10: note = Severe acute respiratory syndrome coronavirus 2
YAISAKNRAR

SEQ ID NO: 11219 - protein, 14 aa, Severe acute respiratory syndrome-related coronavirus
  REGION 1..14: note = Table B: HLA-DQA1*05:01-B1*03:01L HLA-DQA1*02:01-B1*03:03L
  source 1..14: note = Severe acute respiratory syndrome coronavirus 2
ARTVAGVSICSTMT

SEQ ID NO: 11220 - protein, 12 aa, Severe acute respiratory syndrome-related coronavirus
  REGION 1..12: note = Table B: HLA-DQA1*05:01-B1*03:01L HLA-DRB1*04:05L HLA-DQA1*05:05-B1*03:19L HLA-DRB1*04:10L HLA-DPA1*03:01-B1*105:01L
  source 1..12: note = Severe acute respiratory syndrome coronavirus 2
GVSICSTMTNRQ

SEQ ID NO: 11221 - protein, 16 aa, Severe acute respiratory syndrome-related coronavirus
  REGION 1..16: note = Table B: HLA-DQA1*05:01-B1*03:01L HLA-DRB1*01:01L HLA-DPA1*01:03-B1*03:01L HLA-DQA1*03:01-B1*03:02L HLA-DPA1*01:03-B1*104:01L HLA-DRB1*07:01L
  source 1..16: note = Severe acute respiratory syndrome coronavirus 2
TNRQFHQKLLKSIAAT

SEQ ID NO: 11222 - protein, 13 aa, Severe acute respiratory syndrome-related coronavirus
  REGION 1..13: note = Table B: HLA-DQA1*05:01-B1*03:01L HLA-DPA1*02:01-B1*13:01L
  source 1..13: note = Severe acute respiratory syndrome coronavirus 2
HQKLLKSIAATRG

SEQ ID NO: 11223 - protein, 12 aa, Severe acute respiratory syndrome-related coronavirus
  REGION 1..12: note = Table B: HLA-DQA1*05:01-B1*03:01L HLA-DRB1*01:03L HLA-DQA1*01:02-B1*06:02L HLA-DRB1*01:02L HLA-DPA1*03:01-B1*105:01L HLA-DQA1*05:05-B1*03:01L HLA-DRB1*16:01L HLA-DQA1*01:03-B1*06:01L HLA-DRB1*04:08L
  REGION 1..12: note = CONT. FROM ABOVE: HLA-DQA1*02:01-B1*03:03L HLA-DRB1*15:03L
  source 1..12: note = Severe acute respiratory syndrome coronavirus 2
LLKSIAATRGAT

SEQ ID NO: 11224 - protein, 11 aa, Severe acute respiratory syndrome-related coronavirus
  REGION 1..11: note = Table B: HLA-DQA1*05:01-B1*03:01L HLA-DQA1*03:01-B1*03:02L HLA-DQA1*02:01-B1*03:03L
  source 1..11: note = Severe acute respiratory syndrome coronavirus 2
AATRGATVVIG

SEQ ID NO: 11225 - protein, 12 aa, Severe acute respiratory syndrome-related coronavirus
  REGION 1..12: note = Table B: HLA-DQA1*05:01-B1*03:01L HLA-DQA1*01:02-B1*06:02L HLA-DPA1*01:03-B1*03:01L HLA-DPA1*03:01-B1*04:02L HLA-DQA1*05:05-B1*03:19L HLA-DQA1*05:01-B1*02:01L HLA-DRB1*12:01L HLA-DPA1*03:01-B1*105:01L
  REGION 1..12: note = CONT. FROM ABOVE: HLA-DQA1*05:05-B1*03:01L HLA-DPA1*01:02-B1*04: 01L HLA-DQA1*01:03-B1*06:01L HLA-DRB1*15:03L
  source 1..12: note = Severe acute respiratory syndrome coronavirus 2
VVIGTSKFYGGW

SEQ ID NO: 11226 - protein, 11 aa, Severe acute respiratory syndrome-related coronavirus
  REGION 1..11: note = Table B: HLA-DQA1*05:01-B1*03:01L HLA-DQA1*01:02-B1*06:02L HLA-DPA1*03:01-B1*105:01L HLA-DQA1*05:05-B1*03:01L HLA-DQA1*01:03-B1*06:01L HLA-DQA1*02:01-B1*03:03L
  source 1..11: note = Severe acute respiratory syndrome coronavirus 2
IGTSKFYGGWH

SEQ ID NO: 11227 - protein, 10 aa, Severe acute respiratory syndrome-related coronavirus
  REGION 1..10: note = Table B: HLA-DQA1*05:01-B1*03:01L HLA-DRB1*13:03L HLA-DQA1*01:02-B1*06:02M HLA-DRB1*08:77L HLA-DPA1*01:03-B1*03:01L HLA-DPA1*03:01-B1*04:02L HLA-DRB1*03:01L HLA-DRB1*14:02L HLA-DQA1*01-B1*05L
  REGION 1..10: note = CONT. FROM ABOVE: HLA-DQA1*05:05-B1*03:19M HLA-DQA1*05:01-B1*02: 01L HLA-DRB4*01:01L HLA-DPA1*01:03-B1*04:01L HLA-DQA1*05:05-B1*0 3:116L HLA-DPA1*02:01-B1*13:01L HLA-DPA1*03:01-B1*105:01L HLA-DP A1*01:03-B1*104:01L HLA-DRB1*10:01L HLA-DRB1*16:01L
  REGION 1..10: note = CONT. FROM ABOVE: HLA-DQA1*01:03-B1*06:01L HLA-DQA1*02:01-B1*03: 03L HLA-DRB1*15:03L
  source 1..10: note = Severe acute respiratory syndrome coronavirus 2
DVENPHLMGW

SEQ ID NO: 11228 - protein, 11 aa, Severe acute respiratory syndrome-related coronavirus
  REGION 1..11: note = Table B: HLA-DQA1*05:01-B1*03:01L HLA-DQA1*01:02-B1*06:02L HLA-DRB1*08:77L HLA-DPA1*01:03-B1*03:01L HLA-DRB1*03:01L HLA-DQA1*05:01-B1*02:01L HLA-DRB4*01:01L HLA-DPA1*01:03-B1*04:01L HLA-DPA1*01:03-B1*104:01L
  REGION 1..11: note = CONT. FROM ABOVE: HLA-DRB1*16:01L
  source 1..11: note = Severe acute respiratory syndrome coronavirus 2
VENPHLMGWDY

SEQ ID NO: 11229 - protein, 16 aa, Severe acute respiratory syndrome-related coronavirus
  REGION 1..16: note = Table B: HLA-DQA1*05:01-B1*03:01L HLA-DRB1*04:01L HLA-DRB1*14:02L HLA-DRB1*08:01L HLA-DRB1*11:01L HLA-DQA1*01-B1*05L HLA-DPA1*02:01-B1*13:01L HLA-DQA1*05:05-B1*03:01L HLA-DRB1*10:01L
  source 1..16: note = Severe acute respiratory syndrome coronavirus 2
MPNMLRIMASLVLARK

SEQ ID NO: 11230 - protein, 12 aa, Severe acute respiratory syndrome-related coronavirus
  REGION 1..12: note = Table B: HLA-DQA1*05:01-B1*03:01L HLA-DRB1*01:02L
  source 1..12: note = Severe acute respiratory syndrome coronavirus 2
IMASLVLARKHT

SEQ ID NO: 11231 - protein, 13 aa, Severe acute respiratory syndrome-related coronavirus
  REGION 1..13: note = Table B: HLA-DQA1*05:01-B1*03:01L HLA-DPA1*01:03-B1*03:01L HLA-DQA1*05:05-B1*03:19L
  source 1..13: note = Severe acute respiratory syndrome coronavirus 2
RLANECAQVLSEM

SEQ ID NO: 11232 - protein, 14 aa, Severe acute respiratory syndrome-related coronavirus
  REGION 1..14: note = Table B: HLA-DQA1*05:01-B1*03:01L HLA-DRB1*01:02L HLA-DPA1*03:01-B1*105:01L HLA-DQA1*05:05-B1*03:01L HLA-DQA1*02:01-B1*03:03L HLA-DRB1*15:03L
  source 1..14: note = Severe acute respiratory syndrome coronavirus 2
EMVMCGGSLYVKPG

SEQ ID NO: 11233 - protein, 12 aa, Severe acute respiratory syndrome-related coronavirus
  REGION 1..12: note = Table B: HLA-DQA1*05:01-B1*03:01L HLA-DQA1*05:05-B1*03:19L HLA-DQA1*05:05-B1*03:01L
  source 1..12: note = Severe acute respiratory syndrome coronavirus 2
SLYVKPGGTSSG

SEQ ID NO: 11234 - protein, 10 aa, Severe acute respiratory syndrome-related coronavirus
  REGION 1..10: note = Table B: HLA-DQA1*05:01-B1*03:01L HLA-DRB1*13:03L HLA-DRB1*01:03L HLA-DQA1*01:02-B1*06:02L HLA-DRB1*08:77L HLA-DPA1*01:03-B1*03:01L HLA-DRB1*03:01L HLA-DRB1*14:02L HLA-DQA1*01-B1*05L HLA-DQA1*05:05-B1*03:19L
  REGION 1..10: note = CONT. FROM ABOVE: HLA-DQA1*05:01-B1*02:01L HLA-DPA1*01:03-B1*04: 01L HLA-DPA1*01:03-B1*04:02L HLA-DPA1*03:01-B1*105:01L HLA-DRB1* 10:01L HLA-DRB1*16:01L HLA-DQA1*02:01-B1*03:03L HLA-DRB1*15:03L
  source 1..10: note = Severe acute respiratory syndrome coronavirus 2
TSSGDATTAY

SEQ ID NO: 11235 - protein, 12 aa, Severe acute respiratory syndrome-related coronavirus
  REGION 1..12: note = Table B: HLA-DQA1*05:01-B1*03:01L HLA-DRB1*04:03L HLA-DQA1*01:02-B1*06:02L HLA-DRB1*01:02L HLA-DQA1*05:05-B1*03:19L HLA-DRB1*12:01L HLA-DPA1*03:01-B1*105:01L HLA-DQA1*05:05-B1*03:01L
  REGION 1..12: note = CONT. FROM ABOVE: HLA-DRB1*14:17L HLA-DRB1*16:01L HLA-DQA1*01:03 -B1*06:01L HLA-DRB1*04:08L HLA-DQA1*02:01-B1*03:03L HLA-DRB1*15: 03L
  source 1..12: note = Severe acute respiratory syndrome coronavirus 2
SVFNICQAVTAN

SEQ ID NO: 11236 - protein, 11 aa, Severe acute respiratory syndrome-related coronavirus
  REGION 1..11: note = Table B: HLA-DQA1*05:01-B1*03:01L HLA-DRB1*04:03L HLA-DQA1*01:02-B1*06:02L HLA-DQA1*03:01-B1*03:02L HLA-DQA1*05:05-B1*03:01L HLA-DRB1*14:17L HLA-DQA1*01:03-B1*06:01L HLA-DQA1*02:01-B1*03:03L
  source 1..11: note = Severe acute respiratory syndrome coronavirus 2
NICQAVTANVN

SEQ ID NO: 11237 - protein, 14 aa, Severe acute respiratory syndrome-related coronavirus
  REGION 1..14: note = Table B: HLA-DQA1*05:01-B1*03:01L HLA-DRB1*04:02L HLA-DRB1*01:02L HLA-DQA1*05:05-B1*03:19L HLA-DPA1*03:01-B1*105:01L HLA-DRB1*14:54L
  source 1..14: note = Severe acute respiratory syndrome coronavirus 2
AVTANVNALLSTDG

SEQ ID NO: 11238 - protein, 14 aa, Severe acute respiratory syndrome-related coronavirus
  REGION 1..14: note = Table B: HLA-DQA1*05:01-B1*03:01L HLA-DQA1*05:05-B1*03:19L HLA-DPA1*03:01-B1*105:01L
  source 1..14: note = Severe acute respiratory syndrome coronavirus 2
VTANVNALLSTDGN

SEQ ID NO: 11239 - protein, 14 aa, Severe acute respiratory syndrome-related coronavirus
  REGION 1..14: note = Table B: HLA-DQA1*05:01-B1*03:01L HLA-DRB1*01:03L HLA-DRB1*04:04L HLA-DRB1*01:02L HLA-DRB1*12:01L HLA-DPA1*03:01-B1*105:01L HLA-DQA1*05:05-B1*03:01L HLA-DRB1*16:01L HLA-DRB1*04:08L
  source 1..14: note = Severe acute respiratory syndrome coronavirus 2
TANVNALLSTDGNK

SEQ ID NO: 11240 - protein, 11 aa, Severe acute respiratory syndrome-related coronavirus
  REGION 1..11: note = Table B: HLA-DQA1*05:01-B1*03:01L HLA-DRB1*01:03L HLA-DRB1*04:05L HLA-DRB1*14:01L HLA-DRB1*14:54L HLA-DPA1*01:02-B1*04:01L HLA-DQA1*01:03-B1*06:01L
  source 1..11: note = Severe acute respiratory syndrome coronavirus 2
LSTDGNKIADK

SEQ ID NO: 11241 - protein, 10 aa, Severe acute respiratory syndrome-related coronavirus
  REGION 1..10: note = Table B: HLA-DQA1*05:01-B1*03:01L HLA-DRB1*13:03L HLA-DRB1*01:03L HLA-DQA1*01:02-B1*06:02L HLA-DRB1*08:77L HLA-DPA1*01:03-B1*03:01L HLA-DPA1*03:01-B1*04:02L HLA-DRB1*03:01L HLA-DRB1*11:02L HLA-DQA1*01-B1*05L
  REGION 1..10: note = CONT. FROM ABOVE: HLA-DQA1*05:05-B1*03:19M HLA-DQA1*05:01-B1*02: 01M HLA-DRB4*01:01L HLA-DPA1*01:03-B1*04:01L HLA-DPA1*01:03-B1*0 4:02L HLA-DRB1*12:01L HLA-DPA1*01:03-B1*104:01L HLA-DRB1*10:01L HLA-DRB1*16:01M HLA-DRB1*15:03L
  source 1..10: note = Severe acute respiratory syndrome coronavirus 2
TDGNKIADKY

SEQ ID NO: 11242 - protein, 16 aa, Severe acute respiratory syndrome-related coronavirus
  REGION 1..16: note = Table B: HLA-DQA1*05:01-B1*03:01L HLA-DRB1*01:01L HLA-DRB1*03:01L HLA-DPA1*03:01-B1*105:01L
  source 1..16: note = Severe acute respiratory syndrome coronavirus 2
DGNKIADKYVRNLQHR

SEQ ID NO: 11243 - protein, 11 aa, Severe acute respiratory syndrome-related coronavirus
  REGION 1..11: note = Table B: HLA-DQA1*05:01-B1*03:01L HLA-DRB1*13:02L HLA-DRB1*13:03L HLA-DRB1*04:05L HLA-DRB1*14:01L HLA-DRB3*01:01L HLA-DRB1*07:01L HLA-DRB1*04:08L HLA-DRB1*15:03L
  source 1..11: note = Severe acute respiratory syndrome coronavirus 2
DKYVRNLQHRL

SEQ ID NO: 11244 - protein, 10 aa, Severe acute respiratory syndrome-related coronavirus
  REGION 1..10: note = Table B: HLA-DQA1*05:01-B1*03:01L HLA-DRB1*13:02L HLA-DRB1*01:03L HLA-DQA1*01:02-B1*06:02L HLA-DRB1*01:02L HLA-DPA1*01:03-B1*03:01L HLA-DPA1*03:01-B1*04:02L HLA-DRB1*03:01L HLA-DRB1*14:01L HLA-DRB1*14:02L HLA-DRB1*11:01L
  REGION 1..10: note = CONT. FROM ABOVE: HLA-DQA1*05:05-B1*03:19L HLA-DQA1*05:01-B1*02: 01L HLA-DPA1*01:03-B1*04:01L HLA-DPA1*01:03-B1*04:02L HLA-DRB1*1 2:01L HLA-DPA1*02:01-B1*13:01L HLA-DPA1*03:01-B1*105:01L HLA-DPA 1*01:02-B1*04:01L HLA-DRB1*16:01L HLA-DQA1*01:03-B1*06:01L
  REGION 1..10: note = CONT. FROM ABOVE: HLA-DQA1*02:01-B1*03:03L HLA-DRB1*15:03L
  source 1..10: note = Severe acute respiratory syndrome coronavirus 2
YVRNLQHRLY

SEQ ID NO: 11245 - protein, 16 aa, Severe acute respiratory syndrome-related coronavirus
  REGION 1..16: note = Table B: HLA-DQA1*05:01-B1*03:01L HLA-DRB1*01:01L HLA-DPA1*03:01-B1*04:02L HLA-DRB1*14:02L HLA-DPA1*01:03-B1*04:01L HLA-DPA1*03:01-B1*105:01L HLA-DQA1*03:01-B1*03:02L HLA-DPA1*01:03-B1*02:01L
  REGION 1..16: note = CONT. FROM ABOVE: HLA-DPA1*01:03-B1*104:01L HLA-DQA1*01:03-B1*06 :01L
  source 1..16: note = Severe acute respiratory syndrome coronavirus 2
LQHRLYECLYRNRDVD

SEQ ID NO: 11246 - protein, 10 aa, Severe acute respiratory syndrome-related coronavirus
  REGION 1..10: note = Table B: HLA-DQA1*05:01-B1*03:01L HLA-DRB1*13:03L HLA-DQA1*01:02-B1*06:02L HLA-DRB1*08:77L HLA-DPA1*01:03-B1*03:01M HLA-DRB1*03:01L HLA-DRB1*11:02L HLA-DQA1*01-B1*05L HLA-DQA1*05:05-B1*03:19M
  REGION 1..10: note = CONT. FROM ABOVE: HLA-DQA1*05:01-B1*02:01M HLA-DRB4*01:01L HLA-D PA1*01:03-B1*04:01L HLA-DQA1*05:05-B1*03:116L HLA-DRB1*12:01L HL A-DPA1*01:03-B1*104:01M HLA-DRB1*10:01L HLA-DRB1*16:01M HLA-DRB1 *15:03L
  source 1..10: note = Severe acute respiratory syndrome coronavirus 2
VDTDFVNEFY

SEQ ID NO: 11247 - protein, 13 aa, Severe acute respiratory syndrome-related coronavirus
  REGION 1..13: note = Table B: HLA-DQA1*05:01-B1*03:01L HLA-DRB1*13:02L HLA-DRB1*08:04L HLA-DRB1*14:01L HLA-DRB1*11:04L HLA-DRB1*11:01L HLA-DRB3*01:01L HLA-DPA1*02:01-B1*13:01L HLA-DQA1*02:01-B1*03:03L
  source 1..13: note = Severe acute respiratory syndrome coronavirus 2
DTDFVNEFYAYLR

SEQ ID NO: 11248 - protein, 12 aa, Severe acute respiratory syndrome-related coronavirus
  REGION 1..12: note = Table B: HLA-DQA1*05:01-B1*03:01L HLA-DRB1*13:02L HLA-DRB1*04:04L HLA-DRB1*04:05L HLA-DQA1*01:02-B1*06:02L HLA-DRB1*14:01L HLA-DRB1*11:04L HLA-DRB1*11:01L HLA-DQA1*01-B1*05L HLA-DRB1*12:01L HLA-DRB3*01:01L
  REGION 1..12: note = CONT. FROM ABOVE: HLA-DRB1*15:03L
  source 1..12: note = Severe acute respiratory syndrome coronavirus 2
FVNEFYAYLRKH

SEQ ID NO: 11249 - protein, 12 aa, Severe acute respiratory syndrome-related coronavirus
  REGION 1..12: note = Table B: HLA-DQA1*05:01-B1*03:01L HLA-DRB1*13:02L HLA-DRB1*08:04L HLA-DPA1*03:01-B1*04:02L HLA-DRB1*14:01L HLA-DRB1*11:04L HLA-DRB1*11:01L HLA-DRB1*12:01L HLA-DRB3*01:01L
  source 1..12: note = Severe acute respiratory syndrome coronavirus 2
VNEFYAYLRKHF

SEQ ID NO: 11250 - protein, 12 aa, Severe acute respiratory syndrome-related coronavirus
  REGION 1..12: note = Table B: HLA-DQA1*05:01-B1*03:01L HLA-DRB1*13:02L HLA-DRB1*13:03L HLA-DRB1*04:02L HLA-DRB1*01:02L HLA-DRB1*08:04L HLA-DPA1*03:01-B1*04:02L HLA-DRB1*11:04L HLA-DRB1*12:01L HLA-DRB3*01:01L HLA-DRB1*08:03L
  source 1..12: note = Severe acute respiratory syndrome coronavirus 2
NEFYAYLRKHFS

SEQ ID NO: 11251 - protein, 15 aa, Severe acute respiratory syndrome-related coronavirus
  REGION 1..15: note = Table B: HLA-DQA1*05:01-B1*03:01L HLA-DRB1*13:03L HLA-DRB1*01:01L HLA-DRB4*03:01NL HLA-DRB1*08:04L HLA-DRB3*02:01L HLA-DPA1*03:01-B1*04:02L HLA-DRB1*11:02L HLA-DRB1*11:03L HLA-DRB1*11:04L HLA-DRB1*08:01L HLA-DQA1*05:01-B1*02:01L
  REGION 1..15: note = CONT. FROM ABOVE: HLA-DRB1*09:01L HLA-DRB1*14:54L HLA-DRB1*10:01 L HLA-DRB1*08:03L
  source 1..15: note = Severe acute respiratory syndrome coronavirus 2
DDAVVCFNSTYASQG

SEQ ID NO: 11252 - protein, 12 aa, Severe acute respiratory syndrome-related coronavirus
  REGION 1..12: note = Table B: HLA-DQA1*05:01-B1*03:01L HLA-DRB1*04:03L HLA-DQA1*01:02-B1*06:02L HLA-DQA1*05:05-B1*03:19L HLA-DQA1*03:01-B1*03:02L HLA-DQA1*05:05-B1*03:01L HLA-DQA1*01:03-B1*06:01L HLA-DQA1*02:01-B1*03:03L
  source 1..12: note = Severe acute respiratory syndrome coronavirus 2
FNSTYASQGLVA

SEQ ID NO: 11253 - protein, 10 aa, Severe acute respiratory syndrome-related coronavirus
  REGION 1..10: note = Table B: HLA-DQA1*05:01-B1*03:01L HLA-DQA1*01:02-B1*06:02L HLA-DQA1*05:05-B1*03:19L HLA-DQA1*03:01-B1*03:02L HLA-DQA1*05:05-B1*03:01L HLA-DQA1*01:03-B1*06:01L HLA-DQA1*02:01-B1*03:03L
  source 1..10: note = Severe acute respiratory syndrome coronavirus 2
ASQGLVASIK

SEQ ID NO: 11254 - protein, 10 aa, Severe acute respiratory syndrome-related coronavirus
  REGION 1..10: note = Table B: HLA-DQA1*05:01-B1*03:01L HLA-DQA1*03:01-B1*03:02L HLA-DQA1*05:05-B1*03:01L HLA-DQA1*01:03-B1*06:01L HLA-DQA1*02:01-B1*03:03L
  source 1..10: note = Severe acute respiratory syndrome coronavirus 2
SQGLVASIKN

SEQ ID NO: 11255 - protein, 14 aa, Severe acute respiratory syndrome-related coronavirus
  REGION 1..14: note = Table B: HLA-DQA1*05:01-B1*03:01L HLA-DRB1*04:01L HLA-DRB1*13:02L HLA-DPA1*01:03-B1*03:01L HLA-DRB1*11:02L HLA-DRB1*08:01L HLA-DRB1*11:01L HLA-DQA1*05:05-B1*03:19L HLA-DRB4*01:01L HLA-DRB1*09:01L HLA-DRB3*01:01L
  REGION 1..14: note = CONT. FROM ABOVE: HLA-DQA1*05:05-B1*03:01L HLA-DRB1*10:01L HLA-D QA1*01:03-B1*06:01L HLA-DRB1*08:03L HLA-DRB1*15:01L
  source 1..14: note = Severe acute respiratory syndrome coronavirus 2
QGLVASIKNFKSVL

SEQ ID NO: 11256 - protein, 10 aa, Severe acute respiratory syndrome-related coronavirus
  REGION 1..10: note = Table B: HLA-DQA1*05:01-B1*03:01L HLA-DRB1*13:02L HLA-DRB1*13:03L HLA-DRB1*01:03L HLA-DQA1*01:02-B1*06:02L HLA-DRB1*08:77L HLA-DPA1*01:03-B1*03:01L HLA-DPA1*03:01-B1*04:02L HLA-DRB1*03:01L HLA-DRB1*14:01L
  REGION 1..10: note = CONT. FROM ABOVE: HLA-DRB1*14:02L HLA-DQA1*01-B1*05L HLA-DQA1*05 :05-B1*03:19L HLA-DQA1*05:01-B1*02:01L HLA-DRB4*01:01L HLA-DPA1* 01:03-B1*04:01L HLA-DPA1*01:03-B1*04:02L HLA-DRB1*12:01L HLA-DPA 1*02:01-B1*13:01L HLA-DPA1*03:01-B1*105:01L
  REGION 1..10: note = CONT. FROM ABOVE: HLA-DPA1*01:03-B1*104:01L HLA-DQA1*05:05-B1*03 :01L HLA-DPA1*01:02-B1*04:01L HLA-DRB1*16:01L HLA-DQA1*01:03-B1* 06:01L HLA-DRB1*08:02L HLA-DQA1*02:01-B1*03:03L HLA-DRB1*15:03L
  source 1..10: note = Severe acute respiratory syndrome coronavirus 2
SIKNFKSVLY

SEQ ID NO: 11257 - protein, 12 aa, Severe acute respiratory syndrome-related coronavirus
  REGION 1..12: note = Table B: HLA-DQA1*05:01-B1*03:01L HLA-DRB1*13:02L HLA-DRB1*01:03L HLA-DRB1*04:02L HLA-DRB1*04:04L HLA-DRB1*04:05L HLA-DQA1*01:02-B1*06:02L HLA-DRB3*02:01L HLA-DPA1*03:01-B1*04:02L HLA-DRB1*14:01L HLA-DRB1*08:01L
  REGION 1..12: note = CONT. FROM ABOVE: HLA-DQA1*01-B1*05L HLA-DQA1*05:01-B1*02:01L HL A-DRB3*01:01L HLA-DPA1*02:01-B1*13:01L HLA-DPA1*03:01-B1*105:01L HLA-DQA1*03:01-B1*03:02L HLA-DPA1*01:02-B1*04:01L HLA-DQA1*01:03 -B1*06:01L HLA-DRB1*04:08L HLA-DQA1*02:01-B1*03:03L
  source 1..12: note = Severe acute respiratory syndrome coronavirus 2
IKNFKSVLYYQN

SEQ ID NO: 11258 - protein, 12 aa, Severe acute respiratory syndrome-related coronavirus
  REGION 1..12: note = Table B: HLA-DQA1*05:01-B1*03:01L HLA-DRB1*04:02L HLA-DRB1*01:02L HLA-DPA1*01:03-B1*03:01L HLA-DPA1*03:01-B1*04:02L
  source 1..12: note = Severe acute respiratory syndrome coronavirus 2
FKSVLYYQNNVF

SEQ ID NO: 11259 - protein, 12 aa, Severe acute respiratory syndrome-related coronavirus
  REGION 1..12: note = Table B: HLA-DQA1*05:01-B1*03:01L HLA-DRB1*13:02L HLA-DRB1*01:03L HLA-DRB1*04:02L HLA-DRB1*04:04L HLA-DRB1*04:05L HLA-DRB1*01:02L HLA-DRB3*02:01L HLA-DPA1*03:01-B1*04:02L HLA-DRB1*08:01L HLA-DRB1*04:10L HLA-DRB1*14:54L HLA-DRB1*14:17L
  REGION 1..12: note = CONT. FROM ABOVE: HLA-DRB1*04:08L HLA-DRB1*15:01L
  source 1..12: note = Severe acute respiratory syndrome coronavirus 2
KSVLYYQNNVFM

SEQ ID NO: 11260 - protein, 13 aa, Severe acute respiratory syndrome-related coronavirus
  REGION 1..13: note = Table B: HLA-DQA1*05:01-B1*03:01L HLA-DRB1*13:02L HLA-DRB1*01:03L HLA-DRB1*04:04L HLA-DRB1*04:05L HLA-DRB1*08:04L HLA-DRB3*02:01L HLA-DPA1*01:03-B1*03:01L HLA-DQA1*03:01-B1*03:02L HLA-DQA1*05:05-B1*03:01L
  REGION 1..13: note = CONT. FROM ABOVE: HLA-DPA1*01:02-B1*04:01L HLA-DRB1*04:08L HLA-D RB1*15:01L
  source 1..13: note = Severe acute respiratory syndrome coronavirus 2
SVLYYQNNVFMSE

SEQ ID NO: 11261 - protein, 12 aa, Severe acute respiratory syndrome-related coronavirus
  REGION 1..12: note = Table B: HLA-DQA1*05:01-B1*03:01L HLA-DQA1*01:02-B1*06:02L HLA-DQA1*05:01-B1*02:01L HLA-DPA1*03:01-B1*105:01L HLA-DQA1*05:05-B1*03:01L
  source 1..12: note = Severe acute respiratory syndrome coronavirus 2
WTETDLTKGPHE

SEQ ID NO: 11262 - protein, 14 aa, Severe acute respiratory syndrome-related coronavirus
  REGION 1..14: note = Table B: HLA-DQA1*05:01-B1*03:01L HLA-DRB1*04:03L HLA-DRB1*13:02L HLA-DRB1*13:03L HLA-DRB1*01:03L HLA-DRB1*04:02L HLA-DRB1*04:04L HLA-DRB1*04:05L HLA-DRB1*01:01L HLA-DRB1*01:02L HLA-DRB1*08:04L HLA-DPA1*01:03-B1*03:01L
  REGION 1..14: note = CONT. FROM ABOVE: HLA-DPA1*03:01-B1*04:02L HLA-DRB1*14:01L HLA-D RB1*11:03L HLA-DRB1*11:04L HLA-DRB1*08:01L HLA-DRB1*11:01L HLA-D RB1*12:01L HLA-DRB3*01:01L HLA-DPA1*02:01-B1*13:01L HLA-DPA1*03: 01-B1*105:01L HLA-DPA1*01:03-B1*02:01L HLA-DQA1*05:05-B1*03:01L
  REGION 1..14: note = CONT. FROM ABOVE: HLA-DPA1*01:02-B1*04:01L HLA-DRB1*07:01L HLA-D RB1*16:01L HLA-DQA1*01:03-B1*06:01L HLA-DRB1*04:08M HLA-DRB1*08: 03L HLA-DQA1*02:01-B1*03:03L HLA-DRB1*15:03L
  source 1..14: note = Severe acute respiratory syndrome coronavirus 2
GPHEFCSQHTMLVK

SEQ ID NO: 11263 - protein, 10 aa, Severe acute respiratory syndrome-related coronavirus
  REGION 1..10: note = Table B: HLA-DQA1*05:01-B1*03:01L HLA-DRB1*13:03L HLA-DRB1*01:03L HLA-DQA1*01:02-B1*06:02L HLA-DRB1*08:77L HLA-DPA1*01:03-B1*03:01L HLA-DRB1*03:01L HLA-DRB1*11:02L HLA-DRB1*14:02L HLA-DQA1*01-B1*05L HLA-DQA1*05:05-B1*03:19L
  REGION 1..10: note = CONT. FROM ABOVE: HLA-DQA1*05:01-B1*02:01L HLA-DRB4*01:01L HLA-D PA1*01:03-B1*04:01L HLA-DPA1*01:03-B1*04:02L HLA-DRB1*12:01L HLA -DPA1*03:01-B1*105:01L HLA-DPA1*01:03-B1*104:01L HLA-DRB1*10:01L HLA-DRB1*16:01L HLA-DQA1*01:03-B1*06:01L HLA-DRB1*08:02L
  REGION 1..10: note = CONT. FROM ABOVE: HLA-DQA1*02:01-B1*03:03L HLA-DRB1*15:03L
  source 1..10: note = Severe acute respiratory syndrome coronavirus 2
LVKQGDDYVY

SEQ ID NO: 11264 - protein, 12 aa, Severe acute respiratory syndrome-related coronavirus
  REGION 1..12: note = Table B: HLA-DQA1*05:01-B1*03:01L HLA-DRB1*13:03L HLA-DRB1*01:03L HLA-DRB1*04:05L HLA-DQA1*01:02-B1*06:02L HLA-DPA1*01:03-B1*03:01L HLA-DPA1*03:01-B1*04:02L HLA-DQA1*01:01-B1*05:01L HLA-DRB1*08:01L
  REGION 1..12: note = CONT. FROM ABOVE: HLA-DQA1*05:05-B1*03:19L HLA-DPA1*01:03-B1*04: 01L HLA-DRB1*04:10L HLA-DPA1*01:03-B1*04:02L HLA-DRB1*12:01L HLA -DPA1*02:01-B1*13:01L HLA-DQA1*05:05-B1*03:01L HLA-DPA1*01:02-B1 *04:01L HLA-DRB1*16:01L HLA-DRB1*04:08L HLA-DRB1*15:03L
  source 1..12: note = Severe acute respiratory syndrome coronavirus 2
DDYVYLPYPDPS

SEQ ID NO: 11265 - protein, 16 aa, Severe acute respiratory syndrome-related coronavirus
  REGION 1..16: note = Table B: HLA-DQA1*05:01-B1*03:01L
  source 1..16: note = Severe acute respiratory syndrome coronavirus 2
YPDPSRILGAGCFVDD

SEQ ID NO: 11266 - protein, 17 aa, Severe acute respiratory syndrome-related coronavirus
  REGION 1..17: note = Table B: HLA-DQA1*05:01-B1*03:01L HLA-DPA1*01:03-B1*03:01L HLA-DPA1*01:03-B1*04:02L HLA-DPA1*02:01-B1*13:01L HLA-DRB1*15:03L
  source 1..17: note = Severe acute respiratory syndrome coronavirus 2
DPSRILGAGCFVDDIVK

SEQ ID NO: 11267 - protein, 12 aa, Severe acute respiratory syndrome-related coronavirus
  REGION 1..12: note = Table B: HLA-DQA1*05:01-B1*03:01L HLA-DRB1*04:04L HLA-DRB1*04:05L HLA-DQA1*01:02-B1*06:02L HLA-DRB1*08:04L HLA-DRB1*03:01L HLA-DRB1*11:03L HLA-DRB1*11:01L HLA-DRB1*13:01L HLA-DRB1*04:10L HLA-DRB3*01:01L HLA-DPA1*03:01-B1*105:01L
  REGION 1..12: note = CONT. FROM ABOVE: HLA-DPA1*01:02-B1*04:01L HLA-DRB1*10:01L HLA-D QA1*01:03-B1*06:01L HLA-DRB1*04:08L HLA-DRB1*08:03L
  source 1..12: note = Severe acute respiratory syndrome coronavirus 2
IVKTDGTLMIER

SEQ ID NO: 11268 - protein, 14 aa, Severe acute respiratory syndrome-related coronavirus
  REGION 1..14: note = Table B: HLA-DQA1*05:01-B1*03:01L HLA-DRB1*13:03L HLA-DRB1*01:03L HLA-DRB1*04:04L HLA-DRB1*08:04L HLA-DRB3*02:01L HLA-DRB1*14:01L HLA-DRB1*11:03L HLA-DRB1*14:02L HLA-DRB1*08:01L HLA-DRB1*11:01L HLA-DRB1*04:10L HLA-DRB1*09:01L HLA-DRB3*01:01L
  REGION 1..14: note = CONT. FROM ABOVE: HLA-DQA1*03:01-B1*03:02L HLA-DPA1*01:03-B1*02: 01L HLA-DRB1*07:01L HLA-DRB1*10:01L HLA-DRB1*08:03L HLA-DQA1*02: 01-B1*03:03L
  source 1..14: note = Severe acute respiratory syndrome coronavirus 2
IERFVSLAIDAYPL

SEQ ID NO: 11269 - protein, 10 aa, Severe acute respiratory syndrome-related coronavirus
  REGION 1..10: note = Table B: HLA-DQA1*05:01-B1*03:01L HLA-DRB1*04:03L HLA-DRB1*13:02L HLA-DRB1*13:03L HLA-DRB1*01:03L HLA-DRB1*04:02L HLA-DRB1*01:01L HLA-DRB1*01:02L HLA-DRB4*03:01NL HLA-DRB1*14:01L HLA-DRB1*12:01L HLA-DRB1*12:02L HLA-DPA1*03:01-B1*105:01L
  REGION 1..10: note = CONT. FROM ABOVE: HLA-DQA1*03:01-B1*03:02L HLA-DQA1*05:05-B1*03: 01L HLA-DRB1*14:17L HLA-DRB1*16:01L HLA-DQA1*01:03-B1*06:01L HLA -DQA1*02:01-B1*03:03L HLA-DRB1*15:03L
  source 1..10: note = Severe acute respiratory syndrome coronavirus 2
LAIDAYPLTK

SEQ ID NO: 11270 - protein, 10 aa, Severe acute respiratory syndrome-related coronavirus
  REGION 1..10: note = Table B: HLA-DQA1*05:01-B1*03:01L HLA-DRB1*13:03L HLA-DQA1*03:01-B1*03:02L HLA-DQA1*01:03-B1*06:01L HLA-DQA1*02:01-B1*03:03L
  source 1..10: note = Severe acute respiratory syndrome coronavirus 2
DAYPLTKHPN

SEQ ID NO: 11271 - protein, 10 aa, Severe acute respiratory syndrome-related coronavirus
  REGION 1..10: note = Table B: HLA-DQA1*05:01-B1*03:01L HLA-DRB1*01:03L HLA-DQA1*01:02-B1*06:02L HLA-DPA1*01:03-B1*03:01L HLA-DRB1*03:01L HLA-DRB1*14:02L HLA-DQA1*05:05-B1*03:19L HLA-DQA1*05:01-B1*02:01L HLA-DPA1*01:03-B1*04:02L
  REGION 1..10: note = CONT. FROM ABOVE: HLA-DPA1*03:01-B1*105:01L HLA-DRB1*16:01L HLA- DQA1*01:03-B1*06:01L HLA-DQA1*02:01-B1*03:03L HLA-DRB1*15:03L
  source 1..10: note = Severe acute respiratory syndrome coronavirus 2
PLTKHPNQEY

SEQ ID NO: 11272 - protein, 10 aa, Severe acute respiratory syndrome-related coronavirus
  REGION 1..10: note = Table B: HLA-DQA1*05:01-B1*03:01L HLA-DRB1*13:03L HLA-DQA1*01:02-B1*06:02L HLA-DRB1*14:01L HLA-DPA1*03:01-B1*105:01L HLA-DRB1*15:03L
  source 1..10: note = Severe acute respiratory syndrome coronavirus 2
HPNQEYADVF

SEQ ID NO: 11273 - protein, 10 aa, Severe acute respiratory syndrome-related coronavirus
  REGION 1..10: note = Table B: HLA-DQA1*05:01-B1*03:01L HLA-DQA1*01:02-B1*06:02L HLA-DRB1*08:77L HLA-DPA1*01:03-B1*03:01M HLA-DPA1*03:01-B1*04:02L HLA-DRB1*03:01L HLA-DRB1*11:02L HLA-DQA1*01-B1*05L HLA-DQA1*05:05-B1*03:19H
  REGION 1..10: note = CONT. FROM ABOVE: HLA-DQA1*05:01-B1*02:01M HLA-DRB4*01:01L HLA-D PA1*01:03-B1*04:01L HLA-DQA1*05:05-B1*03:116L HLA-DRB1*12:01L HL A-DPA1*01:03-B1*104:01M HLA-DPA1*01:02-B1*04:01L HLA-DRB1*10:01L HLA-DRB1*16:01M HLA-DRB1*15:03L
  source 1..10: note = Severe acute respiratory syndrome coronavirus 2
ADVFHLYLQY

SEQ ID NO: 11274 - protein, 12 aa, Severe acute respiratory syndrome-related coronavirus
  REGION 1..12: note = Table B: HLA-DQA1*05:01-B1*03:01L HLA-DRB1*13:02L HLA-DRB1*04:05L HLA-DRB1*14:01L HLA-DRB1*08:01L HLA-DQA1*01-B1*05L HLA-DRB1*12:01L HLA-DRB3*01:01L HLA-DQA1*03:01-B1*03:02L HLA-DQA1*02:01-B1*03:03L
  REGION 1..12: note = CONT. FROM ABOVE: HLA-DRB1*15:01L
  source 1..12: note = Severe acute respiratory syndrome coronavirus 2
DVFHLYLQYIRK

SEQ ID NO: 11275 - protein, 15 aa, Severe acute respiratory syndrome-related coronavirus
  REGION 1..15: note = Table B: HLA-DQA1*05:01-B1*03:01L HLA-DPA1*03:01-B1*04:02L HLA-DRB1*11:02L HLA-DPA1*01:03-B1*04:02L HLA-DPA1*03:01-B1*105:01L HLA-DQA1*02:01-B1*03:03L
  source 1..15: note = Severe acute respiratory syndrome coronavirus 2
VFHLYLQYIRKLHDE

SEQ ID NO: 11276 - protein, 12 aa, Severe acute respiratory syndrome-related coronavirus
  REGION 1..12: note = Table B: HLA-DQA1*05:01-B1*03:01L HLA-DQA1*05:05-B1*03:01L
  source 1..12: note = Severe acute respiratory syndrome coronavirus 2
LTGHMLDMYSVM

SEQ ID NO: 11277 - protein, 12 aa, Severe acute respiratory syndrome-related coronavirus
  REGION 1..12: note = Table B: HLA-DQA1*05:01-B1*03:01L HLA-DRB1*04:02L HLA-DRB1*04:04L HLA-DRB1*04:05L HLA-DRB4*03:01NL HLA-DPA1*01:03-B1*03:01L HLA-DQA1*01-B1*05L HLA-DQA1*05:05-B1*03:19L HLA-DQA1*05:01-B1*02:01L
  REGION 1..12: note = CONT. FROM ABOVE: HLA-DRB1*04:10L HLA-DRB1*12:01L HLA-DPA1*03:01 -B1*105:01L HLA-DRB1*14:54L HLA-DQA1*05:05-B1*03:01L HLA-DRB1*16 :01L HLA-DRB1*04:08L
  source 1..12: note = Severe acute respiratory syndrome coronavirus 2
LDMYSVMLTNDN

SEQ ID NO: 11278 - protein, 14 aa, Severe acute respiratory syndrome-related coronavirus
  REGION 1..14: note = Table B: HLA-DQA1*05:01-B1*03:01L HLA-DRB1*01:01L HLA-DRB1*08:04L HLA-DPA1*01:03-B1*03:01L HLA-DRB1*11:01L HLA-DQA1*05:05-B1*03:19L HLA-DRB1*09:01L HLA-DRB3*01:01L HLA-DPA1*02:01-B1*13:01L HLA-DPA1*03:01-B1*105:01L
  REGION 1..14: note = CONT. FROM ABOVE: HLA-DRB1*15:03L
  source 1..14: note = Severe acute respiratory syndrome coronavirus 2
DMYSVMLTNDNTSR

SEQ ID NO: 11279 - protein, 10 aa, Severe acute respiratory syndrome-related coronavirus
  REGION 1..10: note = Table B: HLA-DQA1*05:01-B1*03:01L HLA-DRB1*13:03L HLA-DRB1*01:03L HLA-DQA1*01:02-B1*06:02L HLA-DRB1*08:77L HLA-DPA1*01:03-B1*03:01L HLA-DPA1*03:01-B1*04:02L HLA-DRB1*03:01L HLA-DRB1*14:01L HLA-DRB1*11:02L HLA-DRB1*14:02L
  REGION 1..10: note = CONT. FROM ABOVE: HLA-DQA1*01-B1*05L HLA-DQA1*05:05-B1*03:19L HL A-DQA1*05:01-B1*02:01L HLA-DRB4*01:01L HLA-DPA1*01:03-B1*04:01L HLA-DQA1*05:05-B1*03:116L HLA-DPA1*01:03-B1*04:02L HLA-DRB1*12:0 1L HLA-DPA1*02:01-B1*13:01L HLA-DPA1*03:01-B1*105:01L
  REGION 1..10: note = CONT. FROM ABOVE: HLA-DPA1*01:03-B1*104:01L HLA-DPA1*01:02-B1*04 :01L HLA-DRB1*10:01L HLA-DRB1*16:01L HLA-DQA1*01:03-B1*06:01L HL A-DRB1*08:02L HLA-DQA1*02:01-B1*03:03L HLA-DRB1*15:03L
  source 1..10: note = Severe acute respiratory syndrome coronavirus 2
LTNDNTSRYW

SEQ ID NO: 11280 - protein, 11 aa, Severe acute respiratory syndrome-related coronavirus
  REGION 1..11: note = Table B: HLA-DQA1*05:01-B1*03:01L HLA-DRB1*01:03L HLA-DRB1*01:02L HLA-DPA1*01:03-B1*03:01L HLA-DRB1*14:01L HLA-DRB1*14:02L HLA-DRB1*08:01L HLA-DRB1*11:01L HLA-DRB1*12:01L HLA-DPA1*01:03-B1*104:01L HLA-DQA1*05:05-B1*03:01L
  REGION 1..11: note = CONT. FROM ABOVE: HLA-DRB1*04:08L
  source 1..11: note = Severe acute respiratory syndrome coronavirus 2
RYWEPEFYEAM

SEQ ID NO: 11281 - protein, 10 aa, Severe acute respiratory syndrome-related coronavirus
  REGION 1..10: note = Table B: HLA-DQA1*05:01-B1*03:01L HLA-DPA1*01:03-B1*03:01L HLA-DPA1*03:01-B1*04:02L HLA-DRB1*11:02L HLA-DQA1*01-B1*05L HLA-DQA1*05:05-B1*03:19M HLA-DQA1*05:01-B1*02:01L HLA-DRB4*01:01L HLA-DPA1*01:03-B1*04:01L
  REGION 1..10: note = CONT. FROM ABOVE: HLA-DPA1*01:03-B1*104:01L HLA-DRB1*16:01L
  source 1..10: note = Severe acute respiratory syndrome coronavirus 2
WEPEFYEAMY

SEQ ID NO: 11282 - protein, 14 aa, Severe acute respiratory syndrome-related coronavirus
  REGION 1..14: note = Table B: HLA-DQA1*05:01-B1*03:01L HLA-DRB1*01:02L HLA-DPA1*03:01-B1*105:01L HLA-DQA1*05:05-B1*03:01L
  source 1..14: note = Severe acute respiratory syndrome coronavirus 2
VGACVLCNSQTSLR

SEQ ID NO: 11283 - protein, 14 aa, Severe acute respiratory syndrome-related coronavirus
  REGION 1..14: note = Table B: HLA-DQA1*05:01-B1*03:01L HLA-DRB1*13:02L HLA-DRB1*01:03L HLA-DRB1*04:02L HLA-DRB1*04:04L HLA-DRB1*04:05L HLA-DRB1*01:02L HLA-DPA1*01:03-B1*03:01L HLA-DRB1*14:01L HLA-DQA1*05:05-B1*03:19L HLA-DRB1*12:01L
  REGION 1..14: note = CONT. FROM ABOVE: HLA-DQA1*03:01-B1*03:02L HLA-DPA1*01:03-B1*02: 01L HLA-DPA1*01:03-B1*104:01L HLA-DQA1*05:05-B1*03:01L HLA-DRB1* 16:01L HLA-DRB1*04:08L HLA-DRB1*15:03L
  source 1..14: note = Severe acute respiratory syndrome coronavirus 2
LVLSVNPYVCNAPG

SEQ ID NO: 11284 - protein, 12 aa, Severe acute respiratory syndrome-related coronavirus
  REGION 1..12: note = Table B: HLA-DQA1*05:01-B1*03:01L HLA-DRB1*04:03L HLA-DPA1*03:01-B1*04:02L HLA-DRB1*12:01L
  source 1..12: note = Severe acute respiratory syndrome coronavirus 2
DVTQLYLGGMSY

SEQ ID NO: 11285 - protein, 10 aa, Severe acute respiratory syndrome-related coronavirus
  REGION 1..10: note = Table B: HLA-DQA1*05:01-B1*03:01L HLA-DRB1*13:03L HLA-DRB1*01:03L HLA-DQA1*01:02-B1*06:02M HLA-DRB1*08:77L HLA-DPA1*01:03-B1*03:01L HLA-DPA1*03:01-B1*04:02L HLA-DRB1*03:01L HLA-DRB1*14:01L HLA-DRB1*11:02L HLA-DRB1*14:02L
  REGION 1..10: note = CONT. FROM ABOVE: HLA-DQA1*01-B1*05L HLA-DQA1*05:05-B1*03:19M HL A-DQA1*05:01-B1*02:01L HLA-DRB4*01:01L HLA-DPA1*01:03-B1*04:01L HLA-DQA1*05:05-B1*03:116L HLA-DPA1*01:03-B1*04:02L HLA-DRB1*12:0 1L HLA-DPA1*02:01-B1*13:01L HLA-DPA1*03:01-B1*105:01L
  REGION 1..10: note = CONT. FROM ABOVE: HLA-DPA1*01:03-B1*104:01L HLA-DQA1*05:05-B1*03 :01L HLA-DRB1*10:01L HLA-DRB1*16:01L HLA-DQA1*01:03-B1*06:01L HL A-DRB1*08:02L HLA-DQA1*02:01-B1*03:03L HLA-DRB1*15:03L
  source 1..10: note = Severe acute respiratory syndrome coronavirus 2
QLYLGGMSYY

SEQ ID NO: 11286 - protein, 13 aa, Severe acute respiratory syndrome-related coronavirus
  REGION 1..13: note = Table B: HLA-DQA1*05:01-B1*03:01L HLA-DRB1*13:02L HLA-DRB1*13:03L HLA-DRB1*04:02L HLA-DRB1*08:04L HLA-DRB1*12:01L HLA-DRB3*01:01L HLA-DPA1*02:01-B1*13:01L HLA-DQA1*01:03-B1*06:01L HLA-DRB1*08:03L HLA-DRB1*15:03L
  source 1..13: note = Severe acute respiratory syndrome coronavirus 2
GGMSYYCKSHKPP

SEQ ID NO: 11287 - protein, 14 aa, Severe acute respiratory syndrome-related coronavirus
  REGION 1..14: note = Table B: HLA-DQA1*05:01-B1*03:01L HLA-DRB1*04:02L HLA-DRB1*11:03L HLA-DPA1*03:01-B1*105:01L HLA-DRB1*08:02L
  source 1..14: note = Severe acute respiratory syndrome coronavirus 2
GMSYYCKSHKPPIS

SEQ ID NO: 11288 - protein, 13 aa, Severe acute respiratory syndrome-related coronavirus
  REGION 1..13: note = Table B: HLA-DQA1*05:01-B1*03:01L HLA-DRB1*04:03L HLA-DRB1*13:02L HLA-DRB1*13:03L HLA-DRB1*01:03L HLA-DRB1*04:02L HLA-DRB1*04:04L HLA-DRB1*04:05L HLA-DQA1*01:02-B1*06:02L HLA-DRB1*08:04L HLA-DRB3*02:01L HLA-DPA1*03:01-B1*04:02L
  REGION 1..13: note = CONT. FROM ABOVE: HLA-DRB1*14:01L HLA-DRB1*11:03L HLA-DRB1*11:04 L HLA-DRB1*08:01L HLA-DRB1*11:01L HLA-DQA1*01-B1*05L HLA-DPA1*01 :03-B1*04:02L HLA-DRB1*12:01L HLA-DRB3*01:01L HLA-DPA1*03:01-B1* 105:01L HLA-DQA1*03:01-B1*03:02L HLA-DQA1*05:05-B1*03:01L
  REGION 1..13: note = CONT. FROM ABOVE: HLA-DRB1*14:17L HLA-DPA1*01:02-B1*04:01L HLA-D QA1*01:03-B1*06:01L HLA-DRB1*04:08L HLA-DRB1*08:03L HLA-DQA1*02: 01-B1*03:03L HLA-DRB1*15:01L
  source 1..13: note = Severe acute respiratory syndrome coronavirus 2
GQVFGLYKNTCVG

SEQ ID NO: 11289 - protein, 14 aa, Severe acute respiratory syndrome-related coronavirus
  REGION 1..14: note = Table B: HLA-DQA1*05:01-B1*03:01L HLA-DRB1*13:03L HLA-DRB1*01:03L HLA-DQA1*01:02-B1*06:02L HLA-DQA1*01:01-B1*05:01L HLA-DRB1*12:01L HLA-DPA1*02:01-B1*13:01L HLA-DPA1*03:01-B1*105:01L
  REGION 1..14: note = CONT. FROM ABOVE: HLA-DQA1*05:05-B1*03:01L
  source 1..14: note = Severe acute respiratory syndrome coronavirus 2
VGSDNVTDFNAIAT

SEQ ID NO: 11290 - protein, 14 aa, Severe acute respiratory syndrome-related coronavirus
  REGION 1..14: note = Table B: HLA-DQA1*05:01-B1*03:01L HLA-DPA1*03:01-B1*04:02L HLA-DQA1*05:05-B1*03:19L HLA-DPA1*01:03-B1*04:02L HLA-DQA1*05:05-B1*03:01L HLA-DQA1*02:01-B1*03:03L
  source 1..14: note = Severe acute respiratory syndrome coronavirus 2
DFNAIATCDWTNAG

SEQ ID NO: 11291 - protein, 12 aa, Severe acute respiratory syndrome-related coronavirus
  REGION 1..12: note = Table B: HLA-DQA1*05:01-B1*03:01L HLA-DRB1*13:02L HLA-DRB1*01:03L HLA-DRB1*04:05L HLA-DRB1*14:01L HLA-DRB1*12:01L HLA-DPA1*03:01-B1*105:01L HLA-DRB1*16:01L HLA-DRB1*04:08L
  source 1..12: note = Severe acute respiratory syndrome coronavirus 2
YILANTCTERLK

SEQ ID NO: 11292 - protein, 13 aa, Severe acute respiratory syndrome-related coronavirus
  REGION 1..13: note = Table B: HLA-DQA1*05:01-B1*03:01L HLA-DRB1*13:02L HLA-DRB1*04:02L HLA-DRB1*04:04L HLA-DRB3*02:01L HLA-DRB1*14:01L HLA-DRB3*01:01L HLA-DPA1*02:01-B1*13:01L HLA-DPA1*03:01-B1*105:01L
  source 1..13: note = Severe acute respiratory syndrome coronavirus 2
TERLKLFAAETLK

SEQ ID NO: 11293 - protein, 14 aa, Severe acute respiratory syndrome-related coronavirus
  REGION 1..14: note = Table B: HLA-DQA1*05:01-B1*03:01L HLA-DRB1*13:02L HLA-DRB1*01:01L
  source 1..14: note = Severe acute respiratory syndrome coronavirus 2
ERLKLFAAETLKAT

SEQ ID NO: 11294 - protein, 10 aa, Severe acute respiratory syndrome-related coronavirus
  REGION 1..10: note = Table B: HLA-DQA1*05:01-B1*03:01L HLA-DRB1*04:03L HLA-DRB1*13:02L HLA-DRB1*13:03L HLA-DRB1*01:03M HLA-DRB1*04:02L HLA-DRB1*04:05L HLA-DQA1*01:02-B1*06:02M HLA-DRB4*03:01NL HLA-DRB1*08:77H HLA-DPA1*01:03-B1*03:01H
  REGION 1..10: note = CONT. FROM ABOVE: HLA-DPA1*03:01-B1*04:02L HLA-DRB1*03:01M HLA-D RB1*11:02H HLA-DRB1*11:03M HLA-DRB1*11:04L HLA-DRB1*14:02L HLA-D RB1*11:01L HLA-DRB5*01:01L HLA-DQA1*01-B1*05H HLA-DQA1*05:05-B1* 03:19H HLA-DQA1*05:01-B1*02:01H HLA-DRB4*01:01M
  REGION 1..10: note = CONT. FROM ABOVE: HLA-DPA1*01:03-B1*04:01M HLA-DQA1*05:05-B1*03: 116M HLA-DPA1*01:03-B1*04:02L HLA-DRB1*12:01M HLA-DPA1*03:01-B1* 105:01L HLA-DRB1*14:54L HLA-DPA1*01:03-B1*104:01H HLA-DPA1*01:02 -B1*04:01L HLA-DRB1*10:01M HLA-DRB1*16:01H HLA-DRB1*08:02L
  REGION 1..10: note = CONT. FROM ABOVE: HLA-DQA1*02:01-B1*03:03L HLA-DRB1*15:03L
  source 1..10: note = Severe acute respiratory syndrome coronavirus 2
ATEETFKLSY

SEQ ID NO: 11295 - protein, 12 aa, Severe acute respiratory syndrome-related coronavirus
  REGION 1..12: note = Table B: HLA-DQA1*05:01-B1*03:01L HLA-DRB1*01:03L HLA-DRB1*01:01L HLA-DRB1*01:02L HLA-DPA1*03:01-B1*105:01L HLA-DRB1*16:01L HLA-DRB1*04:08L HLA-DRB1*15:03L
  source 1..12: note = Severe acute respiratory syndrome coronavirus 2
TFKLSYGIATVR

SEQ ID NO: 11296 - protein, 10 aa, Severe acute respiratory syndrome-related coronavirus
  REGION 1..10: note = Table B: HLA-DQA1*05:01-B1*03:01L HLA-DQA1*03:01-B1*03:02L HLA-DQA1*02:01-B1*03:03L
  source 1..10: note = Severe acute respiratory syndrome coronavirus 2
SWEVGKPRPP

SEQ ID NO: 11297 - protein, 10 aa, Severe acute respiratory syndrome-related coronavirus
  REGION 1..10: note = Table B: HLA-DQA1*05:01-B1*03:01L HLA-DQA1*03:01-B1*03:02L HLA-DQA1*01:03-B1*06:01L HLA-DQA1*02:01-B1*03:03L
  source 1..10: note = Severe acute respiratory syndrome coronavirus 2
EVGKPRPPLN

SEQ ID NO: 11298 - protein, 10 aa, Severe acute respiratory syndrome-related coronavirus
  REGION 1..10: note = Table B: HLA-DQA1*05:01-B1*03:01L HLA-DRB1*13:02L HLA-DRB1*13:03L HLA-DRB1*01:03L HLA-DQA1*01:02-B1*06:02M HLA-DPA1*01:03-B1*03:01L HLA-DRB1*03:01L HLA-DRB1*14:01L HLA-DRB1*14:02L HLA-DRB1*08:01L HLA-DRB1*11:01L HLA-DRB5*01:01L
  REGION 1..10: note = CONT. FROM ABOVE: HLA-DQA1*01-B1*05L HLA-DQA1*05:01-B1*02:01L HL A-DPA1*01:03-B1*04:01L HLA-DRB3*01:01L HLA-DPA1*03:01-B1*105:01L HLA-DRB1*16:01L HLA-DQA1*02:01-B1*03:03L HLA-DRB1*15:03L
  source 1..10: note = Severe acute respiratory syndrome coronavirus 2
KPRPPLNRNY

SEQ ID NO: 11299 - protein, 10 aa, Severe acute respiratory syndrome-related coronavirus
  REGION 1..10: note = Table B: HLA-DQA1*05:01-B1*03:01L HLA-DRB1*13:02L HLA-DRB1*13:03L HLA-DRB1*01:03L HLA-DRB1*04:02L HLA-DQA1*01:02-B1*06:02L HLA-DRB1*01:01L HLA-DRB1*01:02L HLA-DRB4*03:01NL HLA-DRB3*02:01L HLA-DPA1*03:01-B1*04:02L
  REGION 1..10: note = CONT. FROM ABOVE: HLA-DRB1*14:01L HLA-DRB1*11:04L HLA-DRB1*08:01 L HLA-DRB1*11:01L HLA-DPA1*01:03-B1*04:01L HLA-DPA1*01:03-B1*04: 02L HLA-DRB1*12:01L HLA-DRB3*01:01L HLA-DPA1*03:01-B1*105:01L HL A-DQA1*03:01-B1*03:02L HLA-DQA1*05:05-B1*03:01L HLA-DRB1*14:17L
  REGION 1..10: note = CONT. FROM ABOVE: HLA-DPA1*01:02-B1*04:01L HLA-DRB1*16:01L HLA-D QA1*01:03-B1*06:01L HLA-DRB1*04:08L HLA-DQA1*02:01-B1*03:03L HLA -DRB1*15:03L
  source 1..10: note = Severe acute respiratory syndrome coronavirus 2
YVFTGYRVTK

SEQ ID NO: 11300 - protein, 10 aa, Severe acute respiratory syndrome-related coronavirus
  REGION 1..10: note = Table B: HLA-DQA1*05:01-B1*03:01L HLA-DRB1*04:03L HLA-DRB1*13:02L HLA-DRB1*13:03L HLA-DRB1*01:03L HLA-DRB1*04:02L HLA-DRB1*04:05L HLA-DRB1*01:02L HLA-DRB4*03:01NL HLA-DRB1*08:77L HLA-DRB1*14:01L HLA-DRB1*11:03L HLA-DRB1*11:04L HLA-DRB1*08:01L
  REGION 1..10: note = CONT. FROM ABOVE: HLA-DRB1*12:01L HLA-DRB3*01:01L HLA-DQA1*03:01 -B1*03:02L HLA-DRB1*14:17L HLA-DPA1*01:02-B1*04:01L HLA-DRB1*07: 01L HLA-DRB1*16:01L HLA-DRB1*04:08L HLA-DQA1*02:01-B1*03:03L HLA -DRB1*15:03L
  source 1..10: note = Severe acute respiratory syndrome coronavirus 2
YRVTKNSKVQ

SEQ ID NO: 11301 - protein, 12 aa, Severe acute respiratory syndrome-related coronavirus
  REGION 1..12: note = Table B: HLA-DQA1*05:01-B1*03:01L HLA-DRB1*13:02L HLA-DRB1*01:02L HLA-DPA1*01:03-B1*03:01L HLA-DPA1*03:01-B1*04:02L HLA-DRB1*12:01L HLA-DPA1*02:01-B1*13:01L HLA-DPA1*03:01-B1*105:01L
  REGION 1..12: note = CONT. FROM ABOVE: HLA-DQA1*03:01-B1*03:02L HLA-DPA1*01:03-B1*104 :01L HLA-DQA1*05:05-B1*03:01L HLA-DPA1*01:02-B1*04:01L HLA-DRB1* 16:01L HLA-DQA1*01:03-B1*06:01L HLA-DRB1*15:03L
  source 1..12: note = Severe acute respiratory syndrome coronavirus 2
VTKNSKVQIGEY

SEQ ID NO: 11302 - protein, 14 aa, Severe acute respiratory syndrome-related coronavirus
  REGION 1..14: note = Table B: HLA-DQA1*05:01-B1*03:01L HLA-DRB1*01:02L HLA-DPA1*03:01-B1*105:01L HLA-DRB1*15:03L
  source 1..14: note = Severe acute respiratory syndrome coronavirus 2
NSKVQIGEYTFEKG

SEQ ID NO: 11303 - protein, 12 aa, Severe acute respiratory syndrome-related coronavirus
  REGION 1..12: note = Table B: HLA-DQA1*05:01-B1*03:01L HLA-DQA1*01:02-B1*06:02L HLA-DRB1*01:02L HLA-DRB1*08:01L HLA-DQA1*05:05-B1*03:19L HLA-DRB1*04:10L HLA-DRB1*12:01L HLA-DQA1*05:05-B1*03:01L HLA-DRB1*10:01L HLA-DQA1*01:03-B1*06:01L HLA-DRB1*04:08L
  REGION 1..12: note = CONT. FROM ABOVE: HLA-DRB1*15:03L
  source 1..12: note = Severe acute respiratory syndrome coronavirus 2
EYTFEKGDYGDA

SEQ ID NO: 11304 - protein, 12 aa, Severe acute respiratory syndrome-related coronavirus
  REGION 1..12: note = Table B: HLA-DQA1*05:01-B1*03:01L HLA-DQA1*01:02-B1*06:02L HLA-DRB1*08:77L HLA-DPA1*03:01-B1*04:02L HLA-DRB1*14:02L HLA-DPA1*01:03-B1*04:01L HLA-DPA1*01:03-B1*04:02L HLA-DRB1*12:01L HLA-DPA1*02:01-B1*13:01L
  REGION 1..12: note = CONT. FROM ABOVE: HLA-DPA1*03:01-B1*105:01L HLA-DPA1*01:02-B1*04 :01L HLA-DQA1*01:03-B1*06:01L HLA-DQA1*02:01-B1*03:03L HLA-DRB1* 15:03L
  source 1..12: note = Severe acute respiratory syndrome coronavirus 2
FEKGDYGDAVVY

SEQ ID NO: 11305 - protein, 12 aa, Severe acute respiratory syndrome-related coronavirus
  REGION 1..12: note = Table B: HLA-DQA1*05:01-B1*03:01L HLA-DRB1*01:03L HLA-DRB1*01:02L HLA-DQA1*05:05-B1*03:19L HLA-DQA1*05:01-B1*02:01L HLA-DPA1*01:03-B1*04:02L HLA-DPA1*03:01-B1*105:01L HLA-DQA1*05:05-B1*03:01L
  REGION 1..12: note = CONT. FROM ABOVE: HLA-DRB1*04:08L
  source 1..12: note = Severe acute respiratory syndrome coronavirus 2
DYGDAVVYRGTT

SEQ ID NO: 11306 - protein, 11 aa, Severe acute respiratory syndrome-related coronavirus
  REGION 1..11: note = Table B: HLA-DQA1*05:01-B1*03:01L HLA-DRB1*13:03L HLA-DRB1*01:03L HLA-DQA1*01:02-B1*06:02L HLA-DRB4*03:01NL HLA-DQA1*01:01-B1*05:01L HLA-DQA1*01-B1*05L HLA-DQA1*05:05-B1*03:19L HLA-DQA1*05:01-B1*02:01L
  REGION 1..11: note = CONT. FROM ABOVE: HLA-DQA1*05:05-B1*03:01L HLA-DRB1*14:17L HLA-D RB1*16:01L HLA-DQA1*01:03-B1*06:01L
  source 1..11: note = Severe acute respiratory syndrome coronavirus 2
GDAVVYRGTTT

SEQ ID NO: 11307 - protein, 10 aa, Severe acute respiratory syndrome-related coronavirus
  REGION 1..10: note = Table B: HLA-DQA1*05:01-B1*03:01L HLA-DRB1*04:01L HLA-DRB1*04:03L HLA-DRB1*13:02L HLA-DRB1*13:03L HLA-DRB1*01:03L HLA-DRB1*04:02L HLA-DRB1*04:04L HLA-DRB1*01:01L HLA-DRB1*01:02L HLA-DRB4*03:01NL HLA-DRB3*02:01L HLA-DRB1*14:01L HLA-DRB1*11:04L
  REGION 1..10: note = CONT. FROM ABOVE: HLA-DRB1*08:01L HLA-DRB1*11:01L HLA-DRB5*01:01 L HLA-DRB1*13:01L HLA-DRB1*12:01L HLA-DRB1*12:02L HLA-DRB3*01:01 L HLA-DQA1*03:01-B1*03:02M HLA-DQA1*05:05-B1*03:01L HLA-DRB1*14: 17L HLA-DRB1*16:01L HLA-DQA1*02:01-B1*03:03L HLA-DRB1*15:01L
  REGION 1..10: note = CONT. FROM ABOVE: HLA-DRB1*15:03L
  source 1..10: note = Severe acute respiratory syndrome coronavirus 2
VVYRGTTTYK

SEQ ID NO: 11308 - protein, 11 aa, Severe acute respiratory syndrome-related coronavirus
  REGION 1..11: note = Table B: HLA-DQA1*05:01-B1*03:01L HLA-DRB1*13:02L HLA-DRB1*01:03L HLA-DRB3*02:01L HLA-DPA1*03:01-B1*105:01L HLA-DPA1*01:02-B1*04:01L HLA-DRB1*07:01L HLA-DRB1*04:08L
  source 1..11: note = Severe acute respiratory syndrome coronavirus 2
VYRGTTTYKLN

SEQ ID NO: 11309 - protein, 12 aa, Severe acute respiratory syndrome-related coronavirus
  REGION 1..12: note = Table B: HLA-DQA1*05:01-B1*03:01L HLA-DRB1*04:03L HLA-DRB1*13:02L HLA-DRB1*01:03L HLA-DRB1*04:02L HLA-DRB1*04:05L HLA-DQA1*01:02-B1*06:02L HLA-DRB3*02:01L HLA-DRB1*14:01L HLA-DRB1*12:01L HLA-DPA1*03:01-B1*105:01L
  REGION 1..12: note = CONT. FROM ABOVE: HLA-DQA1*05:05-B1*03:01L HLA-DPA1*01:02-B1*04: 01L HLA-DRB1*07:01L HLA-DQA1*01:03-B1*06:01L HLA-DRB1*04:08L
  source 1..12: note = Severe acute respiratory syndrome coronavirus 2
YRGTTTYKLNVG

SEQ ID NO: 11310 - protein, 12 aa, Severe acute respiratory syndrome-related coronavirus
  REGION 1..12: note = Table B: HLA-DQA1*05:01-B1*03:01L HLA-DRB1*13:02L HLA-DRB1*01:03L HLA-DQA1*01:02-B1*06:02L HLA-DRB1*01:01L HLA-DRB3*02:01L HLA-DPA1*03:01-B1*04:02L HLA-DRB1*14:02L HLA-DQA1*05:05-B1*03:19L HLA-DQA1*05:01-B1*02:01L
  REGION 1..12: note = CONT. FROM ABOVE: HLA-DPA1*03:01-B1*105:01L HLA-DQA1*05:05-B1*03 :01L HLA-DPA1*01:02-B1*04:01L HLA-DRB1*07:01L HLA-DQA1*01:03-B1* 06:01L HLA-DRB1*04:08L
  source 1..12: note = Severe acute respiratory syndrome coronavirus 2
YFVLTSHTVMPL

SEQ ID NO: 11311 - protein, 12 aa, Severe acute respiratory syndrome-related coronavirus
  REGION 1..12: note = Table B: HLA-DQA1*05:01-B1*03:01L HLA-DRB1*13:02L HLA-DQA1*01:02-B1*06:02L HLA-DRB1*01:02L HLA-DPA1*03:01-B1*04:02L HLA-DQA1*05:01-B1*02:01L HLA-DPA1*03:01-B1*105:01L HLA-DRB1*14:54L
  REGION 1..12: note = CONT. FROM ABOVE: HLA-DPA1*01:02-B1*04:01L
  source 1..12: note = Severe acute respiratory syndrome coronavirus 2
FVLTSHTVMPLS

SEQ ID NO: 11312 - protein, 13 aa, Severe acute respiratory syndrome-related coronavirus
  REGION 1..13: note = Table B: HLA-DQA1*05:01-B1*03:01L HLA-DQA1*05:01-B1*02:01L HLA-DPA1*03:01-B1*105:01L HLA-DQA1*05:05-B1*03:01L
  source 1..13: note = Severe acute respiratory syndrome coronavirus 2
VLTSHTVMPLSAP

SEQ ID NO: 11313 - protein, 12 aa, Severe acute respiratory syndrome-related coronavirus
  REGION 1..12: note = Table B: HLA-DQA1*05:01-B1*03:01L HLA-DRB1*04:03L HLA-DRB1*01:03L HLA-DRB1*04:02L HLA-DRB1*01:01L HLA-DRB1*01:02L HLA-DRB4*03:01NL HLA-DRB1*08:77L HLA-DRB1*11:03L HLA-DQA1*05:05-B1*03:19L HLA-DRB1*12:01L HLA-DRB1*14:54L
  REGION 1..12: note = CONT. FROM ABOVE: HLA-DQA1*05:05-B1*03:01L HLA-DRB1*14:17L HLA-D RB1*10:01L HLA-DRB1*16:01L HLA-DQA1*02:01-B1*03:03L HLA-DRB1*15: 03L
  source 1..12: note = Severe acute respiratory syndrome coronavirus 2
VMPLSAPTLVPQ

SEQ ID NO: 11314 - protein, 13 aa, Severe acute respiratory syndrome-related coronavirus
  REGION 1..13: note = Table B: HLA-DQA1*05:01-B1*03:01L HLA-DRB1*01:03L HLA-DRB1*04:02L HLA-DRB1*04:05L HLA-DQA1*01:01-B1*05:01L HLA-DQA1*05:05-B1*03:19L HLA-DQA1*05:01-B1*02:01L HLA-DPA1*03:01-B1*105:01L HLA-DRB1*14:17L HLA-DRB1*16:01L
  source 1..13: note = Severe acute respiratory syndrome coronavirus 2
MPLSAPTLVPQEH

SEQ ID NO: 11315 - protein, 10 aa, Severe acute respiratory syndrome-related coronavirus
  REGION 1..10: note = Table B: HLA-DQA1*05:01-B1*03:01L HLA-DRB1*04:03L HLA-DRB1*13:03M HLA-DRB1*01:03L HLA-DRB1*04:02L HLA-DQA1*01:02-B1*06:02M HLA-DRB4*03:01NL HLA-DRB1*08:77L HLA-DPA1*01:03-B1*03:01L HLA-DPA1*03:01-B1*04:02L
  REGION 1..10: note = CONT. FROM ABOVE: HLA-DRB1*03:01L HLA-DRB1*14:01L HLA-DRB1*11:03 L HLA-DRB1*14:02L HLA-DQA1*01-B1*05L HLA-DQA1*05:05-B1*03:19L HL A-DQA1*05:01-B1*02:01L HLA-DPA1*01:03-B1*04:01L HLA-DPA1*01:03-B 1*04:02L HLA-DRB1*12:01L HLA-DPA1*02:01-B1*13:01L
  REGION 1..10: note = CONT. FROM ABOVE: HLA-DPA1*03:01-B1*105:01M HLA-DPA1*01:03-B1*10 4:01L HLA-DPA1*01:02-B1*04:01L HLA-DRB1*10:01L HLA-DRB1*16:01L H LA-DQA1*01:03-B1*06:01L HLA-DRB1*08:02L HLA-DQA1*02:01-B1*03:03L HLA-DRB1*15:03L
  source 1..10: note = Severe acute respiratory syndrome coronavirus 2
APTLVPQEHY

SEQ ID NO: 11316 - protein, 12 aa, Severe acute respiratory syndrome-related coronavirus
  REGION 1..12: note = Table B: HLA-DQA1*05:01-B1*03:01L HLA-DRB1*13:03L HLA-DRB1*01:03L HLA-DRB1*04:05L HLA-DRB1*01:02L HLA-DRB1*14:01L HLA-DRB1*08:01L HLA-DQA1*01-B1*05L HLA-DRB1*12:01L HLA-DPA1*03:01-B1*105:01L HLA-DPA1*01:02-B1*04:01L
  REGION 1..12: note = CONT. FROM ABOVE: HLA-DRB1*16:01L HLA-DRB1*04:08L HLA-DRB1*15:03 L
  source 1..12: note = Severe acute respiratory syndrome coronavirus 2
EHYVRITGLYPT

SEQ ID NO: 11317 - protein, 11 aa, Severe acute respiratory syndrome-related coronavirus
  REGION 1..11: note = Table B: HLA-DQA1*05:01-B1*03:01L HLA-DQA1*01:02-B1*06:02L HLA-DPA1*03:01-B1*105:01L HLA-DQA1*05:05-B1*03:01L HLA-DQA1*01:03-B1*06:01L HLA-DQA1*02:01-B1*03:03L
  source 1..11: note = Severe acute respiratory syndrome coronavirus 2
VRITGLYPTLN

SEQ ID NO: 11318 - protein, 16 aa, Severe acute respiratory syndrome-related coronavirus
  REGION 1..16: note = Table B: HLA-DQA1*05:01-B1*03:01L HLA-DRB1*01:03L HLA-DRB1*08:04L HLA-DPA1*01:03-B1*03:01L HLA-DQA1*05:05-B1*03:19L HLA-DPA1*01:03-B1*04:02L HLA-DRB1*04:08L
  source 1..16: note = Severe acute respiratory syndrome coronavirus 2
YPTLNISDEFSSNVAN

SEQ ID NO: 11319 - protein, 11 aa, Severe acute respiratory syndrome-related coronavirus
  REGION 1..11: note = Table B: HLA-DQA1*05:01-B1*03:01L HLA-DRB1*01:03L HLA-DRB1*04:05L HLA-DRB1*01:02L HLA-DPA1*01:02-B1*04:01L HLA-DQA1*01:03-B1*06:01L HLA-DRB1*04:08L
  source 1..11: note = Severe acute respiratory syndrome coronavirus 2
VANYQKVGMQK

SEQ ID NO: 11320 - protein, 12 aa, Severe acute respiratory syndrome-related coronavirus
  REGION 1..12: note = Table B: HLA-DQA1*05:01-B1*03:01L HLA-DRB1*08:77L HLA-DRB1*11:03L HLA-DQA1*05:05-B1*03:19L HLA-DRB1*10:01L HLA-DRB1*15:03L
  source 1..12: note = Severe acute respiratory syndrome coronavirus 2
YSTLQGPPGTGK

SEQ ID NO: 11321 - protein, 12 aa, Severe acute respiratory syndrome-related coronavirus
  REGION 1..12: note = Table B: HLA-DQA1*05:01-B1*03:01L HLA-DRB1*01:02L HLA-DRB1*04:08L
  source 1..12: note = Severe acute respiratory syndrome coronavirus 2
TLQGPPGTGKSH

SEQ ID NO: 11322 - protein, 10 aa, Severe acute respiratory syndrome-related coronavirus
  REGION 1..10: note = Table B: HLA-DQA1*05:01-B1*03:01L HLA-DRB1*13:03L HLA-DQA1*01:02-B1*06:02L HLA-DRB1*14:01L HLA-DRB5*01:01L HLA-DQA1*01-B1*05L HLA-DPA1*03:01-B1*105:01L
  source 1..10: note = Severe acute respiratory syndrome coronavirus 2
GPPGTGKSHF

SEQ ID NO: 11323 - protein, 12 aa, Severe acute respiratory syndrome-related coronavirus
  REGION 1..12: note = Table B: HLA-DQA1*05:01-B1*03:01L HLA-DQA1*01:02-B1*06:02L HLA-DQA1*05:05-B1*03:19L HLA-DQA1*05:05-B1*03:01L HLA-DQA1*02:01-B1*03:03L
  source 1..12: note = Severe acute respiratory syndrome coronavirus 2
PPGTGKSHFAIG

SEQ ID NO: 11324 - protein, 10 aa, Severe acute respiratory syndrome-related coronavirus
  REGION 1..10: note = Table B: HLA-DQA1*05:01-B1*03:01L HLA-DRB1*04:03L HLA-DRB1*14:01L HLA-DRB1*12:01L HLA-DPA1*03:01-B1*105:01L HLA-DQA1*03:01-B1*03:02L HLA-DPA1*01:02-B1*04:01L HLA-DRB1*16:01L HLA-DQA1*02:01-B1*03:03L HLA-DRB1*15:03L
  source 1..10: note = Severe acute respiratory syndrome coronavirus 2
YYPSARIVYT

SEQ ID NO: 11325 - protein, 10 aa, Severe acute respiratory syndrome-related coronavirus
  REGION 1..10: note = Table B: HLA-DQA1*05:01-B1*03:01L HLA-DRB1*13:03L HLA-DRB1*04:05L HLA-DQA1*01-B1*05L HLA-DPA1*01:02-B1*04:01L HLA-DRB1*16:01L
  source 1..10: note = Severe acute respiratory syndrome coronavirus 2
YPSARIVYTA

SEQ ID NO: 11326 - protein, 11 aa, Severe acute respiratory syndrome-related coronavirus
  REGION 1..11: note = Table B: HLA-DQA1*05:01-B1*03:01L HLA-DQA1*05:05-B1*03:19L HLA-DPA1*03:01-B1*105:01L HLA-DQA1*05:05-B1*03:01L HLA-DQA1*02:01-B1*03:03L
  source 1..11: note = Severe acute respiratory syndrome coronavirus 2
VYTACSHAAVD

SEQ ID NO: 11327 - protein, 14 aa, Severe acute respiratory syndrome-related coronavirus
  REGION 1..14: note = Table B: HLA-DQA1*05:01-B1*03:01L HLA-DRB1*04:05L HLA-DRB1*12:01L HLA-DRB1*16:01L HLA-DRB1*04:08L HLA-DRB1*15:03L
  source 1..14: note = Severe acute respiratory syndrome coronavirus 2
SHAAVDALCEKALK

SEQ ID NO: 11328 - protein, 14 aa, Severe acute respiratory syndrome-related coronavirus
  REGION 1..14: note = Table B: HLA-DQA1*05:01-B1*03:01L HLA-DRB1*13:03L HLA-DRB1*03:01L HLA-DRB1*11:03L HLA-DRB1*07:01L HLA-DRB1*10:01L HLA-DQA1*01:03-B1*06:01L
  source 1..14: note = Severe acute respiratory syndrome coronavirus 2
EKALKYLPIDKCSR

SEQ ID NO: 11329 - protein, 13 aa, Severe acute respiratory syndrome-related coronavirus
  REGION 1..13: note = Table B: HLA-DQA1*05:01-B1*03:01L HLA-DRB1*01:03L HLA-DRB1*01:02L HLA-DRB1*11:04L HLA-DRB1*08:01L HLA-DRB1*11:01L HLA-DQA1*03:01-B1*03:02L HLA-DQA1*05:05-B1*03:01L HLA-DRB1*16:01L HLA-DRB1*04:08L
  source 1..13: note = Severe acute respiratory syndrome coronavirus 2
LPIDKCSRIIPAR

SEQ ID NO: 11330 - protein, 10 aa, Severe acute respiratory syndrome-related coronavirus
  REGION 1..10: note = Table B: HLA-DQA1*05:01-B1*03:01L HLA-DRB1*01:03L HLA-DRB1*01:02L HLA-DRB1*12:01L HLA-DQA1*03:01-B1*03:02L HLA-DRB1*16:01L HLA-DRB1*04:08L HLA-DQA1*02:01-B1*03:03L HLA-DRB1*15:03L
  source 1..10: note = Severe acute respiratory syndrome coronavirus 2
RIIPARARVE

SEQ ID NO: 11331 - protein, 12 aa, Severe acute respiratory syndrome-related coronavirus
  REGION 1..12: note = Table B: HLA-DQA1*05:01-B1*03:01L HLA-DRB1*04:04L HLA-DQA1*01:02-B1*06:02L HLA-DRB1*08:77L HLA-DRB3*02:01L HLA-DPA1*01:03-B1*03:01L HLA-DPA1*03:01-B1*04:02L HLA-DRB1*11:03L HLA-DRB1*14:02L HLA-DQA1*01:01-B1*05:01L
  REGION 1..12: note = CONT. FROM ABOVE: HLA-DRB1*11:01L HLA-DQA1*05:01-B1*02:01L HLA-D RB1*09:01L HLA-DRB1*12:02L HLA-DRB3*01:01L HLA-DPA1*02:01-B1*13: 01L HLA-DPA1*03:01-B1*105:01L HLA-DQA1*05:05-B1*03:01L HLA-DRB1* 10:01L HLA-DRB1*15:03L
  source 1..12: note = Severe acute respiratory syndrome coronavirus 2
FDKFKVNSTLEQ

SEQ ID NO: 11332 - protein, 13 aa, Severe acute respiratory syndrome-related coronavirus
  REGION 1..13: note = Table B: HLA-DQA1*05:01-B1*03:01L HLA-DQA1*01-B1*05L HLA-DQA1*05:05-B1*03:01L
  source 1..13: note = Severe acute respiratory syndrome coronavirus 2
ALPETTADIVVFD

SEQ ID NO: 11333 - protein, 13 aa, Severe acute respiratory syndrome-related coronavirus
  REGION 1..13: note = Table B: HLA-DQA1*05:01-B1*03:01L HLA-DRB1*04:03L HLA-DRB1*01:03L HLA-DRB1*04:05L HLA-DQA1*01:01-B1*05:01L HLA-DQA1*01-B1*05L HLA-DRB1*12:01L HLA-DQA1*05:05-B1*03:01L HLA-DRB1*16:01L HLA-DRB1*04:08L
  source 1..13: note = Severe acute respiratory syndrome coronavirus 2
LPETTADIVVFDE

SEQ ID NO: 11334 - protein, 13 aa, Severe acute respiratory syndrome-related coronavirus
  REGION 1..13: note = Table B: HLA-DQA1*05:01-B1*03:01L HLA-DRB1*04:04L HLA-DRB3*02:01L HLA-DRB1*12:02L HLA-DPA1*03:01-B1*105:01L HLA-DRB1*04:08L
  source 1..13: note = Severe acute respiratory syndrome coronavirus 2
FDEISMATNYDLS

SEQ ID NO: 11335 - protein, 14 aa, Severe acute respiratory syndrome-related coronavirus
  REGION 1..14: note = Table B: HLA-DQA1*05:01-B1*03:01L HLA-DRB1*13:02L HLA-DRB3*02:01L HLA-DPA1*03:01-B1*04:02L
  source 1..14: note = Severe acute respiratory syndrome coronavirus 2
EISMATNYDLSVVN

SEQ ID NO: 11336 - protein, 10 aa, Severe acute respiratory syndrome-related coronavirus
  REGION 1..10: note = Table B: HLA-DQA1*05:01-B1*03:01L HLA-DQA1*03:01-B1*03:02L HLA-DQA1*01:03-B1*06:01L HLA-DQA1*02:01-B1*03:03L
  source 1..10: note = Severe acute respiratory syndrome coronavirus 2
DLSVVNARLR

SEQ ID NO: 11337 - protein, 12 aa, Severe acute respiratory syndrome-related coronavirus
  REGION 1..12: note = Table B: HLA-DQA1*05:01-B1*03:01L HLA-DRB1*13:02L HLA-DQA1*01:02-B1*06:02L HLA-DRB1*01:01L HLA-DRB1*08:77L HLA-DPA1*01:03-B1*03:01L HLA-DPA1*03:01-B1*04:02L HLA-DRB1*14:01L HLA-DRB1*11:03L HLA-DRB1*14:02L
  REGION 1..12: note = CONT. FROM ABOVE: HLA-DQA1*01:01-B1*05:01L HLA-DRB1*11:01L HLA-D RB5*01:01L HLA-DRB1*09:01L HLA-DRB3*01:01L HLA-DPA1*03:01-B1*105 :01L HLA-DQA1*05:05-B1*03:01L HLA-DPA1*01:02-B1*04:01L HLA-DRB1* 07:01L HLA-DRB1*15:03L
  source 1..12: note = Severe acute respiratory syndrome coronavirus 2
AKHYVYIGDPAQ

SEQ ID NO: 11338 - protein, 11 aa, Severe acute respiratory syndrome-related coronavirus
  REGION 1..11: note = Table B: HLA-DQA1*05:01-B1*03:01L HLA-DRB1*04:03L HLA-DRB1*13:02L HLA-DRB1*01:03L HLA-DRB1*04:05L HLA-DQA1*01:02-B1*06:02L HLA-DRB4*03:01NL HLA-DRB1*08:77L HLA-DRB1*11:04L HLA-DRB1*14:02L HLA-DQA1*01:01-B1*05:01L
  REGION 1..11: note = CONT. FROM ABOVE: HLA-DRB1*08:01L HLA-DRB5*01:01L HLA-DQA1*05:05 -B1*03:19L HLA-DQA1*05:01-B1*02:01L HLA-DRB1*04:10L HLA-DRB1*12: 01L HLA-DRB1*12:02L HLA-DRB1*14:54L HLA-DQA1*05:05-B1*03:01L HLA -DRB1*16:01L HLA-DQA1*01:03-B1*06:01L HLA-DRB1*04:08L
  source 1..11: note = Severe acute respiratory syndrome coronavirus 2
IGDPAQLPAPR

SEQ ID NO: 11339 - protein, 11 aa, Severe acute respiratory syndrome-related coronavirus
  REGION 1..11: note = Table B: HLA-DQA1*05:01-B1*03:01L HLA-DRB1*04:03L HLA-DRB1*01:03L HLA-DPA1*01:03-B1*03:01L HLA-DRB1*14:01L HLA-DRB1*14:02L HLA-DRB1*08:01L HLA-DRB1*11:01L HLA-DQA1*01-B1*05L HLA-DQA1*05:05-B1*03:116L HLA-DRB1*09:01L
  REGION 1..11: note = CONT. FROM ABOVE: HLA-DRB1*12:01L HLA-DQA1*05:05-B1*03:01L HLA-D RB1*04:08L HLA-DRB1*08:03L
  source 1..11: note = Severe acute respiratory syndrome coronavirus 2
GTLEPEYFNSV

SEQ ID NO: 11340 - protein, 13 aa, Severe acute respiratory syndrome-related coronavirus
  REGION 1..13: note = Table B: HLA-DQA1*05:01-B1*03:01L HLA-DRB1*13:02L HLA-DRB1*13:03L HLA-DRB1*01:03L HLA-DRB1*04:05L HLA-DQA1*01:02-B1*06:02L HLA-DRB1*01:02L HLA-DRB1*08:04L HLA-DRB1*14:01L HLA-DRB1*08:01L HLA-DRB1*11:01L
  REGION 1..13: note = CONT. FROM ABOVE: HLA-DPA1*02:01-B1*13:01L HLA-DQA1*01:03-B1*06: 01L HLA-DRB1*04:08L HLA-DQA1*02:01-B1*03:03L
  source 1..13: note = Severe acute respiratory syndrome coronavirus 2
EPEYFNSVCRLMK

SEQ ID NO: 11341 - protein, 14 aa, Severe acute respiratory syndrome-related coronavirus
  REGION 1..14: note = Table B: HLA-DQA1*05:01-B1*03:01L HLA-DRB1*01:03L HLA-DRB1*01:02L HLA-DRB1*08:01L HLA-DPA1*03:01-B1*105:01L HLA-DQA1*05:05-B1*03:01L HLA-DRB1*04:08L
  source 1..14: note = Severe acute respiratory syndrome coronavirus 2
FNSVCRLMKTIGPD

SEQ ID NO: 11342 - protein, 15 aa, Severe acute respiratory syndrome-related coronavirus
  REGION 1..15: note = Table B: HLA-DQA1*05:01-B1*03:01L HLA-DRB1*01:03L HLA-DRB1*08:04L HLA-DRB1*08:01L HLA-DRB1*11:01L HLA-DQA1*05:05-B1*03:19L HLA-DPA1*03:01-B1*105:01L HLA-DQA1*05:05-B1*03:01L HLA-DRB1*04:08L
  REGION 1..15: note = CONT. FROM ABOVE: HLA-DQA1*02:01-B1*03:03L
  source 1..15: note = Severe acute respiratory syndrome coronavirus 2
GPDMFLGTCRRCPAE

SEQ ID NO: 11343 - protein, 10 aa, Severe acute respiratory syndrome-related coronavirus
  REGION 1..10: note = Table B: HLA-DQA1*05:01-B1*03:01L HLA-DRB1*04:03L HLA-DRB1*13:03L HLA-DRB1*01:03L HLA-DQA1*01:02-B1*06:02L HLA-DRB4*03:01NL HLA-DRB1*08:77L HLA-DPA1*01:03-B1*03:01M HLA-DRB1*03:01L HLA-DRB1*11:02L HLA-DRB1*14:02L
  REGION 1..10: note = CONT. FROM ABOVE: HLA-DQA1*01-B1*05L HLA-DQA1*05:05-B1*03:19M HL A-DQA1*05:01-B1*02:01M HLA-DRB4*01:01L HLA-DPA1*01:03-B1*04:01L HLA-DQA1*05:05-B1*03:116L HLA-DPA1*01:03-B1*04:02L HLA-DRB1*12:0 1L HLA-DPA1*01:03-B1*104:01L HLA-DRB1*10:01L HLA-DRB1*16:01M
  REGION 1..10: note = CONT. FROM ABOVE: HLA-DRB1*15:03L
  source 1..10: note = Severe acute respiratory syndrome coronavirus 2
IVDTVSALVY

SEQ ID NO: 11344 - protein, 10 aa, Severe acute respiratory syndrome-related coronavirus
  REGION 1..10: note = Table B: HLA-DQA1*05:01-B1*03:01L HLA-DRB1*13:02L HLA-DRB1*13:03L HLA-DRB1*04:02L HLA-DQA1*01:02-B1*06:02L HLA-DRB4*03:01NL HLA-DRB1*08:01L HLA-DRB5*01:01L HLA-DRB1*12:01L HLA-DPA1*03:01-B1*105:01L HLA-DQA1*03:01-B1*03:02L
  REGION 1..10: note = CONT. FROM ABOVE: HLA-DQA1*05:05-B1*03:01L HLA-DRB1*14:17L HLA-D QA1*01:03-B1*06:01L HLA-DQA1*02:01-B1*03:03L
  source 1..10: note = Severe acute respiratory syndrome coronavirus 2
TVSALVYDNK

SEQ ID NO: 11345 - protein, 13 aa, Severe acute respiratory syndrome-related coronavirus
  REGION 1..13: note = Table B: HLA-DQA1*05:01-B1*03:01L HLA-DRB1*04:01L HLA-DRB1*04:04L HLA-DQA1*01:02-B1*06:02L HLA-DRB1*01:01L HLA-DRB3*02:01L HLA-DPA1*01:03-B1*03:01L HLA-DPA1*03:01-B1*04:02L HLA-DPA1*03:01-B1*105:01L
  REGION 1..13: note = CONT. FROM ABOVE: HLA-DRB1*10:01L
  source 1..13: note = Severe acute respiratory syndrome coronavirus 2
VSALVYDNKLKAH

SEQ ID NO: 11346 - protein, 12 aa, Severe acute respiratory syndrome-related coronavirus
  REGION 1..12: note = Table B: HLA-DQA1*05:01-B1*03:01L HLA-DRB1*04:01L HLA-DRB1*04:04L HLA-DQA1*01:02-B1*06:02L HLA-DRB1*01:01L HLA-DRB1*08:04L HLA-DRB1*08:77L HLA-DPA1*01:03-B1*03:01L HLA-DRB1*14:02L HLA-DQA1*05:01-B1*02:01L HLA-DRB1*13:01L
  REGION 1..12: note = CONT. FROM ABOVE: HLA-DPA1*03:01-B1*105:01L HLA-DPA1*01:02-B1*04 :01L HLA-DRB1*10:01L HLA-DQA1*01:03-B1*06:01L HLA-DRB1*08:03L HL A-DQA1*02:01-B1*03:03L
  source 1..12: note = Severe acute respiratory syndrome coronavirus 2
LVYDNKLKAHKD

SEQ ID NO: 11347 - protein, 16 aa, Severe acute respiratory syndrome-related coronavirus
  REGION 1..16: note = Table B: HLA-DQA1*05:01-B1*03:01L HLA-DRB1*12:01L HLA-DPA1*02:01-B1*13:01L HLA-DPA1*03:01-B1*105:01L
  source 1..16: note = Severe acute respiratory syndrome coronavirus 2
AHKDKSAQCFKMFYKG

SEQ ID NO: 11348 - protein, 12 aa, Severe acute respiratory syndrome-related coronavirus
  REGION 1..12: note = Table B: HLA-DQA1*05:01-B1*03:01L HLA-DRB1*04:03L HLA-DRB1*04:02L HLA-DRB1*14:17L HLA-DRB1*16:01L HLA-DQA1*02:01-B1*03:03L
  source 1..12: note = Severe acute respiratory syndrome coronavirus 2
ITHDVSSAINRP

SEQ ID NO: 11349 - protein, 10 aa, Severe acute respiratory syndrome-related coronavirus
  REGION 1..10: note = Table B: HLA-DQA1*05:01-B1*03:01L HLA-DRB1*13:03L HLA-DRB1*01:03L HLA-DQA1*01:02-B1*06:02M HLA-DPA1*01:03-B1*03:01L HLA-DPA1*03:01-B1*04:02L HLA-DRB1*14:01L HLA-DRB1*14:02L HLA-DRB1*08:01L HLA-DRB5*01:01L
  REGION 1..10: note = CONT. FROM ABOVE: HLA-DQA1*01-B1*05L HLA-DQA1*05:01-B1*02:01L HL A-DPA1*01:03-B1*04:01L HLA-DRB3*01:01L HLA-DPA1*02:01-B1*13:01L HLA-DPA1*03:01-B1*105:01M HLA-DPA1*01:02-B1*04:01L HLA-DQA1*01:0 3-B1*06:01L HLA-DQA1*02:01-B1*03:03L HLA-DRB1*15:03L
  source 1..10: note = Severe acute respiratory syndrome coronavirus 2
RPQIGVVREF

SEQ ID NO: 11350 - protein, 13 aa, Severe acute respiratory syndrome-related coronavirus
  REGION 1..13: note = Table B: HLA-DQA1*05:01-B1*03:01L HLA-DRB1*01:03L HLA-DQA1*01:02-B1*06:02L HLA-DRB1*01:02L HLA-DRB1*08:01L HLA-DQA1*05:05-B1*03:19L HLA-DQA1*05:01-B1*02:01L HLA-DRB1*12:01L HLA-DPA1*02:01-B1*13:01L
  REGION 1..13: note = CONT. FROM ABOVE: HLA-DPA1*03:01-B1*105:01L HLA-DQA1*03:01-B1*03 :02L HLA-DPA1*01:02-B1*04:01L HLA-DRB1*16:01L HLA-DQA1*01:03-B1* 06:01L HLA-DRB1*04:08L HLA-DQA1*02:01-B1*03:03L HLA-DRB1*15:03L
  source 1..13: note = Severe acute respiratory syndrome coronavirus 2
NPAWRKAVFISPY

SEQ ID NO: 11351 - protein, 11 aa, Severe acute respiratory syndrome-related coronavirus
  REGION 1..11: note = Table B: HLA-DQA1*05:01-B1*03:01L HLA-DRB1*13:02L HLA-DRB1*01:03L HLA-DRB1*04:05L HLA-DRB1*01:01L HLA-DRB1*01:02L HLA-DRB1*14:54L HLA-DQA1*05:05-B1*03:01L HLA-DRB1*10:01L HLA-DRB1*04:08L HLA-DQA1*02:01-B1*03:03L
  source 1..11: note = Severe acute respiratory syndrome coronavirus 2
PYNSQNAVASK

SEQ ID NO: 11352 - protein, 11 aa, Severe acute respiratory syndrome-related coronavirus
  REGION 1..11: note = Table B: HLA-DQA1*05:01-B1*03:01L
  source 1..11: note = Severe acute respiratory syndrome coronavirus 2
NSQNAVASKIL

SEQ ID NO: 11353 - protein, 11 aa, Severe acute respiratory syndrome-related coronavirus
  REGION 1..11: note = Table B: HLA-DQA1*05:01-B1*03:01L HLA-DRB1*04:03L HLA-DRB1*04:02L HLA-DQA1*01:02-B1*06:02L HLA-DQA1*05:05-B1*03:19L HLA-DQA1*05:05-B1*03:01L
  source 1..11: note = Severe acute respiratory syndrome coronavirus 2
SQNAVASKILG

SEQ ID NO: 11354 - protein, 11 aa, Severe acute respiratory syndrome-related coronavirus
  REGION 1..11: note = Table B: HLA-DQA1*05:01-B1*03:01L HLA-DRB1*04:03L HLA-DQA1*01:02-B1*06:02L HLA-DPA1*03:01-B1*105:01L HLA-DQA1*03:01-B1*03:02L HLA-DRB1*14:17L HLA-DPA1*01:02-B1*04:01L HLA-DQA1*02:01-B1*03:03L
  source 1..11: note = Severe acute respiratory syndrome coronavirus 2
AVASKILGLPT

SEQ ID NO: 11355 - protein, 10 aa, Severe acute respiratory syndrome-related coronavirus
  REGION 1..10: note = Table B: HLA-DQA1*05:01-B1*03:01L HLA-DRB1*13:03L HLA-DRB1*01:03L HLA-DQA1*01:02-B1*06:02L HLA-DRB4*03:01NL HLA-DRB1*08:77M HLA-DPA1*01:03-B1*03:01M HLA-DPA1*03:01-B1*04:02L HLA-DRB1*03:01M HLA-DRB1*11:02M
  REGION 1..10: note = CONT. FROM ABOVE: HLA-DRB1*11:03L HLA-DRB1*11:04L HLA-DRB1*14:02 L HLA-DRB5*01:01L HLA-DQA1*01-B1*05M HLA-DQA1*05:05-B1*03:19M HL A-DQA1*05:01-B1*02:01M HLA-DRB4*01:01L HLA-DPA1*01:03-B1*04:01L HLA-DQA1*05:05-B1*03:116L HLA-DPA1*01:03-B1*04:02L
  REGION 1..10: note = CONT. FROM ABOVE: HLA-DRB1*12:01L HLA-DPA1*01:03-B1*104:01M HLA- DRB1*10:01M HLA-DRB1*16:01M HLA-DRB1*08:02L HLA-DRB1*15:03L
  source 1..10: note = Severe acute respiratory syndrome coronavirus 2
TVDSSQGSEY

SEQ ID NO: 11356 - protein, 13 aa, Severe acute respiratory syndrome-related coronavirus
  REGION 1..13: note = Table B: HLA-DQA1*05:01-B1*03:01L HLA-DRB1*04:03L HLA-DQA1*01:02-B1*06:02L HLA-DRB1*01:02L HLA-DRB1*08:04L HLA-DRB1*08:01L HLA-DQA1*03:01-B1*03:02L HLA-DPA1*01:03-B1*02:01L HLA-DPA1*01:03-B1*104:01L
  REGION 1..13: note = CONT. FROM ABOVE: HLA-DQA1*05:05-B1*03:01L HLA-DQA1*02:01-B1*03: 03L
  source 1..13: note = Severe acute respiratory syndrome coronavirus 2
GSEYDYVIFTQTT

SEQ ID NO: 11357 - protein, 14 aa, Severe acute respiratory syndrome-related coronavirus
  REGION 1..14: note = Table B: HLA-DQA1*05:01-B1*03:01L HLA-DRB1*13:02L HLA-DRB1*01:02L HLA-DRB1*08:04L HLA-DRB1*11:01L HLA-DQA1*05:05-B1*03:19L HLA-DPA1*01:03-B1*104:01L HLA-DQA1*05:05-B1*03:01L
  source 1..14: note = Severe acute respiratory syndrome coronavirus 2
SEYDYVIFTQTTET

SEQ ID NO: 11358 - protein, 11 aa, Severe acute respiratory syndrome-related coronavirus
  REGION 1..11: note = Table B: HLA-DQA1*05:01-B1*03:01L HLA-DRB1*04:01L HLA-DRB1*13:02L HLA-DRB1*04:04L HLA-DQA1*01:02-B1*06:02L HLA-DRB1*01:01L HLA-DRB1*01:02L HLA-DRB1*08:04L HLA-DRB1*08:77L HLA-DRB3*02:01L HLA-DPA1*01:03-B1*03:01L HLA-DRB1*14:01L
  REGION 1..11: note = CONT. FROM ABOVE: HLA-DRB1*11:03L HLA-DRB1*11:04L HLA-DRB1*14:02 L HLA-DRB1*11:01L HLA-DRB5*01:01L HLA-DQA1*05:05-B1*03:19L HLA-D RB4*01:01L HLA-DRB1*09:01L HLA-DRB1*12:02L HLA-DPA1*03:01-B1*105 :01L HLA-DQA1*05:05-B1*03:01L HLA-DRB1*07:01L HLA-DRB1*10:01L
  REGION 1..11: note = CONT. FROM ABOVE: HLA-DQA1*01:03-B1*06:01L HLA-DRB1*08:03L HLA-D RB1*15:03L
  source 1..11: note = Severe acute respiratory syndrome coronavirus 2
IFTQTTETAHS

SEQ ID NO: 11359 - protein, 12 aa, Severe acute respiratory syndrome-related coronavirus
  REGION 1..12: note = Table B: HLA-DQA1*05:01-B1*03:01L HLA-DQA1*05:05-B1*03:19L HLA-DPA1*03:01-B1*105:01L
  source 1..12: note = Severe acute respiratory syndrome coronavirus 2
ETAHSCNVNRFN

SEQ ID NO: 11360 - protein, 12 aa, Severe acute respiratory syndrome-related coronavirus
  REGION 1..12: note = Table B: HLA-DQA1*05:01-B1*03:01L HLA-DRB1*04:03L HLA-DRB1*04:05L HLA-DQA1*01:02-B1*06:02L HLA-DRB1*08:01L HLA-DRB1*12:01L HLA-DRB1*14:17L HLA-DRB1*04:08L HLA-DRB1*15:03L
  source 1..12: note = Severe acute respiratory syndrome coronavirus 2
VNRFNVAITRAK

SEQ ID NO: 11361 - protein, 13 aa, Severe acute respiratory syndrome-related coronavirus
  REGION 1..13: note = Table B: HLA-DQA1*05:01-B1*03:01L HLA-DRB1*13:03L HLA-DRB1*04:04L HLA-DRB1*04:10L HLA-DRB3*01:01L HLA-DPA1*02:01-B1*13:01L
  source 1..13: note = Severe acute respiratory syndrome coronavirus 2
DKLQFTSLEIPRR

SEQ ID NO: 11362 - protein, 10 aa, Severe acute respiratory syndrome-related coronavirus
  REGION 1..10: note = Table B: HLA-DQA1*05:01-B1*03:01L HLA-DQA1*03:01-B1*03:02L HLA-DQA1*01:03-B1*06:01L HLA-DQA1*02:01-B1*03:03L
  source 1..10: note = Severe acute respiratory syndrome coronavirus 2
FTSLEIPRRN

SEQ ID NO: 11363 - protein, 14 aa, Severe acute respiratory syndrome-related coronavirus
  REGION 1..14: note = Table B: HLA-DQA1*05:01-B1*03:01L HLA-DPA1*02:01-B1*13:01L HLA-DPA1*03:01-B1*105:01L HLA-DQA1*02:01-B1*03:03L
  source 1..14: note = Severe acute respiratory syndrome coronavirus 2
VTGLFKDCSKVITG

SEQ ID NO: 11364 - protein, 12 aa, Severe acute respiratory syndrome-related coronavirus
  REGION 1..12: note = Table B: HLA-DQA1*05:01-B1*03:01L HLA-DRB1*04:03L HLA-DRB1*01:02L HLA-DRB1*12:01L HLA-DRB1*14:17L HLA-DRB1*16:01L HLA-DRB1*15:03L
  source 1..12: note = Severe acute respiratory syndrome coronavirus 2
KVITGLHPTQAP

SEQ ID NO: 11365 - protein, 11 aa, Severe acute respiratory syndrome-related coronavirus
  REGION 1..11: note = Table B: HLA-DQA1*05:01-B1*03:01L HLA-DRB1*04:03L HLA-DRB1*04:02L HLA-DRB1*01:02L HLA-DRB4*03:01NL HLA-DQA1*03:01-B1*03:02L HLA-DQA1*05:05-B1*03:01L HLA-DRB1*14:17L HLA-DQA1*02:01-B1*03:03L
  source 1..11: note = Severe acute respiratory syndrome coronavirus 2
ITGLHPTQAPT

SEQ ID NO: 11366 - protein, 10 aa, Severe acute respiratory syndrome-related coronavirus
  REGION 1..10: note = Table B: HLA-DQA1*05:01-B1*03:01L HLA-DRB1*04:03L HLA-DRB1*13:03L HLA-DRB1*01:03L HLA-DRB1*04:02L HLA-DRB4*03:01NL HLA-DQA1*03:01-B1*03:02L HLA-DRB1*14:17L HLA-DRB1*16:01L HLA-DQA1*02:01-B1*03:03L
  source 1..10: note = Severe acute respiratory syndrome coronavirus 2
GLHPTQAPTH

SEQ ID NO: 11367 - protein, 14 aa, Severe acute respiratory syndrome-related coronavirus
  REGION 1..14: note = Table B: HLA-DQA1*05:01-B1*03:01L HLA-DRB1*01:02L HLA-DRB1*08:01L
  source 1..14: note = Severe acute respiratory syndrome coronavirus 2
HPTQAPTHLSVDTK

SEQ ID NO: 11368 - protein, 14 aa, Severe acute respiratory syndrome-related coronavirus
  REGION 1..14: note = Table B: HLA-DQA1*05:01-B1*03:01L HLA-DRB1*04:04L HLA-DRB4*03:01NL HLA-DRB1*08:04L HLA-DRB1*08:77L HLA-DRB3*02:01L HLA-DPA1*01:03-B1*03:01L HLA-DPA1*03:01-B1*04:02L HLA-DRB1*03:01L HLA-DRB1*11:03L HLA-DRB1*11:04L HLA-DRB1*14:02L
  REGION 1..14: note = CONT. FROM ABOVE: HLA-DRB1*11:01L HLA-DQA1*05:01-B1*02:01L HLA-D RB1*04:10L HLA-DRB1*12:02L HLA-DPA1*02:01-B1*13:01L HLA-DPA1*03: 01-B1*105:01L HLA-DPA1*01:02-B1*04:01L HLA-DRB1*10:01L HLA-DRB1* 08:03L HLA-DRB1*15:03L
  source 1..14: note = Severe acute respiratory syndrome coronavirus 2
APTHLSVDTKFKTE

SEQ ID NO: 11369 - protein, 11 aa, Severe acute respiratory syndrome-related coronavirus
  REGION 1..11: note = Table B: HLA-DQA1*05:01-B1*03:01L HLA-DRB1*14:01L
  source 1..11: note = Severe acute respiratory syndrome coronavirus 2
SVDTKFKTEGL

SEQ ID NO: 11370 - protein, 10 aa, Severe acute respiratory syndrome-related coronavirus
  REGION 1..10: note = Table B: HLA-DQA1*05:01-B1*03:01L HLA-DRB1*13:03L HLA-DQA1*01:02-B1*06:02M HLA-DPA1*01:03-B1*03:01L HLA-DQA1*05:05-B1*03:19L HLA-DQA1*05:01-B1*02:01L HLA-DPA1*03:01-B1*105:01L HLA-DRB1*15:03L
  source 1..10: note = Severe acute respiratory syndrome coronavirus 2
IPGIPKDMTY

SEQ ID NO: 11371 - protein, 10 aa, Severe acute respiratory syndrome-related coronavirus
  REGION 1..10: note = Table B: HLA-DQA1*05:01-B1*03:01L HLA-DRB1*14:01L HLA-DRB1*08:01L HLA-DRB3*01:01L HLA-DQA1*03:01-B1*03:02L
  source 1..10: note = Severe acute respiratory syndrome coronavirus 2
IPKDMTYRRL

SEQ ID NO: 11372 - protein, 14 aa, Severe acute respiratory syndrome-related coronavirus
  REGION 1..14: note = Table B: HLA-DQA1*05:01-B1*03:01L HLA-DRB1*13:02L HLA-DRB1*04:02L HLA-DRB1*08:04L HLA-DRB1*14:01L HLA-DRB3*01:01L HLA-DPA1*02:01-B1*13:01L HLA-DPA1*03:01-B1*105:01L HLA-DQA1*03:01-B1*03:02L HLA-DPA1*01:02-B1*04:01L
  REGION 1..14: note = CONT. FROM ABOVE: HLA-DRB1*07:01L HLA-DRB1*10:01L HLA-DQA1*02:01 -B1*03:03L
  source 1..14: note = Severe acute respiratory syndrome coronavirus 2
DMTYRRLISMMGFK

SEQ ID NO: 11373 - protein, 14 aa, Severe acute respiratory syndrome-related coronavirus
  REGION 1..14: note = Table B: HLA-DQA1*05:01-B1*03:01L HLA-DRB1*13:02L HLA-DRB1*04:04L HLA-DRB1*04:05L HLA-DRB1*01:01L HLA-DRB1*14:01L HLA-DRB1*08:01L HLA-DRB3*01:01L HLA-DRB1*07:01L HLA-DQA1*01:03-B1*06:01L HLA-DRB1*15:01L
  source 1..14: note = Severe acute respiratory syndrome coronavirus 2
RRLISMMGFKMNYQ

SEQ ID NO: 11374 - protein, 12 aa, Severe acute respiratory syndrome-related coronavirus
  REGION 1..12: note = Table B: HLA-DQA1*05:01-B1*03:01L HLA-DRB1*14:04L HLA-DRB1*04:01L HLA-DRB1*13:02L HLA-DRB1*13:03L HLA-DRB1*01:03L HLA-DRB1*04:04L HLA-DRB1*04:05L HLA-DQA1*01:02-B1*06:02L HLA-DRB1*01:01L HLA-DRB1*01:02L HLA-DRB4*03:01NL HLA-DRB1*08:04L
  REGION 1..12: note = CONT. FROM ABOVE: HLA-DRB1*08:77L HLA-DRB3*02:01L HLA-DPA1*01:03 -B1*03:01L HLA-DPA1*03:01-B1*04:02L HLA-DRB1*03:01L HLA-DRB1*14: 01M HLA-DRB1*11:02L HLA-DRB1*11:03L HLA-DRB1*11:04L HLA-DRB1*14: 02L HLA-DRB1*08:01L HLA-DRB1*11:01L HLA-DQA1*05:05-B1*03:19L
  REGION 1..12: note = CONT. FROM ABOVE: HLA-DRB1*04:10L HLA-DRB1*09:01L HLA-DPA1*01:03 -B1*04:02L HLA-DRB1*12:01M HLA-DRB1*12:02L HLA-DRB3*01:01L HLA-D PA1*02:01-B1*13:01L HLA-DPA1*03:01-B1*105:01L HLA-DRB1*14:54L HL A-DPA1*01:03-B1*02:01L HLA-DPA1*01:03-B1*104:01L
  REGION 1..12: note = CONT. FROM ABOVE: HLA-DQA1*05:05-B1*03:01L HLA-DPA1*01:02-B1*04: 01L HLA-DRB1*07:01L HLA-DRB1*10:01L HLA-DRB1*16:01L HLA-DQA1*01: 03-B1*06:01L HLA-DRB1*04:08L HLA-DRB1*08:03L HLA-DRB1*15:03L
  source 1..12: note = Severe acute respiratory syndrome coronavirus 2
FKMNYQVNGYPN

SEQ ID NO: 11375 - protein, 12 aa, Severe acute respiratory syndrome-related coronavirus
  REGION 1..12: note = Table B: HLA-DQA1*05:01-B1*03:01L HLA-DRB1*04:03L HLA-DRB1*04:02L HLA-DQA1*01:02-B1*06:02L HLA-DQA1*05:01-B1*02:01L HLA-DPA1*03:01-B1*105:01L HLA-DQA1*01:03-B1*06:01L
  source 1..12: note = Severe acute respiratory syndrome coronavirus 2
GYPNMFITREEA

SEQ ID NO: 11376 - protein, 12 aa, Severe acute respiratory syndrome-related coronavirus
  REGION 1..12: note = Table B: HLA-DQA1*05:01-B1*03:01L HLA-DRB1*13:02L HLA-DRB1*01:03L HLA-DQA1*01:02-B1*06:02L HLA-DRB1*01:02L HLA-DRB1*14:01L HLA-DRB1*08:01L HLA-DQA1*05:01-B1*02:01L HLA-DRB1*12:01L HLA-DPA1*03:01-B1*105:01L HLA-DRB1*07:01L
  REGION 1..12: note = CONT. FROM ABOVE: HLA-DQA1*01:03-B1*06:01L HLA-DRB1*04:08L HLA-D RB1*15:03L
  source 1..12: note = Severe acute respiratory syndrome coronavirus 2
PNMFITREEAIR

SEQ ID NO: 11377 - protein, 10 aa, Severe acute respiratory syndrome-related coronavirus
  REGION 1..10: note = Table B: HLA-DQA1*05:01-B1*03:01L HLA-DRB1*01:03L HLA-DRB1*01:02L HLA-DRB1*08:01L HLA-DRB1*12:01L HLA-DQA1*03:01-B1*03:02L HLA-DRB1*14:17L HLA-DPA1*01:02-B1*04:01L HLA-DRB1*16:01L HLA-DRB1*04:08L
  REGION 1..10: note = CONT. FROM ABOVE: HLA-DQA1*02:01-B1*03:03L
  source 1..10: note = Severe acute respiratory syndrome coronavirus 2
FITREEAIRH

SEQ ID NO: 11378 - protein, 13 aa, Severe acute respiratory syndrome-related coronavirus
  REGION 1..13: note = Table B: HLA-DQA1*05:01-B1*03:01L HLA-DRB1*04:03L HLA-DRB1*01:03L HLA-DRB1*04:02L HLA-DRB1*04:04L HLA-DPA1*03:01-B1*105:01L HLA-DQA1*05:05-B1*03:01L HLA-DRB1*04:08L
  source 1..13: note = Severe acute respiratory syndrome coronavirus 2
EAIRHVRAWIGFD

SEQ ID NO: 11379 - protein, 14 aa, Severe acute respiratory syndrome-related coronavirus
  REGION 1..14: note = Table B: HLA-DQA1*05:01-B1*03:01L HLA-DRB1*13:02L HLA-DRB3*02:01L HLA-DRB1*14:02L HLA-DQA1*05:05-B1*03:19L HLA-DQA1*05:01-B1*02:01L HLA-DQA1*05:05-B1*03:01L
  source 1..14: note = Severe acute respiratory syndrome coronavirus 2
AIRHVRAWIGFDVE

SEQ ID NO: 11380 - protein, 16 aa, Severe acute respiratory syndrome-related coronavirus
  REGION 1..16: note = Table B: HLA-DQA1*05:01-B1*03:01L HLA-DRB1*04:01L HLA-DRB1*13:02L HLA-DRB1*04:04L HLA-DRB1*04:05L HLA-DRB1*14:02L HLA-DRB1*08:01L HLA-DRB1*11:01L HLA-DRB3*01:01L HLA-DPA1*02:01-B1*13:01L HLA-DQA1*03:01-B1*03:02L
  REGION 1..16: note = CONT. FROM ABOVE: HLA-DRB1*10:01L HLA-DQA1*01:03-B1*06:01L HLA-D QA1*02:01-B1*03:03L
  source 1..16: note = Severe acute respiratory syndrome coronavirus 2
VRAWIGFDVEGCHATR

SEQ ID NO: 11381 - protein, 13 aa, Severe acute respiratory syndrome-related coronavirus
  REGION 1..13: note = Table B: HLA-DQA1*05:01-B1*03:01L HLA-DRB1*01:02L HLA-DPA1*03:01-B1*105:01L HLA-DQA1*03:01-B1*03:02L HLA-DQA1*05:05-B1*03:01L HLA-DQA1*01:03-B1*06:01L HLA-DRB1*04:08L HLA-DQA1*02:01-B1*03:03L
  source 1..13: note = Severe acute respiratory syndrome coronavirus 2
IGFDVEGCHATRE

SEQ ID NO: 11382 - protein, 12 aa, Severe acute respiratory syndrome-related coronavirus
  REGION 1..12: note = Table B: HLA-DQA1*05:01-B1*03:01L HLA-DQA1*01:02-B1*06:02M HLA-DQA1*03:01-B1*03:02L HLA-DQA1*05:05-B1*03:01L HLA-DQA1*02:01-B1*03:03L
  source 1..12: note = Severe acute respiratory syndrome coronavirus 2
VEGCHATREAVG

SEQ ID NO: 11383 - protein, 11 aa, Severe acute respiratory syndrome-related coronavirus
  REGION 1..11: note = Table B: HLA-DQA1*05:01-B1*03:01L HLA-DRB1*04:03L HLA-DRB1*04:02L HLA-DRB1*14:17L
  source 1..11: note = Severe acute respiratory syndrome coronavirus 2
REAVGTNLPLQ

SEQ ID NO: 11384 - protein, 11 aa, Severe acute respiratory syndrome-related coronavirus
  REGION 1..11: note = Table B: HLA-DQA1*05:01-B1*03:01L HLA-DQA1*01:02-B1*06:02L HLA-DPA1*03:01-B1*105:01L
  source 1..11: note = Severe acute respiratory syndrome coronavirus 2
EAVGTNLPLQL

SEQ ID NO: 11385 - protein, 11 aa, Severe acute respiratory syndrome-related coronavirus
  REGION 1..11: note = Table B: HLA-DQA1*05:01-B1*03:01L HLA-DRB1*04:03L HLA-DQA1*01:02-B1*06:02L HLA-DQA1*05:01-B1*02:01L HLA-DPA1*03:01-B1*105:01L
  source 1..11: note = Severe acute respiratory syndrome coronavirus 2
AVGTNLPLQLG

SEQ ID NO: 11386 - protein, 13 aa, Severe acute respiratory syndrome-related coronavirus
  REGION 1..13: note = Table B: HLA-DQA1*05:01-B1*03:01L HLA-DRB1*13:02L HLA-DRB1*13:03L HLA-DRB1*01:03L HLA-DQA1*01:02-B1*06:02L HLA-DRB1*01:02L HLA-DRB4*03:01NL HLA-DQA1*05:05-B1*03:19L HLA-DRB1*12:01L HLA-DPA1*02:01-B1*13:01L
  REGION 1..13: note = CONT. FROM ABOVE: HLA-DPA1*03:01-B1*105:01L HLA-DRB1*14:54L HLA- DQA1*05:05-B1*03:01L HLA-DRB1*04:08L HLA-DRB1*15:03L
  source 1..13: note = Severe acute respiratory syndrome coronavirus 2
LVAVPTGYVDTPN

SEQ ID NO: 11387 - protein, 13 aa, Severe acute respiratory syndrome-related coronavirus
  REGION 1..13: note = Table B: HLA-DQA1*05:01-B1*03:01L HLA-DRB1*13:03L HLA-DRB1*01:03L HLA-DQA1*01:02-B1*06:02L HLA-DRB4*03:01NL HLA-DQA1*05:05-B1*03:19L HLA-DRB1*12:01L HLA-DPA1*02:01-B1*13:01L HLA-DPA1*03:01-B1*105:01L
  REGION 1..13: note = CONT. FROM ABOVE: HLA-DQA1*05:05-B1*03:01L HLA-DRB1*04:08L HLA-D RB1*15:03L
  source 1..13: note = Severe acute respiratory syndrome coronavirus 2
VAVPTGYVDTPNN

SEQ ID NO: 11388 - protein, 13 aa, Severe acute respiratory syndrome-related coronavirus
  REGION 1..13: note = Table B: HLA-DQA1*05:01-B1*03:01L HLA-DRB1*04:01L HLA-DRB1*13:02L HLA-DRB1*13:03L HLA-DRB1*01:03L HLA-DRB1*04:04L HLA-DRB1*04:05M HLA-DQA1*01:02-B1*06:02L HLA-DRB1*01:02L HLA-DRB4*03:01NL HLA-DRB1*08:04L HLA-DRB1*08:77L HLA-DRB3*02:01L
  REGION 1..13: note = CONT. FROM ABOVE: HLA-DPA1*01:03-B1*03:01L HLA-DPA1*03:01-B1*04: 02L HLA-DRB1*14:01L HLA-DRB1*11:03L HLA-DRB1*11:04L HLA-DRB1*14: 02L HLA-DQA1*01:01-B1*05:01L HLA-DRB1*08:01L HLA-DRB5*01:01L HLA -DQA1*05:05-B1*03:19L HLA-DRB1*13:01L HLA-DRB4*01:01L
  REGION 1..13: note = CONT. FROM ABOVE: HLA-DRB1*04:10M HLA-DRB1*09:01L HLA-DPA1*01:03 -B1*04:02L HLA-DRB1*12:01L HLA-DRB1*12:02L HLA-DRB3*01:01L HLA-D PA1*02:01-B1*13:01L HLA-DPA1*03:01-B1*105:01L HLA-DRB1*14:54L HL A-DPA1*01:03-B1*104:01L HLA-DQA1*05:05-B1*03:01L HLA-DRB1*14:17L
  REGION 1..13: note = CONT. FROM ABOVE: HLA-DPA1*01:02-B1*04:01L HLA-DRB1*07:01L HLA-D RB1*10:01L HLA-DQA1*01:03-B1*06:01L HLA-DRB1*04:08L HLA-DRB1*08: 03L HLA-DRB1*15:03L
  source 1..13: note = Severe acute respiratory syndrome coronavirus 2
VPTGYVDTPNNTD

SEQ ID NO: 11389 - protein, 10 aa, Severe acute respiratory syndrome-related coronavirus
  REGION 1..10: note = Table B: HLA-DQA1*05:01-B1*03:01L HLA-DRB1*13:03L HLA-DQA1*01-B1*05L HLA-DPA1*03:01-B1*105:01L HLA-DPA1*01:02-B1*04:01L
  source 1..10: note = Severe acute respiratory syndrome coronavirus 2
TPNNTDFSRV

SEQ ID NO: 11390 - protein, 12 aa, Severe acute respiratory syndrome-related coronavirus
  REGION 1..12: note = Table B: HLA-DQA1*05:01-B1*03:01L HLA-DRB1*13:03L HLA-DRB1*04:05L HLA-DRB1*01:02L HLA-DRB1*08:01L HLA-DRB1*12:01L HLA-DRB1*16:01L HLA-DRB1*04:08L HLA-DQA1*02:01-B1*03:03L
  source 1..12: note = Severe acute respiratory syndrome coronavirus 2
DFSRVSAKPPPG

SEQ ID NO: 11391 - protein, 11 aa, Severe acute respiratory syndrome-related coronavirus
  REGION 1..11: note = Table B: HLA-DQA1*05:01-B1*03:01L HLA-DPA1*03:01-B1*04:02L HLA-DRB1*12:01L
  source 1..11: note = Severe acute respiratory syndrome coronavirus 2
DQFKHLIPLMY

SEQ ID NO: 11392 - protein, 10 aa, Severe acute respiratory syndrome-related coronavirus
  REGION 1..10: note = Table B: HLA-DQA1*05:01-B1*03:01L HLA-DRB1*04:03L HLA-DRB1*13:02L HLA-DRB1*13:03L HLA-DRB1*01:03M HLA-DQA1*01:02-B1*06:02L HLA-DRB1*01:02L HLA-DPA1*01:03-B1*03:01L HLA-DPA1*03:01-B1*04:02L
  REGION 1..10: note = CONT. FROM ABOVE: HLA-DRB1*14:01L HLA-DRB1*11:04L HLA-DRB1*08:01 L HLA-DRB1*11:01L HLA-DPA1*01:03-B1*04:01L HLA-DPA1*01:03-B1*04: 02L HLA-DRB1*12:01L HLA-DRB3*01:01L HLA-DPA1*03:01-B1*105:01L HL A-DQA1*03:01-B1*03:02L HLA-DPA1*01:03-B1*02:01L
  REGION 1..10: note = CONT. FROM ABOVE: HLA-DQA1*05:05-B1*03:01L HLA-DPA1*01:02-B1*04: 01M HLA-DRB1*16:01L HLA-DQA1*01:03-B1*06:01L HLA-DRB1*04:08M HLA -DQA1*02:01-B1*03:03L HLA-DRB1*15:03L
  source 1..10: note = Severe acute respiratory syndrome coronavirus 2
YKGLPWNVVR

SEQ ID NO: 11393 - protein, 12 aa, Severe acute respiratory syndrome-related coronavirus
  REGION 1..12: note = Table B: HLA-DQA1*05:01-B1*03:01L HLA-DRB1*01:03L HLA-DRB1*01:02L HLA-DPA1*03:01-B1*04:02L HLA-DRB1*14:01L HLA-DRB1*08:01L HLA-DRB1*12:01L HLA-DQA1*03:01-B1*03:02L HLA-DPA1*01:02-B1*04:01L HLA-DRB1*16:01L HLA-DRB1*04:08L
  REGION 1..12: note = CONT. FROM ABOVE: HLA-DQA1*02:01-B1*03:03L
  source 1..12: note = Severe acute respiratory syndrome coronavirus 2
LPWNVVRIKIVQ

SEQ ID NO: 11394 - protein, 12 aa, Severe acute respiratory syndrome-related coronavirus
  REGION 1..12: note = Table B: HLA-DQA1*05:01-B1*03:01L HLA-DRB1*01:03L HLA-DRB1*04:04L HLA-DRB1*04:05L HLA-DQA1*01:02-B1*06:02L HLA-DPA1*03:01-B1*04:02L HLA-DRB1*14:01L HLA-DRB1*04:10L HLA-DPA1*02:01-B1*13:01L HLA-DRB1*04:08L
  source 1..12: note = Severe acute respiratory syndrome coronavirus 2
IKIVQMLSDTLK

SEQ ID NO: 11395 - protein, 11 aa, Severe acute respiratory syndrome-related coronavirus
  REGION 1..11: note = Table B: HLA-DQA1*05:01-B1*03:01L HLA-DRB1*01:03L HLA-DRB1*04:04L HLA-DRB1*04:05L HLA-DQA1*01:02-B1*06:02L HLA-DRB4*03:01NL HLA-DRB1*14:01L HLA-DRB1*04:10L HLA-DRB1*14:54L HLA-DRB1*10:01L HLA-DRB1*04:08L
  source 1..11: note = Severe acute respiratory syndrome coronavirus 2
IVQMLSDTLKN

SEQ ID NO: 11396 - protein, 13 aa, Severe acute respiratory syndrome-related coronavirus
  REGION 1..13: note = Table B: HLA-DQA1*05:01-B1*03:01L HLA-DRB1*01:03L HLA-DRB1*04:04L HLA-DRB1*04:05L HLA-DRB1*08:04L HLA-DRB1*04:10L HLA-DRB1*14:54L HLA-DPA1*01:02-B1*04:01L HLA-DRB1*04:08L
  source 1..13: note = Severe acute respiratory syndrome coronavirus 2
SDTLKNLSDRVVF

SEQ ID NO: 11397 - protein, 11 aa, Severe acute respiratory syndrome-related coronavirus
  REGION 1..11: note = Table B: HLA-DQA1*05:01-B1*03:01L HLA-DRB1*04:03L HLA-DRB1*01:02L HLA-DRB1*14:01L HLA-DQA1*01-B1*05L HLA-DQA1*05:01-B1*02:01L HLA-DPA1*01:03-B1*04:01L HLA-DPA1*01:03-B1*04:02L HLA-DRB1*12:01L
  REGION 1..11: note = CONT. FROM ABOVE: HLA-DPA1*03:01-B1*105:01L HLA-DPA1*01:02-B1*04 :01L HLA-DRB1*16:01L HLA-DQA1*02:01-B1*03:03L
  source 1..11: note = Severe acute respiratory syndrome coronavirus 2
VVFVLWAHGFE

SEQ ID NO: 11398 - protein, 10 aa, Severe acute respiratory syndrome-related coronavirus
  REGION 1..10: note = Table B: HLA-DQA1*05:01-B1*03:01L HLA-DRB1*04:03L HLA-DRB1*13:02L HLA-DRB1*13:03L HLA-DRB1*01:03L HLA-DQA1*01:02-B1*06:02M HLA-DRB4*03:01NL HLA-DRB1*08:77L HLA-DPA1*01:03-B1*03:01L HLA-DPA1*03:01-B1*04:02L
  REGION 1..10: note = CONT. FROM ABOVE: HLA-DRB1*03:01L HLA-DRB1*14:01L HLA-DRB1*11:02 L HLA-DRB1*14:02L HLA-DRB1*11:01L HLA-DQA1*01-B1*05L HLA-DQA1*05 :05-B1*03:19M HLA-DQA1*05:01-B1*02:01M HLA-DRB4*01:01L HLA-DPA1* 01:03-B1*04:01L HLA-DQA1*05:05-B1*03:116L
  REGION 1..10: note = CONT. FROM ABOVE: HLA-DPA1*01:03-B1*04:02L HLA-DRB1*12:01L HLA-D PA1*02:01-B1*13:01L HLA-DPA1*03:01-B1*105:01L HLA-DPA1*01:03-B1* 104:01L HLA-DPA1*01:02-B1*04:01L HLA-DRB1*10:01L HLA-DRB1*16:01L HLA-DQA1*01:03-B1*06:01L HLA-DRB1*08:02L
  REGION 1..10: note = CONT. FROM ABOVE: HLA-DQA1*02:01-B1*03:03M HLA-DRB1*15:03L
  source 1..10: note = Severe acute respiratory syndrome coronavirus 2
HGFELTSMKY

SEQ ID NO: 11399 - protein, 10 aa, Severe acute respiratory syndrome-related coronavirus
  REGION 1..10: note = Table B: HLA-DQA1*05:01-B1*03:01L HLA-DQA1*01:02-B1*06:02L HLA-DPA1*03:01-B1*04:02L HLA-DQA1*05:05-B1*03:19L HLA-DQA1*05:01-B1*02:01L HLA-DPA1*02:01-B1*13:01L HLA-DPA1*03:01-B1*105:01L HLA-DPA1*01:02-B1*04:01L
  REGION 1..10: note = CONT. FROM ABOVE: HLA-DQA1*01:03-B1*06:01L HLA-DQA1*02:01-B1*03: 03L HLA-DRB1*15:03L
  source 1..10: note = Severe acute respiratory syndrome coronavirus 2
GFELTSMKYF

SEQ ID NO: 11400 - protein, 14 aa, Severe acute respiratory syndrome-related coronavirus
  REGION 1..14: note = Table B: HLA-DQA1*05:01-B1*03:01L HLA-DPA1*03:01-B1*105:01L
  source 1..14: note = Severe acute respiratory syndrome coronavirus 2
FSTASDTYACWHHS

SEQ ID NO: 11401 - protein, 12 aa, Severe acute respiratory syndrome-related coronavirus
  REGION 1..12: note = Table B: HLA-DQA1*05:01-B1*03:01L HLA-DRB1*13:03L HLA-DRB1*01:03L HLA-DRB1*04:05L HLA-DRB1*01:02L HLA-DRB1*08:04L HLA-DRB1*14:01L HLA-DPA1*02:01-B1*13:01L HLA-DPA1*03:01-B1*105:01L HLA-DQA1*03:01-B1*03:02L
  REGION 1..12: note = CONT. FROM ABOVE: HLA-DQA1*05:05-B1*03:01L HLA-DPA1*01:02-B1*04: 01L HLA-DRB1*16:01L HLA-DRB1*04:08L HLA-DRB1*08:03L HLA-DQA1*02: 01-B1*03:03L
  source 1..12: note = Severe acute respiratory syndrome coronavirus 2
SDTYACWHHSIG

SEQ ID NO: 11402 - protein, 11 aa, Severe acute respiratory syndrome-related coronavirus
  REGION 1..11: note = Table B: HLA-DQA1*05:01-B1*03:01L HLA-DRB1*04:03L HLA-DQA1*01:02-B1*06:02L HLA-DPA1*03:01-B1*04:02L HLA-DQA1*05:05-B1*03:19L HLA-DPA1*01:03-B1*04:01L HLA-DRB1*12:01L HLA-DPA1*02:01-B1*13:01L
  REGION 1..11: note = CONT. FROM ABOVE: HLA-DPA1*03:01-B1*105:01L HLA-DQA1*03:01-B1*03 :02L HLA-DPA1*01:02-B1*04:01L HLA-DRB1*16:01L HLA-DQA1*01:03-B1* 06:01L HLA-DQA1*02:01-B1*03:03L HLA-DRB1*15:03L
  source 1..11: note = Severe acute respiratory syndrome coronavirus 2
IGFDYVYNPFM

SEQ ID NO: 11403 - protein, 11 aa, Severe acute respiratory syndrome-related coronavirus
  REGION 1..11: note = Table B: HLA-DQA1*05:01-B1*03:01L HLA-DRB1*04:03L HLA-DRB1*13:02L HLA-DRB1*13:03L HLA-DRB1*01:03L HLA-DRB1*04:02L HLA-DRB1*04:05L HLA-DRB1*08:04L HLA-DPA1*01:03-B1*03:01L HLA-DRB1*14:01L HLA-DRB1*08:01L HLA-DQA1*05:01-B1*02:01L
  REGION 1..11: note = CONT. FROM ABOVE: HLA-DPA1*01:03-B1*04:01L HLA-DPA1*01:03-B1*04: 02L HLA-DRB1*12:01L HLA-DQA1*03:01-B1*03:02L HLA-DPA1*01:03-B1*0 2:01L HLA-DQA1*05:05-B1*03:01L HLA-DRB1*14:17L HLA-DRB1*16:01L H LA-DRB1*04:08L
  source 1..11: note = Severe acute respiratory syndrome coronavirus 2
YVYNPFMIDVQ

SEQ ID NO: 11404 - protein, 10 aa, Severe acute respiratory syndrome-related coronavirus
  REGION 1..10: note = Table B: HLA-DQA1*05:01-B1*03:01L HLA-DRB1*13:03L HLA-DRB1*01:03L HLA-DRB1*04:05L HLA-DQA1*01:02-B1*06:02M HLA-DRB1*01:01L HLA-DRB1*08:77L HLA-DPA1*03:01-B1*04:02L HLA-DRB1*14:01L HLA-DRB1*14:02L HLA-DQA1*05:01-B1*02:01L
  REGION 1..10: note = CONT. FROM ABOVE: HLA-DPA1*01:03-B1*04:01L HLA-DQA1*05:05-B1*03: 116L HLA-DPA1*02:01-B1*13:01M HLA-DPA1*03:01-B1*105:01M HLA-DPA1 *01:02-B1*04:01L HLA-DQA1*01:03-B1*06:01L HLA-DQA1*02:01-B1*03:0 3L HLA-DRB1*15:03M
  source 1..10: note = Severe acute respiratory syndrome coronavirus 2
NPFMIDVQQW

SEQ ID NO: 11405 - protein, 13 aa, Severe acute respiratory syndrome-related coronavirus
  REGION 1..13: note = Table B: HLA-DQA1*05:01-B1*03:01L HLA-DRB1*04:03L HLA-DQA1*01:02-B1*06:02L HLA-DQA1*01:01-B1*05:01L HLA-DQA1*05:05-B1*03:19L HLA-DPA1*03:01-B1*105:01L HLA-DQA1*05:05-B1*03:01L HLA-DRB1*16:01L
  source 1..13: note = Severe acute respiratory syndrome coronavirus 2
IDVQQWGFTGNLQ

SEQ ID NO: 11406 - protein, 11 aa, Severe acute respiratory syndrome-related coronavirus
  REGION 1..11: note = Table B: HLA-DQA1*05:01-B1*03:01L HLA-DRB1*04:03L HLA-DQA1*01:02-B1*06:02L HLA-DPA1*03:01-B1*105:01L HLA-DQA1*05:05-B1*03:01L
  source 1..11: note = Severe acute respiratory syndrome coronavirus 2
WGFTGNLQSNH

SEQ ID NO: 11407 - protein, 10 aa, Severe acute respiratory syndrome-related coronavirus
  REGION 1..10: note = Table B: HLA-DQA1*05:01-B1*03:01L HLA-DRB1*04:03L HLA-DRB1*13:03L HLA-DRB1*01:03L HLA-DQA1*01:02-B1*06:02L HLA-DRB1*08:77L HLA-DPA1*01:03-B1*03:01L HLA-DRB1*03:01L HLA-DRB1*11:02L HLA-DRB1*14:02L HLA-DQA1*01-B1*05L
  REGION 1..10: note = CONT. FROM ABOVE: HLA-DQA1*05:05-B1*03:19M HLA-DQA1*05:01-B1*02: 01L HLA-DRB4*01:01L HLA-DPA1*01:03-B1*04:01L HLA-DQA1*05:05-B1*0 3:116L HLA-DPA1*01:03-B1*04:02L HLA-DRB1*12:01L HLA-DPA1*03:01-B 1*105:01L HLA-DPA1*01:03-B1*104:01L HLA-DRB1*10:01L
  REGION 1..10: note = CONT. FROM ABOVE: HLA-DRB1*16:01L HLA-DRB1*08:02L HLA-DQA1*02:01 -B1*03:03L HLA-DRB1*15:03L
  source 1..10: note = Severe acute respiratory syndrome coronavirus 2
GNLQSNHDLY

SEQ ID NO: 11408 - protein, 12 aa, Severe acute respiratory syndrome-related coronavirus
  REGION 1..12: note = Table B: HLA-DQA1*05:01-B1*03:01L HLA-DRB1*01:03L HLA-DRB1*08:01L HLA-DQA1*03:01-B1*03:02L HLA-DRB1*04:08L
  source 1..12: note = Severe acute respiratory syndrome coronavirus 2
HDLYCQVHGNAH

SEQ ID NO: 11409 - protein, 14 aa, Severe acute respiratory syndrome-related coronavirus
  REGION 1..14: note = Table B: HLA-DQA1*05:01-B1*03:01L HLA-DQA1*05:05-B1*03:19L HLA-DQA1*03:01-B1*03:02L HLA-DQA1*05:05-B1*03:01L HLA-DQA1*02:01-B1*03:03L
  source 1..14: note = Severe acute respiratory syndrome coronavirus 2
VHGNAHVASCDAIM

SEQ ID NO: 11410 - protein, 12 aa, Severe acute respiratory syndrome-related coronavirus
  REGION 1..12: note = Table B: HLA-DQA1*05:01-B1*03:01L HLA-DRB1*04:03L HLA-DRB1*01:03L HLA-DRB1*04:05L HLA-DRB1*01:02L HLA-DRB1*14:01L HLA-DRB1*08:01L HLA-DRB1*12:01L HLA-DPA1*03:01-B1*105:01L HLA-DQA1*03:01-B1*03:02L HLA-DRB1*16:01L HLA-DRB1*04:08L
  REGION 1..12: note = CONT. FROM ABOVE: HLA-DRB1*15:03L
  source 1..12: note = Severe acute respiratory syndrome coronavirus 2
DAIMTRCLAVHE

SEQ ID NO: 11411 - protein, 13 aa, Severe acute respiratory syndrome-related coronavirus
  REGION 1..13: note = Table B: HLA-DQA1*05:01-B1*03:01L HLA-DRB1*04:03L HLA-DRB1*13:02L HLA-DRB1*01:03L HLA-DRB1*04:02L HLA-DRB1*04:05L HLA-DQA1*01:02-B1*06:02L HLA-DRB1*08:04L HLA-DRB1*03:01L HLA-DRB1*11:03L HLA-DRB1*11:04L HLA-DRB1*08:01L HLA-DRB1*11:01L
  REGION 1..13: note = CONT. FROM ABOVE: HLA-DRB3*01:01L HLA-DRB1*14:54L HLA-DPA1*01:02 -B1*04:01L HLA-DQA1*01:03-B1*06:01L HLA-DRB1*04:08L HLA-DQA1*02: 01-B1*03:03L
  source 1..13: note = Severe acute respiratory syndrome coronavirus 2
DELKINAACRKVQ

SEQ ID NO: 11412 - protein, 10 aa, Severe acute respiratory syndrome-related coronavirus
  REGION 1..10: note = Table B: HLA-DQA1*05:01-B1*03:01L HLA-DRB1*04:03L HLA-DRB1*13:03L HLA-DRB1*01:03L HLA-DRB1*04:02L HLA-DQA1*03:01-B1*03:02L HLA-DRB1*14:17L HLA-DRB1*16:01L HLA-DQA1*01:03-B1*06:01L HLA-DQA1*02:01-B1*03:03L
  source 1..10: note = Severe acute respiratory syndrome coronavirus 2
VVKAALLADK

SEQ ID NO: 11413 - protein, 15 aa, Severe acute respiratory syndrome-related coronavirus
  REGION 1..15: note = Table B: HLA-DQA1*05:01-B1*03:01L HLA-DQA1*05:05-B1*03:01L HLA-DRB1*15:03L
  source 1..15: note = Severe acute respiratory syndrome coronavirus 2
LHDIGNPKAIKCVPQ

SEQ ID NO: 11414 - protein, 10 aa, Severe acute respiratory syndrome-related coronavirus
  REGION 1..10: note = Table B: HLA-DQA1*05:01-B1*03:01L HLA-DRB1*13:03L HLA-DQA1*01:02-B1*06:02M HLA-DQA1*05:05-B1*03:116L HLA-DPA1*02:01-B1*13:01L HLA-DPA1*03:01-B1*105:01M HLA-DPA1*01:02-B1*04:01L HLA-DQA1*01:03-B1*06:01L
  REGION 1..10: note = CONT. FROM ABOVE: HLA-DRB1*15:03L
  source 1..10: note = Severe acute respiratory syndrome coronavirus 2
VPQADVEWKF

SEQ ID NO: 11415 - protein, 10 aa, Severe acute respiratory syndrome-related coronavirus
  REGION 1..10: note = Table B: HLA-DQA1*05:01-B1*03:01L HLA-DRB1*01:03L HLA-DQA1*01:02-B1*06:02L HLA-DRB1*08:77L HLA-DPA1*01:03-B1*03:01L HLA-DRB1*03:01L HLA-DRB1*14:02L HLA-DQA1*01-B1*05L HLA-DQA1*05:05-B1*03:19L
  REGION 1..10: note = CONT. FROM ABOVE: HLA-DQA1*05:01-B1*02:01L HLA-DRB4*01:01L HLA-D PA1*01:03-B1*04:01L HLA-DQA1*05:05-B1*03:116L HLA-DPA1*01:03-B1* 04:02L HLA-DPA1*02:01-B1*13:01L HLA-DPA1*03:01-B1*105:01L HLA-DP A1*01:03-B1*104:01L HLA-DRB1*16:01L HLA-DQA1*01:03-B1*06:01L
  REGION 1..10: note = CONT. FROM ABOVE: HLA-DRB1*08:02L HLA-DQA1*02:01-B1*03:03L HLA-D RB1*15:03L
  source 1..10: note = Severe acute respiratory syndrome coronavirus 2
KAYKIEELFY

SEQ ID NO: 11416 - protein, 10 aa, Severe acute respiratory syndrome-related coronavirus
  REGION 1..10: note = Table B: HLA-DQA1*05:01-B1*03:01L HLA-DRB1*01:03L HLA-DQA1*01:02-B1*06:02L HLA-DRB1*08:77L HLA-DPA1*01:03-B1*03:01L HLA-DPA1*03:01-B1*04:02L HLA-DRB1*03:01L HLA-DRB1*11:02L HLA-DRB1*14:02L
  REGION 1..10: note = CONT. FROM ABOVE: HLA-DQA1*01-B1*05L HLA-DQA1*05:05-B1*03:19M HL A-DQA1*05:01-B1*02:01L HLA-DRB4*01:01L HLA-DPA1*01:03-B1*04:01L HLA-DQA1*05:05-B1*03:116L HLA-DPA1*01:03-B1*04:02L HLA-DPA1*02:0 1-B1*13:01L HLA-DPA1*03:01-B1*105:01L HLA-DPA1*01:03-B1*104:01L
  REGION 1..10: note = CONT. FROM ABOVE: HLA-DRB1*10:01L HLA-DRB1*16:01L HLA-DQA1*01:03 -B1*06:01L HLA-DQA1*02:01-B1*03:03L HLA-DRB1*15:03L
  source 1..10: note = Severe acute respiratory syndrome coronavirus 2
YKIEELFYSY

SEQ ID NO: 11417 - protein, 13 aa, Severe acute respiratory syndrome-related coronavirus
  REGION 1..13: note = Table B: HLA-DQA1*05:01-B1*03:01L HLA-DRB1*13:02L HLA-DRB1*13:03L HLA-DRB1*01:03L HLA-DRB1*04:05L HLA-DQA1*01:02-B1*06:02L HLA-DRB1*01:02L HLA-DRB4*03:01NL HLA-DRB1*08:04L HLA-DRB1*08:77L HLA-DRB3*02:01L
  REGION 1..13: note = CONT. FROM ABOVE: HLA-DPA1*01:03-B1*03:01L HLA-DPA1*03:01-B1*04: 02L HLA-DRB1*14:01L HLA-DRB1*11:03L HLA-DRB1*14:02L HLA-DQA1*01: 01-B1*05:01L HLA-DRB1*08:01L HLA-DQA1*05:05-B1*03:19L HLA-DPA1*0 1:03-B1*04:01L HLA-DRB1*04:10L HLA-DRB1*09:01L
  REGION 1..13: note = CONT. FROM ABOVE: HLA-DPA1*01:03-B1*04:02L HLA-DRB1*12:01L HLA-D RB1*12:02L HLA-DPA1*02:01-B1*13:01L HLA-DPA1*03:01-B1*105:01L HL A-DRB1*14:54L HLA-DPA1*01:03-B1*104:01L HLA-DQA1*05:05-B1*03:01L HLA-DRB1*14:17L HLA-DPA1*01:02-B1*04:01L HLA-DRB1*07:01L
  REGION 1..13: note = CONT. FROM ABOVE: HLA-DRB1*10:01L HLA-DQA1*01:03-B1*06:01L HLA-D RB1*04:08L HLA-DRB1*08:03L
  source 1..13: note = Severe acute respiratory syndrome coronavirus 2
IEELFYSYATHSD

SEQ ID NO: 11418 - protein, 12 aa, Severe acute respiratory syndrome-related coronavirus
  REGION 1..12: note = Table B: HLA-DQA1*05:01-B1*03:01L HLA-DRB1*01:03L HLA-DPA1*03:01-B1*04:02L HLA-DRB1*08:01L HLA-DQA1*05:05-B1*03:19L HLA-DPA1*01:03-B1*04:02L HLA-DQA1*05:05-B1*03:01L HLA-DRB1*16:01L
  REGION 1..12: note = CONT. FROM ABOVE: HLA-DQA1*01:03-B1*06:01L HLA-DRB1*04:08L HLA-D QA1*02:01-B1*03:03L HLA-DRB1*15:03L
  source 1..12: note = Severe acute respiratory syndrome coronavirus 2
FWNCNVDRYPAN

SEQ ID NO: 11419 - protein, 13 aa, Severe acute respiratory syndrome-related coronavirus
  REGION 1..13: note = Table B: HLA-DQA1*05:01-B1*03:01L HLA-DRB1*13:02L HLA-DRB1*04:04L HLA-DQA1*01:02-B1*06:02L HLA-DRB1*01:02L HLA-DPA1*01:03-B1*03:01L HLA-DRB1*14:01L HLA-DQA1*01:01-B1*05:01L HLA-DPA1*02:01-B1*13:01L
  REGION 1..13: note = CONT. FROM ABOVE: HLA-DPA1*03:01-B1*105:01L HLA-DQA1*05:05-B1*03 :01L HLA-DRB1*04:08L HLA-DRB1*15:03L
  source 1..13: note = Severe acute respiratory syndrome coronavirus 2
FDTRVLSNLNLPG

SEQ ID NO: 11420 - protein, 12 aa, Severe acute respiratory syndrome-related coronavirus
  REGION 1..12: note = Table B: HLA-DQA1*05:01-B1*03:01L HLA-DRB1*04:03L HLA-DRB1*04:02L HLA-DQA1*01:02-B1*06:02L HLA-DRB1*01:02L HLA-DRB1*14:01L HLA-DQA1*05:05-B1*03:19L HLA-DRB1*12:01L HLA-DPA1*03:01-B1*105:01L HLA-DQA1*03:01-B1*03:02L
  REGION 1..12: note = CONT. FROM ABOVE: HLA-DQA1*05:05-B1*03:01L HLA-DRB1*14:17L HLA-D QA1*01:03-B1*06:01L HLA-DQA1*02:01-B1*03:03L HLA-DRB1*15:03L
  source 1..12: note = Severe acute respiratory syndrome coronavirus 2
VLSNLNLPGCDG

SEQ ID NO: 11421 - protein, 13 aa, Severe acute respiratory syndrome-related coronavirus
  REGION 1..13: note = Table B: HLA-DQA1*05:01-B1*03:01L HLA-DQA1*01:02-B1*06:02L HLA-DQA1*05:05-B1*03:01L HLA-DQA1*01:03-B1*06:01L HLA-DQA1*02:01-B1*03:03L
  source 1..13: note = Severe acute respiratory syndrome coronavirus 2
LPGCDGGSLYVNK

SEQ ID NO: 11422 - protein, 13 aa, Severe acute respiratory syndrome-related coronavirus
  REGION 1..13: note = Table B: HLA-DQA1*05:01-B1*03:01L HLA-DRB1*08:04L HLA-DRB1*11:04L HLA-DPA1*01:02-B1*04:01L
  source 1..13: note = Severe acute respiratory syndrome coronavirus 2
DGGSLYVNKHAFH

SEQ ID NO: 11423 - protein, 14 aa, Severe acute respiratory syndrome-related coronavirus
  REGION 1..14: note = Table B: HLA-DQA1*05:01-B1*03:01L HLA-DRB3*01:01L HLA-DPA1*02:01-B1*13:01L HLA-DPA1*01:02-B1*04:01L HLA-DRB1*08:03L
  source 1..14: note = Severe acute respiratory syndrome coronavirus 2
GGSLYVNKHAFHTP

SEQ ID NO: 11424 - protein, 14 aa, Severe acute respiratory syndrome-related coronavirus
  REGION 1..14: note = Table B: HLA-DQA1*05:01-B1*03:01L HLA-DRB1*04:04L HLA-DRB1*01:01L HLA-DRB4*03:01NL HLA-DPA1*03:01-B1*04:02L HLA-DRB1*03:01L HLA-DRB1*11:02L HLA-DRB1*14:02L HLA-DQA1*05:05-B1*03:19L HLA-DQA1*05:05-B1*03:116L
  REGION 1..14: note = CONT. FROM ABOVE: HLA-DPA1*01:03-B1*04:02L HLA-DPA1*02:01-B1*13: 01L HLA-DPA1*03:01-B1*105:01L HLA-DRB1*14:54L HLA-DPA1*01:03-B1* 02:01L HLA-DQA1*05:05-B1*03:01L HLA-DRB1*07:01L HLA-DRB1*08:02L
  source 1..14: note = Severe acute respiratory syndrome coronavirus 2
GSLYVNKHAFHTPA

SEQ ID NO: 11425 - protein, 14 aa, Severe acute respiratory syndrome-related coronavirus
  REGION 1..14: note = Table B: HLA-DQA1*05:01-B1*03:01L HLA-DRB1*03:01L HLA-DRB1*14:01L HLA-DPA1*03:01-B1*105:01L HLA-DQA1*01:03-B1*06:01L
  source 1..14: note = Severe acute respiratory syndrome coronavirus 2
VNKHAFHTPAFDKS

SEQ ID NO: 11426 - protein, 10 aa, Severe acute respiratory syndrome-related coronavirus
  REGION 1..10: note = Table B: HLA-DQA1*05:01-B1*03:01L HLA-DRB1*13:03L HLA-DRB1*01:03L HLA-DQA1*01:02-B1*06:02M HLA-DPA1*01:03-B1*03:01L HLA-DPA1*03:01-B1*04:02L HLA-DRB1*14:01L HLA-DRB1*14:02L HLA-DQA1*05:05-B1*03:19L
  REGION 1..10: note = CONT. FROM ABOVE: HLA-DQA1*05:01-B1*02:01L HLA-DPA1*01:03-B1*04: 01L HLA-DPA1*02:01-B1*13:01L HLA-DPA1*03:01-B1*105:01L HLA-DPA1* 01:02-B1*04:01L HLA-DQA1*01:03-B1*06:01L HLA-DQA1*02:01-B1*03:03 L HLA-DRB1*15:03L
  source 1..10: note = Severe acute respiratory syndrome coronavirus 2
HTPAFDKSAF

SEQ ID NO: 11427 - protein, 10 aa, Severe acute respiratory syndrome-related coronavirus
  REGION 1..10: note = Table B: HLA-DQA1*05:01-B1*03:01L HLA-DRB1*04:03L HLA-DQA1*01:02-B1*06:02L HLA-DRB1*01:02L HLA-DRB3*02:01L HLA-DPA1*03:01-B1*04:02L HLA-DRB1*14:01L HLA-DRB1*14:02L HLA-DQA1*05:05-B1*03:19L HLA-DQA1*05:01-B1*02:01L
  REGION 1..10: note = CONT. FROM ABOVE: HLA-DRB1*12:01L HLA-DPA1*02:01-B1*13:01L HLA-D PA1*03:01-B1*105:01L HLA-DQA1*05:05-B1*03:01L HLA-DPA1*01:02-B1* 04:01L HLA-DRB1*16:01L HLA-DQA1*01:03-B1*06:01L HLA-DQA1*02:01-B 1*03:03L HLA-DRB1*15:03L
  source 1..10: note = Severe acute respiratory syndrome coronavirus 2
FVNLKQLPFF

SEQ ID NO: 11428 - protein, 10 aa, Severe acute respiratory syndrome-related coronavirus
  REGION 1..10: note = Table B: HLA-DQA1*05:01-B1*03:01L HLA-DQA1*01:02-B1*06:02L HLA-DPA1*01:03-B1*03:01L HLA-DRB1*03:01L HLA-DRB1*14:02L HLA-DQA1*05:05-B1*03:19L HLA-DQA1*05:01-B1*02:01L HLA-DRB4*01:01L HLA-DPA1*01:03-B1*04:01L HLA-DRB1*12:01L
  REGION 1..10: note = CONT. FROM ABOVE: HLA-DPA1*03:01-B1*105:01L HLA-DPA1*01:03-B1*10 4:01L HLA-DRB1*16:01L HLA-DQA1*02:01-B1*03:03L HLA-DRB1*15:03L
  source 1..10: note = Severe acute respiratory syndrome coronavirus 2
NLKQLPFFYY

SEQ ID NO: 11429 - protein, 13 aa, Severe acute respiratory syndrome-related coronavirus
  REGION 1..13: note = Table B: HLA-DQA1*05:01-B1*03:01L HLA-DQA1*01:02-B1*06:02L HLA-DPA1*03:01-B1*105:01L HLA-DQA1*01:03-B1*06:01L HLA-DQA1*02:01-B1*03:03L
  source 1..13: note = Severe acute respiratory syndrome coronavirus 2
YYSDSPCESHGKQ

SEQ ID NO: 11430 - protein, 11 aa, Severe acute respiratory syndrome-related coronavirus
  REGION 1..11: note = Table B: HLA-DQA1*05:01-B1*03:01L HLA-DRB1*13:02L HLA-DRB1*13:03L HLA-DRB1*01:03L HLA-DRB1*04:02L HLA-DRB1*04:05L HLA-DQA1*01:02-B1*06:02L HLA-DRB1*01:02L HLA-DRB4*03:01NL HLA-DPA1*01:03-B1*03:01L HLA-DPA1*03:01-B1*04:02L
  REGION 1..11: note = CONT. FROM ABOVE: HLA-DRB1*14:01L HLA-DQA1*01:01-B1*05:01L HLA-D QA1*05:05-B1*03:19L HLA-DRB1*04:10L HLA-DPA1*01:03-B1*04:02L HLA -DRB1*12:01L HLA-DPA1*03:01-B1*105:01L HLA-DRB1*14:54L HLA-DQA1* 05:05-B1*03:01L HLA-DRB1*14:17L HLA-DPA1*01:02-B1*04:01L
  REGION 1..11: note = CONT. FROM ABOVE: HLA-DRB1*16:01L HLA-DRB1*04:08L HLA-DRB1*15:03 L
  source 1..11: note = Severe acute respiratory syndrome coronavirus 2
VVSDIDYVPLK

SEQ ID NO: 11431 - protein, 13 aa, Severe acute respiratory syndrome-related coronavirus
  REGION 1..13: note = Table B: HLA-DQA1*05:01-B1*03:01L HLA-DRB1*01:03L HLA-DRB1*04:05L HLA-DRB1*01:02L HLA-DPA1*01:03-B1*03:01L HLA-DQA1*05:05-B1*03:19L HLA-DPA1*01:03-B1*04:01L HLA-DRB1*12:01L HLA-DQA1*05:05-B1*03:01L HLA-DRB1*04:08L
  REGION 1..13: note = CONT. FROM ABOVE: HLA-DRB1*15:03L
  source 1..13: note = Severe acute respiratory syndrome coronavirus 2
VSDIDYVPLKSAT

SEQ ID NO: 11432 - protein, 13 aa, Severe acute respiratory syndrome-related coronavirus
  REGION 1..13: note = Table B: HLA-DQA1*05:01-B1*03:01L HLA-DRB1*04:01L HLA-DRB1*13:02L HLA-DRB1*04:04L HLA-DRB1*04:05L HLA-DPA1*01:03-B1*03:01L HLA-DRB1*14:01L HLA-DRB1*11:03L HLA-DRB1*11:01L HLA-DQA1*05:05-B1*03:19L
  REGION 1..13: note = CONT. FROM ABOVE: HLA-DPA1*01:03-B1*04:02L HLA-DRB3*01:01L HLA-D RB1*07:01L HLA-DQA1*01:03-B1*06:01L HLA-DRB1*08:02L
  source 1..13: note = Severe acute respiratory syndrome coronavirus 2
IDYVPLKSATCIT

SEQ ID NO: 11433 - protein, 12 aa, Severe acute respiratory syndrome-related coronavirus
  REGION 1..12: note = Table B: HLA-DQA1*05:01-B1*03:01L HLA-DRB1*04:01L HLA-DRB1*04:04L HLA-DRB1*04:05L HLA-DQA1*01:02-B1*06:02L HLA-DRB1*11:04L HLA-DRB1*08:01L HLA-DRB1*11:01L HLA-DRB1*12:01L HLA-DRB3*01:01L HLA-DPA1*03:01-B1*105:01L HLA-DRB1*07:01L
  REGION 1..12: note = CONT. FROM ABOVE: HLA-DRB1*10:01L HLA-DQA1*01:03-B1*06:01L
  source 1..12: note = Severe acute respiratory syndrome coronavirus 2
YVPLKSATCITR

SEQ ID NO: 11434 - protein, 10 aa, Severe acute respiratory syndrome-related coronavirus
  REGION 1..10: note = Table B: HLA-DQA1*05:01-B1*03:01L HLA-DRB1*01:03L HLA-DQA1*01:02-B1*06:02L HLA-DRB1*03:01L HLA-DRB1*11:01L HLA-DRB1*16:01L HLA-DQA1*02:01-B1*03:03L
  source 1..10: note = Severe acute respiratory syndrome coronavirus 2
RHHANEYRLY

SEQ ID NO: 11435 - protein, 12 aa, Severe acute respiratory syndrome-related coronavirus
  REGION 1..12: note = Table B: HLA-DQA1*05:01-B1*03:01L HLA-DRB1*01:03L HLA-DRB1*01:02L HLA-DRB1*12:01L HLA-DPA1*01:03-B1*104:01L HLA-DRB1*04:08L
  source 1..12: note = Severe acute respiratory syndrome coronavirus 2
FSLWVYKQFDTY

SEQ ID NO: 11436 - protein, 13 aa, Severe acute respiratory syndrome-related coronavirus
  REGION 1..13: note = Table B: HLA-DQA1*05:01-B1*03:01L HLA-DRB1*13:02L HLA-DPA1*01:03-B1*04:02L HLA-DQA1*03:01-B1*03:02L HLA-DQA1*05:05-B1*03:01L
  source 1..13: note = Severe acute respiratory syndrome coronavirus 2
VYKQFDTYNLWNT

SEQ ID NO: 11437 - protein, 12 aa, Severe acute respiratory syndrome-related coronavirus
  REGION 1..12: note = Table B: HLA-DQA1*05:01-B1*03:01L HLA-DRB1*01:03L HLA-DRB1*01:02L HLA-DRB1*14:01L HLA-DPA1*01:03-B1*04:02L HLA-DRB1*04:08L
  source 1..12: note = Severe acute respiratory syndrome coronavirus 2
DTYNLWNTFTRL

SEQ ID NO: 11438 - protein, 11 aa, Severe acute respiratory syndrome-related coronavirus
  REGION 1..11: note = Table B: HLA-DQA1*05:01-B1*03:01L HLA-DRB1*04:03L HLA-DRB1*01:03L HLA-DQA1*01:02-B1*06:02L HLA-DRB1*01:02L HLA-DPA1*01:03-B1*03:01L HLA-DRB1*12:01L HLA-DPA1*02:01-B1*13:01L HLA-DQA1*03:01-B1*03:02L
  REGION 1..11: note = CONT. FROM ABOVE: HLA-DPA1*01:03-B1*02:01L HLA-DRB1*04:08L HLA-D QA1*02:01-B1*03:03L HLA-DRB1*15:03L
  source 1..11: note = Severe acute respiratory syndrome coronavirus 2
SLENVAFNVVN

SEQ ID NO: 11439 - protein, 10 aa, Severe acute respiratory syndrome-related coronavirus
  REGION 1..10: note = Table B: HLA-DQA1*05:01-B1*03:01L HLA-DRB1*04:03L HLA-DRB1*04:02L HLA-DQA1*03:01-B1*03:02L HLA-DPA1*01:02-B1*04:01L HLA-DQA1*01:03-B1*06:01L HLA-DQA1*02:01-B1*03:03L
  source 1..10: note = Severe acute respiratory syndrome coronavirus 2
VAFNVVNKGH

SEQ ID NO: 11440 - protein, 11 aa, Severe acute respiratory syndrome-related coronavirus
  REGION 1..11: note = Table B: HLA-DQA1*05:01-B1*03:01L HLA-DQA1*05:05-B1*03:116L
  source 1..11: note = Severe acute respiratory syndrome coronavirus 2
SIINNTVYTKV

SEQ ID NO: 11441 - protein, 11 aa, Severe acute respiratory syndrome-related coronavirus
  REGION 1..11: note = Table B: HLA-DQA1*05:01-B1*03:01L HLA-DRB1*04:03L HLA-DRB1*04:02L HLA-DQA1*01:02-B1*06:02L HLA-DRB1*01:02L HLA-DPA1*03:01-B1*04:02L HLA-DRB1*14:01L HLA-DQA1*05:01-B1*02:01L HLA-DRB1*12:01L
  REGION 1..11: note = CONT. FROM ABOVE: HLA-DPA1*03:01-B1*105:01L HLA-DRB1*14:17L HLA- DPA1*01:02-B1*04:01L HLA-DRB1*16:01L
  source 1..11: note = Severe acute respiratory syndrome coronavirus 2
IINNTVYTKVD

SEQ ID NO: 11442 - protein, 14 aa, Severe acute respiratory syndrome-related coronavirus
  REGION 1..14: note = Table B: HLA-DQA1*05:01-B1*03:01L HLA-DRB1*01:03L HLA-DRB3*02:01L HLA-DRB1*08:01L HLA-DRB1*15:01L
  source 1..14: note = Severe acute respiratory syndrome coronavirus 2
VDVELFENKTTLPV

SEQ ID NO: 11443 - protein, 14 aa, Severe acute respiratory syndrome-related coronavirus
  REGION 1..14: note = Table B: HLA-DQA1*05:01-B1*03:01L HLA-DRB1*04:03L HLA-DRB1*01:03L HLA-DRB1*04:05L HLA-DPA1*01:03-B1*03:01L HLA-DPA1*03:01-B1*04:02L HLA-DRB1*08:01L HLA-DQA1*01-B1*05L HLA-DPA1*01:03-B1*04:01L HLA-DPA1*01:03-B1*04:02L
  REGION 1..14: note = CONT. FROM ABOVE: HLA-DRB1*12:01L HLA-DQA1*05:05-B1*03:01L HLA-D RB1*16:01L
  source 1..14: note = Severe acute respiratory syndrome coronavirus 2
LPVNVAFELWAKRN

SEQ ID NO: 11444 - protein, 14 aa, Severe acute respiratory syndrome-related coronavirus
  REGION 1..14: note = Table B: HLA-DQA1*05:01-B1*03:01L HLA-DRB1*08:04L HLA-DRB1*11:02L HLA-DRB1*11:03L HLA-DPA1*03:01-B1*105:01L HLA-DPA1*01:03-B1*02:01L HLA-DQA1*01:03-B1*06:01L HLA-DRB1*08:02L HLA-DRB1*08:03L
  source 1..14: note = Severe acute respiratory syndrome coronavirus 2
FELWAKRNIKPVPE

SEQ ID NO: 11445 - protein, 14 aa, Severe acute respiratory syndrome-related coronavirus
  REGION 1..14: note = Table B: HLA-DQA1*05:01-B1*03:01L HLA-DRB1*03:01L HLA-DQA1*01:01-B1*05:01L HLA-DRB1*04:10L HLA-DQA1*01:03-B1*06:01L
  source 1..14: note = Severe acute respiratory syndrome coronavirus 2
LWAKRNIKPVPEVK

SEQ ID NO: 11446 - protein, 12 aa, Severe acute respiratory syndrome-related coronavirus
  REGION 1..12: note = Table B: HLA-DQA1*05:01-B1*03:01L HLA-DRB1*13:02L HLA-DRB1*01:03L HLA-DRB1*04:02L HLA-DRB1*04:05L HLA-DQA1*01:02-B1*06:02L HLA-DRB1*01:02L HLA-DRB1*14:01L HLA-DQA1*01-B1*05L HLA-DQA1*05:01-B1*02:01L HLA-DRB1*12:01L
  REGION 1..12: note = CONT. FROM ABOVE: HLA-DPA1*03:01-B1*105:01L HLA-DRB1*14:17L HLA- DPA1*01:02-B1*04:01L HLA-DRB1*16:01L HLA-DQA1*01:03-B1*06:01L HL A-DRB1*04:08L
  source 1..12: note = Severe acute respiratory syndrome coronavirus 2
IKPVPEVKILNN

SEQ ID NO: 11447 - protein, 13 aa, Severe acute respiratory syndrome-related coronavirus
  REGION 1..13: note = Table B: HLA-DQA1*05:01-B1*03:01L HLA-DRB1*13:02L HLA-DRB1*13:03L HLA-DRB1*01:03L HLA-DQA1*01:02-B1*06:02L HLA-DRB1*08:04L HLA-DRB1*08:77L HLA-DRB3*02:01L HLA-DPA1*01:03-B1*03:01L HLA-DPA1*03:01-B1*04:02L
  REGION 1..13: note = CONT. FROM ABOVE: HLA-DRB1*11:03L HLA-DRB1*11:04L HLA-DRB1*08:01 L HLA-DQA1*05:01-B1*02:01L HLA-DRB1*09:01L HLA-DRB1*12:02L HLA-D PA1*03:01-B1*105:01L HLA-DQA1*05:05-B1*03:01L HLA-DRB1*10:01L HL A-DRB1*04:08L HLA-DRB1*08:03L
  source 1..13: note = Severe acute respiratory syndrome coronavirus 2
VPEVKILNNLGVD

SEQ ID NO: 11448 - protein, 12 aa, Severe acute respiratory syndrome-related coronavirus
  REGION 1..12: note = Table B: HLA-DQA1*05:01-B1*03:01L HLA-DRB1*13:02L HLA-DRB1*01:03L HLA-DQA1*01:02-B1*06:02L HLA-DRB1*08:04L HLA-DRB1*08:77L HLA-DRB3*02:01L HLA-DPA1*01:03-B1*03:01L HLA-DPA1*03:01-B1*04:02L HLA-DRB1*11:03L HLA-DRB1*14:02L
  REGION 1..12: note = CONT. FROM ABOVE: HLA-DQA1*05:05-B1*03:19L HLA-DQA1*05:01-B1*02: 01L HLA-DRB1*12:02L HLA-DPA1*03:01-B1*105:01L HLA-DQA1*05:05-B1* 03:01L HLA-DPA1*01:02-B1*04:01L HLA-DRB1*07:01L
  source 1..12: note = Severe acute respiratory syndrome coronavirus 2
VKILNNLGVDIA

SEQ ID NO: 11449 - protein, 12 aa, Severe acute respiratory syndrome-related coronavirus
  REGION 1..12: note = Table B: HLA-DQA1*05:01-B1*03:01L HLA-DPA1*03:01-B1*04:02L HLA-DRB1*14:01L HLA-DRB1*12:01L HLA-DQA1*05:05-B1*03:01L HLA-DQA1*01:03-B1*06:01L
  source 1..12: note = Severe acute respiratory syndrome coronavirus 2
VDIAANTVIWDY

SEQ ID NO: 11450 - protein, 14 aa, Severe acute respiratory syndrome-related coronavirus
  REGION 1..14: note = Table B: HLA-DQA1*05:01-B1*03:01L HLA-DRB1*14:04L HLA-DRB1*04:01L HLA-DPA1*01:03-B1*03:01L HLA-DPA1*03:01-B1*04:02L HLA-DRB1*03:01L HLA-DRB1*11:02L HLA-DQA1*05:05-B1*03:19L HLA-DRB1*13:01L
  REGION 1..14: note = CONT. FROM ABOVE: HLA-DPA1*01:03-B1*04:02L HLA-DRB1*12:02L HLA-D PA1*03:01-B1*105:01L HLA-DPA1*01:03-B1*02:01L HLA-DRB1*10:01L HL A-DQA1*01:03-B1*06:01L HLA-DRB1*08:02L
  source 1..14: note = Severe acute respiratory syndrome coronavirus 2
ANTVIWDYKRDAPA

SEQ ID NO: 11451 - protein, 13 aa, Severe acute respiratory syndrome-related coronavirus
  REGION 1..13: note = Table B: HLA-DQA1*05:01-B1*03:01L HLA-DRB1*04:04L HLA-DRB1*11:03L HLA-DRB1*14:02L HLA-DQA1*01:01-B1*05:01L HLA-DPA1*02:01-B1*13:01L HLA-DPA1*03:01-B1*105:01L HLA-DRB1*10:01L HLA-DRB1*08:02L
  source 1..13: note = Severe acute respiratory syndrome coronavirus 2
TVIWDYKRDAPAH

SEQ ID NO: 11452 - protein, 11 aa, Severe acute respiratory syndrome-related coronavirus
  REGION 1..11: note = Table B: HLA-DQA1*05:01-B1*03:01L HLA-DRB1*04:03L HLA-DRB1*13:03L HLA-DRB1*01:03L HLA-DRB1*04:02L HLA-DRB1*04:05L HLA-DRB1*01:02L HLA-DRB4*03:01NL HLA-DRB1*08:04L HLA-DRB1*08:77L HLA-DRB1*11:04L HLA-DRB1*12:01L HLA-DRB3*01:01L
  REGION 1..11: note = CONT. FROM ABOVE: HLA-DQA1*03:01-B1*03:02L HLA-DRB1*14:54L HLA-D RB1*14:17L HLA-DRB1*04:08L HLA-DQA1*02:01-B1*03:03L HLA-DRB1*15: 03L
  source 1..11: note = Severe acute respiratory syndrome coronavirus 2
YKRDAPAHIST

SEQ ID NO: 11453 - protein, 11 aa, Severe acute respiratory syndrome-related coronavirus
  REGION 1..11: note = Table B: HLA-DQA1*05:01-B1*03:01L HLA-DRB1*04:03L HLA-DRB1*04:02L HLA-DQA1*01:02-B1*06:02L HLA-DQA1*05:05-B1*03:19L HLA-DPA1*03:01-B1*105:01L HLA-DQA1*05:05-B1*03:01L HLA-DQA1*01:03-B1*06:01L
  source 1..11: note = Severe acute respiratory syndrome coronavirus 2
FFDGRVDGQVD

SEQ ID NO: 11454 - protein, 10 aa, Severe acute respiratory syndrome-related coronavirus
  REGION 1..10: note = Table B: HLA-DQA1*05:01-B1*03:01L HLA-DRB1*01:03L HLA-DQA1*01:02-B1*06:02L HLA-DRB1*14:02L HLA-DQA1*05:05-B1*03:19L HLA-DQA1*05:01-B1*02:01L HLA-DPA1*03:01-B1*105:01L HLA-DQA1*01:03-B1*06:01L
  REGION 1..10: note = CONT. FROM ABOVE: HLA-DQA1*02:01-B1*03:03L HLA-DRB1*15:03L
  source 1..10: note = Severe acute respiratory syndrome coronavirus 2
GRVDGQVDLF

SEQ ID NO: 11455 - protein, 14 aa, Severe acute respiratory syndrome-related coronavirus
  REGION 1..14: note = Table B: HLA-DQA1*05:01-B1*03:01L HLA-DRB1*01:03L HLA-DRB1*04:05L HLA-DRB1*01:02L HLA-DRB1*12:01L HLA-DPA1*02:01-B1*13:01L HLA-DPA1*03:01-B1*105:01L HLA-DQA1*05:05-B1*03:01L HLA-DRB1*04:08L
  source 1..14: note = Severe acute respiratory syndrome coronavirus 2
NARNGVLITEGSVK

SEQ ID NO: 11456 - protein, 12 aa, Severe acute respiratory syndrome-related coronavirus
  REGION 1..12: note = Table B: HLA-DQA1*05:01-B1*03:01L HLA-DRB1*04:01L HLA-DQA1*01:02-B1*06:02L HLA-DRB1*08:04L HLA-DRB1*08:77L HLA-DRB3*02:01L HLA-DPA1*01:03-B1*03:01L HLA-DRB1*14:02L HLA-DQA1*01:01-B1*05:01L HLA-DRB1*08:01L HLA-DRB5*01:01L
  REGION 1..12: note = CONT. FROM ABOVE: HLA-DQA1*05:05-B1*03:19L HLA-DRB1*09:01L HLA-D PA1*03:01-B1*105:01L HLA-DQA1*05:05-B1*03:01L HLA-DRB1*07:01L HL A-DRB1*15:03L
  source 1..12: note = Severe acute respiratory syndrome coronavirus 2
NGVLITEGSVKG

SEQ ID NO: 11457 - protein, 12 aa, Severe acute respiratory syndrome-related coronavirus
  REGION 1..12: note = Table B: HLA-DQA1*05:01-B1*03:01L HLA-DRB1*04:03L HLA-DRB1*13:02L HLA-DRB1*13:03L HLA-DRB1*01:03L HLA-DRB1*04:02L HLA-DRB1*04:05L HLA-DQA1*01:02-B1*06:02L HLA-DRB1*01:02L HLA-DRB4*03:01NL HLA-DRB1*08:04L HLA-DRB1*08:77L
  REGION 1..12: note = CONT. FROM ABOVE: HLA-DPA1*01:03-B1*03:01L HLA-DRB1*14:01L HLA-D RB1*11:03L HLA-DRB1*11:04L HLA-DRB1*14:02L HLA-DQA1*01:01-B1*05: 01L HLA-DQA1*05:05-B1*03:19L HLA-DQA1*05:01-B1*02:01L HLA-DRB1*0 4:10L HLA-DRB1*12:01L HLA-DRB1*12:02L HLA-DPA1*03:01-B1*105:01L
  REGION 1..12: note = CONT. FROM ABOVE: HLA-DRB1*14:54L HLA-DQA1*05:05-B1*03:01L HLA-D RB1*14:17L HLA-DRB1*10:01L HLA-DRB1*16:01L HLA-DRB1*04:08L
  source 1..12: note = Severe acute respiratory syndrome coronavirus 2
ITEGSVKGLQPS

SEQ ID NO: 11458 - protein, 12 aa, Severe acute respiratory syndrome-related coronavirus
  REGION 1..12: note = Table B: HLA-DQA1*05:01-B1*03:01L HLA-DRB1*04:03L HLA-DRB1*04:02L HLA-DRB1*04:05L HLA-DQA1*01:02-B1*06:02L HLA-DRB1*01:02L HLA-DQA1*05:05-B1*03:19L HLA-DRB1*04:10L HLA-DRB1*12:01L HLA-DQA1*03:01-B1*03:02L
  REGION 1..12: note = CONT. FROM ABOVE: HLA-DQA1*05:05-B1*03:01L HLA-DRB1*14:17L HLA-D QA1*02:01-B1*03:03L
  source 1..12: note = Severe acute respiratory syndrome coronavirus 2
GSVKGLQPSVGP

SEQ ID NO: 11459 - protein, 12 aa, Severe acute respiratory syndrome-related coronavirus
  REGION 1..12: note = Table B: HLA-DQA1*05:01-B1*03:01L HLA-DRB1*04:02L HLA-DQA1*01:02-B1*06:02L HLA-DQA1*05:05-B1*03:01L
  source 1..12: note = Severe acute respiratory syndrome coronavirus 2
SVKGLQPSVGPK

SEQ ID NO: 11460 - protein, 10 aa, Severe acute respiratory syndrome-related coronavirus
  REGION 1..10: note = Table B: HLA-DQA1*05:01-B1*03:01L HLA-DRB1*13:03M HLA-DRB1*01:03L HLA-DQA1*01:02-B1*06:02M HLA-DRB4*03:01NL HLA-DRB1*08:77L HLA-DPA1*01:03-B1*03:01L HLA-DPA1*03:01-B1*04:02L HLA-DRB1*03:01L HLA-DRB1*14:01L
  REGION 1..10: note = CONT. FROM ABOVE: HLA-DRB1*11:02L HLA-DRB1*14:02L HLA-DRB5*01:01 L HLA-DQA1*01-B1*05L HLA-DQA1*05:05-B1*03:19M HLA-DQA1*05:01-B1* 02:01L HLA-DRB4*01:01L HLA-DPA1*01:03-B1*04:01M HLA-DQA1*05:05-B 1*03:116L HLA-DPA1*01:03-B1*04:02L HLA-DRB1*12:01L
  REGION 1..10: note = CONT. FROM ABOVE: HLA-DPA1*02:01-B1*13:01L HLA-DPA1*03:01-B1*105 :01L HLA-DPA1*01:03-B1*104:01L HLA-DQA1*05:05-B1*03:01L HLA-DPA1 *01:02-B1*04:01L HLA-DRB1*10:01L HLA-DRB1*16:01L HLA-DQA1*01:03- B1*06:01L HLA-DRB1*08:02L HLA-DQA1*02:01-B1*03:03L
  REGION 1..10: note = CONT. FROM ABOVE: HLA-DRB1*15:03L
  source 1..10: note = Severe acute respiratory syndrome coronavirus 2
EAVKTQFNYY

SEQ ID NO: 11461 - protein, 12 aa, Severe acute respiratory syndrome-related coronavirus
  REGION 1..12: note = Table B: HLA-DQA1*05:01-B1*03:01L HLA-DRB1*04:03L HLA-DRB1*13:02L HLA-DRB1*04:04L HLA-DQA1*01:02-B1*06:02L HLA-DRB1*01:02L HLA-DRB4*03:01NL HLA-DRB1*08:04L HLA-DRB1*14:01L HLA-DRB1*11:04L HLA-DRB1*11:01L HLA-DRB1*04:10L HLA-DRB1*12:01L
  REGION 1..12: note = CONT. FROM ABOVE: HLA-DRB3*01:01L HLA-DPA1*02:01-B1*13:01L HLA-D PA1*03:01-B1*105:01L HLA-DRB1*14:54L HLA-DRB1*14:17L HLA-DPA1*01 :02-B1*04:01L HLA-DRB1*08:03L HLA-DRB1*15:03L
  source 1..12: note = Severe acute respiratory syndrome coronavirus 2
FNYYKKVDGVVQ

SEQ ID NO: 11462 - protein, 14 aa, Severe acute respiratory syndrome-related coronavirus
  REGION 1..14: note = Table B: HLA-DQA1*05:01-B1*03:01L HLA-DRB1*01:02L HLA-DPA1*01:03-B1*03:01L HLA-DQA1*05:05-B1*03:19L HLA-DPA1*02:01-B1*13:01L HLA-DPA1*03:01-B1*105:01L HLA-DQA1*05:05-B1*03:01L
  source 1..14: note = Severe acute respiratory syndrome coronavirus 2
YKKVDGVVQQLPET

SEQ ID NO: 11463 - protein, 12 aa, Severe acute respiratory syndrome-related coronavirus
  REGION 1..12: note = Table B: HLA-DQA1*05:01-B1*03:01L HLA-DRB1*04:03L HLA-DRB1*13:02L HLA-DRB1*13:03L HLA-DRB1*01:03L HLA-DRB1*04:02L HLA-DRB1*04:05L HLA-DRB1*01:02L HLA-DRB4*03:01NL HLA-DRB1*08:77L HLA-DRB3*02:01L HLA-DPA1*01:03-B1*03:01L
  REGION 1..12: note = CONT. FROM ABOVE: HLA-DPA1*03:01-B1*04:02L HLA-DRB1*14:01L HLA-D RB1*11:03L HLA-DRB1*08:01L HLA-DQA1*05:05-B1*03:19L HLA-DQA1*05: 01-B1*02:01L HLA-DPA1*01:03-B1*04:01L HLA-DRB1*09:01L HLA-DPA1*0 1:03-B1*04:02L HLA-DRB1*12:01L HLA-DRB1*12:02L
  REGION 1..12: note = CONT. FROM ABOVE: HLA-DPA1*02:01-B1*13:01L HLA-DRB1*14:54L HLA-D QA1*05:05-B1*03:01L HLA-DRB1*14:17L HLA-DPA1*01:02-B1*04:01L HLA -DRB1*07:01L HLA-DRB1*16:01L HLA-DQA1*01:03-B1*06:01L HLA-DRB1*0 4:08L HLA-DRB1*15:03L
  source 1..12: note = Severe acute respiratory syndrome coronavirus 2
LPETYFTQSRNL

SEQ ID NO: 11464 - protein, 12 aa, Severe acute respiratory syndrome-related coronavirus
  REGION 1..12: note = Table B: HLA-DQA1*05:01-B1*03:01L HLA-DRB1*04:03L HLA-DRB1*13:03L HLA-DRB1*01:03L HLA-DRB1*04:02L HLA-DRB1*04:05L HLA-DRB1*01:02L HLA-DRB1*08:04L HLA-DPA1*03:01-B1*04:02L HLA-DRB1*14:01L HLA-DRB1*08:01L HLA-DQA1*01-B1*05L
  REGION 1..12: note = CONT. FROM ABOVE: HLA-DRB1*12:01L HLA-DPA1*02:01-B1*13:01L HLA-D QA1*05:05-B1*03:01L HLA-DRB1*16:01L HLA-DQA1*01:03-B1*06:01L HLA -DRB1*04:08L HLA-DRB1*15:03L
  source 1..12: note = Severe acute respiratory syndrome coronavirus 2
PETYFTQSRNLQ

SEQ ID NO: 11465 - protein, 13 aa, Severe acute respiratory syndrome-related coronavirus
  REGION 1..13: note = Table B: HLA-DQA1*05:01-B1*03:01L HLA-DRB1*13:03L HLA-DRB1*01:03L HLA-DRB1*04:02L HLA-DRB1*04:05L HLA-DQA1*01:02-B1*06:02L HLA-DRB1*01:02L HLA-DRB1*08:04L HLA-DRB1*14:01L HLA-DPA1*02:01-B1*13:01L HLA-DRB1*16:01L
  REGION 1..13: note = CONT. FROM ABOVE: HLA-DRB1*04:08L HLA-DRB1*08:03L HLA-DQA1*02:01 -B1*03:03L HLA-DRB1*15:03L
  source 1..13: note = Severe acute respiratory syndrome coronavirus 2
LQEFKPRSQMEID

SEQ ID NO: 11466 - protein, 13 aa, Severe acute respiratory syndrome-related coronavirus
  REGION 1..13: note = Table B: HLA-DQA1*05:01-B1*03:01L HLA-DRB1*01:03L HLA-DRB1*04:02L HLA-DRB1*04:05L HLA-DRB1*11:03L HLA-DRB1*14:02L HLA-DQA1*05:05-B1*03:116L HLA-DPA1*01:03-B1*04:02L HLA-DRB3*01:01L HLA-DPA1*02:01-B1*13:01L
  REGION 1..13: note = CONT. FROM ABOVE: HLA-DPA1*03:01-B1*105:01L HLA-DRB1*08:02L
  source 1..13: note = Severe acute respiratory syndrome coronavirus 2
DEFIERYKLEGYA

SEQ ID NO: 11467 - protein, 13 aa, Severe acute respiratory syndrome-related coronavirus
  REGION 1..13: note = Table B: HLA-DQA1*05:01-B1*03:01L HLA-DRB1*04:03L HLA-DRB1*13:02L HLA-DRB1*13:03L HLA-DRB1*04:02L HLA-DRB1*04:04L HLA-DRB1*08:04L HLA-DRB1*11:04L HLA-DRB1*11:01L HLA-DPA1*01:03-B1*04:01L HLA-DPA1*01:03-B1*04:02L
  REGION 1..13: note = CONT. FROM ABOVE: HLA-DRB3*01:01L HLA-DPA1*01:03-B1*02:01L HLA-D RB1*08:03L
  source 1..13: note = Severe acute respiratory syndrome coronavirus 2
IERYKLEGYAFEH

SEQ ID NO: 11468 - protein, 10 aa, Severe acute respiratory syndrome-related coronavirus
  REGION 1..10: note = Table B: HLA-DQA1*05:01-B1*03:01L HLA-DRB1*04:05L HLA-DQA1*01:02-B1*06:02L HLA-DPA1*03:01-B1*04:02L HLA-DQA1*01-B1*05L HLA-DQA1*05:05-B1*03:19L HLA-DQA1*05:01-B1*02:01L HLA-DPA1*01:03-B1*04:01L
  REGION 1..10: note = CONT. FROM ABOVE: HLA-DPA1*02:01-B1*13:01L HLA-DPA1*03:01-B1*105 :01L HLA-DPA1*01:02-B1*04:01L HLA-DRB1*16:01L HLA-DQA1*01:03-B1* 06:01L HLA-DQA1*02:01-B1*03:03L HLA-DRB1*15:03L
  source 1..10: note = Severe acute respiratory syndrome coronavirus 2
AFEHIVYGDF

SEQ ID NO: 11469 - protein, 10 aa, Severe acute respiratory syndrome-related coronavirus
  REGION 1..10: note = Table B: HLA-DQA1*05:01-B1*03:01L HLA-DRB1*01:03L HLA-DQA1*01:02-B1*06:02L HLA-DPA1*03:01-B1*105:01L HLA-DQA1*03:01-B1*03:02L HLA-DPA1*01:02-B1*04:01L HLA-DRB1*16:01L HLA-DQA1*01:03-B1*06:01L
  REGION 1..10: note = CONT. FROM ABOVE: HLA-DQA1*02:01-B1*03:03L
  source 1..10: note = Severe acute respiratory syndrome coronavirus 2
FSHSQLGGLH

SEQ ID NO: 11470 - protein, 12 aa, Severe acute respiratory syndrome-related coronavirus
  REGION 1..12: note = Table B: HLA-DQA1*05:01-B1*03:01L HLA-DRB1*01:03L HLA-DQA1*01:02-B1*06:02L HLA-DRB1*01:02L HLA-DQA1*01:01-B1*05:01L HLA-DRB1*04:10L HLA-DRB1*12:01L HLA-DPA1*02:01-B1*13:01L HLA-DPA1*03:01-B1*105:01L
  REGION 1..12: note = CONT. FROM ABOVE: HLA-DRB1*14:54L HLA-DRB1*04:08L HLA-DRB1*15:03 L
  source 1..12: note = Severe acute respiratory syndrome coronavirus 2
LEDFIPMDSTVK

SEQ ID NO: 11471 - protein, 10 aa, Severe acute respiratory syndrome-related coronavirus
  REGION 1..10: note = Table B: HLA-DQA1*05:01-B1*03:01L HLA-DRB1*04:03L HLA-DRB1*13:03L HLA-DRB1*01:03L HLA-DRB1*04:02L HLA-DRB1*04:05L HLA-DRB1*01:02L HLA-DRB4*03:01NL HLA-DQA1*01-B1*05L HLA-DQA1*05:01-B1*02:01L HLA-DRB1*12:01L
  REGION 1..10: note = CONT. FROM ABOVE: HLA-DQA1*03:01-B1*03:02L HLA-DRB1*14:17L HLA-D RB1*16:01L HLA-DQA1*02:01-B1*03:03L HLA-DRB1*15:03L
  source 1..10: note = Severe acute respiratory syndrome coronavirus 2
FIPMDSTVKN

SEQ ID NO: 11472 - protein, 15 aa, Severe acute respiratory syndrome-related coronavirus
  REGION 1..15: note = Table B: HLA-DQA1*05:01-B1*03:01L HLA-DQA1*05:05-B1*03:19L HLA-DQA1*05:05-B1*03:01L
  source 1..15: note = Severe acute respiratory syndrome coronavirus 2
DSTVKNYFITDAQTG

SEQ ID NO: 11473 - protein, 14 aa, Severe acute respiratory syndrome-related coronavirus
  REGION 1..14: note = Table B: HLA-DQA1*05:01-B1*03:01L HLA-DQA1*05:05-B1*03:19L HLA-DPA1*03:01-B1*105:01L HLA-DQA1*05:05-B1*03:01L HLA-DQA1*01:03-B1*06:01L HLA-DQA1*02:01-B1*03:03L
  source 1..14: note = Severe acute respiratory syndrome coronavirus 2
AQTGSSKCVCSVID

SEQ ID NO: 11474 - protein, 13 aa, Severe acute respiratory syndrome-related coronavirus
  REGION 1..13: note = Table B: HLA-DQA1*05:01-B1*03:01L HLA-DRB1*08:01L HLA-DRB3*01:01L HLA-DPA1*01:03-B1*104:01L HLA-DQA1*05:05-B1*03:01L
  source 1..13: note = Severe acute respiratory syndrome coronavirus 2
IDLLLDDFVEIIK

SEQ ID NO: 11475 - protein, 12 aa, Severe acute respiratory syndrome-related coronavirus
  REGION 1..12: note = Table B: HLA-DQA1*05:01-B1*03:01L HLA-DRB1*01:03L HLA-DRB1*04:05L HLA-DQA1*01:02-B1*06:02L HLA-DRB1*08:04L HLA-DPA1*03:01-B1*04:02L HLA-DRB1*08:01L HLA-DQA1*01-B1*05L HLA-DPA1*03:01-B1*105:01L HLA-DRB1*16:01L
  REGION 1..12: note = CONT. FROM ABOVE: HLA-DQA1*01:03-B1*06:01L HLA-DRB1*04:08L
  source 1..12: note = Severe acute respiratory syndrome coronavirus 2
VETFYPKLQSSQ

SEQ ID NO: 11476 - protein, 10 aa, Severe acute respiratory syndrome-related coronavirus
  REGION 1..10: note = Table B: HLA-DQA1*05:01-B1*03:01L HLA-DRB1*13:03L HLA-DQA1*01:02-B1*06:02M HLA-DPA1*03:01-B1*04:02L HLA-DRB1*14:01L HLA-DRB1*14:02L HLA-DQA1*05:01-B1*02:01L HLA-DPA1*02:01-B1*13:01L HLA-DPA1*03:01-B1*105:01M
  REGION 1..10: note = CONT. FROM ABOVE: HLA-DQA1*02:01-B1*03:03L HLA-DRB1*15:03L
  source 1..10: note = Severe acute respiratory syndrome coronavirus 2
YPKLQSSQAW

SEQ ID NO: 11477 - protein, 10 aa, Severe acute respiratory syndrome-related coronavirus
  REGION 1..10: note = Table B: HLA-DQA1*05:01-B1*03:01L HLA-DQA1*01:02-B1*06:02L HLA-DQA1*05:05-B1*03:19L HLA-DQA1*03:01-B1*03:02L HLA-DQA1*05:05-B1*03:01L HLA-DQA1*01:03-B1*06:01L HLA-DQA1*02:01-B1*03:03L
  source 1..10: note = Severe acute respiratory syndrome coronavirus 2
PGVAMPNLYK

SEQ ID NO: 11478 - protein, 14 aa, Severe acute respiratory syndrome-related coronavirus
  REGION 1..14: note = Table B: HLA-DQA1*05:01-B1*03:01L HLA-DRB1*04:03L HLA-DRB1*04:04L HLA-DRB1*01:01L HLA-DRB1*11:02L HLA-DRB1*11:03L HLA-DRB1*14:02L HLA-DQA1*05:05-B1*03:116L HLA-DPA1*01:03-B1*04:02L HLA-DPA1*02:01-B1*13:01L
  REGION 1..14: note = CONT. FROM ABOVE: HLA-DPA1*03:01-B1*105:01L HLA-DQA1*03:01-B1*03 :02L HLA-DPA1*01:03-B1*02:01L HLA-DRB1*07:01L HLA-DRB1*08:02L HL A-DRB1*08:03L HLA-DQA1*02:01-B1*03:03L
  source 1..14: note = Severe acute respiratory syndrome coronavirus 2
MPNLYKMQRMLLEK

SEQ ID NO: 11479 - protein, 15 aa, Severe acute respiratory syndrome-related coronavirus
  REGION 1..15: note = Table B: HLA-DQA1*05:01-B1*03:01L HLA-DRB1*01:02L HLA-DRB1*04:08L HLA-DRB1*15:03L
  source 1..15: note = Severe acute respiratory syndrome coronavirus 2
RMLLEKCDLQNYGDS

SEQ ID NO: 11480 - protein, 12 aa, Severe acute respiratory syndrome-related coronavirus
  REGION 1..12: note = Table B: HLA-DQA1*05:01-B1*03:01L HLA-DQA1*05:05-B1*03:19L HLA-DPA1*03:01-B1*105:01L HLA-DQA1*05:05-B1*03:01L
  source 1..12: note = Severe acute respiratory syndrome coronavirus 2
LPKGIMMNVAKY

SEQ ID NO: 11481 - protein, 14 aa, Severe acute respiratory syndrome-related coronavirus
  REGION 1..14: note = Table B: HLA-DQA1*05:01-B1*03:01L HLA-DRB1*13:02L HLA-DRB1*04:04L HLA-DRB1*14:01L HLA-DRB1*11:01L HLA-DPA1*01:03-B1*02:01L
  source 1..14: note = Severe acute respiratory syndrome coronavirus 2
NVAKYTQLCQYLNT

SEQ ID NO: 11482 - protein, 15 aa, Severe acute respiratory syndrome-related coronavirus
  REGION 1..15: note = Table B: HLA-DQA1*05:01-B1*03:01L HLA-DRB1*13:02L HLA-DRB1*01:01L HLA-DRB1*11:01L HLA-DQA1*01-B1*05L HLA-DPA1*01:03-B1*02:01L HLA-DRB1*08:02L HLA-DRB1*08:03L
  source 1..15: note = Severe acute respiratory syndrome coronavirus 2
VAKYTQLCQYLNTLT

SEQ ID NO: 11483 - protein, 10 aa, Severe acute respiratory syndrome-related coronavirus
  REGION 1..10: note = Table B: HLA-DQA1*05:01-B1*03:01L HLA-DRB1*04:03L HLA-DQA1*01:02-B1*06:02L HLA-DPA1*03:01-B1*105:01L HLA-DQA1*03:01-B1*03:02L HLA-DQA1*05:05-B1*03:01L HLA-DRB1*14:17L HLA-DQA1*01:03-B1*06:01L
  REGION 1..10: note = CONT. FROM ABOVE: HLA-DQA1*02:01-B1*03:03L
  source 1..10: note = Severe acute respiratory syndrome coronavirus 2
LTLAVPYNMR

SEQ ID NO: 11484 - protein, 10 aa, Severe acute respiratory syndrome-related coronavirus
  REGION 1..10: note = Table B: HLA-DQA1*05:01-B1*03:01L HLA-DRB1*13:03L HLA-DRB1*01:03L HLA-DRB1*04:05L HLA-DQA1*01:02-B1*06:02M HLA-DRB1*01:01L HLA-DRB1*01:02L HLA-DPA1*03:01-B1*04:02L HLA-DRB1*14:01L HLA-DRB1*08:01L HLA-DQA1*05:01-B1*02:01L
  REGION 1..10: note = CONT. FROM ABOVE: HLA-DQA1*05:05-B1*03:116L HLA-DPA1*02:01-B1*13 :01M HLA-DPA1*03:01-B1*105:01M HLA-DPA1*01:02-B1*04:01L HLA-DRB1 *16:01L HLA-DQA1*01:03-B1*06:01L HLA-DQA1*02:01-B1*03:03L HLA-DR B1*15:03M
  source 1..10: note = Severe acute respiratory syndrome coronavirus 2
VPYNMRVIHF

SEQ ID NO: 11485 - protein, 12 aa, Severe acute respiratory syndrome-related coronavirus
  REGION 1..12: note = Table B: HLA-DQA1*05:01-B1*03:01L HLA-DRB1*01:03L HLA-DRB4*03:01NL HLA-DQA1*01:01-B1*05:01L HLA-DQA1*05:05-B1*03:19L HLA-DQA1*05:05-B1*03:01L
  source 1..12: note = Severe acute respiratory syndrome coronavirus 2
AGSDKGVAPGTA

SEQ ID NO: 11486 - protein, 11 aa, Severe acute respiratory syndrome-related coronavirus
  REGION 1..11: note = Table B: HLA-DQA1*05:01-B1*03:01L
  source 1..11: note = Severe acute respiratory syndrome coronavirus 2
SDKGVAPGTAV

SEQ ID NO: 11487 - protein, 12 aa, Severe acute respiratory syndrome-related coronavirus
  REGION 1..12: note = Table B: HLA-DQA1*05:01-B1*03:01L HLA-DQA1*05:05-B1*03:19L
  source 1..12: note = Severe acute respiratory syndrome coronavirus 2
DKGVAPGTAVLR

SEQ ID NO: 11488 - protein, 10 aa, Severe acute respiratory syndrome-related coronavirus
  REGION 1..10: note = Table B: HLA-DQA1*05:01-B1*03:01L HLA-DRB1*13:03L HLA-DRB1*01:03L HLA-DQA1*01:02-B1*06:02M HLA-DPA1*01:03-B1*03:01L HLA-DPA1*03:01-B1*04:02L HLA-DRB1*14:01L HLA-DRB1*14:02L HLA-DQA1*05:01-B1*02:01L
  REGION 1..10: note = CONT. FROM ABOVE: HLA-DPA1*01:03-B1*04:01L HLA-DPA1*02:01-B1*13: 01L HLA-DPA1*03:01-B1*105:01M HLA-DQA1*02:01-B1*03:03L HLA-DRB1* 15:03L
  source 1..10: note = Severe acute respiratory syndrome coronavirus 2
APGTAVLRQW

SEQ ID NO: 11489 - protein, 13 aa, Severe acute respiratory syndrome-related coronavirus
  REGION 1..13: note = Table B: HLA-DQA1*05:01-B1*03:01L HLA-DRB1*13:02L HLA-DRB1*01:03L HLA-DRB1*04:04L HLA-DRB1*04:05L HLA-DRB3*02:01L HLA-DPA1*01:03-B1*03:01L HLA-DQA1*05:05-B1*03:19L HLA-DQA1*05:05-B1*03:01L HLA-DRB1*14:17L
  REGION 1..13: note = CONT. FROM ABOVE: HLA-DQA1*01:03-B1*06:01L HLA-DRB1*04:08L
  source 1..13: note = Severe acute respiratory syndrome coronavirus 2
TAVLRQWLPTGTL

SEQ ID NO: 11490 - protein, 12 aa, Severe acute respiratory syndrome-related coronavirus
  REGION 1..12: note = Table B: HLA-DQA1*05:01-B1*03:01L HLA-DRB1*04:03L HLA-DRB1*13:02L HLA-DRB1*01:03L HLA-DRB1*04:02L HLA-DRB1*04:05L HLA-DQA1*01:02-B1*06:02L HLA-DRB1*01:02L HLA-DRB4*03:01NL HLA-DRB1*08:77L HLA-DRB3*02:01L HLA-DPA1*01:03-B1*03:01L
  REGION 1..12: note = CONT. FROM ABOVE: HLA-DPA1*03:01-B1*04:02L HLA-DRB1*14:01L HLA-D RB1*11:03L HLA-DQA1*01-B1*05L HLA-DQA1*05:05-B1*03:19L HLA-DPA1* 01:03-B1*04:01L HLA-DPA1*01:03-B1*04:02L HLA-DRB1*12:01L HLA-DPA 1*03:01-B1*105:01L HLA-DQA1*05:05-B1*03:01L HLA-DRB1*14:17L
  REGION 1..12: note = CONT. FROM ABOVE: HLA-DPA1*01:02-B1*04:01L HLA-DRB1*07:01L HLA-D RB1*16:01L HLA-DRB1*04:08L HLA-DRB1*15:03L
  source 1..12: note = Severe acute respiratory syndrome coronavirus 2
WLPTGTLLVDSD

SEQ ID NO: 11491 - protein, 13 aa, Severe acute respiratory syndrome-related coronavirus
  REGION 1..13: note = Table B: HLA-DQA1*05:01-B1*03:01L HLA-DQA1*01:01-B1*05:01L HLA-DQA1*01-B1*05L HLA-DQA1*05:05-B1*03:19L HLA-DPA1*03:01-B1*105:01L HLA-DQA1*05:05-B1*03:01L HLA-DRB1*16:01L
  source 1..13: note = Severe acute respiratory syndrome coronavirus 2
LPTGTLLVDSDLN

SEQ ID NO: 11492 - protein, 14 aa, Severe acute respiratory syndrome-related coronavirus
  REGION 1..14: note = Table B: HLA-DQA1*05:01-B1*03:01L HLA-DRB1*14:04L HLA-DQA1*01:02-B1*06:02L HLA-DRB1*11:02L HLA-DQA1*01:01-B1*05:01L HLA-DRB1*08:01L HLA-DRB4*02:01NL HLA-DPA1*01:03-B1*104:01L HLA-DPA1*01:02-B1*04:01L
  REGION 1..14: note = CONT. FROM ABOVE: HLA-DQA1*01:03-B1*06:01L HLA-DRB1*08:02L HLA-D RB1*15:01L
  source 1..14: note = Severe acute respiratory syndrome coronavirus 2
LNDFVSDADSTLIG

SEQ ID NO: 11493 - protein, 12 aa, Severe acute respiratory syndrome-related coronavirus
  REGION 1..12: note = Table B: HLA-DQA1*05:01-B1*03:01L HLA-DRB1*04:03L HLA-DPA1*03:01-B1*105:01L HLA-DQA1*03:01-B1*03:02L
  source 1..12: note = Severe acute respiratory syndrome coronavirus 2
IGDCATVHTANK

SEQ ID NO: 11494 - protein, 15 aa, Severe acute respiratory syndrome-related coronavirus
  REGION 1..15: note = Table B: HLA-DQA1*05:01-B1*03:01L HLA-DRB1*13:02L HLA-DRB1*01:03L HLA-DRB1*04:04L HLA-DPA1*03:01-B1*04:02L HLA-DRB1*14:01L HLA-DRB1*08:01L HLA-DQA1*05:05-B1*03:01L HLA-DPA1*01:02-B1*04:01L HLA-DRB1*07:01L
  REGION 1..15: note = CONT. FROM ABOVE: HLA-DQA1*01:03-B1*06:01L
  source 1..15: note = Severe acute respiratory syndrome coronavirus 2
ANKWDLIISDMYDPK

SEQ ID NO: 11495 - protein, 14 aa, Severe acute respiratory syndrome-related coronavirus
  REGION 1..14: note = Table B: HLA-DQA1*05:01-B1*03:01L HLA-DRB1*13:02L HLA-DRB1*01:01L HLA-DPA1*01:03-B1*03:01L HLA-DRB1*03:01L HLA-DRB1*11:03L HLA-DRB1*14:02L HLA-DQA1*01:01-B1*05:01L HLA-DRB1*11:01L HLA-DRB4*01:01L HLA-DPA1*01:03-B1*04:02L
  REGION 1..14: note = CONT. FROM ABOVE: HLA-DRB3*01:01L HLA-DQA1*05:05-B1*03:01L
  source 1..14: note = Severe acute respiratory syndrome coronavirus 2
DLIISDMYDPKTKN

SEQ ID NO: 11496 - protein, 11 aa, Severe acute respiratory syndrome-related coronavirus
  REGION 1..11: note = Table B: HLA-DQA1*05:01-B1*03:01L HLA-DRB1*01:03L HLA-DQA1*01:02-B1*06:02L HLA-DRB1*03:01L HLA-DQA1*05:01-B1*02:01L HLA-DPA1*01:03-B1*04:01L HLA-DRB1*16:01L
  source 1..11: note = Severe acute respiratory syndrome coronavirus 2
VTKENDSKEGF

SEQ ID NO: 11497 - protein, 14 aa, Severe acute respiratory syndrome-related coronavirus
  REGION 1..14: note = Table B: HLA-DQA1*05:01-B1*03:01L HLA-DRB1*04:03L HLA-DRB1*13:02L HLA-DRB1*04:04L HLA-DRB1*04:05L HLA-DRB1*01:01L HLA-DPA1*01:03-B1*03:01L HLA-DPA1*03:01-B1*04:02L HLA-DRB1*14:01L HLA-DRB1*14:02L HLA-DRB1*08:01L HLA-DRB1*11:01L
  REGION 1..14: note = CONT. FROM ABOVE: HLA-DQA1*01-B1*05L HLA-DQA1*05:05-B1*03:19L HL A-DPA1*02:01-B1*13:01L HLA-DQA1*05:05-B1*03:01L HLA-DRB1*10:01L
  source 1..14: note = Severe acute respiratory syndrome coronavirus 2
EGFFTYICGFIQQK

SEQ ID NO: 11498 - protein, 10 aa, Severe acute respiratory syndrome-related coronavirus
  REGION 1..10: note = Table B: HLA-DQA1*05:01-B1*03:01L HLA-DRB1*04:03L HLA-DRB1*04:02L HLA-DRB1*01:02L HLA-DRB4*03:01NL HLA-DRB1*12:01L HLA-DQA1*03:01-B1*03:02L HLA-DQA1*05:05-B1*03:01L HLA-DRB1*14:17L HLA-DQA1*02:01-B1*03:03L
  source 1..10: note = Severe acute respiratory syndrome coronavirus 2
LALGGSVAIK

SEQ ID NO: 11499 - protein, 10 aa, Severe acute respiratory syndrome-related coronavirus
  REGION 1..10: note = Table B: HLA-DQA1*05:01-B1*03:01L HLA-DRB1*08:77L HLA-DPA1*01:03-B1*03:01L HLA-DPA1*03:01-B1*04:02L HLA-DQA1*01-B1*05L HLA-DQA1*05:05-B1*03:19L HLA-DQA1*05:01-B1*02:01L HLA-DRB4*01:01L
  REGION 1..10: note = CONT. FROM ABOVE: HLA-DPA1*01:03-B1*04:01L HLA-DPA1*01:03-B1*104 :01L HLA-DPA1*01:02-B1*04:01L HLA-DRB1*10:01L HLA-DRB1*16:01L
  source 1..10: note = Severe acute respiratory syndrome coronavirus 2
ADLYKLMGHF

SEQ ID NO: 11500 - protein, 11 aa, Severe acute respiratory syndrome-related coronavirus
  REGION 1..11: note = Table B: HLA-DQA1*05:01-B1*03:01L HLA-DQA1*05:05-B1*03:19L HLA-DQA1*05:01-B1*02:01L HLA-DQA1*05:05-B1*03:01L HLA-DRB1*16:01L HLA-DQA1*02:01-B1*03:03L
  source 1..11: note = Severe acute respiratory syndrome coronavirus 2
AWWTAFVTNVN

SEQ ID NO: 11501 - protein, 13 aa, Severe acute respiratory syndrome-related coronavirus
  REGION 1..13: note = Table B: HLA-DQA1*05:01-B1*03:01L HLA-DRB1*01:02L HLA-DRB3*02:01L HLA-DPA1*01:03-B1*03:01L HLA-DRB1*14:02L HLA-DQA1*05:05-B1*03:19L
  source 1..13: note = Severe acute respiratory syndrome coronavirus 2
WTAFVTNVNASSS

SEQ ID NO: 11502 - protein, 11 aa, Severe acute respiratory syndrome-related coronavirus
  REGION 1..11: note = Table B: HLA-DQA1*05:01-B1*03:01L HLA-DRB1*04:01L HLA-DRB1*13:02L HLA-DRB1*13:03L HLA-DRB1*01:03L HLA-DRB1*04:02L HLA-DRB1*04:04L HLA-DRB1*04:05L HLA-DQA1*01:02-B1*06:02L HLA-DRB1*01:01L HLA-DRB1*01:02L HLA-DRB4*03:01NL HLA-DRB1*08:04L
  REGION 1..11: note = CONT. FROM ABOVE: HLA-DRB1*08:77L HLA-DRB3*02:01L HLA-DPA1*01:03 -B1*03:01L HLA-DRB1*14:01L HLA-DRB1*11:03L HLA-DRB1*11:04L HLA-D RB1*14:02L HLA-DRB1*11:01L HLA-DQA1*01-B1*05L HLA-DQA1*05:05-B1* 03:19L HLA-DQA1*05:01-B1*02:01L HLA-DRB1*04:10L HLA-DRB1*12:01L
  REGION 1..11: note = CONT. FROM ABOVE: HLA-DRB1*12:02L HLA-DPA1*03:01-B1*105:01L HLA- DQA1*03:01-B1*03:02L HLA-DQA1*05:05-B1*03:01L HLA-DRB1*10:01L HL A-DRB1*16:01L HLA-DRB1*04:08L HLA-DRB1*08:03L HLA-DQA1*02:01-B1* 03:03L HLA-DRB1*15:03L
  source 1..11: note = Severe acute respiratory syndrome coronavirus 2
FVTNVNASSSE

SEQ ID NO: 11503 - protein, 12 aa, Severe acute respiratory syndrome-related coronavirus
  REGION 1..12: note = Table B: HLA-DQA1*05:01-B1*03:01L HLA-DRB1*04:03L HLA-DQA1*01:02-B1*06:02L HLA-DQA1*01:01-B1*05:01L HLA-DQA1*01-B1*05L HLA-DQA1*05:05-B1*03:19L HLA-DRB1*12:01L HLA-DPA1*03:01-B1*105:01L HLA-DQA1*05:05-B1*03:01L
  REGION 1..12: note = CONT. FROM ABOVE: HLA-DRB1*16:01L
  source 1..12: note = Severe acute respiratory syndrome coronavirus 2
VNASSSEAFLIG

SEQ ID NO: 11504 - protein, 14 aa, Severe acute respiratory syndrome-related coronavirus
  REGION 1..14: note = Table B: HLA-DQA1*05:01-B1*03:01L HLA-DRB1*04:01L HLA-DRB1*13:02L HLA-DRB1*04:02L HLA-DRB1*04:04L HLA-DRB1*04:05L HLA-DRB1*01:01L HLA-DRB1*08:04L HLA-DRB1*14:01L HLA-DRB1*11:04L HLA-DRB1*11:01L HLA-DRB1*12:01L HLA-DRB3*01:01L
  REGION 1..14: note = CONT. FROM ABOVE: HLA-DQA1*03:01-B1*03:02L HLA-DPA1*01:03-B1*02: 01L HLA-DQA1*05:05-B1*03:01L HLA-DRB1*14:17L HLA-DRB1*10:01L HLA -DQA1*01:03-B1*06:01L HLA-DQA1*02:01-B1*03:03L
  source 1..14: note = Severe acute respiratory syndrome coronavirus 2
EAFLIGCNYLGKPR

SEQ ID NO: 11505 - protein, 11 aa, Severe acute respiratory syndrome-related coronavirus
  REGION 1..11: note = Table B: HLA-DQA1*05:01-B1*03:01L HLA-DRB1*04:03L HLA-DRB1*13:03L HLA-DRB1*01:03L HLA-DRB1*04:02L HLA-DRB1*01:02L HLA-DRB1*14:01L HLA-DRB1*08:01L HLA-DQA1*05:05-B1*03:01L HLA-DRB1*14:17L HLA-DRB1*16:01L HLA-DRB1*04:08L
  source 1..11: note = Severe acute respiratory syndrome coronavirus 2
YLGKPREQIDG

SEQ ID NO: 11506 - protein, 15 aa, Severe acute respiratory syndrome-related coronavirus
  REGION 1..15: note = Table B: HLA-DQA1*05:01-B1*03:01L HLA-DRB1*13:02L HLA-DPA1*01:03-B1*03:01L HLA-DRB1*04:08L
  source 1..15: note = Severe acute respiratory syndrome coronavirus 2
GKPREQIDGYVMHAN

SEQ ID NO: 11507 - protein, 10 aa, Severe acute respiratory syndrome-related coronavirus
  REGION 1..10: note = Table B: HLA-DQA1*05:01-B1*03:01L HLA-DPA1*01:03-B1*03:01L HLA-DRB1*03:01L HLA-DQA1*01-B1*05L HLA-DQA1*05:05-B1*03:19L HLA-DQA1*05:01-B1*02:01L HLA-DPA1*01:03-B1*104:01L HLA-DRB1*16:01L HLA-DQA1*02:01-B1*03:03L
  source 1..10: note = Severe acute respiratory syndrome coronavirus 2
IDGYVMHANY

SEQ ID NO: 11508 - protein, 11 aa, Severe acute respiratory syndrome-related coronavirus
  REGION 1..11: note = Table B: HLA-DQA1*05:01-B1*03:01L HLA-DPA1*03:01-B1*04:02L HLA-DRB1*14:01L HLA-DQA1*05:01-B1*02:01L HLA-DRB1*12:01L HLA-DPA1*03:01-B1*105:01L HLA-DPA1*01:02-B1*04:01L
  source 1..11: note = Severe acute respiratory syndrome coronavirus 2
DGYVMHANYIF

SEQ ID NO: 11509 - protein, 10 aa, Severe acute respiratory syndrome-related coronavirus
  REGION 1..10: note = Table B: HLA-DQA1*05:01-B1*03:01L HLA-DRB1*13:03L HLA-DRB1*04:05L HLA-DQA1*01:02-B1*06:02L HLA-DRB1*01:02L HLA-DPA1*01:03-B1*03:01L HLA-DPA1*03:01-B1*04:02L HLA-DRB1*14:01L HLA-DRB1*08:01L HLA-DRB5*01:01L
  REGION 1..10: note = CONT. FROM ABOVE: HLA-DQA1*01-B1*05L HLA-DQA1*05:01-B1*02:01L HL A-DQA1*05:05-B1*03:116L HLA-DPA1*02:01-B1*13:01L HLA-DPA1*03:01- B1*105:01L HLA-DQA1*03:01-B1*03:02L HLA-DPA1*01:02-B1*04:01L HLA -DRB1*16:01L HLA-DQA1*02:01-B1*03:03L HLA-DRB1*15:03L
  source 1..10: note = Severe acute respiratory syndrome coronavirus 2
FPLKLRGTAV

SEQ ID NO: 11510 - protein, 10 aa, Severe acute respiratory syndrome-related coronavirus
  REGION 1..10: note = Table B: HLA-DQA1*05:01-B1*03:01L HLA-DQA1*01:02-B1*06:02L HLA-DPA1*03:01-B1*105:01L HLA-DPA1*01:02-B1*04:01L HLA-DQA1*01:03-B1*06:01L HLA-DQA1*02:01-B1*03:03L
  source 1..10: note = Severe acute respiratory syndrome coronavirus 2
LRGTAVMSLK

SEQ ID NO: 11511 - protein, 13 aa, Severe acute respiratory syndrome-related coronavirus
  REGION 1..13: note = Table B: HLA-DQA1*05:01-B1*03:01L HLA-DRB1*01:03L HLA-DRB1*04:02L HLA-DRB1*04:05L HLA-DRB1*01:02L HLA-DRB1*12:01L HLA-DPA1*01:02-B1*04:01L HLA-DRB1*16:01L HLA-DRB1*04:08L
  source 1..13: note = Severe acute respiratory syndrome coronavirus 2
INDMILSLLSKGR

SEQ ID NO: 11512 - protein, 12 aa, Severe acute respiratory syndrome-related coronavirus
  REGION 1..12: note = Table B: HLA-DQA1*05:01-B1*03:01L HLA-DRB1*13:02L HLA-DRB1*01:03L HLA-DRB1*04:02L HLA-DRB1*04:05L HLA-DRB1*01:02L HLA-DRB3*02:01L HLA-DPA1*03:01-B1*04:02L HLA-DQA1*05:01-B1*02:01L HLA-DRB1*12:01L
  REGION 1..12: note = CONT. FROM ABOVE: HLA-DPA1*03:01-B1*105:01L HLA-DRB1*14:54L HLA- DQA1*05:05-B1*03:01L HLA-DPA1*01:02-B1*04:01L HLA-DRB1*16:01L HL A-DRB1*04:08L
  source 1..12: note = Severe acute respiratory syndrome coronavirus 2
DMILSLLSKGRL

SEQ ID NO: 11513 - protein, 12 aa, Severe acute respiratory syndrome-related coronavirus
  REGION 1..12: note = Table B: HLA-DQA1*05:01-B1*03:01L HLA-DRB1*04:05L HLA-DQA1*01:02-B1*06:02L HLA-DRB4*03:01NL HLA-DRB3*02:01L HLA-DPA1*01:03-B1*03:01L HLA-DPA1*03:01-B1*04:02L HLA-DRB1*03:01L HLA-DRB1*11:03L HLA-DRB1*14:02L HLA-DRB1*08:01L
  REGION 1..12: note = CONT. FROM ABOVE: HLA-DRB1*11:01L HLA-DQA1*05:01-B1*02:01L HLA-D PA1*03:01-B1*105:01L HLA-DQA1*02:01-B1*03:03L
  source 1..12: note = Severe acute respiratory syndrome coronavirus 2
LIIRENNRVVIS

SEQ ID NO: 11514 - protein, 13 aa, Severe acute respiratory syndrome-related coronavirus
  REGION 1..13: note = Table B: HLA-DQA1*05:01-B1*03:01L HLA-DRB1*04:05L HLA-DQA1*01:02-B1*06:02L HLA-DRB1*08:77L HLA-DRB3*02:01L HLA-DPA1*01:03-B1*03:01L HLA-DRB1*03:01L HLA-DRB1*11:03L HLA-DRB1*14:02L HLA-DRB1*11:01L HLA-DQA1*05:05-B1*03:19L
  REGION 1..13: note = CONT. FROM ABOVE: HLA-DQA1*05:01-B1*02:01L HLA-DQA1*03:01-B1*03: 02L HLA-DQA1*02:01-B1*03:03L
  source 1..13: note = Severe acute respiratory syndrome coronavirus 2
IIRENNRVVISSD

SEQ ID NO: 11515 - protein, 12 aa, Severe acute respiratory syndrome-related coronavirus
  REGION 1..12: note = Table B: HLA-DQA1*05:01-B1*03:01L HLA-DRB1*13:02L HLA-DRB1*04:04L HLA-DRB1*04:05L HLA-DRB1*01:02L HLA-DRB4*03:01NL HLA-DQA1*01-B1*05L HLA-DRB1*04:10L HLA-DRB1*12:02L HLA-DQA1*02:01-B1*03:03L HLA-DRB1*15:03L
  source 1..12: note = Severe acute respiratory syndrome coronavirus 2
NRVVISSDVLVN

SEQ ID NO: 11516 - protein, 13 aa, Severe acute respiratory syndrome-related coronavirus
  REGION 1..13: note = Table B: HLA-DQA1*05:01-B1*03:01L HLA-DRB1*04:02L HLA-DRB1*04:04L HLA-DPA1*01:03-B1*03:01L HLA-DQA1*02:01-B1*03:03L
  source 1..13: note = Severe acute respiratory syndrome coronavirus 2
LVLLPLVSSQCVN

SEQ ID NO: 11517 - protein, 12 aa, Severe acute respiratory syndrome-related coronavirus
  REGION 1..12: note = Table B: HLA-DQA1*05:01-B1*03:01L HLA-DRB1*13:02L HLA-DRB1*13:03L HLA-DRB1*01:03L HLA-DRB4*03:01NL HLA-DRB1*08:04L HLA-DRB1*08:01L HLA-DRB1*12:01L HLA-DQA1*03:01-B1*03:02L HLA-DRB1*16:01L HLA-DQA1*02:01-B1*03:03L
  source 1..12: note = Severe acute respiratory syndrome coronavirus 2
VNLTTRTQLPPA

SEQ ID NO: 11518 - protein, 12 aa, Severe acute respiratory syndrome-related coronavirus
  REGION 1..12: note = Table B: HLA-DQA1*05:01-B1*03:01L HLA-DQA1*01:02-B1*06:02L HLA-DRB1*14:01L HLA-DQA1*01:03-B1*06:01L
  source 1..12: note = Severe acute respiratory syndrome coronavirus 2
TNSFTRGVYYPD

SEQ ID NO: 11519 - protein, 10 aa, Severe acute respiratory syndrome-related coronavirus
  REGION 1..10: note = Table B: HLA-DQA1*05:01-B1*03:01L HLA-DRB1*01:03L HLA-DRB1*04:02L HLA-DQA1*01:02-B1*06:02L HLA-DQA1*03:01-B1*03:02L HLA-DPA1*01:02-B1*04:01L HLA-DRB1*16:01L HLA-DQA1*01:03-B1*06:01L
  REGION 1..10: note = CONT. FROM ABOVE: HLA-DQA1*02:01-B1*03:03L
  source 1..10: note = Severe acute respiratory syndrome coronavirus 2
FTRGVYYPDK

SEQ ID NO: 11520 - protein, 10 aa, Severe acute respiratory syndrome-related coronavirus
  REGION 1..10: note = Table B: HLA-DQA1*05:01-B1*03:01L HLA-DRB1*13:03L HLA-DQA1*01:02-B1*06:02L HLA-DQA1*01-B1*05L HLA-DQA1*05:05-B1*03:116L HLA-DPA1*02:01-B1*13:01L HLA-DPA1*03:01-B1*105:01L HLA-DPA1*01:02-B1*04:01L
  REGION 1..10: note = CONT. FROM ABOVE: HLA-DRB1*16:01L
  source 1..10: note = Severe acute respiratory syndrome coronavirus 2
YPDKVFRSSV

SEQ ID NO: 11521 - protein, 11 aa, Severe acute respiratory syndrome-related coronavirus
  REGION 1..11: note = Table B: HLA-DQA1*05:01-B1*03:01L HLA-DRB1*01:03L HLA-DQA1*05:05-B1*03:01L HLA-DPA1*01:02-B1*04:01L HLA-DRB1*04:08L
  source 1..11: note = Severe acute respiratory syndrome coronavirus 2
VFRSSVLHSTQ

SEQ ID NO: 11522 - protein, 11 aa, Severe acute respiratory syndrome-related coronavirus
  REGION 1..11: note = Table B: HLA-DQA1*05:01-B1*03:01L HLA-DQA1*05:05-B1*03:19L HLA-DQA1*05:05-B1*03:01L HLA-DPA1*01:02-B1*04:01L
  source 1..11: note = Severe acute respiratory syndrome coronavirus 2
FRSSVLHSTQD

SEQ ID NO: 11523 - protein, 13 aa, Severe acute respiratory syndrome-related coronavirus
  REGION 1..13: note = Table B: HLA-DQA1*05:01-B1*03:01L HLA-DRB1*04:03L HLA-DRB1*13:02L HLA-DRB1*01:03L HLA-DRB1*04:02L HLA-DRB1*04:05L HLA-DRB3*02:01L HLA-DRB1*14:01L HLA-DQA1*05:01-B1*02:01L HLA-DPA1*02:01-B1*13:01L HLA-DRB1*04:08L HLA-DRB1*15:01L
  source 1..13: note = Severe acute respiratory syndrome coronavirus 2
FSNVTWFHAIHVS

SEQ ID NO: 11524 - protein, 12 aa, Severe acute respiratory syndrome-related coronavirus
  REGION 1..12: note = Table B: HLA-DQA1*05:01-B1*03:01L HLA-DRB1*13:02L HLA-DQA1*01:02-B1*06:02L HLA-DRB1*08:01L HLA-DRB1*15:01L
  source 1..12: note = Severe acute respiratory syndrome coronavirus 2
NVTWFHAIHVSG

SEQ ID NO: 11525 - protein, 11 aa, Severe acute respiratory syndrome-related coronavirus
  REGION 1..11: note = Table B: HLA-DQA1*05:01-B1*03:01L HLA-DQA1*05:05-B1*03:19L HLA-DQA1*03:01-B1*03:02L HLA-DQA1*05:05-B1*03:01L HLA-DQA1*01:03-B1*06:01L
  source 1..11: note = Severe acute respiratory syndrome coronavirus 2
WFHAIHVSGTN

SEQ ID NO: 11526 - protein, 12 aa, Severe acute respiratory syndrome-related coronavirus
  REGION 1..12: note = Table B: HLA-DQA1*05:01-B1*03:01L HLA-DRB1*04:04L HLA-DQA1*01:02-B1*06:02L HLA-DRB1*01:02L HLA-DRB1*14:01L HLA-DRB1*11:04L HLA-DRB1*08:01L HLA-DRB1*04:10L HLA-DRB1*14:54L HLA-DRB1*10:01L HLA-DRB1*04:08L HLA-DRB1*08:03L HLA-DRB1*15:03L
  source 1..12: note = Severe acute respiratory syndrome coronavirus 2
HAIHVSGTNGTK

SEQ ID NO: 11527 - protein, 12 aa, Severe acute respiratory syndrome-related coronavirus
  REGION 1..12: note = Table B: HLA-DQA1*05:01-B1*03:01L HLA-DRB1*04:04L HLA-DQA1*01:02-B1*06:02L HLA-DRB1*01:02L HLA-DRB1*04:08L
  source 1..12: note = Severe acute respiratory syndrome coronavirus 2
AIHVSGTNGTKR

SEQ ID NO: 11528 - protein, 10 aa, Severe acute respiratory syndrome-related coronavirus
  REGION 1..10: note = Table B: HLA-DQA1*05:01-B1*03:01L HLA-DRB1*04:01L HLA-DRB1*13:02L HLA-DRB1*13:03L HLA-DRB1*01:03L HLA-DRB1*04:02L HLA-DRB1*01:01L HLA-DRB4*03:01NL HLA-DRB3*02:01L HLA-DRB1*14:01L HLA-DRB1*11:04L HLA-DRB1*14:02L HLA-DRB1*08:01L HLA-DRB5*01:01L
  REGION 1..10: note = CONT. FROM ABOVE: HLA-DPA1*01:03-B1*04:02L HLA-DRB1*12:01L HLA-D RB1*12:02L HLA-DQA1*03:01-B1*03:02M HLA-DQA1*05:05-B1*03:01L HLA -DRB1*14:17L HLA-DRB1*16:01L HLA-DQA1*01:03-B1*06:01L HLA-DQA1*0 2:01-B1*03:03L HLA-DRB1*15:01L
  source 1..10: note = Severe acute respiratory syndrome coronavirus 2
ASTEKSNIIR

SEQ ID NO: 11529 - protein, 14 aa, Severe acute respiratory syndrome-related coronavirus
  REGION 1..14: note = Table B: HLA-DQA1*05:01-B1*03:01L HLA-DRB1*01:03L HLA-DRB1*01:02L HLA-DPA1*01:03-B1*03:01L HLA-DQA1*05:05-B1*03:19L HLA-DPA1*01:03-B1*04:01L HLA-DPA1*02:01-B1*13:01L HLA-DRB1*16:01L HLA-DRB1*04:08L
  source 1..14: note = Severe acute respiratory syndrome coronavirus 2
NIIRGWIFGTTLDS

SEQ ID NO: 11530 - protein, 10 aa, Severe acute respiratory syndrome-related coronavirus
  REGION 1..10: note = Table B: HLA-DQA1*05:01-B1*03:01L HLA-DRB1*04:03L HLA-DRB1*13:02L HLA-DRB1*13:03L HLA-DRB1*04:02L HLA-DQA1*01:02-B1*06:02L HLA-DRB4*03:01NL HLA-DRB1*12:01L HLA-DPA1*03:01-B1*105:01L HLA-DQA1*03:01-B1*03:02L
  REGION 1..10: note = CONT. FROM ABOVE: HLA-DQA1*05:05-B1*03:01L HLA-DRB1*14:17L HLA-D RB1*16:01L HLA-DQA1*01:03-B1*06:01L HLA-DQA1*02:01-B1*03:03L
  source 1..10: note = Severe acute respiratory syndrome coronavirus 2
WIFGTTLDSK

SEQ ID NO: 11531 - protein, 13 aa, Severe acute respiratory syndrome-related coronavirus
  REGION 1..13: note = Table B: HLA-DQA1*05:01-B1*03:01L
  source 1..13: note = Severe acute respiratory syndrome coronavirus 2
NATNVVIKVCEFQ

SEQ ID NO: 11532 - protein, 15 aa, Severe acute respiratory syndrome-related coronavirus
  REGION 1..15: note = Table B: HLA-DQA1*05:01-B1*03:01L HLA-DRB1*04:03L HLA-DRB1*13:02L HLA-DPA1*01:03-B1*03:01L HLA-DRB1*08:01L HLA-DQA1*01-B1*05L HLA-DQA1*05:05-B1*03:19L HLA-DQA1*05:01-B1*02:01L HLA-DPA1*02:01-B1*13:01L
  REGION 1..15: note = CONT. FROM ABOVE: HLA-DPA1*01:03-B1*104:01L HLA-DQA1*05:05-B1*03 :01L HLA-DQA1*02:01-B1*03:03L
  source 1..15: note = Severe acute respiratory syndrome coronavirus 2
VVIKVCEFQFCNDPF

SEQ ID NO: 11533 - protein, 12 aa, Severe acute respiratory syndrome-related coronavirus
  REGION 1..12: note = Table B: HLA-DQA1*05:01-B1*03:01L HLA-DRB1*04:05L HLA-DQA1*01:02-B1*06:02L HLA-DRB1*01:02L HLA-DPA1*01:03-B1*03:01L HLA-DRB1*12:01L HLA-DPA1*01:03-B1*02:01L HLA-DQA1*02:01-B1*03:03L
  REGION 1..12: note = CONT. FROM ABOVE: HLA-DRB1*15:03L
  source 1..12: note = Severe acute respiratory syndrome coronavirus 2
NDPFLGVYYHKN

SEQ ID NO: 11534 - protein, 12 aa, Severe acute respiratory syndrome-related coronavirus
  REGION 1..12: note = Table B: HLA-DQA1*05:01-B1*03:01L HLA-DRB1*04:03L HLA-DRB1*13:02L HLA-DRB1*13:03L HLA-DRB1*04:04L HLA-DRB1*04:05L HLA-DQA1*01:02-B1*06:02L HLA-DRB1*01:02L HLA-DRB1*08:04L HLA-DPA1*01:03-B1*03:01L HLA-DRB1*14:01L HLA-DRB1*11:04L
  REGION 1..12: note = CONT. FROM ABOVE: HLA-DRB1*11:01L HLA-DQA1*01-B1*05L HLA-DRB1*12 :01L HLA-DRB3*01:01L HLA-DPA1*02:01-B1*13:01L HLA-DPA1*01:03-B1* 02:01L HLA-DQA1*02:01-B1*03:03L HLA-DRB1*15:03L
  source 1..12: note = Severe acute respiratory syndrome coronavirus 2
DPFLGVYYHKNN

SEQ ID NO: 11535 - protein, 10 aa, Severe acute respiratory syndrome-related coronavirus
  REGION 1..10: note = Table B: HLA-DQA1*05:01-B1*03:01L HLA-DRB1*04:03L HLA-DRB1*01:03M HLA-DRB1*04:05M HLA-DQA1*01:02-B1*06:02L HLA-DRB1*01:01L HLA-DRB1*01:02L HLA-DRB1*08:77L HLA-DPA1*03:01-B1*04:02L HLA-DRB1*11:03L HLA-DRB1*14:02L
  REGION 1..10: note = CONT. FROM ABOVE: HLA-DQA1*01:01-B1*05:01L HLA-DRB1*11:01L HLA-D QA1*05:05-B1*03:19L HLA-DQA1*05:01-B1*02:01L HLA-DRB4*01:01L HLA -DPA1*01:03-B1*04:01L HLA-DQA1*05:05-B1*03:116L HLA-DPA1*01:03-B 1*04:02L HLA-DRB1*12:01L HLA-DPA1*02:01-B1*13:01M
  REGION 1..10: note = CONT. FROM ABOVE: HLA-DPA1*03:01-B1*105:01L HLA-DPA1*01:02-B1*04 :01L HLA-DRB1*16:01L HLA-DQA1*01:03-B1*06:01M HLA-DQA1*02:01-B1* 03:03L HLA-DRB1*15:03L
  source 1..10: note = Severe acute respiratory syndrome coronavirus 2
VYYHKNNKSW

SEQ ID NO: 11536 - protein, 13 aa, Severe acute respiratory syndrome-related coronavirus
  REGION 1..13: note = Table B: HLA-DQA1*05:01-B1*03:01L HLA-DRB1*04:03L HLA-DRB1*04:05L HLA-DRB1*11:01L HLA-DQA1*05:05-B1*03:01L
  source 1..13: note = Severe acute respiratory syndrome coronavirus 2
FEYVSQPFLMDLE

SEQ ID NO: 11537 - protein, 12 aa, Severe acute respiratory syndrome-related coronavirus
  REGION 1..12: note = Table B: HLA-DQA1*05:01-B1*03:01L HLA-DRB1*04:03L HLA-DRB1*13:02L HLA-DRB1*13:03L HLA-DRB1*04:02L HLA-DRB1*04:04L HLA-DRB1*04:05L HLA-DRB1*08:04L HLA-DRB1*14:01L HLA-DRB1*11:04L HLA-DRB1*08:01L HLA-DRB1*11:01L HLA-DRB3*01:01L
  REGION 1..12: note = CONT. FROM ABOVE: HLA-DPA1*01:03-B1*02:01L HLA-DQA1*05:05-B1*03: 01L HLA-DRB1*14:17L HLA-DRB1*10:01L HLA-DRB1*08:03L
  source 1..12: note = Severe acute respiratory syndrome coronavirus 2
YVSQPFLMDLEG

SEQ ID NO: 11538 - protein, 14 aa, Severe acute respiratory syndrome-related coronavirus
  REGION 1..14: note = Table B: HLA-DQA1*05:01-B1*03:01L HLA-DRB1*01:01L HLA-DQA1*05:05-B1*03:19L HLA-DRB1*13:01L HLA-DPA1*01:03-B1*04:01L HLA-DPA1*01:03-B1*04:02L HLA-DQA1*05:05-B1*03:01L HLA-DRB1*07:01L
  source 1..14: note = Severe acute respiratory syndrome coronavirus 2
VSQPFLMDLEGKQG

SEQ ID NO: 11539 - protein, 10 aa, Severe acute respiratory syndrome-related coronavirus
  REGION 1..10: note = Table B: HLA-DQA1*05:01-B1*03:01L HLA-DRB1*08:77L HLA-DPA1*03:01-B1*04:02L HLA-DQA1*01-B1*05L HLA-DQA1*05:05-B1*03:19L HLA-DQA1*05:01-B1*02:01L HLA-DRB4*01:01L HLA-DPA1*01:03-B1*04:01L
  REGION 1..10: note = CONT. FROM ABOVE: HLA-DPA1*01:02-B1*04:01L HLA-DRB1*10:01L HLA-D RB1*16:01L HLA-DRB1*15:03L
  source 1..10: note = Severe acute respiratory syndrome coronavirus 2
MDLEGKQGNF

SEQ ID NO: 11540 - protein, 12 aa, Severe acute respiratory syndrome-related coronavirus
  REGION 1..12: note = Table B: HLA-DQA1*05:01-B1*03:01L HLA-DRB1*13:02L HLA-DRB1*01:03L HLA-DQA1*01:02-B1*06:02L HLA-DRB1*14:01L HLA-DRB1*08:01L HLA-DRB3*01:01L HLA-DPA1*01:02-B1*04:01L HLA-DRB1*07:01L HLA-DRB1*16:01L HLA-DRB1*04:08L
  REGION 1..12: note = CONT. FROM ABOVE: HLA-DQA1*02:01-B1*03:03L
  source 1..12: note = Severe acute respiratory syndrome coronavirus 2
GNFKNLREFVFK

SEQ ID NO: 11541 - protein, 13 aa, Severe acute respiratory syndrome-related coronavirus
  REGION 1..13: note = Table B: HLA-DQA1*05:01-B1*03:01L HLA-DRB1*04:03L HLA-DRB1*13:02L HLA-DRB1*04:02L HLA-DPA1*03:01-B1*04:02L HLA-DRB1*11:04L HLA-DRB3*01:01L HLA-DPA1*02:01-B1*13:01L HLA-DPA1*03:01-B1*105:01L HLA-DQA1*01:03-B1*06:01L
  REGION 1..13: note = CONT. FROM ABOVE: HLA-DRB1*08:03L
  source 1..13: note = Severe acute respiratory syndrome coronavirus 2
IDGYFKIYSKHTP

SEQ ID NO: 11542 - protein, 11 aa, Severe acute respiratory syndrome-related coronavirus
  REGION 1..11: note = Table B: HLA-DQA1*05:01-B1*03:01L HLA-DRB1*04:03L HLA-DRB1*13:03L HLA-DRB1*04:02L HLA-DRB1*04:05L HLA-DQA1*01:02-B1*06:02L HLA-DRB1*01:02L HLA-DRB1*08:04L HLA-DRB1*11:04L HLA-DRB1*11:01L HLA-DRB1*12:01L HLA-DRB1*14:54L
  REGION 1..11: note = CONT. FROM ABOVE: HLA-DRB1*14:17L HLA-DPA1*01:02-B1*04:01L HLA-D RB1*04:08L HLA-DRB1*08:03L
  source 1..11: note = Severe acute respiratory syndrome coronavirus 2
FKIYSKHTPIN

SEQ ID NO: 11543 - protein, 12 aa, Severe acute respiratory syndrome-related coronavirus
  REGION 1..12: note = Table B: HLA-DQA1*05:01-B1*03:01L HLA-DRB1*14:04L HLA-DRB1*13:02L HLA-DRB1*01:01L HLA-DRB1*08:77L HLA-DRB3*02:01L HLA-DPA1*01:03-B1*03:01L HLA-DPA1*03:01-B1*04:02L HLA-DRB1*11:03L HLA-DRB1*14:02L HLA-DQA1*01:01-B1*05:01L
  REGION 1..12: note = CONT. FROM ABOVE: HLA-DRB1*11:01L HLA-DRB5*01:01L HLA-DQA1*05:05 -B1*03:19L HLA-DRB4*01:01L HLA-DRB1*09:01L HLA-DRB3*01:01L HLA-D PA1*02:01-B1*13:01L HLA-DPA1*03:01-B1*105:01L HLA-DPA1*01:03-B1* 104:01L HLA-DQA1*05:05-B1*03:01L HLA-DRB1*07:01L
  REGION 1..12: note = CONT. FROM ABOVE: HLA-DQA1*01:03-B1*06:01L HLA-DRB1*08:02L HLA-D RB1*15:01L
  source 1..12: note = Severe acute respiratory syndrome coronavirus 2
TPINLVRDLPQG

SEQ ID NO: 11544 - protein, 13 aa, Severe acute respiratory syndrome-related coronavirus
  REGION 1..13: note = Table B: HLA-DQA1*05:01-B1*03:01L HLA-DRB1*04:03L HLA-DRB1*13:02L HLA-DRB1*13:03L HLA-DRB1*01:03L HLA-DRB1*04:02L HLA-DRB1*04:05L HLA-DRB1*01:02L HLA-DRB4*03:01NL HLA-DRB1*08:04L HLA-DRB3*02:01L HLA-DPA1*01:03-B1*03:01L
  REGION 1..13: note = CONT. FROM ABOVE: HLA-DPA1*03:01-B1*04:02L HLA-DRB1*14:01L HLA-D RB1*14:02L HLA-DQA1*01:01-B1*05:01L HLA-DRB1*08:01L HLA-DQA1*01- B1*05L HLA-DQA1*05:01-B1*02:01L HLA-DPA1*01:03-B1*04:01L HLA-DRB 1*04:10L HLA-DRB1*09:01L HLA-DPA1*01:03-B1*04:02L
  REGION 1..13: note = CONT. FROM ABOVE: HLA-DRB1*12:01L HLA-DRB1*12:02L HLA-DPA1*02:01 -B1*13:01L HLA-DPA1*03:01-B1*105:01L HLA-DRB1*14:54L HLA-DPA1*01 :03-B1*104:01L HLA-DRB1*14:17L HLA-DPA1*01:02-B1*04:01L HLA-DRB1 *10:01L HLA-DRB1*16:01L HLA-DRB1*04:08L HLA-DRB1*08:03L
  REGION 1..13: note = CONT. FROM ABOVE: HLA-DRB1*15:03L
  source 1..13: note = Severe acute respiratory syndrome coronavirus 2
LPQGFSALEPLVD

SEQ ID NO: 11545 - protein, 11 aa, Severe acute respiratory syndrome-related coronavirus
  REGION 1..11: note = Table B: HLA-DQA1*05:01-B1*03:01L HLA-DRB1*13:02L HLA-DRB1*01:03L HLA-DRB1*04:04L HLA-DQA1*01:02-B1*06:02L HLA-DRB1*01:02L HLA-DRB1*08:77L HLA-DRB3*02:01L HLA-DPA1*03:01-B1*04:02L HLA-DRB1*14:01L HLA-DRB1*11:03L
  REGION 1..11: note = CONT. FROM ABOVE: HLA-DRB1*12:02L HLA-DPA1*02:01-B1*13:01L HLA-D RB1*10:01L HLA-DQA1*01:03-B1*06:01L HLA-DRB1*04:08L
  source 1..11: note = Severe acute respiratory syndrome coronavirus 2
ALEPLVDLPIG

SEQ ID NO: 11546 - protein, 14 aa, Severe acute respiratory syndrome-related coronavirus
  REGION 1..14: note = Table B: HLA-DQA1*05:01-B1*03:01L HLA-DRB1*01:03L HLA-DRB1*04:05L HLA-DRB1*01:02L HLA-DPA1*01:03-B1*03:01L HLA-DRB1*14:01L HLA-DQA1*01:01-B1*05:01L HLA-DPA1*02:01-B1*13:01L HLA-DPA1*01:02-B1*04:01L
  REGION 1..14: note = CONT. FROM ABOVE: HLA-DRB1*16:01L HLA-DRB1*04:08L
  source 1..14: note = Severe acute respiratory syndrome coronavirus 2
EPLVDLPIGINITR

SEQ ID NO: 11547 - protein, 13 aa, Severe acute respiratory syndrome-related coronavirus
  REGION 1..13: note = Table B: HLA-DQA1*05:01-B1*03:01L HLA-DRB1*13:02L HLA-DRB1*08:04L HLA-DRB1*14:01L HLA-DRB1*11:04L HLA-DRB1*08:01L HLA-DRB1*11:01L HLA-DRB3*01:01L HLA-DPA1*01:03-B1*02:01L HLA-DPA1*01:03-B1*104:01L
  source 1..13: note = Severe acute respiratory syndrome coronavirus 2
INITRFQTLLALH

SEQ ID NO: 11548 - protein, 12 aa, Severe acute respiratory syndrome-related coronavirus
  REGION 1..12: note = Table B: HLA-DQA1*05:01-B1*03:01L HLA-DRB1*04:01L HLA-DRB1*13:02L HLA-DRB1*13:03L HLA-DRB1*01:01L HLA-DRB1*14:01L HLA-DRB1*11:04L HLA-DRB1*11:01L HLA-DRB3*01:01L HLA-DPA1*02:01-B1*13:01L HLA-DPA1*01:03-B1*104:01L
  REGION 1..12: note = CONT. FROM ABOVE: HLA-DRB1*07:01L HLA-DQA1*01:03-B1*06:01L
  source 1..12: note = Severe acute respiratory syndrome coronavirus 2
ITRFQTLLALHR

SEQ ID NO: 11549 - protein, 10 aa, Severe acute respiratory syndrome-related coronavirus
  REGION 1..10: note = Table B: HLA-DQA1*05:01-B1*03:01L HLA-DQA1*01:02-B1*06:02L HLA-DQA1*05:05-B1*03:19L HLA-DQA1*05:01-B1*02:01L HLA-DQA1*02:01-B1*03:03L
  source 1..10: note = Severe acute respiratory syndrome coronavirus 2
QTLLALHRSY

SEQ ID NO: 11550 - protein, 14 aa, Severe acute respiratory syndrome-related coronavirus
  REGION 1..14: note = Table B: HLA-DQA1*05:01-B1*03:01L HLA-DRB1*13:02L HLA-DRB1*01:03L HLA-DRB1*04:04L HLA-DQA1*01:02-B1*06:02L HLA-DRB1*01:02L HLA-DPA1*01:03-B1*03:01L HLA-DQA1*01:01-B1*05:01L HLA-DRB1*08:01L
  REGION 1..14: note = CONT. FROM ABOVE: HLA-DQA1*05:05-B1*03:19L HLA-DRB3*01:01L HLA-D PA1*03:01-B1*105:01L HLA-DPA1*01:03-B1*104:01L HLA-DQA1*05:05-B1 *03:01L HLA-DRB1*07:01L HLA-DQA1*01:03-B1*06:01L HLA-DRB1*15:03L
  source 1..14: note = Severe acute respiratory syndrome coronavirus 2
LHRSYLTPGDSSSG

SEQ ID NO: 11551 - protein, 11 aa, Severe acute respiratory syndrome-related coronavirus
  REGION 1..11: note = Table B: HLA-DQA1*05:01-B1*03:01L HLA-DRB1*08:77L HLA-DRB1*14:02L HLA-DQA1*05:05-B1*03:19L HLA-DQA1*05:01-B1*02:01L HLA-DRB4*01:01L HLA-DPA1*01:03-B1*04:01L HLA-DPA1*02:01-B1*13:01L
  REGION 1..11: note = CONT. FROM ABOVE: HLA-DQA1*02:01-B1*03:03L HLA-DRB1*15:03L
  source 1..11: note = Severe acute respiratory syndrome coronavirus 2
YLTPGDSSSGW

SEQ ID NO: 11552 - protein, 14 aa, Severe acute respiratory syndrome-related coronavirus
  REGION 1..14: note = Table B: HLA-DQA1*05:01-B1*03:01L HLA-DRB1*01:02L HLA-DRB1*08:01L HLA-DPA1*03:01-B1*105:01L HLA-DRB1*04:08L HLA-DRB1*15:01L
  source 1..14: note = Severe acute respiratory syndrome coronavirus 2
AGAAAYYVGYLQPR

SEQ ID NO: 11553 - protein, 12 aa, Severe acute respiratory syndrome-related coronavirus
  REGION 1..12: note = Table B: HLA-DQA1*05:01-B1*03:01L HLA-DRB1*04:03L HLA-DRB1*13:02L HLA-DRB1*13:03L HLA-DRB1*01:03L HLA-DRB1*04:02L HLA-DRB1*04:04L HLA-DRB1*04:05L HLA-DRB1*01:02L HLA-DRB4*03:01NL HLA-DRB1*08:04L HLA-DRB1*08:77L HLA-DRB3*02:01L
  REGION 1..12: note = CONT. FROM ABOVE: HLA-DPA1*01:03-B1*03:01L HLA-DPA1*03:01-B1*04: 02L HLA-DRB1*14:01L HLA-DRB1*11:04L HLA-DRB1*14:02L HLA-DQA1*01: 01-B1*05:01L HLA-DRB1*08:01L HLA-DQA1*01-B1*05L HLA-DRB4*01:01L HLA-DPA1*01:03-B1*04:01L HLA-DQA1*05:05-B1*03:116L
  REGION 1..12: note = CONT. FROM ABOVE: HLA-DRB1*04:10L HLA-DRB1*09:01L HLA-DPA1*01:03 -B1*04:02L HLA-DRB1*12:01L HLA-DPA1*02:01-B1*13:01L HLA-DPA1*03: 01-B1*105:01L HLA-DRB1*14:54L HLA-DQA1*05:05-B1*03:01M HLA-DRB1* 14:17L HLA-DPA1*01:02-B1*04:01L HLA-DRB1*07:01L HLA-DRB1*10:01L
  REGION 1..12: note = CONT. FROM ABOVE: HLA-DRB1*16:01L HLA-DRB1*04:08L HLA-DRB1*15:03 L
  source 1..12: note = Severe acute respiratory syndrome coronavirus 2
YNENGTITDAVD

SEQ ID NO: 11554 - protein, 15 aa, Severe acute respiratory syndrome-related coronavirus
  REGION 1..15: note = Table B: HLA-DQA1*05:01-B1*03:01L HLA-DRB1*01:03L HLA-DRB1*01:02L HLA-DRB4*03:01NL HLA-DQA1*05:05-B1*03:19L HLA-DRB1*12:01L HLA-DRB1*15:03L
  source 1..15: note = Severe acute respiratory syndrome coronavirus 2
ITDAVDCALDPLSET

SEQ ID NO: 11555 - protein, 10 aa, Severe acute respiratory syndrome-related coronavirus
  REGION 1..10: note = Table B: HLA-DQA1*05:01-B1*03:01L HLA-DRB1*04:03L HLA-DRB1*04:02L HLA-DQA1*03:01-B1*03:02L HLA-DRB1*14:17L HLA-DRB1*16:01L HLA-DQA1*02:01-B1*03:03L
  source 1..10: note = Severe acute respiratory syndrome coronavirus 2
SFTVEKGIYQ

SEQ ID NO: 11556 - protein, 11 aa, Severe acute respiratory syndrome-related coronavirus
  REGION 1..11: note = Table B: HLA-DQA1*05:01-B1*03:01L HLA-DRB1*04:03L HLA-DRB1*01:03L HLA-DRB1*04:02L HLA-DRB1*01:02L HLA-DRB1*08:77L HLA-DRB3*02:01L HLA-DPA1*03:01-B1*04:02L HLA-DQA1*05:01-B1*02:01L HLA-DRB1*12:01L
  REGION 1..11: note = CONT. FROM ABOVE: HLA-DPA1*03:01-B1*105:01L HLA-DPA1*01:02-B1*04 :01L HLA-DRB1*07:01L HLA-DRB1*04:08L HLA-DQA1*02:01-B1*03:03L
  source 1..11: note = Severe acute respiratory syndrome coronavirus 2
GIYQTSNFRVQ

SEQ ID NO: 11557 - protein, 11 aa, Severe acute respiratory syndrome-related coronavirus
  REGION 1..11: note = Table B: HLA-DQA1*05:01-B1*03:01L HLA-DRB1*04:03L HLA-DRB1*01:03L HLA-DRB1*01:02L HLA-DPA1*03:01-B1*04:02L HLA-DRB1*14:01L HLA-DQA1*01-B1*05L HLA-DPA1*01:03-B1*04:01L HLA-DRB1*12:01L HLA-DPA1*03:01-B1*105:01L
  REGION 1..11: note = CONT. FROM ABOVE: HLA-DQA1*01:03-B1*06:01L HLA-DRB1*04:08L HLA-D QA1*02:01-B1*03:03L
  source 1..11: note = Severe acute respiratory syndrome coronavirus 2
IYQTSNFRVQP

SEQ ID NO: 11558 - protein, 10 aa, Severe acute respiratory syndrome-related coronavirus
  REGION 1..10: note = Table B: HLA-DQA1*05:01-B1*03:01L HLA-DRB1*04:01L HLA-DRB1*04:03L HLA-DRB1*13:02M HLA-DRB1*13:03M HLA-DRB1*01:03L HLA-DRB1*04:02L HLA-DRB1*04:04L HLA-DRB1*01:01L HLA-DRB4*03:01NL HLA-DRB3*02:01L HLA-DRB1*14:01L HLA-DRB1*11:04L HLA-DRB1*14:02L
  REGION 1..10: note = CONT. FROM ABOVE: HLA-DRB1*08:01M HLA-DRB1*11:01L HLA-DRB5*01:01 L HLA-DRB1*13:01L HLA-DPA1*01:03-B1*04:02L HLA-DRB1*12:01M HLA-D RB1*12:02L HLA-DRB3*01:01L HLA-DQA1*03:01-B1*03:02M HLA-DQA1*05: 05-B1*03:01L HLA-DRB1*14:17L HLA-DRB1*16:01L
  REGION 1..10: note = CONT. FROM ABOVE: HLA-DQA1*01:03-B1*06:01L HLA-DRB1*08:02L HLA-D RB1*08:03L HLA-DQA1*02:01-B1*03:03L HLA-DRB1*15:01L
  source 1..10: note = Severe acute respiratory syndrome coronavirus 2
RVQPTESIVR

SEQ ID NO: 11559 - protein, 13 aa, Severe acute respiratory syndrome-related coronavirus
  REGION 1..13: note = Table B: HLA-DQA1*05:01-B1*03:01L
  source 1..13: note = Severe acute respiratory syndrome coronavirus 2
QPTESIVRFPNIT

SEQ ID NO: 11560 - protein, 11 aa, Severe acute respiratory syndrome-related coronavirus
  REGION 1..11: note = Table B: HLA-DQA1*05:01-B1*03:01L HLA-DRB1*01:03L HLA-DRB1*01:02L HLA-DPA1*01:03-B1*03:01L HLA-DRB1*14:01L HLA-DRB1*14:02L HLA-DQA1*01-B1*05L HLA-DPA1*01:03-B1*04:02L HLA-DRB1*12:01L HLA-DQA1*03:01-B1*03:02L
  source 1..11: note = Severe acute respiratory syndrome coronavirus 2
EVFNATRFASV

SEQ ID NO: 11561 - protein, 12 aa, Severe acute respiratory syndrome-related coronavirus
  REGION 1..12: note = Table B: HLA-DQA1*05:01-B1*03:01L HLA-DRB1*13:02L HLA-DRB1*04:04L HLA-DRB1*04:05L HLA-DQA1*01:02-B1*06:02L HLA-DRB1*08:01L HLA-DPA1*02:01-B1*13:01L HLA-DPA1*01:02-B1*04:01L HLA-DRB1*07:01L
  REGION 1..12: note = CONT. FROM ABOVE: HLA-DQA1*01:03-B1*06:01L
  source 1..12: note = Severe acute respiratory syndrome coronavirus 2
TRFASVYAWNRK

SEQ ID NO: 11562 - protein, 12 aa, Severe acute respiratory syndrome-related coronavirus
  REGION 1..12: note = Table B: HLA-DQA1*05:01-B1*03:01L HLA-DRB1*13:02L HLA-DRB1*04:05L HLA-DQA1*01:02-B1*06:02L HLA-DRB1*01:01L HLA-DRB3*01:01L HLA-DRB1*07:01L HLA-DQA1*01:03-B1*06:01L
  source 1..12: note = Severe acute respiratory syndrome coronavirus 2
RFASVYAWNRKR

SEQ ID NO: 11563 - protein, 13 aa, Severe acute respiratory syndrome-related coronavirus
  REGION 1..13: note = Table B: HLA-DQA1*05:01-B1*03:01L HLA-DPA1*03:01-B1*04:02L HLA-DRB1*03:01L HLA-DRB1*14:02L HLA-DQA1*05:05-B1*03:19L HLA-DQA1*05:05-B1*03:116L HLA-DPA1*01:03-B1*04:02L HLA-DPA1*02:01-B1*13:01L HLA-DPA1*01:03-B1*02:01L
  REGION 1..13: note = CONT. FROM ABOVE: HLA-DRB1*07:01L HLA-DRB1*08:02L
  source 1..13: note = Severe acute respiratory syndrome coronavirus 2
ASVYAWNRKRISN

SEQ ID NO: 11564 - protein, 14 aa, Severe acute respiratory syndrome-related coronavirus
  REGION 1..14: note = Table B: HLA-DQA1*05:01-B1*03:01L HLA-DRB1*01:03L HLA-DRB1*04:04L HLA-DRB1*04:05L HLA-DPA1*01:03-B1*03:01L HLA-DRB1*08:01L HLA-DRB1*12:01L HLA-DQA1*03:01-B1*03:02L HLA-DPA1*01:03-B1*104:01L HLA-DPA1*01:02-B1*04:01L
  REGION 1..14: note = CONT. FROM ABOVE: HLA-DRB1*16:01L HLA-DRB1*04:08L
  source 1..14: note = Severe acute respiratory syndrome coronavirus 2
RKRISNCVADYSVL

SEQ ID NO: 11565 - protein, 14 aa, Severe acute respiratory syndrome-related coronavirus
  REGION 1..14: note = Table B: HLA-DQA1*05:01-B1*03:01L HLA-DQA1*01-B1*05L HLA-DQA1*01:03-B1*06:01L
  source 1..14: note = Severe acute respiratory syndrome coronavirus 2
ASFSTFKCYGVSPT

SEQ ID NO: 11566 - protein, 12 aa, Severe acute respiratory syndrome-related coronavirus
  REGION 1..12: note = Table B: HLA-DQA1*05:01-B1*03:01L HLA-DRB1*04:03L HLA-DRB1*13:02L HLA-DRB1*13:03L HLA-DRB1*04:02L HLA-DRB1*04:04L HLA-DRB1*04:05L HLA-DQA1*01:02-B1*06:02L HLA-DRB1*01:01L HLA-DRB1*01:02L HLA-DRB1*08:04L HLA-DRB1*14:01L HLA-DRB1*11:04L
  REGION 1..12: note = CONT. FROM ABOVE: HLA-DRB1*08:01L HLA-DRB1*11:01L HLA-DQA1*01-B1 *05L HLA-DRB1*04:10L HLA-DRB1*12:01L HLA-DRB3*01:01L HLA-DPA1*02 :01-B1*13:01L HLA-DPA1*03:01-B1*105:01L HLA-DPA1*01:03-B1*02:01L HLA-DRB1*14:17L HLA-DPA1*01:02-B1*04:01L HLA-DRB1*10:01L
  REGION 1..12: note = CONT. FROM ABOVE: HLA-DRB1*16:01L HLA-DQA1*01:03-B1*06:01L HLA-D RB1*08:03L HLA-DQA1*02:01-B1*03:03L HLA-DRB1*15:03L
  source 1..12: note = Severe acute respiratory syndrome coronavirus 2
STFKCYGVSPTK

SEQ ID NO: 11567 - protein, 17 aa, Severe acute respiratory syndrome-related coronavirus
  REGION 1..17: note = Table B: HLA-DQA1*05:01-B1*03:01L HLA-DRB1*08:04L HLA-DRB1*14:01L HLA-DRB1*14:02L HLA-DRB1*08:01L HLA-DQA1*01-B1*05L HLA-DQA1*05:01-B1*02:01L HLA-DPA1*01:03-B1*04:01L HLA-DPA1*01:03-B1*02:01L
  source 1..17: note = Severe acute respiratory syndrome coronavirus 2
SPTKLNDLCFTNVYADS

SEQ ID NO: 11568 - protein, 12 aa, Severe acute respiratory syndrome-related coronavirus
  REGION 1..12: note = Table B: HLA-DQA1*05:01-B1*03:01L HLA-DRB1*04:03L HLA-DRB1*13:03L HLA-DRB1*01:03L HLA-DRB1*04:02L HLA-DRB1*04:05L HLA-DQA1*01:02-B1*06:02L HLA-DRB1*01:02L HLA-DPA1*01:03-B1*03:01L HLA-DPA1*03:01-B1*04:02L
  REGION 1..12: note = CONT. FROM ABOVE: HLA-DQA1*01:01-B1*05:01L HLA-DRB1*08:01L HLA-D QA1*05:05-B1*03:19L HLA-DPA1*01:03-B1*04:02L HLA-DRB1*12:01L HLA -DPA1*02:01-B1*13:01L HLA-DPA1*03:01-B1*105:01L HLA-DQA1*05:05-B 1*03:01L HLA-DRB1*14:17L HLA-DPA1*01:02-B1*04:01L
  REGION 1..12: note = CONT. FROM ABOVE: HLA-DRB1*16:01L HLA-DRB1*04:08L HLA-DRB1*15:03 L
  source 1..12: note = Severe acute respiratory syndrome coronavirus 2
VYADSFVIRGDE

SEQ ID NO: 11569 - protein, 12 aa, Severe acute respiratory syndrome-related coronavirus
  REGION 1..12: note = Table B: HLA-DQA1*05:01-B1*03:01L HLA-DRB1*01:03L HLA-DRB1*04:02L HLA-DRB1*04:05L HLA-DQA1*01:02-B1*06:02L HLA-DQA1*01:01-B1*05:01L HLA-DRB1*16:01L HLA-DRB1*04:08L
  source 1..12: note = Severe acute respiratory syndrome coronavirus 2
ADSFVIRGDEVR

SEQ ID NO: 11570 - protein, 12 aa, Severe acute respiratory syndrome-related coronavirus
  REGION 1..12: note = Table B: HLA-DQA1*05:01-B1*03:01L HLA-DRB1*04:05L HLA-DQA1*01:02-B1*06:02L HLA-DRB4*03:01NL HLA-DRB1*14:01L HLA-DRB1*12:01L HLA-DRB1*14:54L HLA-DRB1*15:03L
  source 1..12: note = Severe acute respiratory syndrome coronavirus 2
DSFVIRGDEVRQ

SEQ ID NO: 11571 - protein, 12 aa, Severe acute respiratory syndrome-related coronavirus
  REGION 1..12: note = Table B: HLA-DQA1*05:01-B1*03:01L HLA-DRB1*04:03L HLA-DRB1*01:03L HLA-DRB1*04:02L HLA-DQA1*01:02-B1*06:02L HLA-DRB1*01:02L HLA-DRB1*14:01L HLA-DPA1*03:01-B1*105:01L HLA-DQA1*03:01-B1*03:02L HLA-DQA1*05:05-B1*03:01L
  REGION 1..12: note = CONT. FROM ABOVE: HLA-DRB1*16:01L HLA-DQA1*01:03-B1*06:01L HLA-D QA1*02:01-B1*03:03L
  source 1..12: note = Severe acute respiratory syndrome coronavirus 2
IRGDEVRQIAPG

SEQ ID NO: 11572 - protein, 12 aa, Severe acute respiratory syndrome-related coronavirus
  REGION 1..12: note = Table B: HLA-DQA1*05:01-B1*03:01L HLA-DRB1*13:03L HLA-DRB1*01:03L HLA-DRB1*04:05L HLA-DQA1*01:02-B1*06:02L HLA-DRB4*03:01NL HLA-DQA1*01-B1*05L HLA-DRB1*04:10L HLA-DRB1*12:01L HLA-DRB1*14:54L HLA-DQA1*05:05-B1*03:01L
  REGION 1..12: note = CONT. FROM ABOVE: HLA-DRB1*16:01L HLA-DQA1*01:03-B1*06:01L
  source 1..12: note = Severe acute respiratory syndrome coronavirus 2
GDEVRQIAPGQT

SEQ ID NO: 11573 - protein, 12 aa, Severe acute respiratory syndrome-related coronavirus
  REGION 1..12: note = Table B: HLA-DQA1*05:01-B1*03:01L HLA-DRB1*13:02L HLA-DRB1*13:03L HLA-DRB1*01:03L HLA-DRB1*04:04L HLA-DRB1*04:05L HLA-DQA1*01:02-B1*06:02L HLA-DRB1*01:02L HLA-DRB4*03:01NL HLA-DRB1*08:04L HLA-DRB1*08:77L HLA-DPA1*01:03-B1*03:01L
  REGION 1..12: note = CONT. FROM ABOVE: HLA-DRB1*14:01L HLA-DQA1*01:01-B1*05:01L HLA-D RB1*08:01L HLA-DQA1*01-B1*05L HLA-DQA1*05:05-B1*03:19L HLA-DRB1* 04:10L HLA-DRB1*12:01L HLA-DRB1*12:02L HLA-DPA1*02:01-B1*13:01L HLA-DPA1*03:01-B1*105:01L HLA-DRB1*14:54L
  REGION 1..12: note = CONT. FROM ABOVE: HLA-DQA1*05:05-B1*03:01L HLA-DRB1*10:01L HLA-D RB1*16:01L HLA-DQA1*01:03-B1*06:01L HLA-DRB1*04:08L HLA-DRB1*08: 03L HLA-DRB1*15:03L
  source 1..12: note = Severe acute respiratory syndrome coronavirus 2
DEVRQIAPGQTG

SEQ ID NO: 11574 - protein, 11 aa, Severe acute respiratory syndrome-related coronavirus
  REGION 1..11: note = Table B: HLA-DQA1*05:01-B1*03:01L HLA-DRB1*01:03L HLA-DRB1*08:77L HLA-DRB1*14:02L HLA-DPA1*01:03-B1*04:02L HLA-DPA1*03:01-B1*105:01L HLA-DRB1*15:03L
  source 1..11: note = Severe acute respiratory syndrome coronavirus 2
APGQTGKIADY

SEQ ID NO: 11575 - protein, 11 aa, Severe acute respiratory syndrome-related coronavirus
  REGION 1..11: note = Table B: HLA-DQA1*05:01-B1*03:01L HLA-DQA1*03:01-B1*03:02L HLA-DQA1*05:05-B1*03:01L
  source 1..11: note = Severe acute respiratory syndrome coronavirus 2
PGQTGKIADYN

SEQ ID NO: 11576 - protein, 10 aa, Severe acute respiratory syndrome-related coronavirus
  REGION 1..10: note = Table B: HLA-DQA1*05:01-B1*03:01L HLA-DRB1*13:03L HLA-DRB1*01:03L HLA-DQA1*01:02-B1*06:02L HLA-DRB1*08:77L HLA-DPA1*01:03-B1*03:01L HLA-DRB1*03:01L HLA-DRB1*11:02L HLA-DRB1*14:02L HLA-DQA1*01-B1*05L HLA-DQA1*05:05-B1*03:19M
  REGION 1..10: note = CONT. FROM ABOVE: HLA-DQA1*05:01-B1*02:01L HLA-DRB4*01:01L HLA-D PA1*01:03-B1*04:01L HLA-DQA1*05:05-B1*03:116L HLA-DPA1*01:03-B1* 04:02L HLA-DPA1*03:01-B1*105:01L HLA-DPA1*01:03-B1*104:01L HLA-D RB1*10:01L HLA-DRB1*16:01L HLA-DQA1*01:03-B1*06:01L
  REGION 1..10: note = CONT. FROM ABOVE: HLA-DQA1*02:01-B1*03:03L
  source 1..10: note = Severe acute respiratory syndrome coronavirus 2
QTGKIADYNY

SEQ ID NO: 11577 - protein, 11 aa, Severe acute respiratory syndrome-related coronavirus
  REGION 1..11: note = Table B: HLA-DQA1*05:01-B1*03:01L HLA-DRB1*13:02L HLA-DRB1*13:03L HLA-DRB1*01:03L HLA-DRB1*04:05L HLA-DQA1*01:02-B1*06:02L HLA-DRB1*01:02L HLA-DRB4*03:01NL HLA-DRB1*08:04L HLA-DRB1*08:77L HLA-DRB3*02:01L
  REGION 1..11: note = CONT. FROM ABOVE: HLA-DPA1*01:03-B1*03:01L HLA-DPA1*03:01-B1*04: 02L HLA-DRB1*14:01L HLA-DRB1*14:02L HLA-DQA1*01:01-B1*05:01L HLA -DRB1*08:01L HLA-DQA1*05:05-B1*03:19L HLA-DRB1*04:10L HLA-DPA1*0 1:03-B1*04:02L HLA-DRB1*12:01L HLA-DPA1*02:01-B1*13:01L
  REGION 1..11: note = CONT. FROM ABOVE: HLA-DPA1*03:01-B1*105:01L HLA-DRB1*14:54L HLA- DQA1*05:05-B1*03:01L HLA-DRB1*14:17L HLA-DQA1*01:03-B1*06:01L HL A-DRB1*04:08L HLA-DRB1*15:03L
  source 1..11: note = Severe acute respiratory syndrome coronavirus 2
IADYNYKLPDD

SEQ ID NO: 11578 - protein, 12 aa, Severe acute respiratory syndrome-related coronavirus
  REGION 1..12: note = Table B: HLA-DQA1*05:01-B1*03:01L HLA-DQA1*05:05-B1*03:19L HLA-DPA1*03:01-B1*105:01L HLA-DQA1*02:01-B1*03:03L
  source 1..12: note = Severe acute respiratory syndrome coronavirus 2
DFTGCVIAWNSN

SEQ ID NO: 11579 - protein, 12 aa, Severe acute respiratory syndrome-related coronavirus
  REGION 1..12: note = Table B: HLA-DQA1*05:01-B1*03:01L HLA-DQA1*05:05-B1*03:19L HLA-DPA1*03:01-B1*105:01L HLA-DQA1*02:01-B1*03:03L
  source 1..12: note = Severe acute respiratory syndrome coronavirus 2
FTGCVIAWNSNN

SEQ ID NO: 11580 - protein, 16 aa, Severe acute respiratory syndrome-related coronavirus
  REGION 1..16: note = Table B: HLA-DQA1*05:01-B1*03:01L HLA-DRB1*04:04L HLA-DRB1*01:01L HLA-DPA1*01:03-B1*03:01L HLA-DRB1*03:01L HLA-DQA1*05:05-B1*03:19L HLA-DQA1*05:05-B1*03:116L HLA-DPA1*02:01-B1*13:01L HLA-DPA1*01:03-B1*104:01L
  REGION 1..16: note = CONT. FROM ABOVE: HLA-DRB1*07:01L HLA-DRB1*08:03L HLA-DQA1*02:01 -B1*03:03L
  source 1..16: note = Severe acute respiratory syndrome coronavirus 2
VGGNYNYLYRLFRKSN

SEQ ID NO: 11581 - protein, 16 aa, Severe acute respiratory syndrome-related coronavirus
  REGION 1..16: note = Table B: HLA-DQA1*05:01-B1*03:01L HLA-DPA1*01:03-B1*03:01L HLA-DPA1*03:01-B1*04:02L HLA-DRB1*03:01L HLA-DRB1*14:02L HLA-DQA1*05:05-B1*03:19L HLA-DRB1*13:01L HLA-DPA1*01:03-B1*04:02L HLA-DPA1*01:03-B1*02:01L
  REGION 1..16: note = CONT. FROM ABOVE: HLA-DPA1*01:03-B1*104:01L HLA-DRB1*07:01L HLA- DRB1*08:02L
  source 1..16: note = Severe acute respiratory syndrome coronavirus 2
NYLYRLFRKSNLKPFE

SEQ ID NO: 11582 - protein, 10 aa, Severe acute respiratory syndrome-related coronavirus
  REGION 1..10: note = Table B: HLA-DQA1*05:01-B1*03:01L HLA-DRB1*08:77L HLA-DPA1*01:03-B1*03:01L HLA-DPA1*03:01-B1*04:02L HLA-DRB1*03:01L HLA-DQA1*01-B1*05L HLA-DQA1*05:05-B1*03:19L HLA-DQA1*05:01-B1*02:01L HLA-DRB4*01:01L
  REGION 1..10: note = CONT. FROM ABOVE: HLA-DPA1*01:03-B1*04:01L HLA-DPA1*01:03-B1*104 :01L HLA-DRB1*10:01L HLA-DRB1*16:01L HLA-DRB1*15:03L
  source 1..10: note = Severe acute respiratory syndrome coronavirus 2
FERDISTEIY

SEQ ID NO: 11583 - protein, 14 aa, Severe acute respiratory syndrome-related coronavirus
  REGION 1..14: note = Table B: HLA-DQA1*05:01-B1*03:01L HLA-DRB1*04:02L HLA-DRB1*01:02L HLA-DQA1*05:05-B1*03:19L HLA-DPA1*01:03-B1*04:02L HLA-DQA1*05:05-B1*03:01L HLA-DRB1*04:08L
  source 1..14: note = Severe acute respiratory syndrome coronavirus 2
ERDISTEIYQAGST

SEQ ID NO: 11584 - protein, 12 aa, Severe acute respiratory syndrome-related coronavirus
  REGION 1..12: note = Table B: HLA-DQA1*05:01-B1*03:01L HLA-DQA1*01:02-B1*06:02L HLA-DQA1*05:05-B1*03:19L HLA-DQA1*05:05-B1*03:01L HLA-DQA1*01:03-B1*06:01L
  source 1..12: note = Severe acute respiratory syndrome coronavirus 2
QAGSTPCNGVEG

SEQ ID NO: 11585 - protein, 14 aa, Severe acute respiratory syndrome-related coronavirus
  REGION 1..14: note = Table B: HLA-DQA1*05:01-B1*03:01L HLA-DRB1*04:03L HLA-DRB1*01:03L HLA-DRB1*04:05L HLA-DRB1*01:02L HLA-DRB1*08:04L HLA-DPA1*01:03-B1*03:01L HLA-DPA1*03:01-B1*04:02L HLA-DQA1*01-B1*05L HLA-DQA1*05:01-B1*02:01L
  REGION 1..14: note = CONT. FROM ABOVE: HLA-DPA1*01:03-B1*04:02L HLA-DRB1*12:01L HLA-D PA1*02:01-B1*13:01L HLA-DQA1*05:05-B1*03:01L HLA-DPA1*01:02-B1*0 4:01L HLA-DRB1*16:01L HLA-DQA1*01:03-B1*06:01L HLA-DRB1*04:08L H LA-DQA1*02:01-B1*03:03L HLA-DRB1*15:03L
  source 1..14: note = Severe acute respiratory syndrome coronavirus 2
VEGFNCYFPLQSYG

SEQ ID NO: 11586 - protein, 12 aa, Severe acute respiratory syndrome-related coronavirus
  REGION 1..12: note = Table B: HLA-DQA1*05:01-B1*03:01L HLA-DRB1*04:03L HLA-DRB1*13:02L HLA-DRB1*01:03L HLA-DRB1*04:02L HLA-DRB1*04:05L HLA-DQA1*01:02-B1*06:02L HLA-DRB1*01:01L HLA-DRB1*01:02L HLA-DRB3*02:01L HLA-DPA1*03:01-B1*04:02L HLA-DRB1*14:01L
  REGION 1..12: note = CONT. FROM ABOVE: HLA-DRB1*11:03L HLA-DQA1*01-B1*05L HLA-DQA1*05 :01-B1*02:01L HLA-DRB1*12:01L HLA-DPA1*03:01-B1*105:01L HLA-DQA1 *03:01-B1*03:02L HLA-DQA1*05:05-B1*03:01L HLA-DRB1*14:17L HLA-DP A1*01:02-B1*04:01L HLA-DRB1*07:01L HLA-DRB1*16:01L
  REGION 1..12: note = CONT. FROM ABOVE: HLA-DRB1*04:08L HLA-DQA1*02:01-B1*03:03L HLA-D RB1*15:03L
  source 1..12: note = Severe acute respiratory syndrome coronavirus 2
YFPLQSYGFQPT

SEQ ID NO: 11587 - protein, 12 aa, Severe acute respiratory syndrome-related coronavirus
  REGION 1..12: note = Table B: HLA-DQA1*05:01-B1*03:01L HLA-DRB1*04:05L HLA-DQA1*05:01-B1*02:01L HLA-DRB1*14:54L HLA-DQA1*05:05-B1*03:01L HLA-DRB1*16:01L
  source 1..12: note = Severe acute respiratory syndrome coronavirus 2
QSYGFQPTNGVG

SEQ ID NO: 11588 - protein, 10 aa, Severe acute respiratory syndrome-related coronavirus
  REGION 1..10: note = Table B: HLA-DQA1*05:01-B1*03:01L HLA-DRB1*13:03L HLA-DRB1*01:03L HLA-DRB1*04:05L HLA-DQA1*01:02-B1*06:02M HLA-DRB1*01:01L HLA-DRB1*01:02L HLA-DRB1*14:02L HLA-DQA1*05:01-B1*02:01L HLA-DQA1*05:05-B1*03:116L
  REGION 1..10: note = CONT. FROM ABOVE: HLA-DPA1*02:01-B1*13:01L HLA-DPA1*03:01-B1*105 :01L HLA-DQA1*01:03-B1*06:01L HLA-DQA1*02:01-B1*03:03L HLA-DRB1* 15:03L
  source 1..10: note = Severe acute respiratory syndrome coronavirus 2
QPYRVVVLSF

SEQ ID NO: 11589 - protein, 13 aa, Severe acute respiratory syndrome-related coronavirus
  REGION 1..13: note = Table B: HLA-DQA1*05:01-B1*03:01L HLA-DRB1*04:03L HLA-DRB1*04:02L HLA-DRB1*12:01L HLA-DQA1*03:01-B1*03:02L HLA-DQA1*05:05-B1*03:01L HLA-DRB1*16:01L HLA-DQA1*01:03-B1*06:01L HLA-DRB1*15:03L
  source 1..13: note = Severe acute respiratory syndrome coronavirus 2
ELLHAPATVCGPK

SEQ ID NO: 11590 - protein, 13 aa, Severe acute respiratory syndrome-related coronavirus
  REGION 1..13: note = Table B: HLA-DQA1*05:01-B1*03:01L HLA-DQA1*05:05-B1*03:01L HLA-DQA1*01:03-B1*06:01L HLA-DQA1*02:01-B1*03:03L
  source 1..13: note = Severe acute respiratory syndrome coronavirus 2
APATVCGPKKSTN

SEQ ID NO: 11591 - protein, 13 aa, Severe acute respiratory syndrome-related coronavirus
  REGION 1..13: note = Table B: HLA-DQA1*05:01-B1*03:01L HLA-DQA1*01:02-B1*06:02L HLA-DRB1*08:04L HLA-DRB3*02:01L HLA-DRB1*14:54L HLA-DPA1*01:02-B1*04:01L HLA-DRB1*16:01L HLA-DQA1*02:01-B1*03:03L
  source 1..13: note = Severe acute respiratory syndrome coronavirus 2
STNLVKNKCVNFN

SEQ ID NO: 11592 - protein, 12 aa, Severe acute respiratory syndrome-related coronavirus
  REGION 1..12: note = Table B: HLA-DQA1*05:01-B1*03:01L HLA-DQA1*01:02-B1*06:02L HLA-DRB1*01:01L HLA-DQA1*05:01-B1*02:01L HLA-DRB1*12:01L HLA-DPA1*03:01-B1*105:01L HLA-DQA1*05:05-B1*03:01L HLA-DRB1*10:01L HLA-DRB1*16:01L HLA-DQA1*01:03-B1*06:01L
  REGION 1..12: note = CONT. FROM ABOVE: HLA-DQA1*02:01-B1*03:03L HLA-DRB1*15:03L
  source 1..12: note = Severe acute respiratory syndrome coronavirus 2
FNFNGLTGTGVL

SEQ ID NO: 11593 - protein, 10 aa, Severe acute respiratory syndrome-related coronavirus
  REGION 1..10: note = Table B: HLA-DQA1*05:01-B1*03:01L HLA-DQA1*01:02-B1*06:02L HLA-DQA1*03:01-B1*03:02L HLA-DQA1*05:05-B1*03:01L HLA-DQA1*01:03-B1*06:01L HLA-DQA1*02:01-B1*03:03L
  source 1..10: note = Severe acute respiratory syndrome coronavirus 2
GTGVLTESNK

SEQ ID NO: 11594 - protein, 13 aa, Severe acute respiratory syndrome-related coronavirus
  REGION 1..13: note = Table B: HLA-DQA1*05:01-B1*03:01L HLA-DRB1*13:02L HLA-DRB1*01:03L HLA-DRB1*04:05L HLA-DRB1*01:02L HLA-DPA1*01:03-B1*03:01L HLA-DRB1*08:01L HLA-DQA1*01-B1*05L HLA-DPA1*01:03-B1*04:01L HLA-DPA1*01:03-B1*04:02L
  REGION 1..13: note = CONT. FROM ABOVE: HLA-DRB1*12:01L HLA-DPA1*01:03-B1*104:01L HLA- DRB1*04:08L HLA-DRB1*15:03L
  source 1..13: note = Severe acute respiratory syndrome coronavirus 2
ESNKKFLPFQQFG

SEQ ID NO: 11595 - protein, 13 aa, Severe acute respiratory syndrome-related coronavirus
  REGION 1..13: note = Table B: HLA-DQA1*05:01-B1*03:01L
  source 1..13: note = Severe acute respiratory syndrome coronavirus 2
NKKFLPFQQFGRD

SEQ ID NO: 11596 - protein, 12 aa, Severe acute respiratory syndrome-related coronavirus
  REGION 1..12: note = Table B: HLA-DQA1*05:01-B1*03:01L HLA-DRB1*01:03L HLA-DRB1*04:05L HLA-DQA1*01:02-B1*06:02L HLA-DQA1*01:01-B1*05:01L HLA-DQA1*05:05-B1*03:19L HLA-DRB1*04:10L HLA-DRB1*04:08L
  source 1..12: note = Severe acute respiratory syndrome coronavirus 2
DIADTTDAVRDP

SEQ ID NO: 11597 - protein, 14 aa, Severe acute respiratory syndrome-related coronavirus
  REGION 1..14: note = Table B: HLA-DQA1*05:01-B1*03:01L HLA-DRB1*13:02L HLA-DRB1*13:03L HLA-DRB1*01:03L HLA-DRB1*04:02L HLA-DRB1*04:04L HLA-DRB1*04:05L HLA-DQA1*01:02-B1*06:02L HLA-DRB1*01:02L HLA-DRB4*03:01NL HLA-DRB1*08:04L HLA-DRB1*08:77L HLA-DRB3*02:01L
  REGION 1..14: note = CONT. FROM ABOVE: HLA-DPA1*01:03-B1*03:01L HLA-DRB1*14:01L HLA-D RB1*11:03L HLA-DRB1*11:04L HLA-DRB1*14:02L HLA-DQA1*01:01-B1*05: 01L HLA-DRB1*08:01L HLA-DQA1*05:05-B1*03:19L HLA-DRB4*01:01L HLA -DPA1*01:03-B1*04:01L HLA-DRB1*04:10L HLA-DRB1*09:01L
  REGION 1..14: note = CONT. FROM ABOVE: HLA-DPA1*01:03-B1*04:02L HLA-DRB1*12:02L HLA-D PA1*02:01-B1*13:01L HLA-DRB1*14:54L HLA-DPA1*01:03-B1*02:01L HLA -DPA1*01:03-B1*104:01L HLA-DQA1*05:05-B1*03:01L HLA-DRB1*14:17L HLA-DPA1*01:02-B1*04:01L HLA-DRB1*07:01L HLA-DRB1*10:01L
  REGION 1..14: note = CONT. FROM ABOVE: HLA-DRB1*04:08L HLA-DRB1*08:03L HLA-DQA1*02:01 -B1*03:03L
  source 1..14: note = Severe acute respiratory syndrome coronavirus 2
DPQTLEILDITPCS

SEQ ID NO: 11598 - protein, 13 aa, Severe acute respiratory syndrome-related coronavirus
  REGION 1..13: note = Table B: HLA-DQA1*05:01-B1*03:01L HLA-DRB1*04:03L HLA-DPA1*01:03-B1*03:01L HLA-DPA1*03:01-B1*04:02L HLA-DQA1*05:05-B1*03:19L HLA-DQA1*05:01-B1*02:01L HLA-DPA1*01:03-B1*04:01L HLA-DPA1*01:03-B1*04:02L
  REGION 1..13: note = CONT. FROM ABOVE: HLA-DRB1*12:01L HLA-DQA1*05:05-B1*03:01L HLA-D PA1*01:02-B1*04:01L HLA-DQA1*02:01-B1*03:03L HLA-DRB1*15:03L
  source 1..13: note = Severe acute respiratory syndrome coronavirus 2
ILDITPCSFGGVS

SEQ ID NO: 11599 - protein, 11 aa, Severe acute respiratory syndrome-related coronavirus
  REGION 1..11: note = Table B: HLA-DQA1*05:01-B1*03:01L HLA-DQA1*01:02-B1*06:02L HLA-DQA1*05:05-B1*03:19L HLA-DQA1*05:01-B1*02:01L HLA-DQA1*05:05-B1*03:01L
  source 1..11: note = Severe acute respiratory syndrome coronavirus 2
GGVSVITPGTN

SEQ ID NO: 11600 - protein, 13 aa, Severe acute respiratory syndrome-related coronavirus
  REGION 1..13: note = Table B: HLA-DQA1*05:01-B1*03:01L HLA-DRB1*04:02L HLA-DQA1*05:05-B1*03:19L HLA-DQA1*05:05-B1*03:01L
  source 1..13: note = Severe acute respiratory syndrome coronavirus 2
GVSVITPGTNTSN

SEQ ID NO: 11601 - protein, 14 aa, Severe acute respiratory syndrome-related coronavirus
  REGION 1..14: note = Table B: HLA-DQA1*05:01-B1*03:01L HLA-DQA1*01:02-B1*06:02L HLA-DRB1*01:02L HLA-DQA1*05:05-B1*03:19L HLA-DQA1*05:01-B1*02:01L HLA-DRB1*16:01L HLA-DRB1*04:08L
  source 1..14: note = Severe acute respiratory syndrome coronavirus 2
VSVITPGTNTSNQV

SEQ ID NO: 11602 - protein, 13 aa, Severe acute respiratory syndrome-related coronavirus
  REGION 1..13: note = Table B: HLA-DQA1*05:01-B1*03:01L HLA-DRB1*13:02L HLA-DRB1*01:03L HLA-DRB1*04:05L HLA-DQA1*01:02-B1*06:02L HLA-DRB1*01:02L HLA-DRB1*08:77L HLA-DPA1*01:03-B1*03:01L HLA-DQA1*05:05-B1*03:19L HLA-DRB1*04:10L HLA-DRB1*12:01L
  REGION 1..13: note = CONT. FROM ABOVE: HLA-DRB1*14:54L HLA-DQA1*05:05-B1*03:01L HLA-D RB1*16:01L HLA-DQA1*01:03-B1*06:01L
  source 1..13: note = Severe acute respiratory syndrome coronavirus 2
VITPGTNTSNQVA

SEQ ID NO: 11603 - protein, 10 aa, Severe acute respiratory syndrome-related coronavirus
  REGION 1..10: note = Table B: HLA-DQA1*05:01-B1*03:01L HLA-DRB1*13:03M HLA-DRB1*01:03L HLA-DQA1*01:02-B1*06:02M HLA-DRB4*03:01NL HLA-DRB1*08:77L HLA-DPA1*01:03-B1*03:01L HLA-DPA1*03:01-B1*04:02L HLA-DRB1*03:01L HLA-DRB1*14:01L
  REGION 1..10: note = CONT. FROM ABOVE: HLA-DRB1*11:02L HLA-DRB1*14:02L HLA-DQA1*01-B1 *05L HLA-DQA1*05:05-B1*03:19M HLA-DQA1*05:01-B1*02:01L HLA-DRB4* 01:01L HLA-DPA1*01:03-B1*04:01L HLA-DQA1*05:05-B1*03:116L HLA-DP A1*01:03-B1*04:02L HLA-DRB1*12:01L HLA-DPA1*02:01-B1*13:01L
  REGION 1..10: note = CONT. FROM ABOVE: HLA-DPA1*03:01-B1*105:01L HLA-DPA1*01:03-B1*10 4:01L HLA-DRB1*10:01L HLA-DRB1*16:01L HLA-DRB1*08:02L HLA-DQA1*0 2:01-B1*03:03L HLA-DRB1*15:03L
  source 1..10: note = Severe acute respiratory syndrome coronavirus 2
NTSNQVAVLY

SEQ ID NO: 11604 - protein, 11 aa, Severe acute respiratory syndrome-related coronavirus
  REGION 1..11: note = Table B: HLA-DQA1*05:01-B1*03:01L HLA-DRB1*04:03L HLA-DPA1*01:03-B1*03:01L HLA-DPA1*03:01-B1*04:02L HLA-DQA1*01:01-B1*05:01L HLA-DQA1*05:05-B1*03:19L HLA-DPA1*01:03-B1*04:01L HLA-DPA1*01:03-B1*04:02L
  REGION 1..11: note = CONT. FROM ABOVE: HLA-DRB1*12:01L HLA-DQA1*05:05-B1*03:01L HLA-D RB1*14:17L HLA-DRB1*16:01L HLA-DRB1*15:03L
  source 1..11: note = Severe acute respiratory syndrome coronavirus 2
NQVAVLYQDVN

SEQ ID NO: 11605 - protein, 11 aa, Severe acute respiratory syndrome-related coronavirus
  REGION 1..11: note = Table B: HLA-DQA1*05:01-B1*03:01L HLA-DQA1*01:02-B1*06:02L HLA-DPA1*03:01-B1*105:01L HLA-DQA1*03:01-B1*03:02L HLA-DQA1*05:05-B1*03:01L HLA-DQA1*02:01-B1*03:03L
  source 1..11: note = Severe acute respiratory syndrome coronavirus 2
VNCTEVPVAIH

SEQ ID NO: 11606 - protein, 10 aa, Severe acute respiratory syndrome-related coronavirus
  REGION 1..10: note = Table B: HLA-DQA1*05:01-B1*03:01L HLA-DRB1*13:03L HLA-DRB1*01:03L HLA-DQA1*01:02-B1*06:02M HLA-DRB1*08:77L HLA-DPA1*01:03-B1*03:01L HLA-DRB1*03:01L HLA-DRB1*14:02L HLA-DQA1*05:05-B1*03:19L HLA-DQA1*05:01-B1*02:01L
  REGION 1..10: note = CONT. FROM ABOVE: HLA-DPA1*01:03-B1*04:01L HLA-DPA1*01:03-B1*04: 02L HLA-DPA1*02:01-B1*13:01L HLA-DPA1*03:01-B1*105:01L HLA-DRB1* 16:01L HLA-DQA1*01:03-B1*06:01L HLA-DQA1*02:01-B1*03:03L HLA-DRB 1*15:03L
  source 1..10: note = Severe acute respiratory syndrome coronavirus 2
DQLTPTWRVY

SEQ ID NO: 11607 - protein, 10 aa, Severe acute respiratory syndrome-related coronavirus
  REGION 1..10: note = Table B: HLA-DQA1*05:01-B1*03:01L HLA-DRB1*04:01L HLA-DRB1*13:02M HLA-DRB1*13:03M HLA-DRB1*01:03L HLA-DRB1*04:02L HLA-DRB1*04:04L HLA-DQA1*01:02-B1*06:02L HLA-DRB1*01:01M HLA-DRB4*03:01NM HLA-DRB3*02:01L HLA-DRB1*14:01L HLA-DRB1*11:04M
  REGION 1..10: note = CONT. FROM ABOVE: HLA-DRB1*14:02L HLA-DRB1*08:01M HLA-DRB1*11:01 L HLA-DRB5*01:01M HLA-DQA1*05:05-B1*03:19L HLA-DRB4*02:01NL HLA- DRB5*02:02L HLA-DPA1*01:03-B1*04:01L HLA-DPA1*01:03-B1*04:02M HL A-DRB1*12:01H HLA-DRB1*12:02M HLA-DRB3*01:01L
  REGION 1..10: note = CONT. FROM ABOVE: HLA-DPA1*03:01-B1*105:01L HLA-DQA1*03:01-B1*03 :02M HLA-DRB1*14:54L HLA-DQA1*05:05-B1*03:01H HLA-DRB1*14:17L HL A-DRB1*16:01L HLA-DQA1*01:03-B1*06:01M HLA-DRB1*08:02L HLA-DRB1* 08:03L HLA-DQA1*02:01-B1*03:03L HLA-DRB1*15:01L
  source 1..10: note = Severe acute respiratory syndrome coronavirus 2
STGSNVFQTR

SEQ ID NO: 11608 - protein, 13 aa, Severe acute respiratory syndrome-related coronavirus
  REGION 1..13: note = Table B: HLA-DQA1*05:01-B1*03:01L HLA-DQA1*05:05-B1*03:19L HLA-DPA1*03:01-B1*105:01L HLA-DQA1*05:05-B1*03:01L HLA-DQA1*02:01-B1*03:03L
  source 1..13: note = Severe acute respiratory syndrome coronavirus 2
VFQTRAGCLIGAE

SEQ ID NO: 11609 - protein, 12 aa, Severe acute respiratory syndrome-related coronavirus
  REGION 1..12: note = Table B: HLA-DQA1*05:01-B1*03:01L HLA-DPA1*03:01-B1*105:01L HLA-DQA1*03:01-B1*03:02L HLA-DQA1*05:05-B1*03:01L
  source 1..12: note = Severe acute respiratory syndrome coronavirus 2
QTRAGCLIGAEH

SEQ ID NO: 11610 - protein, 13 aa, Severe acute respiratory syndrome-related coronavirus
  REGION 1..13: note = Table B: HLA-DQA1*05:01-B1*03:01L HLA-DQA1*03:01-B1*03:02L HLA-DQA1*05:05-B1*03:01L
  source 1..13: note = Severe acute respiratory syndrome coronavirus 2
TRAGCLIGAEHVN

SEQ ID NO: 11611 - protein, 10 aa, Severe acute respiratory syndrome-related coronavirus
  REGION 1..10: note = Table B: HLA-DQA1*05:01-B1*03:01L HLA-DRB1*04:03L HLA-DRB1*13:03L HLA-DRB1*01:03L HLA-DQA1*01:02-B1*06:02L HLA-DRB4*03:01NL HLA-DRB1*08:77L HLA-DPA1*01:03-B1*03:01L HLA-DPA1*03:01-B1*04:02L HLA-DRB1*03:01L HLA-DRB1*14:01L
  REGION 1..10: note = CONT. FROM ABOVE: HLA-DRB1*14:02L HLA-DQA1*01-B1*05L HLA-DQA1*05 :05-B1*03:19L HLA-DQA1*05:01-B1*02:01L HLA-DRB4*01:01L HLA-DPA1* 01:03-B1*04:01L HLA-DQA1*05:05-B1*03:116L HLA-DPA1*01:03-B1*04:0 2L HLA-DRB1*12:01L HLA-DPA1*02:01-B1*13:01L
  REGION 1..10: note = CONT. FROM ABOVE: HLA-DPA1*03:01-B1*105:01L HLA-DPA1*01:03-B1*10 4:01L HLA-DRB1*10:01L HLA-DRB1*16:01L HLA-DQA1*01:03-B1*06:01L H LA-DRB1*08:02L HLA-DQA1*02:01-B1*03:03L HLA-DRB1*15:03L
  source 1..10: note = Severe acute respiratory syndrome coronavirus 2
IGAEHVNNSY

SEQ ID NO: 11612 - protein, 11 aa, Severe acute respiratory syndrome-related coronavirus
  REGION 1..11: note = Table B: HLA-DQA1*05:01-B1*03:01L HLA-DRB1*13:03L HLA-DQA1*01:02-B1*06:02L HLA-DRB1*08:77L HLA-DPA1*01:03-B1*03:01L HLA-DRB1*03:01L HLA-DRB1*14:02L HLA-DQA1*05:05-B1*03:19L HLA-DQA1*05:01-B1*02:01L
  REGION 1..11: note = CONT. FROM ABOVE: HLA-DPA1*01:03-B1*04:01L HLA-DPA1*03:01-B1*105 :01L HLA-DRB1*16:01L HLA-DQA1*02:01-B1*03:03L HLA-DRB1*15:03L
  source 1..11: note = Severe acute respiratory syndrome coronavirus 2
IPIGAGICASY

SEQ ID NO: 11613 - protein, 10 aa, Severe acute respiratory syndrome-related coronavirus
  REGION 1..10: note = Table B: HLA-DQA1*05:01-B1*03:01L HLA-DRB1*04:01L HLA-DRB1*04:03L HLA-DRB1*13:02L HLA-DRB1*13:03L HLA-DRB1*01:03L HLA-DRB1*04:02L HLA-DRB1*04:05L HLA-DRB1*01:01L HLA-DRB4*03:01NL HLA-DRB1*11:03L HLA-DRB1*11:04L HLA-DRB1*08:01L HLA-DRB5*01:01L
  REGION 1..10: note = CONT. FROM ABOVE: HLA-DQA1*01-B1*05L HLA-DRB1*04:10L HLA-DRB1*12 :01L HLA-DRB1*12:02L HLA-DQA1*03:01-B1*03:02L HLA-DRB1*14:54L HL A-DQA1*05:05-B1*03:01L HLA-DRB1*14:17L HLA-DRB1*10:01L HLA-DRB1* 16:01L HLA-DRB1*04:08L HLA-DRB1*08:03L HLA-DQA1*02:01-B1*03:03L
  source 1..10: note = Severe acute respiratory syndrome coronavirus 2
SYQTQTNSPR

SEQ ID NO: 11614 - protein, 12 aa, Severe acute respiratory syndrome-related coronavirus
  REGION 1..12: note = Table B: HLA-DQA1*05:01-B1*03:01L HLA-DQA1*01:02-B1*06:02L HLA-DQA1*01:03-B1*06:01L
  source 1..12: note = Severe acute respiratory syndrome coronavirus 2
YQTQTNSPRRAR

SEQ ID NO: 11615 - protein, 14 aa, Severe acute respiratory syndrome-related coronavirus
  REGION 1..14: note = Table B: HLA-DQA1*05:01-B1*03:01L HLA-DRB1*13:02L HLA-DRB1*04:04L HLA-DQA1*01:02-B1*06:02L HLA-DPA1*01:03-B1*03:01L HLA-DRB1*08:01L HLA-DQA1*03:01-B1*03:02L HLA-DPA1*01:03-B1*104:01L
  REGION 1..14: note = CONT. FROM ABOVE: HLA-DPA1*01:02-B1*04:01L HLA-DRB1*07:01L HLA-D QA1*01:03-B1*06:01L HLA-DRB1*04:08L HLA-DQA1*02:01-B1*03:03L HLA -DRB1*15:03L
  source 1..14: note = Severe acute respiratory syndrome coronavirus 2
SPRRARSVASQSII

SEQ ID NO: 11616 - protein, 12 aa, Severe acute respiratory syndrome-related coronavirus
  REGION 1..12: note = Table B: HLA-DQA1*05:01-B1*03:01L HLA-DQA1*01:02-B1*06:02L HLA-DQA1*03:01-B1*03:02L HLA-DQA1*01:03-B1*06:01L HLA-DQA1*02:01-B1*03:03L
  source 1..12: note = Severe acute respiratory syndrome coronavirus 2
RARSVASQSIIA

SEQ ID NO: 11617 - protein, 14 aa, Severe acute respiratory syndrome-related coronavirus
  REGION 1..14: note = Table B: HLA-DQA1*05:01-B1*03:01L HLA-DRB1*01:03L HLA-DRB3*02:01L HLA-DPA1*01:03-B1*03:01L HLA-DRB1*11:03L HLA-DRB1*11:04L HLA-DQA1*05:05-B1*03:19L HLA-DQA1*03:01-B1*03:02L HLA-DQA1*05:05-B1*03:01L
  REGION 1..14: note = CONT. FROM ABOVE: HLA-DQA1*01:03-B1*06:01L HLA-DRB1*08:03L HLA-D QA1*02:01-B1*03:03L HLA-DRB1*15:01L
  source 1..14: note = Severe acute respiratory syndrome coronavirus 2
SQSIIAYTMSLGAE

SEQ ID NO: 11618 - protein, 12 aa, Severe acute respiratory syndrome-related coronavirus
  REGION 1..12: note = Table B: HLA-DQA1*05:01-B1*03:01L HLA-DRB1*04:03L HLA-DRB1*01:02L HLA-DQA1*03:01-B1*03:02L HLA-DQA1*05:05-B1*03:01L HLA-DRB1*14:17L HLA-DQA1*02:01-B1*03:03L
  source 1..12: note = Severe acute respiratory syndrome coronavirus 2
YTMSLGAENSVA

SEQ ID NO: 11619 - protein, 11 aa, Severe acute respiratory syndrome-related coronavirus
  REGION 1..11: note = Table B: HLA-DQA1*05:01-B1*03:01L HLA-DPA1*01:03-B1*03:01L HLA-DRB1*03:01L HLA-DRB4*01:01L HLA-DPA1*01:03-B1*04:01L HLA-DRB1*16:01L HLA-DRB1*08:02L HLA-DRB1*15:03L
  source 1..11: note = Severe acute respiratory syndrome coronavirus 2
MSLGAENSVAY

SEQ ID NO: 11620 - protein, 13 aa, Severe acute respiratory syndrome-related coronavirus
  REGION 1..13: note = Table B: HLA-DQA1*05:01-B1*03:01L HLA-DRB1*13:02L HLA-DRB1*13:03L HLA-DRB1*01:03L HLA-DRB1*04:04L HLA-DQA1*01:02-B1*06:02L HLA-DRB1*01:02L HLA-DRB1*08:77L HLA-DRB3*02:01L HLA-DPA1*01:03-B1*03:01L HLA-DRB1*11:04L
  REGION 1..13: note = CONT. FROM ABOVE: HLA-DQA1*05:05-B1*03:19L HLA-DPA1*03:01-B1*105 :01L HLA-DQA1*05:05-B1*03:01L HLA-DQA1*01:03-B1*06:01L HLA-DRB1* 04:08L HLA-DRB1*08:03L HLA-DRB1*15:03L
  source 1..13: note = Severe acute respiratory syndrome coronavirus 2
AENSVAYSNNSIA

SEQ ID NO: 11621 - protein, 11 aa, Severe acute respiratory syndrome-related coronavirus
  REGION 1..11: note = Table B: HLA-DQA1*05:01-B1*03:01L HLA-DRB1*04:03L HLA-DRB1*13:03L HLA-DRB1*01:03L HLA-DRB1*04:02L HLA-DQA1*01:02-B1*06:02L HLA-DRB4*03:01NL HLA-DQA1*05:05-B1*03:19L HLA-DRB1*12:01L
  REGION 1..11: note = CONT. FROM ABOVE: HLA-DPA1*03:01-B1*105:01L HLA-DRB1*14:54L HLA- DQA1*05:05-B1*03:01L HLA-DRB1*14:17L HLA-DRB1*16:01L
  source 1..11: note = Severe acute respiratory syndrome coronavirus 2
YSNNSIAIPTN

SEQ ID NO: 11622 - protein, 12 aa, Severe acute respiratory syndrome-related coronavirus
  REGION 1..12: note = Table B: HLA-DQA1*05:01-B1*03:01L HLA-DQA1*01:01-B1*05:01L HLA-DQA1*05:05-B1*03:19L HLA-DPA1*03:01-B1*105:01L HLA-DQA1*05:05-B1*03:01L
  source 1..12: note = Severe acute respiratory syndrome coronavirus 2
SNNSIAIPTNFT

SEQ ID NO: 11623 - protein, 10 aa, Severe acute respiratory syndrome-related coronavirus
  REGION 1..10: note = Table B: HLA-DQA1*05:01-B1*03:01L HLA-DRB1*13:03L HLA-DPA1*03:01-B1*04:02L HLA-DQA1*01-B1*05L HLA-DQA1*05:05-B1*03:116L HLA-DPA1*02:01-B1*13:01L HLA-DPA1*03:01-B1*105:01L
  source 1..10: note = Severe acute respiratory syndrome coronavirus 2
LPVSMTKTSV

SEQ ID NO: 11624 - protein, 10 aa, Severe acute respiratory syndrome-related coronavirus
  REGION 1..10: note = Table B: HLA-DQA1*05:01-B1*03:01L HLA-DQA1*01:02-B1*06:02L HLA-DRB1*08:77L HLA-DPA1*01:03-B1*03:01L HLA-DPA1*03:01-B1*04:02L HLA-DRB1*03:01L HLA-DRB1*11:02L HLA-DQA1*01-B1*05L HLA-DQA1*05:05-B1*03:19M
  REGION 1..10: note = CONT. FROM ABOVE: HLA-DQA1*05:01-B1*02:01L HLA-DRB4*01:01L HLA-D PA1*01:03-B1*04:01L HLA-DQA1*05:05-B1*03:116L HLA-DPA1*01:03-B1* 104:01L HLA-DRB1*10:01L HLA-DRB1*16:01L HLA-DRB1*15:03L
  source 1..10: note = Severe acute respiratory syndrome coronavirus 2
TECSNLLLQY

SEQ ID NO: 11625 - protein, 12 aa, Severe acute respiratory syndrome-related coronavirus
  REGION 1..12: note = Table B: HLA-DQA1*05:01-B1*03:01L HLA-DRB1*01:03L HLA-DQA1*01:02-B1*06:02L HLA-DRB1*01:02L HLA-DPA1*03:01-B1*04:02L HLA-DRB1*08:01L HLA-DPA1*01:03-B1*04:01L HLA-DPA1*01:03-B1*04:02L
  REGION 1..12: note = CONT. FROM ABOVE: HLA-DQA1*03:01-B1*03:02L HLA-DPA1*01:03-B1*02: 01L HLA-DQA1*05:05-B1*03:01L HLA-DPA1*01:02-B1*04:01L HLA-DRB1*1 6:01L HLA-DRB1*04:08L HLA-DQA1*02:01-B1*03:03L
  source 1..12: note = Severe acute respiratory syndrome coronavirus 2
LQYGSFCTQLNR

SEQ ID NO: 11626 - protein, 12 aa, Severe acute respiratory syndrome-related coronavirus
  REGION 1..12: note = Table B: HLA-DQA1*05:01-B1*03:01L HLA-DPA1*03:01-B1*105:01L HLA-DQA1*05:05-B1*03:01L HLA-DQA1*02:01-B1*03:03L
  source 1..12: note = Severe acute respiratory syndrome coronavirus 2
SFCTQLNRALTG

SEQ ID NO: 11627 - protein, 13 aa, Severe acute respiratory syndrome-related coronavirus
  REGION 1..13: note = Table B: HLA-DQA1*05:01-B1*03:01L HLA-DRB1*04:03L HLA-DRB1*04:02L HLA-DRB1*04:05L HLA-DQA1*01:02-B1*06:02L HLA-DRB1*01:02L HLA-DPA1*01:03-B1*03:01L HLA-DRB1*12:01L HLA-DPA1*03:01-B1*105:01L HLA-DQA1*05:05-B1*03:01L
  REGION 1..13: note = CONT. FROM ABOVE: HLA-DRB1*14:17L HLA-DRB1*15:03L
  source 1..13: note = Severe acute respiratory syndrome coronavirus 2
TQLNRALTGIAVE

SEQ ID NO: 11628 - protein, 11 aa, Severe acute respiratory syndrome-related coronavirus
  REGION 1..11: note = Table B: HLA-DQA1*05:01-B1*03:01L HLA-DRB1*04:02L HLA-DRB1*14:17L HLA-DRB1*16:01L
  source 1..11: note = Severe acute respiratory syndrome coronavirus 2
NTQEVFAQVKQ

SEQ ID NO: 11629 - protein, 10 aa, Severe acute respiratory syndrome-related coronavirus
  REGION 1..10: note = Table B: HLA-DQA1*05:01-B1*03:01L HLA-DRB1*04:03L HLA-DRB1*13:02L HLA-DRB1*13:03L HLA-DRB1*01:03L HLA-DRB1*04:02L HLA-DRB1*04:05L HLA-DQA1*01:02-B1*06:02L HLA-DRB1*01:02L HLA-DRB4*03:01NL HLA-DRB1*14:01L HLA-DQA1*01-B1*05L
  REGION 1..10: note = CONT. FROM ABOVE: HLA-DRB1*12:01L HLA-DPA1*03:01-B1*105:01L HLA- DQA1*03:01-B1*03:02L HLA-DQA1*05:05-B1*03:01L HLA-DRB1*14:17L HL A-DPA1*01:02-B1*04:01L HLA-DRB1*16:01L HLA-DQA1*01:03-B1*06:01L HLA-DRB1*04:08L HLA-DQA1*02:01-B1*03:03L HLA-DRB1*15:03L
  source 1..10: note = Severe acute respiratory syndrome coronavirus 2
QIYKTPPIKD

SEQ ID NO: 11630 - protein, 14 aa, Severe acute respiratory syndrome-related coronavirus
  REGION 1..14: note = Table B: HLA-DQA1*05:01-B1*03:01L HLA-DRB1*13:02L HLA-DRB1*04:04L HLA-DPA1*01:03-B1*03:01L HLA-DRB1*08:01L HLA-DQA1*05:05-B1*03:19L HLA-DRB1*04:10L HLA-DRB3*01:01L HLA-DRB1*14:54L HLA-DQA1*05:05-B1*03:01L
  REGION 1..14: note = CONT. FROM ABOVE: HLA-DPA1*01:02-B1*04:01L HLA-DRB1*07:01L
  source 1..14: note = Severe acute respiratory syndrome coronavirus 2
TPPIKDFGGFNFSQ

SEQ ID NO: 11631 - protein, 14 aa, Severe acute respiratory syndrome-related coronavirus
  REGION 1..14: note = Table B: HLA-DQA1*05:01-B1*03:01L
  source 1..14: note = Severe acute respiratory syndrome coronavirus 2
DFGGFNFSQILPDP

SEQ ID NO: 11632 - protein, 12 aa, Severe acute respiratory syndrome-related coronavirus
  REGION 1..12: note = Table B: HLA-DQA1*05:01-B1*03:01L HLA-DRB1*01:03L HLA-DRB1*04:05L HLA-DQA1*01:02-B1*06:02L HLA-DRB1*01:02L HLA-DRB4*03:01NL HLA-DQA1*05:05-B1*03:19L HLA-DRB1*12:01L HLA-DPA1*03:01-B1*105:01L HLA-DQA1*05:05-B1*03:01L
  REGION 1..12: note = CONT. FROM ABOVE: HLA-DRB1*10:01L HLA-DRB1*16:01L HLA-DQA1*01:03 -B1*06:01L HLA-DRB1*04:08L
  source 1..12: note = Severe acute respiratory syndrome coronavirus 2
NFSQILPDPSKP

SEQ ID NO: 11633 - protein, 11 aa, Severe acute respiratory syndrome-related coronavirus
  REGION 1..11: note = Table B: HLA-DQA1*05:01-B1*03:01L HLA-DQA1*01:02-B1*06:02L HLA-DRB1*11:02L HLA-DRB1*09:01L HLA-DPA1*02:01-B1*13:01L
  source 1..11: note = Severe acute respiratory syndrome coronavirus 2
IEDLLFNKVTL

SEQ ID NO: 11634 - protein, 10 aa, Severe acute respiratory syndrome-related coronavirus
  REGION 1..10: note = Table B: HLA-DQA1*05:01-B1*03:01L HLA-DRB1*04:03L HLA-DRB1*13:02L HLA-DRB1*13:03L HLA-DRB1*01:03L HLA-DRB1*04:02L HLA-DRB1*04:05L HLA-DQA1*01:02-B1*06:02M HLA-DRB4*03:01NL HLA-DRB1*08:77M HLA-DPA1*01:03-B1*03:01H
  REGION 1..10: note = CONT. FROM ABOVE: HLA-DPA1*03:01-B1*04:02L HLA-DRB1*03:01M HLA-D RB1*14:01L HLA-DRB1*11:02M HLA-DRB1*11:03L HLA-DRB1*11:04L HLA-D RB1*14:02L HLA-DRB1*11:01L HLA-DRB5*01:01L HLA-DQA1*01-B1*05H HL A-DQA1*05:05-B1*03:19H HLA-DQA1*05:01-B1*02:01H HLA-DRB4*01:01M
  REGION 1..10: note = CONT. FROM ABOVE: HLA-DPA1*01:03-B1*04:01M HLA-DQA1*05:05-B1*03: 116M HLA-DPA1*01:03-B1*04:02M HLA-DRB1*12:01M HLA-DPA1*02:01-B1* 13:01L HLA-DPA1*03:01-B1*105:01L HLA-DRB1*14:54L HLA-DPA1*01:03- B1*104:01H HLA-DQA1*05:05-B1*03:01L HLA-DPA1*01:02-B1*04:01L
  REGION 1..10: note = CONT. FROM ABOVE: HLA-DRB1*10:01M HLA-DRB1*16:01H HLA-DRB1*08:02 L HLA-DQA1*02:01-B1*03:03L HLA-DRB1*15:03L
  source 1..10: note = Severe acute respiratory syndrome coronavirus 2
LADAGFIKQY

SEQ ID NO: 11635 - protein, 14 aa, Severe acute respiratory syndrome-related coronavirus
  REGION 1..14: note = Table B: HLA-DQA1*05:01-B1*03:01L HLA-DRB1*04:01L HLA-DRB1*13:03L HLA-DRB1*04:02L HLA-DRB1*04:04L HLA-DRB1*01:01L HLA-DRB1*08:04L HLA-DRB3*02:01L HLA-DRB1*14:01L HLA-DRB1*11:02L HLA-DRB1*11:03L HLA-DRB1*11:04L HLA-DRB1*14:02L HLA-DRB1*08:01L
  REGION 1..14: note = CONT. FROM ABOVE: HLA-DRB1*11:01L HLA-DRB4*01:01L HLA-DPA1*01:03 -B1*04:01L HLA-DRB1*04:10L HLA-DRB1*09:01L HLA-DPA1*01:03-B1*04: 02L HLA-DRB3*01:01L HLA-DPA1*01:02-B1*04:01L HLA-DRB1*07:01L HLA -DRB1*10:01L HLA-DRB1*08:03L HLA-DRB1*15:01L
  source 1..14: note = Severe acute respiratory syndrome coronavirus 2
GFIKQYGDCLGDIA

SEQ ID NO: 11636 - protein, 15 aa, Severe acute respiratory syndrome-related coronavirus
  REGION 1..15: note = Table B: HLA-DQA1*05:01-B1*03:01L HLA-DQA1*05:05-B1*03:01L
  source 1..15: note = Severe acute respiratory syndrome coronavirus 2
IKQYGDCLGDIAARD

SEQ ID NO: 11637 - protein, 14 aa, Severe acute respiratory syndrome-related coronavirus
  REGION 1..14: note = Table B: HLA-DQA1*05:01-B1*03:01L HLA-DRB1*01:03L HLA-DRB1*01:02L HLA-DRB1*04:08L
  source 1..14: note = Severe acute respiratory syndrome coronavirus 2
LGDIAARDLICAQK

SEQ ID NO: 11638 - protein, 14 aa, Severe acute respiratory syndrome-related coronavirus
  REGION 1..14: note = Table B: HLA-DQA1*05:01-B1*03:01L HLA-DRB1*13:03L HLA-DRB1*04:02L HLA-DRB1*04:05L HLA-DRB1*11:02L HLA-DRB1*11:03L HLA-DRB1*14:02L HLA-DQA1*05:05-B1*03:19L HLA-DQA1*05:05-B1*03:116L HLA-DPA1*02:01-B1*13:01L
  REGION 1..14: note = CONT. FROM ABOVE: HLA-DPA1*01:03-B1*104:01L HLA-DQA1*05:05-B1*03 :01L HLA-DRB1*08:02L HLA-DRB1*08:03L HLA-DQA1*02:01-B1*03:03L
  source 1..14: note = Severe acute respiratory syndrome coronavirus 2
ARDLICAQKFNGLT

SEQ ID NO: 11639 - protein, 11 aa, Severe acute respiratory syndrome-related coronavirus
  REGION 1..11: note = Table B: HLA-DQA1*05:01-B1*03:01L HLA-DQA1*01:02-B1*06:02L HLA-DQA1*01-B1*05L HLA-DQA1*05:01-B1*02:01L HLA-DPA1*03:01-B1*105:01L HLA-DQA1*01:03-B1*06:01L
  source 1..11: note = Severe acute respiratory syndrome coronavirus 2
TVLPPLLTDEM

SEQ ID NO: 11640 - protein, 16 aa, Severe acute respiratory syndrome-related coronavirus
  REGION 1..16: note = Table B: HLA-DQA1*05:01-B1*03:01L HLA-DRB1*04:01L HLA-DRB3*02:01L HLA-DPA1*02:01-B1*13:01L HLA-DPA1*01:03-B1*02:01L
  source 1..16: note = Severe acute respiratory syndrome coronavirus 2
LPPLLTDEMIAQYTSA

SEQ ID NO: 11641 - protein, 14 aa, Severe acute respiratory syndrome-related coronavirus
  REGION 1..14: note = Table B: HLA-DQA1*05:01-B1*03:01L HLA-DRB1*13:02L HLA-DRB1*13:03L HLA-DRB1*04:05L HLA-DRB1*01:01L HLA-DPA1*03:01-B1*04:02L HLA-DRB1*14:01L HLA-DRB1*11:03L HLA-DRB1*11:04L HLA-DRB1*14:02L HLA-DRB1*08:01L
  REGION 1..14: note = CONT. FROM ABOVE: HLA-DQA1*05:05-B1*03:19L HLA-DRB1*04:10L HLA-D PA1*03:01-B1*105:01L HLA-DRB1*14:54L HLA-DRB1*08:03L
  source 1..14: note = Severe acute respiratory syndrome coronavirus 2
DEMIAQYTSALLAG

SEQ ID NO: 11642 - protein, 12 aa, Severe acute respiratory syndrome-related coronavirus
  REGION 1..12: note = Table B: HLA-DQA1*05:01-B1*03:01L HLA-DQA1*05:05-B1*03:19L HLA-DQA1*03:01-B1*03:02L HLA-DQA1*05:05-B1*03:01L HLA-DQA1*02:01-B1*03:03L
  source 1..12: note = Severe acute respiratory syndrome coronavirus 2
TSALLAGTITSG

SEQ ID NO: 11643 - protein, 10 aa, Severe acute respiratory syndrome-related coronavirus
  REGION 1..10: note = Table B: HLA-DQA1*05:01-B1*03:01L HLA-DRB1*13:03L HLA-DQA1*01:02-B1*06:02L HLA-DPA1*03:01-B1*04:02L HLA-DRB1*14:02L HLA-DQA1*05:05-B1*03:19L HLA-DQA1*05:01-B1*02:01L HLA-DRB4*01:01L
  REGION 1..10: note = CONT. FROM ABOVE: HLA-DPA1*01:03-B1*04:01L HLA-DPA1*02:01-B1*13: 01L HLA-DPA1*03:01-B1*105:01L HLA-DQA1*01:03-B1*06:01L HLA-DQA1* 02:01-B1*03:03L HLA-DRB1*15:03L
  source 1..10: note = Severe acute respiratory syndrome coronavirus 2
LLAGTITSGW

SEQ ID NO: 11644 - protein, 12 aa, Severe acute respiratory syndrome-related coronavirus
  REGION 1..12: note = Table B: HLA-DQA1*05:01-B1*03:01L HLA-DRB1*13:02L HLA-DRB3*02:01L HLA-DPA1*03:01-B1*04:02L HLA-DRB1*14:01L HLA-DQA1*05:01-B1*02:01L HLA-DPA1*01:02-B1*04:01L
  source 1..12: note = Severe acute respiratory syndrome coronavirus 2
IPFAMQMAYRFN

SEQ ID NO: 11645 - protein, 12 aa, Severe acute respiratory syndrome-related coronavirus
  REGION 1..12: note = Table B: HLA-DQA1*05:01-B1*03:01L HLA-DRB1*04:03L HLA-DRB1*01:03L HLA-DRB1*04:02L HLA-DQA1*01:02-B1*06:02L HLA-DRB1*01:02L HLA-DPA1*03:01-B1*04:02L HLA-DRB1*14:01L HLA-DRB1*08:01L HLA-DQA1*01-B1*05L HLA-DRB1*12:01L
  REGION 1..12: note = CONT. FROM ABOVE: HLA-DPA1*03:01-B1*105:01L HLA-DQA1*03:01-B1*03 :02L HLA-DPA1*01:02-B1*04:01L HLA-DRB1*16:01L HLA-DRB1*04:08L HL A-DQA1*02:01-B1*03:03L HLA-DRB1*15:03L
  source 1..12: note = Severe acute respiratory syndrome coronavirus 2
MAYRFNGIGVTQ

SEQ ID NO: 11646 - protein, 11 aa, Severe acute respiratory syndrome-related coronavirus
  REGION 1..11: note = Table B: HLA-DQA1*05:01-B1*03:01L HLA-DRB1*01:03L HLA-DRB1*04:02L HLA-DRB1*04:05L HLA-DPA1*03:01-B1*105:01L HLA-DPA1*01:02-B1*04:01L HLA-DRB1*16:01L HLA-DRB1*04:08L
  source 1..11: note = Severe acute respiratory syndrome coronavirus 2
YRFNGIGVTQN

SEQ ID NO: 11647 - protein, 10 aa, Severe acute respiratory syndrome-related coronavirus
  REGION 1..10: note = Table B: HLA-DQA1*05:01-B1*03:01L HLA-DRB1*13:03L HLA-DRB1*01:03L HLA-DQA1*01:02-B1*06:02L HLA-DRB1*08:77L HLA-DPA1*01:03-B1*03:01L HLA-DRB1*03:01L HLA-DRB1*14:02L HLA-DQA1*05:05-B1*03:19L HLA-DQA1*05:01-B1*02:01L
  REGION 1..10: note = CONT. FROM ABOVE: HLA-DPA1*01:03-B1*04:01L HLA-DRB1*12:01L HLA-D PA1*03:01-B1*105:01L HLA-DPA1*01:03-B1*104:01L HLA-DRB1*16:01L H LA-DQA1*02:01-B1*03:03L HLA-DRB1*15:03L
  source 1..10: note = Severe acute respiratory syndrome coronavirus 2
GIGVTQNVLY

SEQ ID NO: 11648 - protein, 10 aa, Severe acute respiratory syndrome-related coronavirus
  REGION 1..10: note = Table B: HLA-DQA1*05:01-B1*03:01L HLA-DRB1*04:03L HLA-DPA1*03:01-B1*105:01L HLA-DQA1*03:01-B1*03:02L HLA-DPA1*01:02-B1*04:01L HLA-DQA1*01:03-B1*06:01L HLA-DQA1*02:01-B1*03:03L
  source 1..10: note = Severe acute respiratory syndrome coronavirus 2
QFNSAIGKIQ

SEQ ID NO: 11649 - protein, 14 aa, Severe acute respiratory syndrome-related coronavirus
  REGION 1..14: note = Table B: HLA-DQA1*05:01-B1*03:01L HLA-DRB1*14:04L HLA-DRB1*04:01L HLA-DRB1*13:02L HLA-DQA1*01:02-B1*06:02L HLA-DRB1*01:01L HLA-DRB1*08:04L HLA-DRB1*08:77L HLA-DPA1*01:03-B1*03:01L HLA-DRB1*11:03L HLA-DRB1*14:02L
  REGION 1..14: note = CONT. FROM ABOVE: HLA-DRB1*11:01L HLA-DRB5*01:01L HLA-DQA1*05:05 -B1*03:19L HLA-DRB4*01:01L HLA-DRB1*09:01L HLA-DRB1*12:02L HLA-D PA1*02:01-B1*13:01L HLA-DPA1*03:01-B1*105:01L HLA-DPA1*01:03-B1* 104:01L HLA-DQA1*05:05-B1*03:01L HLA-DRB1*07:01L HLA-DRB1*10:01L
  REGION 1..14: note = CONT. FROM ABOVE: HLA-DQA1*01:03-B1*06:01L HLA-DRB1*08:03L HLA-D RB1*15:03L
  source 1..14: note = Severe acute respiratory syndrome coronavirus 2
IGKIQDSLSSTASA

SEQ ID NO: 11650 - protein, 13 aa, Severe acute respiratory syndrome-related coronavirus
  REGION 1..13: note = Table B: HLA-DQA1*05:01-B1*03:01L HLA-DRB1*04:03L HLA-DRB1*04:02L HLA-DRB1*04:05L HLA-DQA1*01:02-B1*06:02L HLA-DRB4*03:01NL HLA-DQA1*01:01-B1*05:01L HLA-DQA1*05:05-B1*03:19L HLA-DQA1*05:01-B1*02:01L
  REGION 1..13: note = CONT. FROM ABOVE: HLA-DQA1*05:05-B1*03:01L HLA-DRB1*14:17L HLA-D RB1*16:01L HLA-DQA1*01:03-B1*06:01L HLA-DQA1*02:01-B1*03:03L
  source 1..13: note = Severe acute respiratory syndrome coronavirus 2
IQDSLSSTASALG

SEQ ID NO: 11651 - protein, 11 aa, Severe acute respiratory syndrome-related coronavirus
  REGION 1..11: note = Table B: HLA-DQA1*05:01-B1*03:01L HLA-DRB1*13:02L HLA-DRB1*04:05L HLA-DQA1*05:05-B1*03:19L HLA-DRB1*12:02L HLA-DPA1*03:01-B1*105:01L
  source 1..11: note = Severe acute respiratory syndrome coronavirus 2
SLSSTASALGK

SEQ ID NO: 11652 - protein, 13 aa, Severe acute respiratory syndrome-related coronavirus
  REGION 1..13: note = Table B: HLA-DQA1*05:01-B1*03:01L HLA-DRB1*04:01L HLA-DRB1*13:02L HLA-DRB1*08:04L HLA-DRB1*08:77L HLA-DPA1*01:03-B1*03:01L HLA-DRB1*14:01L HLA-DRB1*11:03L HLA-DRB1*11:04L HLA-DRB1*09:01L HLA-DRB1*12:02L
  REGION 1..13: note = CONT. FROM ABOVE: HLA-DPA1*03:01-B1*105:01L HLA-DPA1*01:03-B1*10 4:01L HLA-DQA1*05:05-B1*03:01L HLA-DRB1*07:01L HLA-DRB1*10:01L H LA-DRB1*08:03L HLA-DRB1*15:03L
  source 1..13: note = Severe acute respiratory syndrome coronavirus 2
LGKLQDVVNQNAQ

SEQ ID NO: 11653 - protein, 13 aa, Severe acute respiratory syndrome-related coronavirus
  REGION 1..13: note = Table B: HLA-DQA1*05:01-B1*03:01L HLA-DRB1*04:01L HLA-DRB1*13:02L HLA-DRB1*08:04L HLA-DPA1*01:03-B1*03:01L HLA-DRB1*14:01L HLA-DRB1*11:03L HLA-DRB1*11:04L HLA-DPA1*03:01-B1*105:01L HLA-DQA1*05:05-B1*03:01L
  REGION 1..13: note = CONT. FROM ABOVE: HLA-DRB1*10:01L HLA-DRB1*08:03L HLA-DRB1*15:03 L
  source 1..13: note = Severe acute respiratory syndrome coronavirus 2
GKLQDVVNQNAQA

SEQ ID NO: 11654 - protein, 10 aa, Severe acute respiratory syndrome-related coronavirus
  REGION 1..10: note = Table B: HLA-DQA1*05:01-B1*03:01L HLA-DRB4*03:01NL HLA-DQA1*03:01-B1*03:02L HLA-DQA1*05:05-B1*03:01L HLA-DQA1*01:03-B1*06:01L HLA-DQA1*02:01-B1*03:03L
  source 1..10: note = Severe acute respiratory syndrome coronavirus 2
NAQALNTLVK

SEQ ID NO: 11655 - protein, 11 aa, Severe acute respiratory syndrome-related coronavirus
  REGION 1..11: note = Table B: HLA-DQA1*05:01-B1*03:01L HLA-DRB1*04:05L HLA-DRB1*01:02L HLA-DRB4*03:01NL HLA-DRB1*14:01L HLA-DQA1*05:01-B1*02:01L HLA-DRB1*04:10L HLA-DRB1*14:54L HLA-DRB1*16:01L HLA-DRB1*15:03L
  source 1..11: note = Severe acute respiratory syndrome coronavirus 2
TLVKQLSSNFG

SEQ ID NO: 11656 - protein, 11 aa, Severe acute respiratory syndrome-related coronavirus
  REGION 1..11: note = Table B: HLA-DQA1*05:01-B1*03:01L HLA-DRB1*04:03L HLA-DQA1*01:02-B1*06:02L HLA-DQA1*05:05-B1*03:19L HLA-DQA1*05:01-B1*02:01L HLA-DQA1*03:01-B1*03:02L HLA-DQA1*05:05-B1*03:01L HLA-DRB1*14:17L
  REGION 1..11: note = CONT. FROM ABOVE: HLA-DQA1*01:03-B1*06:01L HLA-DQA1*02:01-B1*03: 03L
  source 1..11: note = Severe acute respiratory syndrome coronavirus 2
SNFGAISSVLN

SEQ ID NO: 11657 - protein, 11 aa, Severe acute respiratory syndrome-related coronavirus
  REGION 1..11: note = Table B: HLA-DQA1*05:01-B1*03:01L HLA-DRB1*04:03L HLA-DRB1*12:01L HLA-DRB1*16:01L HLA-DRB1*15:03L
  source 1..11: note = Severe acute respiratory syndrome coronavirus 2
GAISSVLNDIL

SEQ ID NO: 11658 - protein, 11 aa, Severe acute respiratory syndrome-related coronavirus
  REGION 1..11: note = Table B: HLA-DQA1*05:01-B1*03:01L HLA-DRB1*04:03L HLA-DQA1*01:02-B1*06:02L HLA-DPA1*03:01-B1*105:01L HLA-DRB1*16:01L
  source 1..11: note = Severe acute respiratory syndrome coronavirus 2
ISSVLNDILSR

SEQ ID NO: 11659 - protein, 10 aa, Severe acute respiratory syndrome-related coronavirus
  REGION 1..10: note = Table B: HLA-DQA1*05:01-B1*03:01L HLA-DQA1*01:02-B1*06:02L HLA-DPA1*03:01-B1*105:01L HLA-DQA1*01:03-B1*06:01L HLA-DQA1*02:01-B1*03:03L
  source 1..10: note = Severe acute respiratory syndrome coronavirus 2
ITGRLQSLQT

SEQ ID NO: 11660 - protein, 13 aa, Severe acute respiratory syndrome-related coronavirus
  REGION 1..13: note = Table B: HLA-DQA1*05:01-B1*03:01L HLA-DRB1*13:02L HLA-DRB1*13:03L HLA-DRB1*08:04L HLA-DPA1*01:03-B1*03:01L HLA-DRB1*11:03L HLA-DRB1*11:04L HLA-DQA1*01-B1*05L HLA-DQA1*05:01-B1*02:01L HLA-DRB1*12:02L
  REGION 1..13: note = CONT. FROM ABOVE: HLA-DPA1*03:01-B1*105:01L HLA-DQA1*05:05-B1*03 :01L HLA-DRB1*10:01L HLA-DRB1*08:03L
  source 1..13: note = Severe acute respiratory syndrome coronavirus 2
TGRLQSLQTYVTQ

SEQ ID NO: 11661 - protein, 13 aa, Severe acute respiratory syndrome-related coronavirus
  REGION 1..13: note = Table B: HLA-DQA1*05:01-B1*03:01L HLA-DRB1*04:01L HLA-DRB1*01:01L HLA-DRB1*08:04L HLA-DRB1*11:04L HLA-DQA1*01-B1*05L HLA-DPA1*03:01-B1*105:01L HLA-DQA1*05:05-B1*03:01L HLA-DRB1*10:01L
  source 1..13: note = Severe acute respiratory syndrome coronavirus 2
GRLQSLQTYVTQQ

SEQ ID NO: 11662 - protein, 10 aa, Severe acute respiratory syndrome-related coronavirus
  REGION 1..10: note = Table B: HLA-DQA1*05:01-B1*03:01L HLA-DRB1*04:03L HLA-DQA1*01:02-B1*06:02L HLA-DPA1*03:01-B1*105:01L HLA-DQA1*03:01-B1*03:02L HLA-DQA1*01:03-B1*06:01L HLA-DQA1*02:01-B1*03:03L
  source 1..10: note = Severe acute respiratory syndrome coronavirus 2
VTQQLIRAAE

SEQ ID NO: 11663 - protein, 12 aa, Severe acute respiratory syndrome-related coronavirus
  REGION 1..12: note = Table B: HLA-DQA1*05:01-B1*03:01L
  source 1..12: note = Severe acute respiratory syndrome coronavirus 2
QQLIRAAEIRAS

SEQ ID NO: 11664 - protein, 10 aa, Severe acute respiratory syndrome-related coronavirus
  REGION 1..10: note = Table B: HLA-DQA1*05:01-B1*03:01L HLA-DQA1*01:02-B1*06:02L HLA-DQA1*05:05-B1*03:19L HLA-DPA1*03:01-B1*105:01L HLA-DQA1*03:01-B1*03:02L HLA-DQA1*05:05-B1*03:01L HLA-DQA1*01:03-B1*06:01L HLA-DQA1*02:01-B1*03:03L
  source 1..10: note = Severe acute respiratory syndrome coronavirus 2
IRAAEIRASA

SEQ ID NO: 11665 - protein, 11 aa, Severe acute respiratory syndrome-related coronavirus
  REGION 1..11: note = Table B: HLA-DQA1*05:01-B1*03:01L HLA-DRB1*04:01L HLA-DRB1*04:04L HLA-DRB1*04:05L HLA-DQA1*01:02-B1*06:02L HLA-DRB1*01:02L HLA-DRB1*08:04L HLA-DRB1*14:01L HLA-DRB1*11:03L HLA-DRB1*11:04L HLA-DRB1*11:01L HLA-DQA1*05:05-B1*03:19L
  REGION 1..11: note = CONT. FROM ABOVE: HLA-DRB1*04:10L HLA-DRB1*12:02L HLA-DPA1*03:01 -B1*105:01L HLA-DRB1*14:54L HLA-DRB1*10:01L HLA-DQA1*01:03-B1*06 :01L HLA-DRB1*04:08L HLA-DRB1*08:03L HLA-DRB1*15:03L
  source 1..11: note = Severe acute respiratory syndrome coronavirus 2
IRASANLAATK

SEQ ID NO: 11666 - protein, 14 aa, Severe acute respiratory syndrome-related coronavirus
  REGION 1..14: note = Table B: HLA-DQA1*05:01-B1*03:01L HLA-DRB1*01:02L
  source 1..14: note = Severe acute respiratory syndrome coronavirus 2
LAATKMSECVLGQS

SEQ ID NO: 11667 - protein, 13 aa, Severe acute respiratory syndrome-related coronavirus
  REGION 1..13: note = Table B: HLA-DQA1*05:01-B1*03:01L
  source 1..13: note = Severe acute respiratory syndrome coronavirus 2
ATKMSECVLGQSK

SEQ ID NO: 11668 - protein, 13 aa, Severe acute respiratory syndrome-related coronavirus
  REGION 1..13: note = Table B: HLA-DQA1*05:01-B1*03:01L HLA-DRB1*01:02L HLA-DRB1*04:08L
  source 1..13: note = Severe acute respiratory syndrome coronavirus 2
TKMSECVLGQSKR

SEQ ID NO: 11669 - protein, 10 aa, Severe acute respiratory syndrome-related coronavirus
  REGION 1..10: note = Table B: HLA-DQA1*05:01-B1*03:01L HLA-DRB1*01:03L HLA-DQA1*01:02-B1*06:02L HLA-DRB1*14:01L HLA-DQA1*03:01-B1*03:02L HLA-DRB1*16:01L HLA-DQA1*01:03-B1*06:01L HLA-DQA1*02:01-B1*03:03L
  REGION 1..10: note = CONT. FROM ABOVE: HLA-DRB1*15:03L
  source 1..10: note = Severe acute respiratory syndrome coronavirus 2
VLGQSKRVDF

SEQ ID NO: 11670 - protein, 12 aa, Severe acute respiratory syndrome-related coronavirus
  REGION 1..12: note = Table B: HLA-DQA1*05:01-B1*03:01L HLA-DRB1*04:01L HLA-DRB1*13:03L HLA-DRB1*01:03L HLA-DRB1*04:04L HLA-DRB1*04:05L HLA-DQA1*01:02-B1*06:02L HLA-DRB1*01:02L HLA-DRB4*03:01NL HLA-DRB1*08:04L HLA-DRB1*14:01L HLA-DRB1*11:04L HLA-DRB1*08:01L
  REGION 1..12: note = CONT. FROM ABOVE: HLA-DRB1*04:10L HLA-DRB1*12:01L HLA-DPA1*03:01 -B1*105:01L HLA-DRB1*14:54L HLA-DQA1*05:05-B1*03:01L HLA-DRB1*10 :01L HLA-DRB1*16:01L HLA-DRB1*04:08L HLA-DRB1*15:03L
  source 1..12: note = Severe acute respiratory syndrome coronavirus 2
YHLMSFPQSAPH

SEQ ID NO: 11671 - protein, 10 aa, Severe acute respiratory syndrome-related coronavirus
  REGION 1..10: note = Table B: HLA-DQA1*05:01-B1*03:01L HLA-DRB1*13:03L HLA-DQA1*01:02-B1*06:02L HLA-DPA1*03:01-B1*04:02L HLA-DQA1*01-B1*05L HLA-DQA1*05:05-B1*03:116L HLA-DPA1*03:01-B1*105:01L HLA-DPA1*01:02-B1*04:01L
  source 1..10: note = Severe acute respiratory syndrome coronavirus 2
APHGVVFLHV

SEQ ID NO: 11672 - protein, 12 aa, Severe acute respiratory syndrome-related coronavirus
  REGION 1..12: note = Table B: HLA-DQA1*05:01-B1*03:01L HLA-DRB1*04:03L HLA-DQA1*01:02-B1*06:02L HLA-DRB1*01:02L HLA-DPA1*01:03-B1*03:01L HLA-DRB1*14:01L HLA-DQA1*05:01-B1*02:01L HLA-DPA1*01:03-B1*04:01L
  REGION 1..12: note = CONT. FROM ABOVE: HLA-DPA1*01:03-B1*04:02L HLA-DRB1*12:01L HLA-D RB1*16:01L HLA-DRB1*04:08L HLA-DQA1*02:01-B1*03:03L HLA-DRB1*15: 03L
  source 1..12: note = Severe acute respiratory syndrome coronavirus 2
VVFLHVTYVPAQ

SEQ ID NO: 11673 - protein, 11 aa, Severe acute respiratory syndrome-related coronavirus
  REGION 1..11: note = Table B: HLA-DQA1*05:01-B1*03:01L
  source 1..11: note = Severe acute respiratory syndrome coronavirus 2
TYVPAQEKNFT

SEQ ID NO: 11674 - protein, 14 aa, Severe acute respiratory syndrome-related coronavirus
  REGION 1..14: note = Table B: HLA-DQA1*05:01-B1*03:01L HLA-DQA1*01:02-B1*06:02L HLA-DQA1*05:05-B1*03:01L HLA-DQA1*01:03-B1*06:01L
  source 1..14: note = Severe acute respiratory syndrome coronavirus 2
YVPAQEKNFTTAPA

SEQ ID NO: 11675 - protein, 16 aa, Severe acute respiratory syndrome-related coronavirus
  REGION 1..16: note = Table B: HLA-DQA1*05:01-B1*03:01L HLA-DRB1*13:02L HLA-DRB1*01:03L HLA-DRB1*04:04L HLA-DRB1*01:02L HLA-DPA1*03:01-B1*105:01L HLA-DQA1*05:05-B1*03:01L HLA-DRB1*07:01L HLA-DRB1*04:08L HLA-DRB1*15:03L
  source 1..16: note = Severe acute respiratory syndrome coronavirus 2
VPAQEKNFTTAPAICH

SEQ ID NO: 11676 - protein, 10 aa, Severe acute respiratory syndrome-related coronavirus
  REGION 1..10: note = Table B: HLA-DQA1*05:01-B1*03:01L HLA-DQA1*01:02-B1*06:02L HLA-DQA1*05:05-B1*03:19L HLA-DQA1*03:01-B1*03:02L HLA-DQA1*05:05-B1*03:01L HLA-DQA1*01:03-B1*06:01L HLA-DQA1*02:01-B1*03:03L
  source 1..10: note = Severe acute respiratory syndrome coronavirus 2
TTAPAICHDG

SEQ ID NO: 11677 - protein, 14 aa, Severe acute respiratory syndrome-related coronavirus
  REGION 1..14: note = Table B: HLA-DQA1*05:01-B1*03:01L HLA-DRB1*04:01L HLA-DRB1*04:02L HLA-DRB1*04:05L HLA-DQA1*01:02-B1*06:02L HLA-DRB1*01:01L HLA-DRB4*03:01NL HLA-DRB1*08:77L HLA-DPA1*01:03-B1*03:01L HLA-DRB1*11:03L HLA-DRB1*14:02L
  REGION 1..14: note = CONT. FROM ABOVE: HLA-DRB1*11:01L HLA-DRB5*01:01L HLA-DQA1*05:01 -B1*02:01L HLA-DPA1*03:01-B1*105:01L HLA-DQA1*03:01-B1*03:02L HL A-DRB1*14:54L HLA-DPA1*01:02-B1*04:01L HLA-DRB1*10:01L HLA-DRB1* 08:03L HLA-DQA1*02:01-B1*03:03L
  source 1..14: note = Severe acute respiratory syndrome coronavirus 2
APAICHDGKAHFPR

SEQ ID NO: 11678 - protein, 13 aa, Severe acute respiratory syndrome-related coronavirus
  REGION 1..13: note = Table B: HLA-DQA1*05:01-B1*03:01L HLA-DRB1*13:02L HLA-DQA1*05:05-B1*03:01L HLA-DPA1*01:02-B1*04:01L
  source 1..13: note = Severe acute respiratory syndrome coronavirus 2
VFVSNGTHWFVTQ

SEQ ID NO: 11679 - protein, 13 aa, Severe acute respiratory syndrome-related coronavirus
  REGION 1..13: note = Table B: HLA-DQA1*05:01-B1*03:01L
  source 1..13: note = Severe acute respiratory syndrome coronavirus 2
VSNGTHWFVTQRN

SEQ ID NO: 11680 - protein, 12 aa, Severe acute respiratory syndrome-related coronavirus
  REGION 1..12: note = Table B: HLA-DQA1*05:01-B1*03:01L HLA-DPA1*01:03-B1*03:01L HLA-DPA1*03:01-B1*04:02L HLA-DRB1*14:01L HLA-DRB1*12:01L HLA-DPA1*03:01-B1*105:01L HLA-DRB1*15:03L
  source 1..12: note = Severe acute respiratory syndrome coronavirus 2
GTHWFVTQRNFY

SEQ ID NO: 11681 - protein, 15 aa, Severe acute respiratory syndrome-related coronavirus
  REGION 1..15: note = Table B: HLA-DQA1*05:01-B1*03:01L HLA-DRB3*02:01L HLA-DRB1*08:01L HLA-DQA1*05:05-B1*03:19L HLA-DPA1*01:03-B1*04:01L HLA-DPA1*01:03-B1*04:02L HLA-DQA1*05:05-B1*03:01L
  source 1..15: note = Severe acute respiratory syndrome coronavirus 2
VTQRNFYEPQIITTD

SEQ ID NO: 11682 - protein, 12 aa, Severe acute respiratory syndrome-related coronavirus
  REGION 1..12: note = Table B: HLA-DQA1*05:01-B1*03:01L HLA-DRB1*13:03L HLA-DRB1*04:02L HLA-DRB1*04:05L HLA-DQA1*01:02-B1*06:02L HLA-DRB4*03:01NL HLA-DQA1*05:05-B1*03:19L HLA-DRB1*04:10L HLA-DPA1*03:01-B1*105:01L HLA-DQA1*05:05-B1*03:01L
  REGION 1..12: note = CONT. FROM ABOVE: HLA-DRB1*16:01L HLA-DRB1*04:08L
  source 1..12: note = Severe acute respiratory syndrome coronavirus 2
NFYEPQIITTDN

SEQ ID NO: 11683 - protein, 13 aa, Severe acute respiratory syndrome-related coronavirus
  REGION 1..13: note = Table B: HLA-DQA1*05:01-B1*03:01L HLA-DRB3*02:01L HLA-DPA1*03:01-B1*04:02L HLA-DPA1*03:01-B1*105:01L
  source 1..13: note = Severe acute respiratory syndrome coronavirus 2
YEPQIITTDNTFV

SEQ ID NO: 11684 - protein, 13 aa, Severe acute respiratory syndrome-related coronavirus
  REGION 1..13: note = Table B: HLA-DQA1*05:01-B1*03:01L HLA-DRB1*14:04L HLA-DRB1*04:01L HLA-DRB1*01:03L HLA-DRB1*04:04L HLA-DRB1*01:01L HLA-DRB1*01:02L HLA-DRB1*08:04L HLA-DPA1*01:03-B1*03:01L HLA-DPA1*03:01-B1*04:02L HLA-DRB1*14:02L HLA-DRB1*08:01L
  REGION 1..13: note = CONT. FROM ABOVE: HLA-DRB1*11:01L HLA-DRB5*01:01L HLA-DQA1*05:05 -B1*03:19L HLA-DRB4*01:01L HLA-DRB1*09:01L HLA-DRB3*01:01L HLA-D PA1*03:01-B1*105:01L HLA-DQA1*05:05-B1*03:01L HLA-DRB1*07:01L HL A-DRB1*10:01L HLA-DRB1*04:08L HLA-DRB1*08:03L
  source 1..13: note = Severe acute respiratory syndrome coronavirus 2
EPQIITTDNTFVS

SEQ ID NO: 11685 - protein, 13 aa, Severe acute respiratory syndrome-related coronavirus
  REGION 1..13: note = Table B: HLA-DQA1*05:01-B1*03:01L HLA-DRB1*04:01L HLA-DRB1*01:03L HLA-DRB1*04:04L HLA-DRB1*01:02L HLA-DRB1*08:04L HLA-DPA1*01:03-B1*03:01L HLA-DRB1*03:01L HLA-DRB1*14:02L HLA-DRB5*01:01L HLA-DRB4*01:01L HLA-DRB1*09:01L HLA-DRB3*01:01L
  REGION 1..13: note = CONT. FROM ABOVE: HLA-DQA1*05:05-B1*03:01L HLA-DRB1*07:01L HLA-D RB1*10:01L HLA-DRB1*04:08L HLA-DRB1*08:03L
  source 1..13: note = Severe acute respiratory syndrome coronavirus 2
PQIITTDNTFVSG

SEQ ID NO: 11686 - protein, 12 aa, Severe acute respiratory syndrome-related coronavirus
  REGION 1..12: note = Table B: HLA-DQA1*05:01-B1*03:01L HLA-DQA1*05:05-B1*03:19L HLA-DPA1*03:01-B1*105:01L HLA-DQA1*05:05-B1*03:01L HLA-DQA1*02:01-B1*03:03L
  source 1..12: note = Severe acute respiratory syndrome coronavirus 2
TFVSGNCDVVIG

SEQ ID NO: 11687 - protein, 10 aa, Severe acute respiratory syndrome-related coronavirus
  REGION 1..10: note = Table B: HLA-DQA1*05:01-B1*03:01L HLA-DRB1*04:03L HLA-DRB1*13:03L HLA-DRB1*01:03L HLA-DQA1*01:02-B1*06:02L HLA-DRB1*08:77L HLA-DPA1*01:03-B1*03:01L HLA-DPA1*03:01-B1*04:02L HLA-DRB1*03:01L HLA-DRB1*14:01L
  REGION 1..10: note = CONT. FROM ABOVE: HLA-DRB1*14:02L HLA-DQA1*01-B1*05L HLA-DQA1*05 :05-B1*03:19L HLA-DQA1*05:01-B1*02:01L HLA-DRB4*01:01L HLA-DPA1* 01:03-B1*04:01L HLA-DPA1*01:03-B1*04:02L HLA-DRB1*12:01L HLA-DPA 1*03:01-B1*105:01L HLA-DPA1*01:03-B1*104:01L HLA-DRB1*16:01L
  REGION 1..10: note = CONT. FROM ABOVE: HLA-DQA1*01:03-B1*06:01L HLA-DQA1*02:01-B1*03: 03L HLA-DRB1*15:03L
  source 1..10: note = Severe acute respiratory syndrome coronavirus 2
VIGIVNNTVY

SEQ ID NO: 11688 - protein, 13 aa, Severe acute respiratory syndrome-related coronavirus
  REGION 1..13: note = Table B: HLA-DQA1*05:01-B1*03:01L HLA-DRB1*13:02L HLA-DRB1*13:03L HLA-DRB1*01:03L HLA-DRB1*04:02L HLA-DQA1*01:02-B1*06:02L HLA-DRB1*01:02L HLA-DRB4*03:01NL HLA-DPA1*01:03-B1*03:01L HLA-DPA1*03:01-B1*04:02L
  REGION 1..13: note = CONT. FROM ABOVE: HLA-DQA1*01:01-B1*05:01L HLA-DQA1*05:05-B1*03: 19L HLA-DRB1*04:10L HLA-DRB1*12:01L HLA-DRB1*14:54L HLA-DQA1*05: 05-B1*03:01L HLA-DRB1*14:17L HLA-DPA1*01:02-B1*04:01L HLA-DRB1*0 4:08L HLA-DRB1*15:03L
  source 1..13: note = Severe acute respiratory syndrome coronavirus 2
IVNNTVYDPLQPE

SEQ ID NO: 11689 - protein, 10 aa, Severe acute respiratory syndrome-related coronavirus
  REGION 1..10: note = Table B: HLA-DQA1*05:01-B1*03:01L HLA-DRB1*13:03L HLA-DQA1*01:02-B1*06:02M HLA-DPA1*03:01-B1*04:02L HLA-DQA1*05:01-B1*02:01L HLA-DQA1*05:05-B1*03:116L HLA-DPA1*02:01-B1*13:01L HLA-DPA1*03:01-B1*105:01M
  REGION 1..10: note = CONT. FROM ABOVE: HLA-DPA1*01:02-B1*04:01L HLA-DQA1*01:03-B1*06: 01L HLA-DRB1*15:03L
  source 1..10: note = Severe acute respiratory syndrome coronavirus 2
DPLQPELDSF

SEQ ID NO: 11690 - protein, 13 aa, Severe acute respiratory syndrome-related coronavirus
  REGION 1..13: note = Table B: HLA-DQA1*05:01-B1*03:01L HLA-DRB1*13:02L HLA-DRB1*13:03L HLA-DRB1*01:03L HLA-DRB1*04:04L HLA-DRB1*01:02L HLA-DRB4*03:01NL HLA-DRB1*08:04L HLA-DPA1*03:01-B1*04:02L HLA-DRB1*14:01L HLA-DQA1*01:01-B1*05:01L HLA-DRB1*12:01L
  REGION 1..13: note = CONT. FROM ABOVE: HLA-DPA1*03:01-B1*105:01L HLA-DRB1*14:54L HLA- DRB1*14:17L HLA-DPA1*01:02-B1*04:01L HLA-DRB1*08:03L
  source 1..13: note = Severe acute respiratory syndrome coronavirus 2
QPELDSFKEELDK

SEQ ID NO: 11691 - protein, 13 aa, Severe acute respiratory syndrome-related coronavirus
  REGION 1..13: note = Table B: HLA-DQA1*05:01-B1*03:01L HLA-DRB1*04:03L HLA-DRB1*01:03L HLA-DRB1*04:05L HLA-DQA1*01:02-B1*06:02L HLA-DQA1*01:01-B1*05:01L HLA-DQA1*01-B1*05L HLA-DQA1*05:05-B1*03:19L HLA-DQA1*05:01-B1*02:01L
  REGION 1..13: note = CONT. FROM ABOVE: HLA-DRB1*12:01L HLA-DPA1*03:01-B1*105:01L HLA- DQA1*05:05-B1*03:01L HLA-DRB1*16:01L HLA-DRB1*04:08L HLA-DQA1*02 :01-B1*03:03L
  source 1..13: note = Severe acute respiratory syndrome coronavirus 2
SPDVDLGDISGIN

SEQ ID NO: 11692 - protein, 14 aa, Severe acute respiratory syndrome-related coronavirus
  REGION 1..14: note = Table B: HLA-DQA1*05:01-B1*03:01L HLA-DQA1*01:02-B1*06:02L HLA-DPA1*03:01-B1*105:01L HLA-DQA1*05:05-B1*03:01L HLA-DQA1*01:03-B1*06:01L
  source 1..14: note = Severe acute respiratory syndrome coronavirus 2
VDLGDISGINASVV

SEQ ID NO: 11693 - protein, 14 aa, Severe acute respiratory syndrome-related coronavirus
  REGION 1..14: note = Table B: HLA-DQA1*05:01-B1*03:01L HLA-DRB1*13:02L HLA-DRB1*04:04L HLA-DQA1*01:02-B1*06:02L HLA-DPA1*01:03-B1*03:01L HLA-DRB1*14:01L HLA-DQA1*01:01-B1*05:01L HLA-DRB3*01:01L
  REGION 1..14: note = CONT. FROM ABOVE: HLA-DPA1*02:01-B1*13:01L HLA-DPA1*03:01-B1*105 :01L HLA-DPA1*01:02-B1*04:01L HLA-DRB1*07:01L HLA-DQA1*01:03-B1* 06:01L
  source 1..14: note = Severe acute respiratory syndrome coronavirus 2
IQKEIDRLNEVAKN

SEQ ID NO: 11694 - protein, 14 aa, Severe acute respiratory syndrome-related coronavirus
  REGION 1..14: note = Table B: HLA-DQA1*05:01-B1*03:01L HLA-DRB1*13:03L HLA-DRB1*14:01L HLA-DQA1*01:01-B1*05:01L HLA-DQA1*05:05-B1*03:19L HLA-DRB1*07:01L
  source 1..14: note = Severe acute respiratory syndrome coronavirus 2
VAKNLNESLIDLQE

SEQ ID NO: 11695 - protein, 10 aa, Severe acute respiratory syndrome-related coronavirus
  REGION 1..10: note = Table B: HLA-DQA1*05:01-B1*03:01L HLA-DRB1*04:03L HLA-DRB1*13:02L HLA-DRB1*13:03L HLA-DRB1*01:03L HLA-DRB1*04:02L HLA-DRB1*04:05L HLA-DQA1*01:02-B1*06:02L HLA-DRB4*03:01NL HLA-DRB1*08:77M HLA-DPA1*01:03-B1*03:01H
  REGION 1..10: note = CONT. FROM ABOVE: HLA-DPA1*03:01-B1*04:02L HLA-DRB1*03:01M HLA-D RB1*11:02M HLA-DRB1*11:03L HLA-DRB1*11:04L HLA-DRB1*14:02L HLA-D RB5*01:01L HLA-DQA1*01-B1*05M HLA-DQA1*05:05-B1*03:19H HLA-DQA1* 05:01-B1*02:01H HLA-DRB4*01:01L HLA-DPA1*01:03-B1*04:01M
  REGION 1..10: note = CONT. FROM ABOVE: HLA-DQA1*05:05-B1*03:116L HLA-DPA1*01:03-B1*04 :02L HLA-DRB1*12:01L HLA-DRB1*14:54L HLA-DPA1*01:03-B1*104:01M H LA-DPA1*01:02-B1*04:01L HLA-DRB1*10:01M HLA-DRB1*16:01M HLA-DRB1 *08:02L HLA-DQA1*02:01-B1*03:03L HLA-DRB1*15:03L
  source 1..10: note = Severe acute respiratory syndrome coronavirus 2
LIDLQELGKY

SEQ ID NO: 11696 - protein, 10 aa, Severe acute respiratory syndrome-related coronavirus
  REGION 1..10: note = Table B: HLA-DQA1*05:01-B1*03:01L HLA-DRB1*01:03L HLA-DQA1*01:02-B1*06:02L HLA-DRB1*08:77L HLA-DPA1*01:03-B1*03:01M HLA-DPA1*03:01-B1*04:02L HLA-DRB1*03:01L HLA-DRB1*11:02L HLA-DRB1*14:02L
  REGION 1..10: note = CONT. FROM ABOVE: HLA-DQA1*01-B1*05L HLA-DQA1*05:05-B1*03:19M HL A-DQA1*05:01-B1*02:01M HLA-DRB4*01:01L HLA-DPA1*01:03-B1*04:01L HLA-DQA1*05:05-B1*03:116L HLA-DPA1*01:03-B1*04:02L HLA-DRB1*12:0 1L HLA-DPA1*01:03-B1*104:01M HLA-DRB1*10:01L HLA-DRB1*16:01L
  REGION 1..10: note = CONT. FROM ABOVE: HLA-DRB1*08:02L HLA-DQA1*02:01-B1*03:03L HLA-D RB1*15:03L
  source 1..10: note = Severe acute respiratory syndrome coronavirus 2
LQELGKYEQY

SEQ ID NO: 11697 - protein, 12 aa, Severe acute respiratory syndrome-related coronavirus
  REGION 1..12: note = Table B: HLA-DQA1*05:01-B1*03:01L HLA-DRB1*13:02L HLA-DRB1*01:02L HLA-DRB1*08:04L HLA-DRB1*08:77L HLA-DPA1*01:03-B1*03:01L HLA-DRB1*14:01L HLA-DQA1*05:05-B1*03:19L HLA-DPA1*03:01-B1*105:01L
  REGION 1..12: note = CONT. FROM ABOVE: HLA-DQA1*05:05-B1*03:01L
  source 1..12: note = Severe acute respiratory syndrome coronavirus 2
FDEDDSEPVLKG

SEQ ID NO: 11698 - protein, 13 aa, Severe acute respiratory syndrome-related coronavirus
  REGION 1..13: note = Table B: HLA-DQA1*05:01-B1*03:01L HLA-DQA1*01:02-B1*06:02L HLA-DQA1*01:01-B1*05:01L HLA-DQA1*05:05-B1*03:01L
  source 1..13: note = Severe acute respiratory syndrome coronavirus 2
DEDDSEPVLKGVK

SEQ ID NO: 11699 - protein, 12 aa, Severe acute respiratory syndrome-related coronavirus
  REGION 1..12: note = Table B: HLA-DQA1*05:01-B1*03:01L HLA-DRB1*01:03L HLA-DRB1*04:05L HLA-DRB1*01:02L HLA-DRB1*14:01L HLA-DRB1*04:08L HLA-DRB1*15:03L
  source 1..12: note = Severe acute respiratory syndrome coronavirus 2
IFTIGTVTLKQG

SEQ ID NO: 11700 - protein, 12 aa, Severe acute respiratory syndrome-related coronavirus
  REGION 1..12: note = Table B: HLA-DQA1*05:01-B1*03:01L HLA-DPA1*03:01-B1*105:01L HLA-DQA1*05:05-B1*03:01L
  source 1..12: note = Severe acute respiratory syndrome coronavirus 2
FTIGTVTLKQGE

SEQ ID NO: 11701 - protein, 10 aa, Severe acute respiratory syndrome-related coronavirus
  REGION 1..10: note = Table B: HLA-DQA1*05:01-B1*03:01L HLA-DQA1*03:01-B1*03:02L HLA-DQA1*01:03-B1*06:01L HLA-DQA1*02:01-B1*03:03L
  source 1..10: note = Severe acute respiratory syndrome coronavirus 2
TVTLKQGEIK

SEQ ID NO: 11702 - protein, 12 aa, Severe acute respiratory syndrome-related coronavirus
  REGION 1..12: note = Table B: HLA-DQA1*05:01-B1*03:01L HLA-DQA1*01:02-B1*06:02L HLA-DQA1*03:01-B1*03:02L HLA-DQA1*05:05-B1*03:01L HLA-DQA1*02:01-B1*03:03L
  source 1..12: note = Severe acute respiratory syndrome coronavirus 2
LKQGEIKDATPS

SEQ ID NO: 11703 - protein, 14 aa, Severe acute respiratory syndrome-related coronavirus
  REGION 1..14: note = Table B: HLA-DQA1*05:01-B1*03:01L HLA-DRB1*13:02L HLA-DRB1*01:03L HLA-DRB1*04:05L HLA-DQA1*01:02-B1*06:02L HLA-DRB1*01:02L HLA-DRB4*03:01NL HLA-DRB1*08:04L HLA-DRB1*08:77L HLA-DRB3*02:01L HLA-DPA1*01:03-B1*03:01L
  REGION 1..14: note = CONT. FROM ABOVE: HLA-DPA1*03:01-B1*04:02L HLA-DRB1*14:01L HLA-D RB1*11:03L HLA-DQA1*05:01-B1*02:01L HLA-DRB1*04:10L HLA-DRB1*09: 01L HLA-DRB1*12:01L HLA-DRB1*12:02L HLA-DPA1*02:01-B1*13:01L HLA -DPA1*03:01-B1*105:01L HLA-DRB1*14:54L HLA-DQA1*05:05-B1*03:01L
  REGION 1..14: note = CONT. FROM ABOVE: HLA-DPA1*01:02-B1*04:01L HLA-DRB1*07:01L HLA-D RB1*16:01L HLA-DQA1*01:03-B1*06:01L HLA-DRB1*04:08L HLA-DRB1*15: 03L
  source 1..14: note = Severe acute respiratory syndrome coronavirus 2
TPSDFVRATATIPI

SEQ ID NO: 11704 - protein, 12 aa, Severe acute respiratory syndrome-related coronavirus
  REGION 1..12: note = Table B: HLA-DQA1*05:01-B1*03:01L HLA-DRB1*01:02L
  source 1..12: note = Severe acute respiratory syndrome coronavirus 2
QSASKIITLKKR

SEQ ID NO: 11705 - protein, 13 aa, Severe acute respiratory syndrome-related coronavirus
  REGION 1..13: note = Table B: HLA-DQA1*05:01-B1*03:01L HLA-DRB1*13:02L HLA-DRB1*08:04L HLA-DRB1*14:01L HLA-DRB1*08:01L HLA-DQA1*01-B1*05L HLA-DQA1*05:01-B1*02:01L HLA-DPA1*01:03-B1*104:01L HLA-DQA1*05:05-B1*03:01L
  source 1..13: note = Severe acute respiratory syndrome coronavirus 2
VTVYSHLLLVAAG

SEQ ID NO: 11706 - protein, 14 aa, Severe acute respiratory syndrome-related coronavirus
  REGION 1..14: note = Table B: HLA-DQA1*05:01-B1*03:01L HLA-DRB1*04:02L HLA-DRB1*04:04L HLA-DRB1*04:05L HLA-DRB1*01:02L HLA-DPA1*01:03-B1*03:01L HLA-DRB1*14:01L HLA-DQA1*05:05-B1*03:19L HLA-DQA1*05:01-B1*02:01L
  REGION 1..14: note = CONT. FROM ABOVE: HLA-DRB1*04:10L HLA-DRB1*12:01L HLA-DPA1*02:01 -B1*13:01L HLA-DQA1*03:01-B1*03:02L HLA-DPA1*01:03-B1*104:01L HL A-DQA1*05:05-B1*03:01L HLA-DRB1*14:17L HLA-DRB1*16:01L HLA-DQA1* 01:03-B1*06:01L HLA-DRB1*04:08L HLA-DQA1*02:01-B1*03:03L
  source 1..14: note = Severe acute respiratory syndrome coronavirus 2
SHLLLVAAGLEAPF

SEQ ID NO: 11707 - protein, 10 aa, Severe acute respiratory syndrome-related coronavirus
  REGION 1..10: note = Table B: HLA-DQA1*05:01-B1*03:01L HLA-DQA1*01:02-B1*06:02L HLA-DRB1*08:77L HLA-DPA1*01:03-B1*03:01M HLA-DRB1*03:01L HLA-DRB1*11:02L HLA-DQA1*01-B1*05L HLA-DQA1*05:05-B1*03:19M HLA-DQA1*05:01-B1*02:01M HLA-DRB4*01:01L
  REGION 1..10: note = CONT. FROM ABOVE: HLA-DPA1*01:03-B1*04:01L HLA-DQA1*05:05-B1*03: 116L HLA-DPA1*01:03-B1*104:01M HLA-DRB1*10:01L HLA-DRB1*16:01L H LA-DRB1*15:03L
  source 1..10: note = Severe acute respiratory syndrome coronavirus 2
GLEAPFLYLY

SEQ ID NO: 11708 - protein, 11 aa, Severe acute respiratory syndrome-related coronavirus
  REGION 1..11: note = Table B: HLA-DQA1*05:01-B1*03:01L HLA-DRB1*04:03L HLA-DRB1*13:02L HLA-DRB1*13:03L HLA-DRB1*01:03L HLA-DRB1*04:02L HLA-DQA1*01:02-B1*06:02L HLA-DRB1*01:02L HLA-DRB4*03:01NL HLA-DPA1*03:01-B1*04:02L HLA-DRB1*14:01L
  REGION 1..11: note = CONT. FROM ABOVE: HLA-DPA1*03:01-B1*105:01L HLA-DQA1*05:05-B1*03 :01L HLA-DRB1*14:17L HLA-DRB1*16:01L HLA-DRB1*04:08L
  source 1..11: note = Severe acute respiratory syndrome coronavirus 2
VYFLQSINFVR

SEQ ID NO: 11709 - protein, 12 aa, Severe acute respiratory syndrome-related coronavirus
  REGION 1..12: note = Table B: HLA-DQA1*05:01-B1*03:01L HLA-DRB1*01:03L HLA-DRB1*04:05L HLA-DRB1*01:02L HLA-DRB1*14:01L HLA-DPA1*01:03-B1*04:02L HLA-DPA1*01:03-B1*02:01L HLA-DRB1*04:08L
  source 1..12: note = Severe acute respiratory syndrome coronavirus 2
LQSINFVRIIMR

SEQ ID NO: 11710 - protein, 13 aa, Severe acute respiratory syndrome-related coronavirus
  REGION 1..13: note = Table B: HLA-DQA1*05:01-B1*03:01L HLA-DRB1*13:03L HLA-DRB1*01:03L HLA-DRB4*03:01NL HLA-DRB1*08:77L HLA-DRB3*02:01L HLA-DPA1*01:03-B1*04:01L HLA-DRB1*09:01L HLA-DRB3*01:01L HLA-DRB1*14:17L HLA-DRB1*07:01L HLA-DRB1*04:08L
  REGION 1..13: note = CONT. FROM ABOVE: HLA-DQA1*02:01-B1*03:03L
  source 1..13: note = Severe acute respiratory syndrome coronavirus 2
SKNPLLYDANYFL

SEQ ID NO: 11711 - protein, 16 aa, Severe acute respiratory syndrome-related coronavirus
  REGION 1..16: note = Table B: HLA-DQA1*05:01-B1*03:01L HLA-DRB1*13:02L HLA-DRB1*03:01L HLA-DRB1*11:02L HLA-DRB1*11:04L HLA-DRB1*14:02M HLA-DRB1*08:01L HLA-DRB1*11:01L HLA-DQA1*05:05-B1*03:19L HLA-DRB4*01:01L HLA-DQA1*05:05-B1*03:116L HLA-DRB1*09:01L
  REGION 1..16: note = CONT. FROM ABOVE: HLA-DRB3*01:01L HLA-DPA1*01:03-B1*104:01L HLA- DQA1*05:05-B1*03:01L HLA-DRB1*10:01L HLA-DRB1*08:02L HLA-DRB1*08 :03L HLA-DQA1*02:01-B1*03:03L
  source 1..16: note = Severe acute respiratory syndrome coronavirus 2
NPLLYDANYFLCWHTN

SEQ ID NO: 11712 - protein, 14 aa, Severe acute respiratory syndrome-related coronavirus
  REGION 1..14: note = Table B: HLA-DQA1*05:01-B1*03:01L HLA-DRB1*01:02L HLA-DPA1*01:03-B1*04:02L HLA-DQA1*02:01-B1*03:03L HLA-DRB1*15:03L
  source 1..14: note = Severe acute respiratory syndrome coronavirus 2
TNCYDYCIPYNSVT

SEQ ID NO: 11713 - protein, 10 aa, Severe acute respiratory syndrome-related coronavirus
  REGION 1..10: note = Table B: HLA-DQA1*05:01-B1*03:01L HLA-DRB1*13:03L HLA-DRB1*04:05L HLA-DQA1*01:02-B1*06:02L HLA-DRB1*01:01L HLA-DPA1*03:01-B1*04:02L HLA-DRB1*14:01L HLA-DQA1*01-B1*05L HLA-DQA1*05:05-B1*03:116M HLA-DPA1*02:01-B1*13:01M
  REGION 1..10: note = CONT. FROM ABOVE: HLA-DPA1*03:01-B1*105:01L HLA-DPA1*01:02-B1*04 :01L HLA-DRB1*16:01L HLA-DRB1*08:03L HLA-DRB1*15:03L
  source 1..10: note = Severe acute respiratory syndrome coronavirus 2
IPYNSVTSSI

SEQ ID NO: 11714 - protein, 14 aa, Severe acute respiratory syndrome-related coronavirus
  REGION 1..14: note = Table B: HLA-DQA1*05:01-B1*03:01L HLA-DRB1*13:02L HLA-DQA1*01:02-B1*06:02L HLA-DRB1*01:02L HLA-DRB4*03:01NL HLA-DRB1*14:01L HLA-DRB1*12:01L HLA-DRB1*14:54L HLA-DRB1*16:01L HLA-DQA1*01:03-B1*06:01L HLA-DRB1*15:03L
  source 1..14: note = Severe acute respiratory syndrome coronavirus 2
SSIVITSGDGTTSP

SEQ ID NO: 11715 - protein, 13 aa, Severe acute respiratory syndrome-related coronavirus
  REGION 1..13: note = Table B: HLA-DQA1*05:01-B1*03:01L HLA-DRB1*04:02L HLA-DRB4*03:01NL HLA-DQA1*05:05-B1*03:19L HLA-DQA1*05:05-B1*03:01L
  source 1..13: note = Severe acute respiratory syndrome coronavirus 2
IVITSGDGTTSPI

SEQ ID NO: 11716 - protein, 13 aa, Severe acute respiratory syndrome-related coronavirus
  REGION 1..13: note = Table B: HLA-DQA1*05:01-B1*03:01L HLA-DRB1*13:03L HLA-DRB1*01:03L HLA-DRB1*04:05L HLA-DRB1*01:02L HLA-DRB1*08:04L HLA-DQA1*01:01-B1*05:01L HLA-DRB1*12:01L HLA-DPA1*02:01-B1*13:01L HLA-DPA1*03:01-B1*105:01L
  REGION 1..13: note = CONT. FROM ABOVE: HLA-DRB1*16:01L HLA-DRB1*04:08L HLA-DRB1*08:03 L HLA-DRB1*15:03L
  source 1..13: note = Severe acute respiratory syndrome coronavirus 2
IGGYTEKWESGVK

SEQ ID NO: 11717 - protein, 15 aa, Severe acute respiratory syndrome-related coronavirus
  REGION 1..15: note = Table B: HLA-DQA1*05:01-B1*03:01L HLA-DRB1*01:03L HLA-DRB1*01:02L HLA-DRB1*08:01L HLA-DPA1*03:01-B1*105:01L HLA-DRB1*04:08L
  source 1..15: note = Severe acute respiratory syndrome coronavirus 2
TEKWESGVKDCVVLH

SEQ ID NO: 11718 - protein, 13 aa, Severe acute respiratory syndrome-related coronavirus
  REGION 1..13: note = Table B: HLA-DQA1*05:01-B1*03:01L HLA-DPA1*01:03-B1*03:01L HLA-DQA1*05:05-B1*03:01L HLA-DRB1*15:03L
  source 1..13: note = Severe acute respiratory syndrome coronavirus 2
ESGVKDCVVLHSY

SEQ ID NO: 11719 - protein, 14 aa, Severe acute respiratory syndrome-related coronavirus
  REGION 1..14: note = Table B: HLA-DQA1*05:01-B1*03:01L HLA-DRB1*04:03L HLA-DRB1*01:02L HLA-DQA1*05:05-B1*03:01L
  source 1..14: note = Severe acute respiratory syndrome coronavirus 2
SGVKDCVVLHSYFT

SEQ ID NO: 11720 - protein, 11 aa, Severe acute respiratory syndrome-related coronavirus
  REGION 1..11: note = Table B: HLA-DQA1*05:01-B1*03:01L HLA-DRB1*01:03L HLA-DRB1*12:01L HLA-DQA1*05:05-B1*03:01L
  source 1..11: note = Severe acute respiratory syndrome coronavirus 2
SYFTSDYYQLY

SEQ ID NO: 11721 - protein, 13 aa, Severe acute respiratory syndrome-related coronavirus
  REGION 1..13: note = Table B: HLA-DQA1*05:01-B1*03:01L HLA-DRB1*04:01L HLA-DRB1*13:02L HLA-DRB1*13:03L HLA-DRB1*01:01L HLA-DRB1*08:04L HLA-DRB1*08:77L HLA-DRB3*02:01L HLA-DPA1*01:03-B1*03:01L HLA-DPA1*03:01-B1*04:02L HLA-DRB1*11:04L HLA-DRB1*14:02L
  REGION 1..13: note = CONT. FROM ABOVE: HLA-DQA1*01:01-B1*05:01L HLA-DRB1*08:01L HLA-D RB5*01:01L HLA-DQA1*05:05-B1*03:19L HLA-DRB4*01:01L HLA-DPA1*01: 03-B1*04:01L HLA-DRB1*09:01L HLA-DPA1*01:03-B1*04:02L HLA-DRB1*1 2:02L HLA-DPA1*02:01-B1*13:01L HLA-DPA1*01:03-B1*104:01L
  REGION 1..13: note = CONT. FROM ABOVE: HLA-DPA1*01:02-B1*04:01L HLA-DRB1*07:01L HLA-D RB1*08:03L
  source 1..13: note = Severe acute respiratory syndrome coronavirus 2
YQLYSTQLSTDTG

SEQ ID NO: 11722 - protein, 14 aa, Severe acute respiratory syndrome-related coronavirus
  REGION 1..14: note = Table B: HLA-DQA1*05:01-B1*03:01L HLA-DQA1*05:05-B1*03:19L
  source 1..14: note = Severe acute respiratory syndrome coronavirus 2
QLYSTQLSTDTGVE

SEQ ID NO: 11723 - protein, 11 aa, Severe acute respiratory syndrome-related coronavirus
  REGION 1..11: note = Table B: HLA-DQA1*05:01-B1*03:01L HLA-DRB1*13:02L HLA-DRB1*01:03L HLA-DRB1*04:04L HLA-DQA1*01:02-B1*06:02L HLA-DRB1*01:02L HLA-DRB1*08:04L HLA-DPA1*01:03-B1*03:01L HLA-DRB1*14:01L HLA-DRB1*11:04L HLA-DQA1*01:01-B1*05:01L
  REGION 1..11: note = CONT. FROM ABOVE: HLA-DRB1*08:01L HLA-DPA1*01:03-B1*04:02L HLA-D RB1*12:01L HLA-DRB1*12:02L HLA-DPA1*02:01-B1*13:01L HLA-DRB1*14: 54L HLA-DQA1*05:05-B1*03:01L HLA-DRB1*10:01L HLA-DRB1*08:03L HLA -DRB1*15:03L
  source 1..11: note = Severe acute respiratory syndrome coronavirus 2
FIYNKIVDEPE

SEQ ID NO: 11724 - protein, 12 aa, Severe acute respiratory syndrome-related coronavirus
  REGION 1..12: note = Table B: HLA-DQA1*05:01-B1*03:01L HLA-DRB1*04:01L HLA-DRB1*13:02L HLA-DRB1*04:04L HLA-DRB1*01:02L HLA-DRB1*08:04L HLA-DPA1*01:03-B1*03:01L HLA-DRB1*14:01L HLA-DRB1*11:04L HLA-DRB1*12:02L HLA-DRB3*01:01L HLA-DPA1*03:01-B1*105:01L
  REGION 1..12: note = CONT. FROM ABOVE: HLA-DQA1*05:05-B1*03:01L HLA-DRB1*07:01L HLA-D RB1*10:01L HLA-DQA1*01:03-B1*06:01L HLA-DRB1*08:03L HLA-DRB1*15: 03L
  source 1..12: note = Severe acute respiratory syndrome coronavirus 2
IYNKIVDEPEEH

SEQ ID NO: 11725 - protein, 13 aa, Severe acute respiratory syndrome-related coronavirus
  REGION 1..13: note = Table B: HLA-DQA1*05:01-B1*03:01L HLA-DRB1*04:03L HLA-DRB1*13:03L HLA-DRB1*01:03L HLA-DRB1*04:02L HLA-DRB1*04:05L HLA-DQA1*01:01-B1*05:01L HLA-DRB1*08:01L HLA-DQA1*01-B1*05L HLA-DQA1*05:01-B1*02:01L HLA-DPA1*02:01-B1*13:01L
  REGION 1..13: note = CONT. FROM ABOVE: HLA-DPA1*03:01-B1*105:01L HLA-DQA1*05:05-B1*03 :01L HLA-DRB1*16:01L HLA-DRB1*04:08L
  source 1..13: note = Severe acute respiratory syndrome coronavirus 2
EPEEHVQIHTIDG

SEQ ID NO: 11726 - protein, 12 aa, Severe acute respiratory syndrome-related coronavirus
  REGION 1..12: note = Table B: HLA-DQA1*05:01-B1*03:01L HLA-DRB1*08:04L HLA-DQA1*01:01-B1*05:01L HLA-DRB1*08:01L HLA-DPA1*02:01-B1*13:01L HLA-DQA1*01:03-B1*06:01L
  source 1..12: note = Severe acute respiratory syndrome coronavirus 2
HVQIHTIDGSSG

SEQ ID NO: 11727 - protein, 10 aa, Severe acute respiratory syndrome-related coronavirus
  REGION 1..10: note = Table B: HLA-DQA1*05:01-B1*03:01L HLA-DQA1*01:02-B1*06:02L HLA-DQA1*05:05-B1*03:19L HLA-DQA1*05:05-B1*03:01L HLA-DQA1*01:03-B1*06:01L HLA-DQA1*02:01-B1*03:03L
  source 1..10: note = Severe acute respiratory syndrome coronavirus 2
SSGVVNPVME

SEQ ID NO: 11728 - protein, 10 aa, Severe acute respiratory syndrome-related coronavirus
  REGION 1..10: note = Table B: HLA-DQA1*05:01-B1*03:01L HLA-DRB1*13:03L HLA-DRB1*01:03L HLA-DQA1*01:02-B1*06:02L HLA-DRB1*08:77L HLA-DPA1*01:03-B1*03:01L HLA-DRB1*03:01L HLA-DRB1*14:02L HLA-DQA1*01-B1*05L HLA-DQA1*05:05-B1*03:19L
  REGION 1..10: note = CONT. FROM ABOVE: HLA-DQA1*05:01-B1*02:01L HLA-DRB4*01:01L HLA-D PA1*01:03-B1*04:01L HLA-DQA1*05:05-B1*03:116L HLA-DPA1*01:03-B1* 04:02L HLA-DRB1*12:01L HLA-DPA1*03:01-B1*105:01L HLA-DPA1*01:03- B1*104:01L HLA-DRB1*10:01L HLA-DRB1*16:01L
  REGION 1..10: note = CONT. FROM ABOVE: HLA-DQA1*01:03-B1*06:01L HLA-DQA1*02:01-B1*03: 03L HLA-DRB1*15:03L
  source 1..10: note = Severe acute respiratory syndrome coronavirus 2
VVNPVMEPIY

SEQ ID NO: 11729 - protein, 15 aa, Severe acute respiratory syndrome-related coronavirus
  REGION 1..15: note = Table B: HLA-DQA1*05:01-B1*03:01L HLA-DRB3*02:01L HLA-DPA1*01:03-B1*03:01L HLA-DQA1*05:05-B1*03:19L HLA-DQA1*01:03-B1*06:01L
  source 1..15: note = Severe acute respiratory syndrome coronavirus 2
NPVMEPIYDEPTTTT

SEQ ID NO: 11730 - protein, 14 aa, Severe acute respiratory syndrome-related coronavirus
  REGION 1..14: note = Table B: HLA-DQA1*05:01-B1*03:01L HLA-DRB1*13:02L HLA-DRB1*13:03L HLA-DRB1*01:03L HLA-DRB1*04:02L HLA-DRB1*04:04L HLA-DRB1*04:05L HLA-DQA1*01:02-B1*06:02L HLA-DRB1*01:02L HLA-DRB4*03:01NL HLA-DPA1*01:03-B1*03:01L
  REGION 1..14: note = CONT. FROM ABOVE: HLA-DQA1*01:01-B1*05:01L HLA-DQA1*05:05-B1*03: 19L HLA-DRB1*04:10L HLA-DRB1*12:01L HLA-DPA1*02:01-B1*13:01L HLA -DPA1*03:01-B1*105:01L HLA-DRB1*14:54L HLA-DQA1*05:05-B1*03:01L HLA-DRB1*14:17L HLA-DRB1*10:01L HLA-DRB1*16:01L
  REGION 1..14: note = CONT. FROM ABOVE: HLA-DQA1*01:03-B1*06:01L HLA-DRB1*04:08L HLA-D QA1*02:01-B1*03:03L HLA-DRB1*15:03L
  source 1..14: note = Severe acute respiratory syndrome coronavirus 2
EPIYDEPTTTTSVP

SEQ ID NO: 11731 - protein, 14 aa, Severe acute respiratory syndrome-related coronavirus
  REGION 1..14: note = Table B: HLA-DQA1*05:01-B1*03:01L HLA-DRB1*13:02L HLA-DRB1*13:03L HLA-DRB1*01:03L HLA-DRB1*04:02L HLA-DRB1*04:05L HLA-DQA1*01:02-B1*06:02L HLA-DRB1*01:02L HLA-DRB4*03:01NL HLA-DRB1*08:77L HLA-DPA1*01:03-B1*03:01L
  REGION 1..14: note = CONT. FROM ABOVE: HLA-DQA1*05:05-B1*03:19L HLA-DRB1*04:10L HLA-D RB1*12:01L HLA-DPA1*03:01-B1*105:01L HLA-DQA1*05:05-B1*03:01L HL A-DRB1*14:17L HLA-DRB1*16:01L HLA-DQA1*01:03-B1*06:01L HLA-DQA1* 02:01-B1*03:03L
  source 1..14: note = Severe acute respiratory syndrome coronavirus 2
PIYDEPTTTTSVPL

SEQ ID NO: 11732 - protein, 11 aa, Severe acute respiratory syndrome-related coronavirus
  REGION 1..11: note = Table B: HLA-DQA1*05:01-B1*03:01L HLA-DRB1*04:03L HLA-DRB1*13:02L HLA-DRB1*13:03L HLA-DRB1*01:03L HLA-DRB1*04:02L HLA-DRB1*04:05L HLA-DQA1*01:02-B1*06:02L HLA-DRB4*03:01NL HLA-DRB1*08:77L HLA-DRB3*02:01L HLA-DPA1*01:03-B1*03:01L
  REGION 1..11: note = CONT. FROM ABOVE: HLA-DPA1*03:01-B1*04:02L HLA-DRB1*14:01L HLA-D RB1*14:02L HLA-DQA1*05:05-B1*03:19L HLA-DPA1*01:03-B1*04:01L HLA -DRB1*09:01L HLA-DPA1*01:03-B1*04:02L HLA-DRB1*12:01L HLA-DPA1*0 2:01-B1*13:01L HLA-DPA1*03:01-B1*105:01L
  REGION 1..11: note = CONT. FROM ABOVE: HLA-DQA1*05:05-B1*03:01L HLA-DRB1*14:17L HLA-D PA1*01:02-B1*04:01L HLA-DRB1*07:01L HLA-DRB1*16:01L HLA-DQA1*01: 03-B1*06:01L HLA-DQA1*02:01-B1*03:03L HLA-DRB1*15:03L
  source 1..11: note = Severe acute respiratory syndrome coronavirus 2
YSFVSEETGTL

SEQ ID NO: 11733 - protein, 12 aa, Severe acute respiratory syndrome-related coronavirus
  REGION 1..12: note = Table B: HLA-DQA1*05:01-B1*03:01L HLA-DRB1*13:02L HLA-DRB1*01:03L HLA-DRB1*04:02L HLA-DRB1*04:05L HLA-DQA1*01:02-B1*06:02L HLA-DRB1*01:01L HLA-DRB1*01:02L HLA-DRB4*03:01NL HLA-DRB1*08:77L HLA-DRB1*14:02L
  REGION 1..12: note = CONT. FROM ABOVE: HLA-DQA1*01-B1*05L HLA-DRB1*12:01L HLA-DPA1*03 :01-B1*105:01L HLA-DRB1*14:54L HLA-DQA1*05:05-B1*03:01L HLA-DRB1 *14:17L HLA-DRB1*10:01L HLA-DRB1*04:08L
  source 1..12: note = Severe acute respiratory syndrome coronavirus 2
FVSEETGTLIVN

SEQ ID NO: 11734 - protein, 10 aa, Severe acute respiratory syndrome-related coronavirus
  REGION 1..10: note = Table B: HLA-DQA1*05:01-B1*03:01L HLA-DQA1*01:02-B1*06:02L HLA-DQA1*05:05-B1*03:19L HLA-DQA1*05:01-B1*02:01L HLA-DPA1*03:01-B1*105:01L HLA-DQA1*01:03-B1*06:01L HLA-DQA1*02:01-B1*03:03L HLA-DRB1*15:03L
  source 1..10: note = Severe acute respiratory syndrome coronavirus 2
VNVSLVKPSF

SEQ ID NO: 11735 - protein, 10 aa, Severe acute respiratory syndrome-related coronavirus
  REGION 1..10: note = Table B: HLA-DQA1*05:01-B1*03:01L HLA-DRB1*13:03L HLA-DRB1*01:03L HLA-DQA1*01:02-B1*06:02L HLA-DRB1*08:77L HLA-DPA1*01:03-B1*03:01L HLA-DPA1*03:01-B1*04:02L HLA-DRB1*03:01L HLA-DRB1*14:01L HLA-DRB1*14:02L
  REGION 1..10: note = CONT. FROM ABOVE: HLA-DQA1*01-B1*05L HLA-DQA1*05:05-B1*03:19L HL A-DQA1*05:01-B1*02:01L HLA-DRB4*01:01L HLA-DPA1*01:03-B1*04:01L HLA-DPA1*01:03-B1*04:02L HLA-DRB1*12:01L HLA-DPA1*02:01-B1*13:01 L HLA-DPA1*03:01-B1*105:01L HLA-DPA1*01:03-B1*104:01L
  REGION 1..10: note = CONT. FROM ABOVE: HLA-DQA1*05:05-B1*03:01L HLA-DPA1*01:02-B1*04: 01L HLA-DRB1*10:01L HLA-DRB1*16:01L HLA-DQA1*01:03-B1*06:01L HLA -DQA1*02:01-B1*03:03L HLA-DRB1*15:03L
  source 1..10: note = Severe acute respiratory syndrome coronavirus 2
NVSLVKPSFY

SEQ ID NO: 11736 - protein, 12 aa, Severe acute respiratory syndrome-related coronavirus
  REGION 1..12: note = Table B: HLA-DQA1*05:01-B1*03:01L HLA-DRB1*13:02L HLA-DRB1*04:02L HLA-DRB1*04:05L HLA-DRB1*01:02L HLA-DRB1*08:04L HLA-DRB1*14:01L HLA-DRB1*11:04L HLA-DRB1*11:01L HLA-DRB1*12:01L HLA-DRB3*01:01L HLA-DPA1*02:01-B1*13:01L HLA-DRB1*14:54L
  REGION 1..12: note = CONT. FROM ABOVE: HLA-DRB1*14:17L HLA-DRB1*08:03L HLA-DRB1*15:03 L
  source 1..12: note = Severe acute respiratory syndrome coronavirus 2
KPSFYVYSRVKN

SEQ ID NO: 11737 - protein, 10 aa, Severe acute respiratory syndrome-related coronavirus
  REGION 1..10: note = Table B: HLA-DQA1*05:01-B1*03:01L HLA-DRB1*04:03L HLA-DRB1*01:03L HLA-DQA1*01:02-B1*06:02L HLA-DRB1*01:02L HLA-DPA1*03:01-B1*04:02L HLA-DPA1*01:03-B1*04:01L HLA-DPA1*01:03-B1*04:02L HLA-DRB1*12:01L
  REGION 1..10: note = CONT. FROM ABOVE: HLA-DPA1*03:01-B1*105:01L HLA-DQA1*03:01-B1*03 :02L HLA-DPA1*01:02-B1*04:01L HLA-DRB1*16:01L HLA-DQA1*01:03-B1* 06:01L HLA-DRB1*04:08L HLA-DQA1*02:01-B1*03:03L HLA-DRB1*15:03L
  source 1..10: note = Severe acute respiratory syndrome coronavirus 2
YVYSRVKNLN

SEQ ID NO: 11738 - protein, 11 aa, Severe acute respiratory syndrome-related coronavirus
  REGION 1..11: note = Table B: HLA-DQA1*05:01-B1*03:01L HLA-DRB1*04:03L HLA-DRB1*13:03L HLA-DRB1*01:03L HLA-DRB1*04:02L HLA-DRB1*04:04L HLA-DRB1*04:05L HLA-DRB1*01:02L HLA-DRB4*03:01NL HLA-DRB1*14:01L HLA-DRB1*04:10L HLA-DRB1*12:01L HLA-DQA1*03:01-B1*03:02L
  REGION 1..11: note = CONT. FROM ABOVE: HLA-DRB1*14:54L HLA-DRB1*14:17L HLA-DRB1*16:01 L HLA-DRB1*04:08L HLA-DQA1*02:01-B1*03:03L HLA-DRB1*15:03L
  source 1..11: note = Severe acute respiratory syndrome coronavirus 2
VKNLNSSRVPD

SEQ ID NO: 11739 - protein, 10 aa, Severe acute respiratory syndrome-related coronavirus
  REGION 1..10: note = Table B: HLA-DQA1*05:01-B1*03:01L HLA-DRB1*04:03L HLA-DRB1*13:02L HLA-DRB1*13:03L HLA-DRB1*01:03L HLA-DRB1*04:02L HLA-DQA1*01:02-B1*06:02L HLA-DRB1*01:01L HLA-DRB4*03:01NL HLA-DRB1*11:04L HLA-DQA1*01:01-B1*05:01L HLA-DRB1*08:01L
  REGION 1..10: note = CONT. FROM ABOVE: HLA-DRB5*01:01L HLA-DRB1*12:01L HLA-DPA1*03:01 -B1*105:01L HLA-DQA1*03:01-B1*03:02M HLA-DQA1*05:05-B1*03:01L HL A-DRB1*14:17L HLA-DPA1*01:02-B1*04:01L HLA-DRB1*16:01L HLA-DQA1* 01:03-B1*06:01L HLA-DQA1*02:01-B1*03:03L
  source 1..10: note = Severe acute respiratory syndrome coronavirus 2
GTITVEELKK

SEQ ID NO: 11740 - protein, 10 aa, Severe acute respiratory syndrome-related coronavirus
  REGION 1..10: note = Table B: HLA-DQA1*05:01-B1*03:01L HLA-DRB1*08:77L HLA-DPA1*03:01-B1*04:02L HLA-DQA1*05:05-B1*03:19L HLA-DQA1*05:01-B1*02:01L HLA-DRB4*01:01L HLA-DPA1*01:03-B1*04:01L HLA-DPA1*01:03-B1*104:01L
  REGION 1..10: note = CONT. FROM ABOVE: HLA-DRB1*15:03L
  source 1..10: note = Severe acute respiratory syndrome coronavirus 2
LEQWNLVIGF

SEQ ID NO: 11741 - protein, 10 aa, Severe acute respiratory syndrome-related coronavirus
  REGION 1..10: note = Table B: HLA-DQA1*05:01-B1*03:01L HLA-DRB1*04:03L HLA-DRB1*13:03L HLA-DRB1*01:03L HLA-DQA1*01:02-B1*06:02L HLA-DRB1*08:01L HLA-DRB1*12:01L HLA-DQA1*03:01-B1*03:02L HLA-DRB1*14:17L HLA-DPA1*01:02-B1*04:01L HLA-DRB1*16:01L
  REGION 1..10: note = CONT. FROM ABOVE: HLA-DQA1*01:03-B1*06:01L HLA-DRB1*04:08L HLA-D QA1*02:01-B1*03:03L
  source 1..10: note = Severe acute respiratory syndrome coronavirus 2
LQFAYANRNR

SEQ ID NO: 11742 - protein, 10 aa, Severe acute respiratory syndrome-related coronavirus
  REGION 1..10: note = Table B: HLA-DQA1*05:01-B1*03:01L HLA-DQA1*01:02-B1*06:02L HLA-DPA1*03:01-B1*04:02L HLA-DRB1*14:01L HLA-DRB1*14:02L HLA-DQA1*05:05-B1*03:19L HLA-DQA1*05:01-B1*02:01L HLA-DPA1*01:03-B1*04:01L HLA-DPA1*02:01-B1*13:01L
  REGION 1..10: note = CONT. FROM ABOVE: HLA-DPA1*03:01-B1*105:01L HLA-DQA1*01:03-B1*06 :01L HLA-DQA1*02:01-B1*03:03L HLA-DRB1*15:03L
  source 1..10: note = Severe acute respiratory syndrome coronavirus 2
VLAAVYRINW

SEQ ID NO: 11743 - protein, 15 aa, Severe acute respiratory syndrome-related coronavirus
  REGION 1..15: note = Table B: HLA-DQA1*05:01-B1*03:01L HLA-DRB1*07:01L
  source 1..15: note = Severe acute respiratory syndrome coronavirus 2
LSYFIASFRLFARTR

SEQ ID NO: 11744 - protein, 16 aa, Severe acute respiratory syndrome-related coronavirus
  REGION 1..16: note = Table B: HLA-DQA1*05:01-B1*03:01L HLA-DRB1*04:01L HLA-DRB1*04:03L HLA-DRB1*13:02L HLA-DRB1*04:04L HLA-DRB1*01:01L HLA-DRB1*11:04L HLA-DRB1*08:01L HLA-DRB1*11:01L HLA-DRB3*01:01L HLA-DQA1*05:05-B1*03:01L HLA-DRB1*10:01L
  source 1..16: note = Severe acute respiratory syndrome coronavirus 2
FRLFARTRSMWSFNPE

SEQ ID NO: 11745 - protein, 12 aa, Severe acute respiratory syndrome-related coronavirus
  REGION 1..12: note = Table B: HLA-DQA1*05:01-B1*03:01L HLA-DRB1*04:03L HLA-DRB1*01:03L HLA-DQA1*01:02-B1*06:02L HLA-DRB1*01:02L HLA-DPA1*03:01-B1*105:01L HLA-DRB1*16:01L HLA-DQA1*01:03-B1*06:01L
  source 1..12: note = Severe acute respiratory syndrome coronavirus 2
VPLHGTILTRPL

SEQ ID NO: 11746 - protein, 13 aa, Severe acute respiratory syndrome-related coronavirus
  REGION 1..13: note = Table B: HLA-DQA1*05:01-B1*03:01L HLA-DRB1*04:02L HLA-DRB1*14:01L HLA-DPA1*03:01-B1*105:01L HLA-DQA1*01:03-B1*06:01L
  source 1..13: note = Severe acute respiratory syndrome coronavirus 2
ESELVIGAVILRG

SEQ ID NO: 11747 - protein, 10 aa, Severe acute respiratory syndrome-related coronavirus
  REGION 1..10: note = Table B: HLA-DQA1*05:01-B1*03:01L HLA-DQA1*01:02-B1*06:02L HLA-DQA1*05:05-B1*03:19L HLA-DPA1*03:01-B1*105:01L HLA-DQA1*03:01-B1*03:02L HLA-DQA1*05:05-B1*03:01L HLA-DQA1*01:03-B1*06:01L HLA-DQA1*02:01-B1*03:03L
  source 1..10: note = Severe acute respiratory syndrome coronavirus 2
VIGAVILRGH

SEQ ID NO: 11748 - protein, 11 aa, Severe acute respiratory syndrome-related coronavirus
  REGION 1..11: note = Table B: HLA-DQA1*05:01-B1*03:01L
  source 1..11: note = Severe acute respiratory syndrome coronavirus 2
IGAVILRGHLR

SEQ ID NO: 11749 - protein, 13 aa, Severe acute respiratory syndrome-related coronavirus
  REGION 1..13: note = Table B: HLA-DQA1*05:01-B1*03:01L HLA-DRB1*01:03L HLA-DRB4*03:01NL HLA-DPA1*01:03-B1*03:01L HLA-DQA1*01-B1*05L HLA-DQA1*05:01-B1*02:01L HLA-DRB1*12:01L HLA-DQA1*05:05-B1*03:01L
  source 1..13: note = Severe acute respiratory syndrome coronavirus 2
DLPKEITVATSRT

SEQ ID NO: 11750 - protein, 10 aa, Severe acute respiratory syndrome-related coronavirus
  REGION 1..10: note = Table B: HLA-DQA1*05:01-B1*03:01L HLA-DRB1*04:03L HLA-DRB1*13:02L HLA-DRB1*13:03L HLA-DRB1*01:03L HLA-DQA1*01:02-B1*06:02L HLA-DRB4*03:01NL HLA-DRB1*08:77L HLA-DPA1*01:03-B1*03:01L HLA-DPA1*03:01-B1*04:02L
  REGION 1..10: note = CONT. FROM ABOVE: HLA-DRB1*03:01L HLA-DRB1*14:01L HLA-DRB1*11:02 L HLA-DRB1*14:02L HLA-DRB1*11:01L HLA-DQA1*01-B1*05L HLA-DQA1*05 :05-B1*03:19M HLA-DQA1*05:01-B1*02:01L HLA-DRB4*01:01L HLA-DPA1* 01:03-B1*04:01L HLA-DQA1*05:05-B1*03:116L
  REGION 1..10: note = CONT. FROM ABOVE: HLA-DPA1*01:03-B1*04:02L HLA-DRB1*12:01L HLA-D PA1*02:01-B1*13:01L HLA-DPA1*03:01-B1*105:01L HLA-DPA1*01:03-B1* 104:01L HLA-DQA1*05:05-B1*03:01L HLA-DPA1*01:02-B1*04:01L HLA-DR B1*10:01L HLA-DRB1*16:01L HLA-DQA1*01:03-B1*06:01L
  REGION 1..10: note = CONT. FROM ABOVE: HLA-DRB1*08:02L HLA-DQA1*02:01-B1*03:03L HLA-D RB1*15:03L
  source 1..10: note = Severe acute respiratory syndrome coronavirus 2
VATSRTLSYY

SEQ ID NO: 11751 - protein, 11 aa, Severe acute respiratory syndrome-related coronavirus
  REGION 1..11: note = Table B: HLA-DQA1*05:01-B1*03:01L HLA-DRB1*12:01L HLA-DRB1*04:08L HLA-DRB1*15:03L
  source 1..11: note = Severe acute respiratory syndrome coronavirus 2
YYKLGASQRVA

SEQ ID NO: 11752 - protein, 12 aa, Severe acute respiratory syndrome-related coronavirus
  REGION 1..12: note = Table B: HLA-DQA1*05:01-B1*03:01L HLA-DRB1*04:05L HLA-DQA1*01:02-B1*06:02L HLA-DRB1*14:01L HLA-DQA1*01:01-B1*05:01L HLA-DRB1*08:01L HLA-DQA1*05:05-B1*03:19L HLA-DQA1*05:01-B1*02:01L
  REGION 1..12: note = CONT. FROM ABOVE: HLA-DRB1*04:10L HLA-DPA1*03:01-B1*105:01L HLA- DRB1*14:54L HLA-DQA1*05:05-B1*03:01L
  source 1..12: note = Severe acute respiratory syndrome coronavirus 2
LGASQRVAGDSG

SEQ ID NO: 11753 - protein, 13 aa, Severe acute respiratory syndrome-related coronavirus
  REGION 1..13: note = Table B: HLA-DQA1*05:01-B1*03:01L
  source 1..13: note = Severe acute respiratory syndrome coronavirus 2
GASQRVAGDSGFA

SEQ ID NO: 11754 - protein, 11 aa, Severe acute respiratory syndrome-related coronavirus
  REGION 1..11: note = Table B: HLA-DQA1*05:01-B1*03:01L HLA-DRB1*04:01L HLA-DRB1*04:03L HLA-DRB1*13:02L HLA-DRB1*01:03M HLA-DRB4*03:01NL HLA-DRB1*08:77M HLA-DPA1*01:03-B1*03:01L HLA-DPA1*03:01-B1*04:02L HLA-DRB1*03:01M HLA-DRB1*14:01L
  REGION 1..11: note = CONT. FROM ABOVE: HLA-DRB1*11:02L HLA-DRB1*11:03L HLA-DRB1*14:02 M HLA-DRB1*11:01L HLA-DQA1*01-B1*05L HLA-DRB4*01:01L HLA-DPA1*01 :03-B1*04:01L HLA-DQA1*05:05-B1*03:116L HLA-DPA1*01:03-B1*04:02M HLA-DRB1*12:01L HLA-DPA1*02:01-B1*13:01L
  REGION 1..11: note = CONT. FROM ABOVE: HLA-DPA1*01:03-B1*104:01L HLA-DQA1*05:05-B1*03 :01L HLA-DPA1*01:02-B1*04:01L HLA-DRB1*10:01L HLA-DQA1*01:03-B1* 06:01L HLA-DRB1*08:02L
  source 1..11: note = Severe acute respiratory syndrome coronavirus 2
RVAGDSGFAAY

SEQ ID NO: 11755 - protein, 10 aa, Severe acute respiratory syndrome-related coronavirus
  REGION 1..10: note = Table B: HLA-DQA1*05:01-B1*03:01L HLA-DRB1*13:03L HLA-DQA1*01:02-B1*06:02L HLA-DPA1*01:03-B1*03:01L HLA-DRB1*03:01L HLA-DQA1*05:05-B1*03:19L HLA-DQA1*05:01-B1*02:01L HLA-DPA1*03:01-B1*105:01L
  REGION 1..10: note = CONT. FROM ABOVE: HLA-DRB1*16:01L HLA-DQA1*01:03-B1*06:01L HLA-D QA1*02:01-B1*03:03L
  source 1..10: note = Severe acute respiratory syndrome coronavirus 2
DSGFAAYSRY

SEQ ID NO: 11756 - protein, 10 aa, Severe acute respiratory syndrome-related coronavirus
  REGION 1..10: note = Table B: HLA-DQA1*05:01-B1*03:01L HLA-DRB1*01:03L HLA-DQA1*01:02-B1*06:02L HLA-DQA1*03:01-B1*03:02L HLA-DPA1*01:02-B1*04:01L HLA-DQA1*01:03-B1*06:01L HLA-DQA1*02:01-B1*03:03L
  source 1..10: note = Severe acute respiratory syndrome coronavirus 2
SGFAAYSRYR

SEQ ID NO: 11757 - protein, 13 aa, Severe acute respiratory syndrome-related coronavirus
  REGION 1..13: note = Table B: HLA-DQA1*05:01-B1*03:01L HLA-DRB1*13:02L HLA-DRB1*11:01L HLA-DRB3*01:01L HLA-DPA1*02:01-B1*13:01L HLA-DPA1*03:01-B1*105:01L
  source 1..13: note = Severe acute respiratory syndrome coronavirus 2
FAAYSRYRIGNYK

SEQ ID NO: 11758 - protein, 13 aa, Severe acute respiratory syndrome-related coronavirus
  REGION 1..13: note = Table B: HLA-DQA1*05:01-B1*03:01L HLA-DQA1*01:02-B1*06:02L HLA-DRB1*08:77L HLA-DRB3*02:01L HLA-DPA1*01:03-B1*03:01L HLA-DRB1*03:01L HLA-DRB1*11:03L HLA-DRB1*14:02L HLA-DQA1*01:01-B1*05:01L HLA-DRB1*08:01L HLA-DRB1*11:01L
  REGION 1..13: note = CONT. FROM ABOVE: HLA-DRB5*01:01L HLA-DQA1*05:05-B1*03:19L HLA-D RB4*01:01L HLA-DRB1*12:02L HLA-DRB3*01:01L HLA-DPA1*02:01-B1*13: 01L HLA-DPA1*03:01-B1*105:01L HLA-DQA1*05:05-B1*03:01L HLA-DRB1* 07:01L HLA-DRB1*10:01L HLA-DQA1*01:03-B1*06:01L HLA-DRB1*08:03L
  source 1..13: note = Severe acute respiratory syndrome coronavirus 2
YKLNTDHSSSSDN

SEQ ID NO: 11759 - protein, 12 aa, Severe acute respiratory syndrome-related coronavirus
  REGION 1..12: note = Table B: HLA-DQA1*05:01-B1*03:01L HLA-DRB1*13:03L HLA-DRB1*01:03L HLA-DRB1*04:05L HLA-DRB1*14:02L HLA-DRB1*12:01L HLA-DQA1*05:05-B1*03:01L HLA-DQA1*01:03-B1*06:01L
  source 1..12: note = Severe acute respiratory syndrome coronavirus 2
NTDHSSSSDNIA

SEQ ID NO: 11760 - protein, 12 aa, Severe acute respiratory syndrome-related coronavirus
  REGION 1..12: note = Table B: HLA-DQA1*05:01-B1*03:01L HLA-DRB1*04:03L HLA-DRB1*13:02L HLA-DRB1*01:03L HLA-DRB1*04:05L HLA-DRB1*01:02L HLA-DRB1*08:04L HLA-DPA1*01:03-B1*03:01L HLA-DRB1*14:01L HLA-DRB1*08:01L HLA-DQA1*01-B1*05L HLA-DQA1*05:01-B1*02:01L
  REGION 1..12: note = CONT. FROM ABOVE: HLA-DRB1*12:01L HLA-DPA1*01:03-B1*02:01L HLA-D QA1*05:05-B1*03:01L HLA-DRB1*04:08L
  source 1..12: note = Severe acute respiratory syndrome coronavirus 2
FHLVDFQVTIAE

SEQ ID NO: 11761 - protein, 11 aa, Severe acute respiratory syndrome-related coronavirus
  REGION 1..11: note = Table B: HLA-DQA1*05:01-B1*03:01L HLA-DRB1*13:02L HLA-DPA1*03:01-B1*04:02L HLA-DPA1*01:03-B1*04:01L HLA-DPA1*03:01-B1*105:01L HLA-DQA1*03:01-B1*03:02L HLA-DPA1*01:02-B1*04:01L HLA-DQA1*01:03-B1*06:01L
  source 1..11: note = Severe acute respiratory syndrome coronavirus 2
VDFQVTIAEIL

SEQ ID NO: 11762 - protein, 11 aa, Severe acute respiratory syndrome-related coronavirus
  REGION 1..11: note = Table B: HLA-DQA1*05:01-B1*03:01L HLA-DPA1*03:01-B1*04:02L HLA-DQA1*05:05-B1*03:19L HLA-DRB4*01:01L HLA-DRB1*12:01L
  source 1..11: note = Severe acute respiratory syndrome coronavirus 2
AEILLIIMRTF

SEQ ID NO: 11763 - protein, 12 aa, Severe acute respiratory syndrome-related coronavirus
  REGION 1..12: note = Table B: HLA-DQA1*05:01-B1*03:01L HLA-DRB1*04:03L HLA-DRB1*13:02L HLA-DRB1*04:05L HLA-DRB1*01:02L HLA-DRB1*08:04L HLA-DRB1*14:01L HLA-DRB1*14:02L HLA-DRB1*08:01L HLA-DRB1*11:01L HLA-DRB1*12:01L HLA-DPA1*01:03-B1*02:01L
  REGION 1..12: note = CONT. FROM ABOVE: HLA-DQA1*05:05-B1*03:01L
  source 1..12: note = Severe acute respiratory syndrome coronavirus 2
RTFKVSIWNLDY

SEQ ID NO: 11764 - protein, 12 aa, Severe acute respiratory syndrome-related coronavirus
  REGION 1..12: note = Table B: HLA-DQA1*05:01-B1*03:01L HLA-DRB1*13:02L HLA-DRB1*01:03L HLA-DRB1*04:05L HLA-DRB1*01:02L HLA-DRB1*08:04L HLA-DRB3*02:01L HLA-DPA1*01:03-B1*03:01L HLA-DRB1*14:01L HLA-DQA1*05:05-B1*03:19L HLA-DPA1*01:03-B1*04:01L
  REGION 1..12: note = CONT. FROM ABOVE: HLA-DPA1*01:03-B1*04:02L HLA-DPA1*02:01-B1*13: 01L HLA-DQA1*05:05-B1*03:01L HLA-DRB1*14:17L HLA-DRB1*04:08L
  source 1..12: note = Severe acute respiratory syndrome coronavirus 2
NLDYIINLIIKN

SEQ ID NO: 11765 - protein, 13 aa, Severe acute respiratory syndrome-related coronavirus
  REGION 1..13: note = Table B: HLA-DQA1*05:01-B1*03:01L HLA-DRB3*02:01L HLA-DPA1*01:03-B1*03:01L HLA-DRB1*11:03L HLA-DQA1*05:01-B1*02:01L HLA-DRB1*12:02L HLA-DPA1*03:01-B1*105:01L
  source 1..13: note = Severe acute respiratory syndrome coronavirus 2
INLIIKNLSKSLT

SEQ ID NO: 11766 - protein, 12 aa, Severe acute respiratory syndrome-related coronavirus
  REGION 1..12: note = Table B: HLA-DQA1*05:01-B1*03:01L HLA-DRB1*04:05L HLA-DQA1*01:02-B1*06:02L HLA-DRB3*02:01L HLA-DPA1*03:01-B1*04:02L HLA-DRB1*11:03L HLA-DRB1*11:04L HLA-DRB1*14:02L HLA-DRB1*08:01L HLA-DRB1*11:01L HLA-DRB1*12:02L
  REGION 1..12: note = CONT. FROM ABOVE: HLA-DRB3*01:01L HLA-DPA1*03:01-B1*105:01L HLA- DQA1*03:01-B1*03:02L HLA-DRB1*08:03L
  source 1..12: note = Severe acute respiratory syndrome coronavirus 2
LIIKNLSKSLTE

SEQ ID NO: 11767 - protein, 12 aa, Severe acute respiratory syndrome-related coronavirus
  REGION 1..12: note = Table B: HLA-DQA1*05:01-B1*03:01L HLA-DRB1*04:05L HLA-DQA1*01:02-B1*06:02L HLA-DRB3*02:01L HLA-DPA1*01:03-B1*03:01L HLA-DPA1*03:01-B1*04:02L HLA-DRB1*11:03L HLA-DRB1*11:04L HLA-DRB1*14:02L HLA-DRB1*08:01L
  REGION 1..12: note = CONT. FROM ABOVE: HLA-DRB1*11:01L HLA-DQA1*05:05-B1*03:19L HLA-D RB1*12:02L HLA-DRB3*01:01L HLA-DPA1*02:01-B1*13:01L HLA-DPA1*03: 01-B1*105:01L HLA-DQA1*03:01-B1*03:02L HLA-DQA1*05:05-B1*03:01L HLA-DPA1*01:02-B1*04:01L HLA-DRB1*08:03L
  REGION 1..12: note = CONT. FROM ABOVE: HLA-DQA1*02:01-B1*03:03L
  source 1..12: note = Severe acute respiratory syndrome coronavirus 2
IIKNLSKSLTEN

SEQ ID NO: 11768 - protein, 10 aa, Severe acute respiratory syndrome-related coronavirus
  REGION 1..10: note = Table B: HLA-DQA1*05:01-B1*03:01L HLA-DRB1*13:03L HLA-DRB1*01:03L HLA-DQA1*01:02-B1*06:02L HLA-DRB1*08:77L HLA-DPA1*01:03-B1*03:01L HLA-DRB1*03:01L HLA-DRB1*14:02L HLA-DQA1*01-B1*05L HLA-DQA1*05:05-B1*03:19L
  REGION 1..10: note = CONT. FROM ABOVE: HLA-DQA1*05:01-B1*02:01L HLA-DPA1*01:03-B1*04: 01L HLA-DPA1*01:03-B1*04:02L HLA-DRB1*12:01L HLA-DPA1*03:01-B1*1 05:01L HLA-DPA1*01:03-B1*104:01L HLA-DPA1*01:02-B1*04:01L HLA-DR B1*16:01L HLA-DQA1*01:03-B1*06:01L HLA-DRB1*08:02L
  REGION 1..10: note = CONT. FROM ABOVE: HLA-DQA1*02:01-B1*03:03L HLA-DRB1*15:03L
  source 1..10: note = Severe acute respiratory syndrome coronavirus 2
LSKSLTENKY

SEQ ID NO: 11769 - protein, 14 aa, Severe acute respiratory syndrome-related coronavirus
  REGION 1..14: note = Table B: HLA-DQA1*05:01-B1*03:01L HLA-DRB1*13:02L HLA-DRB1*01:02L HLA-DPA1*01:03-B1*03:01L HLA-DPA1*03:01-B1*04:02L HLA-DQA1*05:05-B1*03:19L HLA-DQA1*05:05-B1*03:01L
  source 1..14: note = Severe acute respiratory syndrome coronavirus 2
LTENKYSQLDEEQP

SEQ ID NO: 11770 - protein, 14 aa, Severe acute respiratory syndrome-related coronavirus
  REGION 1..14: note = Table B: HLA-DQA1*05:01-B1*03:01L HLA-DRB1*13:02L HLA-DPA1*01:03-B1*03:01L HLA-DRB1*14:02L HLA-DQA1*05:05-B1*03:01L HLA-DRB1*08:03L
  source 1..14: note = Severe acute respiratory syndrome coronavirus 2
TENKYSQLDEEQPM

SEQ ID NO: 11771 - protein, 14 aa, Severe acute respiratory syndrome-related coronavirus
  REGION 1..14: note = Table B: HLA-DQA1*05:01-B1*03:01L HLA-DRB1*04:01L HLA-DRB1*13:02L HLA-DRB1*04:04L HLA-DRB3*02:01L HLA-DPA1*01:03-B1*03:01L HLA-DPA1*03:01-B1*04:02L HLA-DRB1*14:01L HLA-DRB1*14:02L HLA-DQA1*05:05-B1*03:19L
  REGION 1..14: note = CONT. FROM ABOVE: HLA-DRB1*09:01L HLA-DPA1*01:03-B1*04:02L HLA-D RB1*12:02L HLA-DRB3*01:01L HLA-DPA1*01:03-B1*104:01L HLA-DRB1*07 :01L HLA-DRB1*10:01L HLA-DRB1*08:03L
  source 1..14: note = Severe acute respiratory syndrome coronavirus 2
ENKYSQLDEEQPME

SEQ ID NO: 11772 - protein, 12 aa, Severe acute respiratory syndrome-related coronavirus
  REGION 1..12: note = Table B: HLA-DQA1*05:01-B1*03:01L HLA-DPA1*03:01-B1*04:02L HLA-DQA1*05:05-B1*03:01L HLA-DQA1*02:01-B1*03:03L
  source 1..12: note = Severe acute respiratory syndrome coronavirus 2
ITLATCELYHYQ

SEQ ID NO: 11773 - protein, 12 aa, Severe acute respiratory syndrome-related coronavirus
  REGION 1..12: note = Table B: HLA-DQA1*05:01-B1*03:01L HLA-DQA1*01:02-B1*06:02L HLA-DQA1*01-B1*05L HLA-DQA1*05:05-B1*03:19L HLA-DQA1*05:01-B1*02:01L HLA-DQA1*05:05-B1*03:01L
  source 1..12: note = Severe acute respiratory syndrome coronavirus 2
EGNSPFHPLADN

SEQ ID NO: 11774 - protein, 10 aa, Severe acute respiratory syndrome-related coronavirus
  REGION 1..10: note = Table B: HLA-DQA1*05:01-B1*03:01L HLA-DRB1*04:03L HLA-DRB1*01:03L HLA-DRB1*04:05L HLA-DQA1*01:02-B1*06:02L HLA-DRB1*01:01L HLA-DRB1*01:02L HLA-DQA1*01:01-B1*05:01L HLA-DQA1*01-B1*05L HLA-DQA1*05:01-B1*02:01L HLA-DRB1*12:01L
  REGION 1..10: note = CONT. FROM ABOVE: HLA-DPA1*02:01-B1*13:01L HLA-DPA1*03:01-B1*105 :01L HLA-DPA1*01:02-B1*04:01L HLA-DRB1*16:01L HLA-DQA1*01:03-B1* 06:01L HLA-DQA1*02:01-B1*03:03L HLA-DRB1*15:03L
  source 1..10: note = Severe acute respiratory syndrome coronavirus 2
PFHPLADNKF

SEQ ID NO: 11775 - protein, 10 aa, Severe acute respiratory syndrome-related coronavirus
  REGION 1..10: note = Table B: HLA-DQA1*05:01-B1*03:01L HLA-DRB1*13:03L HLA-DRB1*04:02L HLA-DQA1*01:02-B1*06:02L HLA-DPA1*03:01-B1*04:02L HLA-DRB1*14:01L HLA-DRB1*08:01L HLA-DRB5*01:01L HLA-DQA1*01-B1*05L HLA-DQA1*05:01-B1*02:01L
  REGION 1..10: note = CONT. FROM ABOVE: HLA-DQA1*05:05-B1*03:116L HLA-DPA1*03:01-B1*10 5:01L HLA-DQA1*03:01-B1*03:02L HLA-DPA1*01:02-B1*04:01L HLA-DRB1 *16:01L HLA-DQA1*02:01-B1*03:03L HLA-DRB1*15:03L
  source 1..10: note = Severe acute respiratory syndrome coronavirus 2
HPLADNKFAL

SEQ ID NO: 11776 - protein, 12 aa, Severe acute respiratory syndrome-related coronavirus
  REGION 1..12: note = Table B: HLA-DQA1*05:01-B1*03:01L HLA-DRB1*01:03L HLA-DQA1*01:02-B1*06:02L HLA-DRB1*01:02L HLA-DQA1*03:01-B1*03:02L HLA-DRB1*04:08L HLA-DQA1*02:01-B1*03:03L HLA-DRB1*15:03L
  source 1..12: note = Severe acute respiratory syndrome coronavirus 2
QFAFACPDGVKH

SEQ ID NO: 11777 - protein, 10 aa, Severe acute respiratory syndrome-related coronavirus
  REGION 1..10: note = Table B: HLA-DQA1*05:01-B1*03:01L HLA-DRB1*13:03L HLA-DRB1*01:03L HLA-DQA1*01:02-B1*06:02L HLA-DRB1*08:77L HLA-DPA1*01:03-B1*03:01L HLA-DRB1*03:01L HLA-DRB1*14:02L HLA-DQA1*01-B1*05L HLA-DQA1*05:05-B1*03:19L
  REGION 1..10: note = CONT. FROM ABOVE: HLA-DQA1*05:01-B1*02:01L HLA-DRB4*01:01L HLA-D PA1*01:03-B1*04:01L HLA-DPA1*01:03-B1*04:02L HLA-DPA1*03:01-B1*1 05:01L HLA-DPA1*01:03-B1*104:01L HLA-DRB1*10:01L HLA-DRB1*16:01L HLA-DQA1*01:03-B1*06:01L HLA-DRB1*08:02L
  REGION 1..10: note = CONT. FROM ABOVE: HLA-DQA1*02:01-B1*03:03L HLA-DRB1*15:03L
  source 1..10: note = Severe acute respiratory syndrome coronavirus 2
ACPDGVKHVY

SEQ ID NO: 11778 - protein, 12 aa, Severe acute respiratory syndrome-related coronavirus
  REGION 1..12: note = Table B: HLA-DQA1*05:01-B1*03:01L HLA-DRB1*13:02L HLA-DQA1*01:02-B1*06:02L HLA-DRB1*01:01L HLA-DRB1*08:04L HLA-DRB1*11:03L HLA-DRB3*01:01L HLA-DRB1*08:03L HLA-DRB1*15:03L
  source 1..12: note = Severe acute respiratory syndrome coronavirus 2
VYQLRARSVSPK

SEQ ID NO: 11779 - protein, 13 aa, Severe acute respiratory syndrome-related coronavirus
  REGION 1..13: note = Table B: HLA-DQA1*05:01-B1*03:01L HLA-DRB1*13:03L HLA-DRB1*01:02L HLA-DRB4*03:01NL HLA-DRB1*08:04L HLA-DRB1*14:01L HLA-DQA1*01:01-B1*05:01L HLA-DRB1*04:10L HLA-DRB1*12:01L HLA-DRB1*14:54L HLA-DRB1*14:17L HLA-DRB1*08:03L HLA-DRB1*15:03L
  source 1..13: note = Severe acute respiratory syndrome coronavirus 2
SPKLFIRQEEVQE

SEQ ID NO: 11780 - protein, 10 aa, Severe acute respiratory syndrome-related coronavirus
  REGION 1..10: note = Table B: HLA-DQA1*05:01-B1*03:01L HLA-DRB1*13:03L HLA-DRB1*01:03L HLA-DQA1*01:02-B1*06:02L HLA-DRB1*08:77L HLA-DPA1*01:03-B1*03:01L HLA-DRB1*03:01L HLA-DRB1*14:02L HLA-DQA1*01-B1*05L HLA-DQA1*05:05-B1*03:19L
  REGION 1..10: note = CONT. FROM ABOVE: HLA-DQA1*05:01-B1*02:01L HLA-DPA1*01:03-B1*04: 01L HLA-DPA1*01:03-B1*04:02L HLA-DRB1*12:01L HLA-DPA1*03:01-B1*1 05:01L HLA-DPA1*01:03-B1*104:01L HLA-DRB1*16:01L HLA-DQA1*01:03- B1*06:01L HLA-DRB1*08:02L HLA-DQA1*02:01-B1*03:03L
  REGION 1..10: note = CONT. FROM ABOVE: HLA-DRB1*15:03L
  source 1..10: note = Severe acute respiratory syndrome coronavirus 2
IRQEEVQELY

SEQ ID NO: 11781 - protein, 15 aa, Severe acute respiratory syndrome-related coronavirus
  REGION 1..15: note = Table B: HLA-DQA1*05:01-B1*03:01L HLA-DRB1*04:04L HLA-DRB1*08:04L HLA-DPA1*01:03-B1*03:01L HLA-DPA1*03:01-B1*04:02L HLA-DRB1*03:01L HLA-DRB1*11:02L HLA-DRB1*14:02L HLA-DRB1*13:01L HLA-DPA1*01:03-B1*04:02L
  REGION 1..15: note = CONT. FROM ABOVE: HLA-DQA1*05:05-B1*03:01L
  source 1..15: note = Severe acute respiratory syndrome coronavirus 2
IVFITLCFTLKRKTE

SEQ ID NO: 11782 - protein, 16 aa, Severe acute respiratory syndrome-related coronavirus
  REGION 1..16: note = Table B: HLA-DQA1*05:01-B1*03:01L HLA-DRB1*04:03L HLA-DRB1*13:03L HLA-DRB3*02:01L HLA-DPA1*01:03-B1*03:01L HLA-DRB1*03:01L HLA-DRB1*11:02L HLA-DRB1*14:02L HLA-DQA1*01-B1*05L HLA-DQA1*05:05-B1*03:19L
  REGION 1..16: note = CONT. FROM ABOVE: HLA-DQA1*05:01-B1*02:01L HLA-DRB1*13:01L HLA-D PA1*01:03-B1*02:01L HLA-DPA1*01:03-B1*104:01L HLA-DQA1*05:05-B1* 03:01L HLA-DRB1*07:01L HLA-DQA1*01:03-B1*06:01L HLA-DRB1*08:02L HLA-DRB1*08:03L HLA-DRB1*15:01L
  source 1..16: note = Severe acute respiratory syndrome coronavirus 2
DPCPIHFYSKWYIRVG

SEQ ID NO: 11783 - protein, 12 aa, Severe acute respiratory syndrome-related coronavirus
  REGION 1..12: note = Table B: HLA-DQA1*05:01-B1*03:01L HLA-DRB1*04:03L HLA-DRB1*13:02L HLA-DRB1*13:03L HLA-DRB1*01:03L HLA-DRB1*04:02L HLA-DRB1*04:05L HLA-DQA1*01:02-B1*06:02L HLA-DRB1*01:02L HLA-DRB1*14:01L HLA-DRB1*11:04L HLA-DRB1*08:01L HLA-DRB1*11:01L
  REGION 1..12: note = CONT. FROM ABOVE: HLA-DRB1*12:01L HLA-DRB3*01:01L HLA-DQA1*03:01 -B1*03:02L HLA-DPA1*01:02-B1*04:01L HLA-DRB1*16:01L HLA-DRB1*04: 08L HLA-DQA1*02:01-B1*03:03L HLA-DRB1*15:03L
  source 1..12: note = Severe acute respiratory syndrome coronavirus 2
YIRVGARKSAPL

SEQ ID NO: 11784 - protein, 14 aa, Severe acute respiratory syndrome-related coronavirus
  REGION 1..14: note = Table B: HLA-DQA1*05:01-B1*03:01L HLA-DRB1*04:01L HLA-DRB1*13:03L HLA-DRB1*01:03L HLA-DRB1*01:01L HLA-DRB4*03:01NL HLA-DRB1*08:04L HLA-DPA1*01:03-B1*03:01L HLA-DRB1*14:01L HLA-DRB1*11:03L HLA-DRB1*11:04L HLA-DRB1*08:01L HLA-DRB1*11:01L
  REGION 1..14: note = CONT. FROM ABOVE: HLA-DQA1*01-B1*05L HLA-DQA1*05:05-B1*03:19L HL A-DRB4*01:01L HLA-DRB1*09:01L HLA-DRB1*12:01L HLA-DPA1*03:01-B1* 105:01L HLA-DQA1*03:01-B1*03:02L HLA-DRB1*14:54L HLA-DQA1*05:05- B1*03:01L HLA-DRB1*10:01L HLA-DRB1*16:01M
  REGION 1..14: note = CONT. FROM ABOVE: HLA-DQA1*01:03-B1*06:01L HLA-DRB1*08:03L HLA-D QA1*02:01-B1*03:03L HLA-DRB1*15:03L
  source 1..14: note = Severe acute respiratory syndrome coronavirus 2
APLIELCVDEAGSK

SEQ ID NO: 11785 - protein, 10 aa, Severe acute respiratory syndrome-related coronavirus
  REGION 1..10: note = Table B: HLA-DQA1*05:01-B1*03:01L HLA-DRB1*13:02L HLA-DRB1*13:03M HLA-DRB1*01:03L HLA-DQA1*01:02-B1*06:02M HLA-DRB4*03:01NL HLA-DRB1*08:77L HLA-DPA1*01:03-B1*03:01L HLA-DPA1*03:01-B1*04:02L HLA-DRB1*03:01L HLA-DRB1*14:01L
  REGION 1..10: note = CONT. FROM ABOVE: HLA-DRB1*14:02L HLA-DRB5*01:01L HLA-DQA1*01-B1 *05L HLA-DQA1*05:05-B1*03:19L HLA-DQA1*05:01-B1*02:01L HLA-DRB4* 01:01L HLA-DPA1*01:03-B1*04:01L HLA-DQA1*05:05-B1*03:116L HLA-DP A1*01:03-B1*04:02L HLA-DRB1*12:01L HLA-DPA1*02:01-B1*13:01L
  REGION 1..10: note = CONT. FROM ABOVE: HLA-DPA1*03:01-B1*105:01L HLA-DPA1*01:03-B1*10 4:01L HLA-DQA1*05:05-B1*03:01L HLA-DPA1*01:02-B1*04:01L HLA-DRB1 *10:01L HLA-DRB1*16:01L HLA-DQA1*01:03-B1*06:01L HLA-DRB1*08:02L HLA-DQA1*02:01-B1*03:03L HLA-DRB1*15:03L
  source 1..10: note = Severe acute respiratory syndrome coronavirus 2
EAGSKSPIQY

SEQ ID NO: 11786 - protein, 12 aa, Severe acute respiratory syndrome-related coronavirus
  REGION 1..12: note = Table B: HLA-DQA1*05:01-B1*03:01L HLA-DPA1*03:01-B1*04:02L HLA-DQA1*05:05-B1*03:19L HLA-DQA1*05:05-B1*03:01L HLA-DQA1*02:01-B1*03:03L
  source 1..12: note = Severe acute respiratory syndrome coronavirus 2
NYTVSCLPFTIN

SEQ ID NO: 11787 - protein, 10 aa, Severe acute respiratory syndrome-related coronavirus
  REGION 1..10: note = Table B: HLA-DQA1*05:01-B1*03:01L HLA-DRB1*13:02L HLA-DRB1*13:03L HLA-DRB1*01:03L HLA-DRB1*04:02L HLA-DQA1*01:02-B1*06:02L HLA-DRB1*01:01L HLA-DRB4*03:01NL HLA-DRB1*11:04L HLA-DRB1*08:01L HLA-DRB5*01:01L HLA-DRB1*12:01L
  REGION 1..10: note = CONT. FROM ABOVE: HLA-DQA1*03:01-B1*03:02M HLA-DQA1*05:05-B1*03: 01L HLA-DRB1*14:17L HLA-DPA1*01:02-B1*04:01L HLA-DRB1*16:01L HLA -DQA1*01:03-B1*06:01L HLA-DQA1*02:01-B1*03:03L
  source 1..10: note = Severe acute respiratory syndrome coronavirus 2
EPKLGSLVVR

SEQ ID NO: 11788 - protein, 12 aa, Severe acute respiratory syndrome-related coronavirus
  REGION 1..12: note = Table B: HLA-DQA1*05:01-B1*03:01L HLA-DRB1*13:02L HLA-DRB1*04:05L HLA-DRB1*01:02L HLA-DRB1*08:04L HLA-DRB1*14:01L HLA-DRB1*14:02L HLA-DRB1*08:01L HLA-DRB1*11:01L HLA-DRB1*12:01L HLA-DRB3*01:01L HLA-DPA1*02:01-B1*13:01L
  REGION 1..12: note = CONT. FROM ABOVE: HLA-DPA1*01:03-B1*02:01L
  source 1..12: note = Severe acute respiratory syndrome coronavirus 2
FYEDFLEYHDVR

SEQ ID NO: 11789 - protein, 12 aa, Severe acute respiratory syndrome-related coronavirus
  REGION 1..12: note = Table B: HLA-DQA1*05:01-B1*03:01L HLA-DRB1*13:02L HLA-DRB1*13:03L HLA-DRB1*01:03L HLA-DRB1*04:04L HLA-DRB1*04:05L HLA-DRB3*02:01L HLA-DPA1*01:03-B1*03:01L HLA-DRB1*14:01L HLA-DRB1*08:01L HLA-DPA1*01:03-B1*04:01L HLA-DRB1*14:17L
  REGION 1..12: note = CONT. FROM ABOVE: HLA-DRB1*04:08L HLA-DRB1*15:01L
  source 1..12: note = Severe acute respiratory syndrome coronavirus 2
EDFLEYHDVRVV

SEQ ID NO: 11790 - protein, 13 aa, Severe acute respiratory syndrome-related coronavirus
  REGION 1..13: note = Table B: HLA-DQA1*05:01-B1*03:01L HLA-DRB1*04:03L HLA-DQA1*01:02-B1*06:02L
  source 1..13: note = Severe acute respiratory syndrome coronavirus 2
SDNGPQNQRNAPR

SEQ ID NO: 11791 - protein, 13 aa, Severe acute respiratory syndrome-related coronavirus
  REGION 1..13: note = Table B: HLA-DQA1*05:01-B1*03:01L HLA-DQA1*01:02-B1*06:02L HLA-DQA1*05:05-B1*03:19L HLA-DQA1*05:01-B1*02:01L HLA-DQA1*05:05-B1*03:01L HLA-DQA1*01:03-B1*06:01L
  source 1..13: note = Severe acute respiratory syndrome coronavirus 2
APRITFGGPSDST

SEQ ID NO: 11792 - protein, 10 aa, Severe acute respiratory syndrome-related coronavirus
  REGION 1..10: note = Table B: HLA-DQA1*05:01-B1*03:01L HLA-DRB1*04:03L HLA-DRB1*01:03L HLA-DRB1*04:02L HLA-DQA1*01:02-B1*06:02L HLA-DPA1*03:01-B1*105:01L HLA-DQA1*03:01-B1*03:02L HLA-DQA1*05:05-B1*03:01L HLA-DRB1*14:17L
  REGION 1..10: note = CONT. FROM ABOVE: HLA-DPA1*01:02-B1*04:01L HLA-DRB1*16:01L HLA-D QA1*01:03-B1*06:01L HLA-DQA1*02:01-B1*03:03L
  source 1..10: note = Severe acute respiratory syndrome coronavirus 2
WFTALTQHGK

SEQ ID NO: 11793 - protein, 10 aa, Severe acute respiratory syndrome-related coronavirus
  REGION 1..10: note = Table B: HLA-DQA1*05:01-B1*03:01L HLA-DRB1*13:03L HLA-DRB1*01:03L HLA-DQA1*03:01-B1*03:02L
  source 1..10: note = Severe acute respiratory syndrome coronavirus 2
FPRGQGVPIN

SEQ ID NO: 11794 - protein, 10 aa, Severe acute respiratory syndrome-related coronavirus
  REGION 1..10: note = Table B: HLA-DQA1*05:01-B1*03:01L HLA-DRB1*04:03L HLA-DRB1*13:03L HLA-DRB1*01:03L HLA-DQA1*01:02-B1*06:02L HLA-DRB4*03:01NL HLA-DRB1*08:77L HLA-DPA1*01:03-B1*03:01L HLA-DPA1*03:01-B1*04:02L HLA-DRB1*03:01L HLA-DRB1*11:02L
  REGION 1..10: note = CONT. FROM ABOVE: HLA-DRB1*14:02L HLA-DQA1*01-B1*05L HLA-DQA1*05 :05-B1*03:19M HLA-DQA1*05:01-B1*02:01M HLA-DRB4*01:01L HLA-DPA1* 01:03-B1*04:01L HLA-DQA1*05:05-B1*03:116L HLA-DPA1*01:03-B1*04:0 2L HLA-DRB1*12:01L HLA-DPA1*02:01-B1*13:01L
  REGION 1..10: note = CONT. FROM ABOVE: HLA-DPA1*03:01-B1*105:01L HLA-DPA1*01:03-B1*10 4:01L HLA-DRB1*10:01L HLA-DRB1*16:01L HLA-DRB1*08:02L HLA-DQA1*0 2:01-B1*03:03L HLA-DRB1*15:03L
  source 1..10: note = Severe acute respiratory syndrome coronavirus 2
NSSPDDQIGY

SEQ ID NO: 11795 - protein, 10 aa, Severe acute respiratory syndrome-related coronavirus
  REGION 1..10: note = Table B: HLA-DQA1*05:01-B1*03:01L HLA-DRB1*13:03L HLA-DRB1*01:03L HLA-DQA1*01:02-B1*06:02M HLA-DRB1*08:77L HLA-DPA1*01:03-B1*03:01L HLA-DRB1*03:01L HLA-DRB1*14:02L HLA-DQA1*01-B1*05L HLA-DQA1*05:05-B1*03:19L
  REGION 1..10: note = CONT. FROM ABOVE: HLA-DQA1*05:01-B1*02:01L HLA-DPA1*01:03-B1*04: 01L HLA-DPA1*03:01-B1*105:01L HLA-DPA1*01:03-B1*104:01L HLA-DRB1 *10:01L HLA-DRB1*16:01L HLA-DRB1*15:03L
  source 1..10: note = Severe acute respiratory syndrome coronavirus 2
SSPDDQIGYY

SEQ ID NO: 11796 - protein, 15 aa, Severe acute respiratory syndrome-related coronavirus
  REGION 1..15: note = Table B: HLA-DQA1*05:01-B1*03:01L HLA-DRB1*04:02L HLA-DRB1*04:04L HLA-DRB1*01:01L HLA-DRB1*03:01L HLA-DRB1*11:03L HLA-DRB1*13:01L HLA-DPA1*02:01-B1*13:01L HLA-DRB1*14:54L HLA-DPA1*01:02-B1*04:01L HLA-DRB1*07:01L
  source 1..15: note = Severe acute respiratory syndrome coronavirus 2
SPDDQIGYYRRATRR

SEQ ID NO: 11797 - protein, 10 aa, Severe acute respiratory syndrome-related coronavirus
  REGION 1..10: note = Table B: HLA-DQA1*05:01-B1*03:01L HLA-DRB1*13:02L HLA-DRB1*01:03L HLA-DQA1*01:02-B1*06:02L HLA-DPA1*01:03-B1*03:01L HLA-DRB1*03:01L HLA-DRB1*14:01L HLA-DRB1*14:02L HLA-DRB1*11:01L HLA-DQA1*05:05-B1*03:19L
  REGION 1..10: note = CONT. FROM ABOVE: HLA-DQA1*05:01-B1*02:01L HLA-DPA1*01:03-B1*04: 01L HLA-DPA1*01:03-B1*04:02L HLA-DRB1*12:01L HLA-DRB1*16:01L HLA -DQA1*01:03-B1*06:01L HLA-DRB1*08:02L HLA-DQA1*02:01-B1*03:03M H LA-DRB1*15:03L
  source 1..10: note = Severe acute respiratory syndrome coronavirus 2
KMKDLSPRWY

SEQ ID NO: 11798 - protein, 12 aa, Severe acute respiratory syndrome-related coronavirus
  REGION 1..12: note = Table B: HLA-DQA1*05:01-B1*03:01L HLA-DQA1*05:05-B1*03:19L HLA-DQA1*01:03-B1*06:01L
  source 1..12: note = Severe acute respiratory syndrome coronavirus 2
EAGLPYGANKDG

SEQ ID NO: 11799 - protein, 12 aa, Severe acute respiratory syndrome-related coronavirus
  REGION 1..12: note = Table B: HLA-DQA1*05:01-B1*03:01L HLA-DRB1*13:02L HLA-DRB1*04:04L HLA-DRB1*04:05L HLA-DQA1*01:02-B1*06:02L HLA-DRB1*01:02L HLA-DRB1*08:77L HLA-DPA1*01:03-B1*03:01L HLA-DRB1*11:03L HLA-DRB1*11:04L HLA-DRB1*14:02L
  REGION 1..12: note = CONT. FROM ABOVE: HLA-DQA1*01:01-B1*05:01L HLA-DQA1*01-B1*05L HL A-DQA1*05:05-B1*03:19L HLA-DRB1*04:10L HLA-DPA1*01:03-B1*04:02L HLA-DRB1*12:02L HLA-DPA1*03:01-B1*105:01L HLA-DRB1*10:01L HLA-DR B1*04:08L HLA-DRB1*15:03L
  source 1..12: note = Severe acute respiratory syndrome coronavirus 2
VATEGALNTPKD

SEQ ID NO: 11800 - protein, 11 aa, Severe acute respiratory syndrome-related coronavirus
  REGION 1..11: note = Table B: HLA-DQA1*05:01-B1*03:01L HLA-DRB1*13:03L HLA-DRB1*01:03L HLA-DRB1*04:02L HLA-DQA1*01:02-B1*06:02L HLA-DRB4*03:01NL HLA-DQA1*01:01-B1*05:01L HLA-DQA1*01-B1*05L HLA-DQA1*05:01-B1*02:01L HLA-DRB1*14:17L HLA-DRB1*16:01L
  source 1..11: note = Severe acute respiratory syndrome coronavirus 2
TEGALNTPKDH

SEQ ID NO: 11801 - protein, 13 aa, Severe acute respiratory syndrome-related coronavirus
  REGION 1..13: note = Table B: HLA-DQA1*05:01-B1*03:01L HLA-DQA1*01:02-B1*06:02L HLA-DRB1*08:01L HLA-DQA1*01:03-B1*06:01L HLA-DQA1*02:01-B1*03:03L
  source 1..13: note = Severe acute respiratory syndrome coronavirus 2
TPKDHIGTRNPAN

SEQ ID NO: 11802 - protein, 11 aa, Severe acute respiratory syndrome-related coronavirus
  REGION 1..11: note = Table B: HLA-DQA1*05:01-B1*03:01L HLA-DRB1*04:03L HLA-DQA1*02:01-B1*03:03L
  source 1..11: note = Severe acute respiratory syndrome coronavirus 2
DHIGTRNPANN

SEQ ID NO: 11803 - protein, 13 aa, Severe acute respiratory syndrome-related coronavirus
  REGION 1..13: note = Table B: HLA-DQA1*05:01-B1*03:01L HLA-DRB1*13:02L HLA-DQA1*01:02-B1*06:02L HLA-DRB1*01:02L HLA-DPA1*01:03-B1*03:01L HLA-DQA1*05:01-B1*02:01L HLA-DRB1*04:10L HLA-DRB1*12:01L HLA-DPA1*02:01-B1*13:01L
  REGION 1..13: note = CONT. FROM ABOVE: HLA-DPA1*01:03-B1*104:01L HLA-DQA1*05:05-B1*03 :01L HLA-DQA1*01:03-B1*06:01L
  source 1..13: note = Severe acute respiratory syndrome coronavirus 2
IGTRNPANNAAIV

SEQ ID NO: 11804 - protein, 11 aa, Severe acute respiratory syndrome-related coronavirus
  REGION 1..11: note = Table B: HLA-DQA1*05:01-B1*03:01L HLA-DRB1*01:03L HLA-DRB1*08:77L HLA-DPA1*01:03-B1*03:01L HLA-DPA1*03:01-B1*04:02L HLA-DRB1*14:01L HLA-DRB1*14:02L HLA-DQA1*05:05-B1*03:19L HLA-DQA1*05:01-B1*02:01L
  REGION 1..11: note = CONT. FROM ABOVE: HLA-DPA1*01:03-B1*04:01L HLA-DPA1*03:01-B1*105 :01L HLA-DPA1*01:02-B1*04:01L HLA-DRB1*16:01L HLA-DRB1*15:03L
  source 1..11: note = Severe acute respiratory syndrome coronavirus 2
LPQGTTLPKGF

SEQ ID NO: 11805 - protein, 14 aa, Severe acute respiratory syndrome-related coronavirus
  REGION 1..14: note = Table B: HLA-DQA1*05:01-B1*03:01L HLA-DQA1*01:02-B1*06:02L HLA-DRB1*01:02L HLA-DRB1*08:01L HLA-DQA1*01:03-B1*06:01L HLA-DRB1*04:08L
  source 1..14: note = Severe acute respiratory syndrome coronavirus 2
GTTLPKGFYAEGSR

SEQ ID NO: 11806 - protein, 13 aa, Severe acute respiratory syndrome-related coronavirus
  REGION 1..13: note = Table B: HLA-DQA1*05:01-B1*03:01L HLA-DQA1*01:02-B1*06:02L HLA-DQA1*01:03-B1*06:01L
  source 1..13: note = Severe acute respiratory syndrome coronavirus 2
TLPKGFYAEGSRG

SEQ ID NO: 11807 - protein, 13 aa, Severe acute respiratory syndrome-related coronavirus
  REGION 1..13: note = Table B: HLA-DQA1*05:01-B1*03:01L HLA-DRB1*04:03L HLA-DRB1*13:03L HLA-DRB1*01:03L HLA-DRB1*04:02L HLA-DRB1*04:05L HLA-DQA1*01:02-B1*06:02L HLA-DRB1*01:02L HLA-DRB4*03:01NL HLA-DRB1*08:01L HLA-DRB1*04:10L HLA-DRB1*12:01L HLA-DRB1*14:17L
  REGION 1..13: note = CONT. FROM ABOVE: HLA-DRB1*16:01L HLA-DRB1*04:08L
  source 1..13: note = Severe acute respiratory syndrome coronavirus 2
LPKGFYAEGSRGG

SEQ ID NO: 11808 - protein, 11 aa, Severe acute respiratory syndrome-related coronavirus
  REGION 1..11: note = Table B: HLA-DQA1*05:01-B1*03:01L HLA-DRB1*04:01L HLA-DRB1*04:04L HLA-DRB1*04:05L HLA-DQA1*01:02-B1*06:02L HLA-DRB1*01:01L HLA-DRB1*01:02L HLA-DRB4*03:01NL HLA-DRB1*14:01L HLA-DRB1*11:03L HLA-DRB1*11:04L HLA-DRB1*14:02L HLA-DRB1*11:01L
  REGION 1..11: note = CONT. FROM ABOVE: HLA-DQA1*05:05-B1*03:19L HLA-DRB1*04:10L HLA-D RB1*12:01L HLA-DRB1*14:54L HLA-DQA1*05:05-B1*03:01L HLA-DRB1*10: 01L HLA-DRB1*16:01L HLA-DRB1*04:08L HLA-DQA1*02:01-B1*03:03L HLA -DRB1*15:03L
  source 1..11: note = Severe acute respiratory syndrome coronavirus 2
FYAEGSRGGSQ

SEQ ID NO: 11809 - protein, 13 aa, Severe acute respiratory syndrome-related coronavirus
  REGION 1..13: note = Table B: HLA-DQA1*05:01-B1*03:01L HLA-DQA1*05:05-B1*03:01L
  source 1..13: note = Severe acute respiratory syndrome coronavirus 2
YAEGSRGGSQASS

SEQ ID NO: 11810 - protein, 12 aa, Severe acute respiratory syndrome-related coronavirus
  REGION 1..12: note = Table B: HLA-DQA1*05:01-B1*03:01L HLA-DQA1*01:02-B1*06:02L HLA-DQA1*01:03-B1*06:01L HLA-DRB1*04:08L HLA-DQA1*02:01-B1*03:03L
  source 1..12: note = Severe acute respiratory syndrome coronavirus 2
EGSRGGSQASSR

SEQ ID NO: 11811 - protein, 12 aa, Severe acute respiratory syndrome-related coronavirus
  REGION 1..12: note = Table B: HLA-DQA1*05:01-B1*03:01L HLA-DQA1*01:02-B1*06:02L HLA-DRB1*01:02L HLA-DQA1*05:05-B1*03:19L HLA-DQA1*01:03-B1*06:01L HLA-DRB1*04:08L HLA-DQA1*02:01-B1*03:03L
  source 1..12: note = Severe acute respiratory syndrome coronavirus 2
GSRGGSQASSRS

SEQ ID NO: 11812 - protein, 12 aa, Severe acute respiratory syndrome-related coronavirus
  REGION 1..12: note = Table B: HLA-DQA1*05:01-B1*03:01L HLA-DRB1*01:03L HLA-DQA1*02:01-B1*03:03L
  source 1..12: note = Severe acute respiratory syndrome coronavirus 2
GGSQASSRSSSR

SEQ ID NO: 11813 - protein, 12 aa, Severe acute respiratory syndrome-related coronavirus
  REGION 1..12: note = Table B: HLA-DQA1*05:01-B1*03:01L HLA-DQA1*02:01-B1*03:03L
  source 1..12: note = Severe acute respiratory syndrome coronavirus 2
NSSRNSTPGSSR

SEQ ID NO: 11814 - protein, 12 aa, Severe acute respiratory syndrome-related coronavirus
  REGION 1..12: note = Table B: HLA-DQA1*05:01-B1*03:01L HLA-DQA1*03:01-B1*03:02L HLA-DQA1*02:01-B1*03:03L
  source 1..12: note = Severe acute respiratory syndrome coronavirus 2
NSTPGSSRGTSP

SEQ ID NO: 11815 - protein, 12 aa, Severe acute respiratory syndrome-related coronavirus
  REGION 1..12: note = Table B: HLA-DQA1*05:01-B1*03:01L HLA-DQA1*05:05-B1*03:01L HLA-DQA1*02:01-B1*03:03L
  source 1..12: note = Severe acute respiratory syndrome coronavirus 2
TPGSSRGTSPAR

SEQ ID NO: 11816 - protein, 13 aa, Severe acute respiratory syndrome-related coronavirus
  REGION 1..13: note = Table B: HLA-DQA1*05:01-B1*03:01L HLA-DQA1*01:02-B1*06:02L HLA-DQA1*03:01-B1*03:02L HLA-DQA1*05:05-B1*03:01L HLA-DQA1*01:03-B1*06:01L HLA-DQA1*02:01-B1*03:03L
  source 1..13: note = Severe acute respiratory syndrome coronavirus 2
SSRGTSPARMAGN

SEQ ID NO: 11817 - protein, 11 aa, Severe acute respiratory syndrome-related coronavirus
  REGION 1..11: note = Table B: HLA-DQA1*05:01-B1*03:01L HLA-DRB1*04:03L HLA-DQA1*01:02-B1*06:02L HLA-DQA1*03:01-B1*03:02L HLA-DQA1*05:05-B1*03:01L HLA-DQA1*01:03-B1*06:01L HLA-DQA1*02:01-B1*03:03L
  source 1..11: note = Severe acute respiratory syndrome coronavirus 2
DAALALLLLDR

SEQ ID NO: 11818 - protein, 15 aa, Severe acute respiratory syndrome-related coronavirus
  REGION 1..15: note = Table B: HLA-DQA1*05:01-B1*03:01L HLA-DRB1*01:01L HLA-DRB1*11:04L HLA-DRB3*01:01L HLA-DRB1*10:01L
  source 1..15: note = Severe acute respiratory syndrome coronavirus 2
LDRLNQLESKMSGKG

SEQ ID NO: 11819 - protein, 14 aa, Severe acute respiratory syndrome-related coronavirus
  REGION 1..14: note = Table B: HLA-DQA1*05:01-B1*03:01L HLA-DQA1*01:02-B1*06:02L HLA-DRB1*08:01L HLA-DQA1*03:01-B1*03:02L HLA-DQA1*02:01-B1*03:03L
  source 1..14: note = Severe acute respiratory syndrome coronavirus 2
LESKMSGKGQQQQG

SEQ ID NO: 11820 - protein, 13 aa, Severe acute respiratory syndrome-related coronavirus
  REGION 1..13: note = Table B: HLA-DQA1*05:01-B1*03:01L HLA-DRB1*01:02L
  source 1..13: note = Severe acute respiratory syndrome coronavirus 2
GKGQQQQGQTVTK

SEQ ID NO: 11821 - protein, 12 aa, Severe acute respiratory syndrome-related coronavirus
  REGION 1..12: note = Table B: HLA-DQA1*05:01-B1*03:01L HLA-DRB1*04:03L HLA-DRB1*01:02L
  source 1..12: note = Severe acute respiratory syndrome coronavirus 2
GQQQQGQTVTKK

SEQ ID NO: 11822 - protein, 14 aa, Severe acute respiratory syndrome-related coronavirus
  REGION 1..14: note = Table B: HLA-DQA1*05:01-B1*03:01L HLA-DRB1*04:04L HLA-DQA1*01:02-B1*06:02L HLA-DRB1*01:02L HLA-DRB1*08:04L HLA-DRB1*14:01L HLA-DRB1*11:04L HLA-DQA1*01:01-B1*05:01L HLA-DRB1*11:01L HLA-DRB1*04:10L HLA-DRB1*12:01L HLA-DRB3*01:01L
  REGION 1..14: note = CONT. FROM ABOVE: HLA-DPA1*02:01-B1*13:01L HLA-DRB1*16:01L HLA-D QA1*01:03-B1*06:01L HLA-DRB1*08:03L HLA-DRB1*15:03L
  source 1..14: note = Severe acute respiratory syndrome coronavirus 2
GQTVTKKSAAEASK

SEQ ID NO: 11823 - protein, 13 aa, Severe acute respiratory syndrome-related coronavirus
  REGION 1..13: note = Table B: HLA-DQA1*05:01-B1*03:01L HLA-DRB1*01:03L HLA-DRB1*04:05L HLA-DQA1*01:02-B1*06:02L HLA-DRB1*01:02L HLA-DRB1*08:01L HLA-DRB1*12:01L HLA-DRB1*16:01L HLA-DQA1*01:03-B1*06:01L HLA-DQA1*02:01-B1*03:03L
  source 1..13: note = Severe acute respiratory syndrome coronavirus 2
VTKKSAAEASKKP

SEQ ID NO: 11824 - protein, 15 aa, Severe acute respiratory syndrome-related coronavirus
  REGION 1..15: note = Table B: HLA-DQA1*05:01-B1*03:01L HLA-DRB1*13:02L HLA-DQA1*01:02-B1*06:02L HLA-DPA1*01:03-B1*03:01L HLA-DRB1*08:01L HLA-DRB1*11:01L HLA-DQA1*03:01-B1*03:02L HLA-DPA1*01:03-B1*104:01L HLA-DPA1*01:02-B1*04:01L
  REGION 1..15: note = CONT. FROM ABOVE: HLA-DRB1*16:01L HLA-DQA1*01:03-B1*06:01L HLA-D RB1*04:08L HLA-DRB1*15:03L
  source 1..15: note = Severe acute respiratory syndrome coronavirus 2
KPRQKRTATKAYNVT

SEQ ID NO: 11825 - protein, 12 aa, Severe acute respiratory syndrome-related coronavirus
  REGION 1..12: note = Table B: HLA-DQA1*05:01-B1*03:01L HLA-DRB1*04:05L HLA-DRB1*07:01L HLA-DRB1*04:08L
  source 1..12: note = Severe acute respiratory syndrome coronavirus 2
KAYNVTQAFGRR

SEQ ID NO: 11826 - protein, 13 aa, Severe acute respiratory syndrome-related coronavirus
  REGION 1..13: note = Table B: HLA-DQA1*05:01-B1*03:01L
  source 1..13: note = Severe acute respiratory syndrome coronavirus 2
AYNVTQAFGRRGP

SEQ ID NO: 11827 - protein, 12 aa, Severe acute respiratory syndrome-related coronavirus
  REGION 1..12: note = Table B: HLA-DQA1*05:01-B1*03:01L HLA-DRB1*01:03L HLA-DRB1*04:02L HLA-DQA1*01:02-B1*06:02L HLA-DRB1*01:02L HLA-DRB1*08:01L HLA-DQA1*03:01-B1*03:02L HLA-DRB1*14:17L HLA-DRB1*16:01L HLA-DQA1*01:03-B1*06:01L
  REGION 1..12: note = CONT. FROM ABOVE: HLA-DQA1*02:01-B1*03:03L
  source 1..12: note = Severe acute respiratory syndrome coronavirus 2
NVTQAFGRRGPE

SEQ ID NO: 11828 - protein, 12 aa, Severe acute respiratory syndrome-related coronavirus
  REGION 1..12: note = Table B: HLA-DQA1*05:01-B1*03:01L HLA-DQA1*01:02-B1*06:02L HLA-DQA1*03:01-B1*03:02L HLA-DQA1*01:03-B1*06:01L HLA-DQA1*02:01-B1*03:03L
  source 1..12: note = Severe acute respiratory syndrome coronavirus 2
VTQAFGRRGPEQ

SEQ ID NO: 11829 - protein, 14 aa, Severe acute respiratory syndrome-related coronavirus
  REGION 1..14: note = Table B: HLA-DQA1*05:01-B1*03:01L
  source 1..14: note = Severe acute respiratory syndrome coronavirus 2
RGPEQTQGNFGDQE

SEQ ID NO: 11830 - protein, 14 aa, Severe acute respiratory syndrome-related coronavirus
  REGION 1..14: note = Table B: HLA-DQA1*05:01-B1*03:01L HLA-DRB1*01:03L HLA-DRB1*04:02L HLA-DRB1*04:05L HLA-DQA1*01:02-B1*06:02L HLA-DRB1*01:02L HLA-DPA1*01:03-B1*03:01L HLA-DPA1*03:01-B1*04:02L HLA-DQA1*05:05-B1*03:19L
  REGION 1..14: note = CONT. FROM ABOVE: HLA-DRB1*12:01L HLA-DPA1*02:01-B1*13:01L HLA-D PA1*03:01-B1*105:01L HLA-DRB1*04:08L HLA-DRB1*15:03L
  source 1..14: note = Severe acute respiratory syndrome coronavirus 2
GPEQTQGNFGDQEL

SEQ ID NO: 11831 - protein, 12 aa, Severe acute respiratory syndrome-related coronavirus
  REGION 1..12: note = Table B: HLA-DQA1*05:01-B1*03:01L HLA-DRB1*13:03L HLA-DRB1*01:03L HLA-DRB1*04:02L HLA-DQA1*01:02-B1*06:02L HLA-DPA1*01:03-B1*03:01L HLA-DRB1*14:01L HLA-DQA1*01:01-B1*05:01L HLA-DQA1*05:05-B1*03:19L
  REGION 1..12: note = CONT. FROM ABOVE: HLA-DPA1*01:03-B1*04:02L HLA-DRB1*12:01L HLA-D PA1*03:01-B1*105:01L HLA-DQA1*05:05-B1*03:01L HLA-DPA1*01:02-B1* 04:01L
  source 1..12: note = Severe acute respiratory syndrome coronavirus 2
FGDQELIRQGTD

SEQ ID NO: 11832 - protein, 14 aa, Severe acute respiratory syndrome-related coronavirus
  REGION 1..14: note = Table B: HLA-DQA1*05:01-B1*03:01L HLA-DRB1*04:02L HLA-DPA1*01:03-B1*03:01L HLA-DRB3*01:01L HLA-DPA1*03:01-B1*105:01L HLA-DQA1*01:03-B1*06:01L
  source 1..14: note = Severe acute respiratory syndrome coronavirus 2
ELIRQGTDYKHWPQ

SEQ ID NO: 11833 - protein, 13 aa, Severe acute respiratory syndrome-related coronavirus
  REGION 1..13: note = Table B: HLA-DQA1*05:01-B1*03:01L HLA-DRB1*04:02L HLA-DRB1*04:05L HLA-DQA1*01:02-B1*06:02L HLA-DRB1*01:02L HLA-DRB4*03:01NL HLA-DQA1*01-B1*05L HLA-DQA1*05:01-B1*02:01L HLA-DRB1*04:10L HLA-DRB1*12:01L HLA-DRB1*14:54L
  REGION 1..13: note = CONT. FROM ABOVE: HLA-DQA1*05:05-B1*03:01L HLA-DRB1*16:01L HLA-D RB1*15:03L
  source 1..13: note = Severe acute respiratory syndrome coronavirus 2
WPQIAQFAPSASA

SEQ ID NO: 11834 - protein, 12 aa, Severe acute respiratory syndrome-related coronavirus
  REGION 1..12: note = Table B: HLA-DQA1*05:01-B1*03:01L HLA-DRB1*13:03L HLA-DPA1*03:01-B1*04:02L HLA-DRB1*11:04L HLA-DRB1*11:01L HLA-DQA1*05:05-B1*03:19L HLA-DPA1*01:03-B1*04:02L HLA-DQA1*05:05-B1*03:01L HLA-DPA1*01:02-B1*04:01L
  REGION 1..12: note = CONT. FROM ABOVE: HLA-DRB1*16:01L HLA-DRB1*04:08L HLA-DRB1*08:03 L HLA-DRB1*15:03L
  source 1..12: note = Severe acute respiratory syndrome coronavirus 2
SAFFGMSRIGME

SEQ ID NO: 11835 - protein, 13 aa, Severe acute respiratory syndrome-related coronavirus
  REGION 1..13: note = Table B: HLA-DQA1*05:01-B1*03:01L HLA-DRB1*13:02L HLA-DRB1*11:03L HLA-DRB1*11:04L HLA-DQA1*01:01-B1*05:01L HLA-DRB1*08:01L HLA-DRB1*12:02L HLA-DPA1*03:01-B1*105:01L HLA-DPA1*01:03-B1*104:01L HLA-DQA1*05:05-B1*03:01L
  REGION 1..13: note = CONT. FROM ABOVE: HLA-DRB1*07:01L HLA-DRB1*10:01L HLA-DQA1*01:03 -B1*06:01L HLA-DRB1*15:03L
  source 1..13: note = Severe acute respiratory syndrome coronavirus 2
GMSRIGMEVTPSG

SEQ ID NO: 11836 - protein, 10 aa, Severe acute respiratory syndrome-related coronavirus
  REGION 1..10: note = Table B: HLA-DQA1*05:01-B1*03:01L HLA-DRB1*13:03L HLA-DQA1*01:02-B1*06:02L HLA-DRB1*08:77L HLA-DPA1*01:03-B1*03:01L HLA-DRB1*03:01L HLA-DRB1*11:02L HLA-DRB1*14:02L HLA-DQA1*01-B1*05L HLA-DQA1*05:05-B1*03:19L
  REGION 1..10: note = CONT. FROM ABOVE: HLA-DQA1*05:01-B1*02:01L HLA-DRB4*01:01L HLA-D PA1*01:03-B1*04:01L HLA-DPA1*03:01-B1*105:01L HLA-DPA1*01:03-B1* 104:01L HLA-DRB1*10:01L HLA-DRB1*16:01L HLA-DQA1*02:01-B1*03:03L HLA-DRB1*15:03L
  source 1..10: note = Severe acute respiratory syndrome coronavirus 2
VTPSGTWLTY

SEQ ID NO: 11837 - protein, 10 aa, Severe acute respiratory syndrome-related coronavirus
  REGION 1..10: note = Table B: HLA-DQA1*05:01-B1*03:01L HLA-DRB1*01:02L HLA-DQA1*05:01-B1*02:01L HLA-DRB1*12:01L HLA-DPA1*03:01-B1*105:01L HLA-DRB1*16:01L HLA-DQA1*01:03-B1*06:01L HLA-DQA1*02:01-B1*03:03L
  REGION 1..10: note = CONT. FROM ABOVE: HLA-DRB1*15:03L
  source 1..10: note = Severe acute respiratory syndrome coronavirus 2
LTYTGAIKLD

SEQ ID NO: 11838 - protein, 11 aa, Severe acute respiratory syndrome-related coronavirus
  REGION 1..11: note = Table B: HLA-DQA1*05:01-B1*03:01L HLA-DRB1*04:05L HLA-DQA1*01:02-B1*06:02L HLA-DRB1*08:04L HLA-DPA1*01:02-B1*04:01L HLA-DRB1*16:01L HLA-DRB1*04:08L HLA-DRB1*08:03L
  source 1..11: note = Severe acute respiratory syndrome coronavirus 2
TYTGAIKLDDK

SEQ ID NO: 11839 - protein, 12 aa, Severe acute respiratory syndrome-related coronavirus
  REGION 1..12: note = Table B: HLA-DQA1*05:01-B1*03:01L HLA-DRB1*04:04L HLA-DQA1*01:02-B1*06:02L HLA-DRB3*02:01L HLA-DPA1*01:03-B1*03:01L HLA-DPA1*03:01-B1*04:02L HLA-DRB1*11:03L HLA-DRB1*14:02L HLA-DQA1*01:01-B1*05:01L
  REGION 1..12: note = CONT. FROM ABOVE: HLA-DRB5*01:01L HLA-DQA1*05:05-B1*03:19L HLA-D RB3*01:01L HLA-DPA1*02:01-B1*13:01L HLA-DPA1*03:01-B1*105:01L HL A-DQA1*05:05-B1*03:01L HLA-DRB1*10:01L HLA-DQA1*01:03-B1*06:01L
  source 1..12: note = Severe acute respiratory syndrome coronavirus 2
TGAIKLDDKDPN

SEQ ID NO: 11840 - protein, 13 aa, Severe acute respiratory syndrome-related coronavirus
  REGION 1..13: note = Table B: HLA-DQA1*05:01-B1*03:01L HLA-DRB3*02:01L HLA-DPA1*03:01-B1*04:02L HLA-DRB1*11:02L HLA-DQA1*05:05-B1*03:19L HLA-DRB4*02:01NL HLA-DRB1*09:01L HLA-DPA1*01:03-B1*04:02L HLA-DRB1*08:02L HLA-DRB1*15:01L
  source 1..13: note = Severe acute respiratory syndrome coronavirus 2
GAIKLDDKDPNFK

SEQ ID NO: 11841 - protein, 14 aa, Severe acute respiratory syndrome-related coronavirus
  REGION 1..14: note = Table B: HLA-DQA1*05:01-B1*03:01L HLA-DRB3*02:01L HLA-DPA1*03:01-B1*04:02L HLA-DRB1*11:02L HLA-DQA1*05:05-B1*03:19L HLA-DRB1*04:10L HLA-DPA1*01:03-B1*04:02L HLA-DQA1*01:03-B1*06:01L
  source 1..14: note = Severe acute respiratory syndrome coronavirus 2
AIKLDDKDPNFKDQ

SEQ ID NO: 11842 - protein, 10 aa, Severe acute respiratory syndrome-related coronavirus
  REGION 1..10: note = Table B: HLA-DQA1*05:01-B1*03:01L HLA-DRB1*01:03L HLA-DQA1*01:02-B1*06:02L HLA-DRB1*08:77L HLA-DPA1*01:03-B1*03:01L HLA-DRB1*03:01L HLA-DRB1*14:02L HLA-DQA1*01-B1*05L HLA-DQA1*05:05-B1*03:19L
  REGION 1..10: note = CONT. FROM ABOVE: HLA-DQA1*05:01-B1*02:01L HLA-DRB4*01:01L HLA-D PA1*01:03-B1*04:01L HLA-DQA1*05:05-B1*03:116L HLA-DPA1*01:03-B1* 04:02L HLA-DPA1*02:01-B1*13:01L HLA-DPA1*03:01-B1*105:01L HLA-DP A1*01:03-B1*104:01L HLA-DRB1*16:01L HLA-DQA1*01:03-B1*06:01L
  REGION 1..10: note = CONT. FROM ABOVE: HLA-DRB1*08:02L HLA-DQA1*02:01-B1*03:03L HLA-D RB1*15:03L
  source 1..10: note = Severe acute respiratory syndrome coronavirus 2
ILLNKHIDAY

SEQ ID NO: 11843 - protein, 10 aa, Severe acute respiratory syndrome-related coronavirus
  REGION 1..10: note = Table B: HLA-DQA1*05:01-B1*03:01L HLA-DRB1*04:03L HLA-DRB1*13:02L HLA-DRB1*13:03L HLA-DRB1*01:03L HLA-DRB1*04:02L HLA-DRB1*04:05L HLA-DRB4*03:01NL HLA-DRB1*08:01L HLA-DQA1*01-B1*05L HLA-DRB1*12:01L HLA-DQA1*03:01-B1*03:02L
  REGION 1..10: note = CONT. FROM ABOVE: HLA-DRB1*14:54L HLA-DRB1*14:17L HLA-DRB1*16:01 L HLA-DRB1*04:08L HLA-DQA1*02:01-B1*03:03L
  source 1..10: note = Severe acute respiratory syndrome coronavirus 2
YKTFPPTEPK

SEQ ID NO: 11844 - protein, 11 aa, Severe acute respiratory syndrome-related coronavirus
  REGION 1..11: note = Table B: HLA-DQA1*05:01-B1*03:01L HLA-DQA1*05:05-B1*03:19L HLA-DPA1*03:01-B1*105:01L HLA-DQA1*05:05-B1*03:01L
  source 1..11: note = Severe acute respiratory syndrome coronavirus 2
QQTVTLLPAAD

SEQ ID NO: 11845 - protein, 12 aa, Severe acute respiratory syndrome-related coronavirus
  REGION 1..12: note = Table B: HLA-DQA1*05:01-B1*03:01L HLA-DQA1*01:02-B1*06:02L HLA-DRB1*01:02L HLA-DQA1*05:05-B1*03:19L HLA-DPA1*03:01-B1*105:01L HLA-DQA1*05:05-B1*03:01L
  source 1..12: note = Severe acute respiratory syndrome coronavirus 2
TVTLLPAADLDD

SEQ ID NO: 11846 - protein, 13 aa, Severe acute respiratory syndrome-related coronavirus
  REGION 1..13: note = Table B: HLA-DQA1*05:01-B1*03:01L HLA-DRB1*13:03L HLA-DRB1*01:03L HLA-DRB1*04:04L HLA-DPA1*01:03-B1*03:01L HLA-DPA1*03:01-B1*04:02L HLA-DQA1*01:01-B1*05:01L HLA-DRB4*01:01L HLA-DRB1*04:08L HLA-DRB1*08:03L
  source 1..13: note = Severe acute respiratory syndrome coronavirus 2
VTLLPAADLDDFS

SEQ ID NO: 11847 - protein, 15 aa, Severe acute respiratory syndrome-related coronavirus
  REGION 1..15: note = Table B: HLA-DQA1*05:01-B1*03:01L HLA-DRB1*13:02L HLA-DRB1*13:03L HLA-DRB1*08:04L HLA-DPA1*01:03-B1*03:01L HLA-DPA1*03:01-B1*04:02L HLA-DRB1*14:01L HLA-DRB1*08:01L HLA-DRB3*01:01L HLA-DRB1*14:54L HLA-DPA1*01:02-B1*04:01L
  REGION 1..15: note = CONT. FROM ABOVE: HLA-DRB1*04:08L
  source 1..15: note = Severe acute respiratory syndrome coronavirus 2
LPAADLDDFSKQLQQ

SEQ ID NO: 11848 - protein, 13 aa, Severe acute respiratory syndrome-related coronavirus
  REGION 1..13: note = Table B: HLA-DQA1*05:01-B1*03:01L HLA-DRB1*13:03L HLA-DRB1*01:03L HLA-DQA1*01:02-B1*06:02L HLA-DRB1*08:04L HLA-DRB1*14:01L HLA-DRB1*08:01L HLA-DPA1*03:01-B1*105:01L HLA-DRB1*14:54L HLA-DRB1*16:01L HLA-DQA1*01:03-B1*06:01L
  REGION 1..13: note = CONT. FROM ABOVE: HLA-DRB1*04:08L HLA-DQA1*02:01-B1*03:03L
  source 1..13: note = Severe acute respiratory syndrome coronavirus 2
ADLDDFSKQLQQS

SEQ ID NO: 11849 - protein, 11 aa, Severe acute respiratory syndrome-related coronavirus
  REGION 1..11: note = Table B: HLA-DQA1*05:01-B1*03:01L HLA-DQA1*05:01-B1*02:01L HLA-DPA1*01:02-B1*04:01L HLA-DQA1*01:03-B1*06:01L HLA-DQA1*02:01-B1*03:03L
  source 1..11: note = Severe acute respiratory syndrome coronavirus 2
DDFSKQLQQSM

SEQ ID NO: 11850 - protein, 11 aa, Severe acute respiratory syndrome-related coronavirus
  REGION 1..11: note = Table B: HLA-DQA1*05:01-B1*03:01L HLA-DRB1*13:02L HLA-DRB1*04:02L HLA-DRB3*02:01L HLA-DPA1*01:03-B1*03:01L HLA-DRB1*14:01L HLA-DQA1*01-B1*05L HLA-DQA1*03:01-B1*03:02L HLA-DQA1*05:05-B1*03:01L HLA-DRB1*14:17L
  REGION 1..11: note = CONT. FROM ABOVE: HLA-DPA1*01:02-B1*04:01L HLA-DRB1*07:01L
  source 1..11: note = Severe acute respiratory syndrome coronavirus 2
GYINVFAFPFT

SEQ ID NO: 11851 - protein, 15 aa, Severe acute respiratory syndrome-related coronavirus
  REGION 1..15: note = Table B: HLA-DRB1*14:04L HLA-DRB3*02:01L HLA-DPA1*01:03-B1*04:02L HLA-DPA1*01:03-B1*02:01L HLA-DRB1*07:01L
  source 1..15: note = Severe acute respiratory syndrome coronavirus 2
VEEVLSEARQHLKDG

SEQ ID NO: 11852 - protein, 12 aa, Severe acute respiratory syndrome-related coronavirus
  REGION 1..12: note = Table B: HLA-DRB1*14:04L HLA-DRB1*04:05L HLA-DQA1*01:02-B1*06:02L HLA-DRB1*01:02L HLA-DRB1*08:04L HLA-DRB1*11:03L HLA-DRB1*11:04L HLA-DRB1*08:01L HLA-DRB1*11:01L HLA-DQA1*05:05-B1*03:19L HLA-DRB1*12:02L
  REGION 1..12: note = CONT. FROM ABOVE: HLA-DQA1*05:05-B1*03:01L HLA-DRB1*08:03L HLA-D RB1*15:03L
  source 1..12: note = Severe acute respiratory syndrome coronavirus 2
GLVEVEKGVLPQ

SEQ ID NO: 11853 - protein, 12 aa, Severe acute respiratory syndrome-related coronavirus
  REGION 1..12: note = Table B: HLA-DRB1*14:04L HLA-DRB1*04:04L HLA-DQA1*01:01-B1*05:01L HLA-DRB1*11:01L HLA-DRB5*01:01L HLA-DRB4*01:01L HLA-DPA1*01:03-B1*04:02L HLA-DRB3*01:01L HLA-DPA1*01:03-B1*104:01L HLA-DRB1*10:01L HLA-DRB1*08:03L
  source 1..12: note = Severe acute respiratory syndrome coronavirus 2
NSIIKTIQPRVE

SEQ ID NO: 11854 - protein, 12 aa, Severe acute respiratory syndrome-related coronavirus
  REGION 1..12: note = Table B: HLA-DRB1*14:04L HLA-DRB1*04:01L HLA-DRB1*04:04L HLA-DQA1*01:02-B1*06:02L HLA-DRB1*01:01L HLA-DRB3*02:01L HLA-DRB1*03:01L HLA-DRB1*11:02L HLA-DRB1*11:03L HLA-DQA1*01:01-B1*05:01L HLA-DRB1*08:01L HLA-DRB1*11:01L
  REGION 1..12: note = CONT. FROM ABOVE: HLA-DRB5*01:01L HLA-DQA1*05:05-B1*03:19L HLA-D RB1*13:01L HLA-DRB4*01:01L HLA-DPA1*01:03-B1*04:01L HLA-DRB1*04: 10L HLA-DRB1*09:01L HLA-DPA1*01:03-B1*04:02L HLA-DRB1*12:02L HLA -DPA1*02:01-B1*13:01L HLA-DPA1*01:03-B1*02:01L
  REGION 1..12: note = CONT. FROM ABOVE: HLA-DPA1*01:03-B1*104:01L HLA-DQA1*05:05-B1*03 :01L HLA-DRB1*07:01L HLA-DRB1*10:01L HLA-DRB1*08:03L HLA-DRB1*15 :01L
  source 1..12: note = Severe acute respiratory syndrome coronavirus 2
INIVGDFKLNEE

SEQ ID NO: 11855 - protein, 14 aa, Severe acute respiratory syndrome-related coronavirus
  REGION 1..14: note = Table B: HLA-DRB1*14:04L HLA-DRB1*08:03L
  source 1..14: note = Severe acute respiratory syndrome coronavirus 2
AQNSVRVLQKAAIT

SEQ ID NO: 11856 - protein, 14 aa, Severe acute respiratory syndrome-related coronavirus
  REGION 1..14: note = Table B: HLA-DRB1*14:04L HLA-DPA1*01:03-B1*03:01L HLA-DPA1*02:01-B1*13:01L
  source 1..14: note = Severe acute respiratory syndrome coronavirus 2
VGGQIVTCAKEIKE

SEQ ID NO: 11857 - protein, 14 aa, Severe acute respiratory syndrome-related coronavirus
  REGION 1..14: note = Table B: HLA-DRB1*14:04L HLA-DRB1*04:01L HLA-DRB1*01:01L HLA-DRB1*08:77L HLA-DRB3*02:01L HLA-DRB1*03:01L HLA-DRB1*11:02L HLA-DQA1*01:01-B1*05:01L HLA-DQA1*05:05-B1*03:116L HLA-DRB1*12:02L HLA-DRB3*01:01L HLA-DPA1*02:01-B1*13:01L
  REGION 1..14: note = CONT. FROM ABOVE: HLA-DPA1*01:03-B1*104:01L HLA-DRB1*07:01L HLA- DRB1*10:01L HLA-DRB1*08:02L HLA-DRB1*08:03L
  source 1..14: note = Severe acute respiratory syndrome coronavirus 2
DSIIIGGAKLKALN

SEQ ID NO: 11858 - protein, 13 aa, Severe acute respiratory syndrome-related coronavirus
  REGION 1..13: note = Table B: HLA-DRB1*14:04L HLA-DPA1*01:03-B1*02:01L
  source 1..13: note = Severe acute respiratory syndrome coronavirus 2
GETFVTHSKGLYR

SEQ ID NO: 11859 - protein, 14 aa, Severe acute respiratory syndrome-related coronavirus
  REGION 1..14: note = Table B: HLA-DRB1*14:04L HLA-DRB1*04:01L HLA-DRB1*01:01L HLA-DRB3*02:01L HLA-DRB1*14:02L HLA-DQA1*01:01-B1*05:01L HLA-DRB1*08:01L HLA-DRB1*11:01L HLA-DRB5*01:01L HLA-DRB4*01:01L HLA-DRB1*09:01L HLA-DRB3*01:01L HLA-DPA1*02:01-B1*13:01L
  REGION 1..14: note = CONT. FROM ABOVE: HLA-DPA1*01:03-B1*104:01L HLA-DRB1*07:01L HLA- DQA1*01:03-B1*06:01L HLA-DRB1*08:02L
  source 1..14: note = Severe acute respiratory syndrome coronavirus 2
TGDLQPLEQPTSEA

SEQ ID NO: 11860 - protein, 14 aa, Severe acute respiratory syndrome-related coronavirus
  REGION 1..14: note = Table B: HLA-DRB1*14:04L HLA-DRB1*04:04L HLA-DRB1*08:01L HLA-DRB1*11:01L HLA-DRB3*01:01L HLA-DPA1*02:01-B1*13:01L HLA-DPA1*01:03-B1*104:01L HLA-DPA1*01:02-B1*04:01L HLA-DRB1*10:01L HLA-DRB1*08:03L
  source 1..14: note = Severe acute respiratory syndrome coronavirus 2
APNMMVTNNTFTLK

SEQ ID NO: 11861 - protein, 14 aa, Severe acute respiratory syndrome-related coronavirus
  REGION 1..14: note = Table B: HLA-DRB1*14:04L HLA-DRB1*13:01L HLA-DQA1*05:05-B1*03:116L HLA-DRB1*08:02L
  source 1..14: note = Severe acute respiratory syndrome coronavirus 2
DDTVIEVQGYKSVN

SEQ ID NO: 11862 - protein, 11 aa, Severe acute respiratory syndrome-related coronavirus
  REGION 1..11: note = Table B: HLA-DRB1*14:04L HLA-DRB1*04:01L HLA-DRB1*08:04L HLA-DRB1*08:77L HLA-DRB3*02:01L HLA-DPA1*01:03-B1*03:01L HLA-DPA1*03:01-B1*04:02L HLA-DRB1*11:03L HLA-DRB1*11:04L HLA-DRB1*14:02L HLA-DQA1*01:01-B1*05:01L HLA-DRB1*08:01L
  REGION 1..11: note = CONT. FROM ABOVE: HLA-DRB5*01:01L HLA-DQA1*05:05-B1*03:19L HLA-D RB1*09:01L HLA-DRB3*01:01L HLA-DPA1*02:01-B1*13:01L HLA-DRB1*07: 01L HLA-DRB1*10:01L HLA-DRB1*08:03L
  source 1..11: note = Severe acute respiratory syndrome coronavirus 2
AVIKTLQPVSE

SEQ ID NO: 11863 - protein, 13 aa, Severe acute respiratory syndrome-related coronavirus
  REGION 1..13: note = Table B: HLA-DRB1*14:04L HLA-DRB1*11:02L HLA-DRB4*02:01NL HLA-DPA1*01:03-B1*02:01L HLA-DRB1*15:01L
  source 1..13: note = Severe acute respiratory syndrome coronavirus 2
ATYYLFDESGEFK

SEQ ID NO: 11864 - protein, 14 aa, Severe acute respiratory syndrome-related coronavirus
  REGION 1..14: note = Table B: HLA-DRB1*14:04L HLA-DRB1*04:01L HLA-DRB1*11:03L HLA-DRB1*14:02L HLA-DRB1*08:01L HLA-DRB4*01:01L HLA-DRB1*09:01L HLA-DPA1*01:03-B1*04:02L HLA-DPA1*01:02-B1*04:01L HLA-DRB1*07:01L
  source 1..14: note = Severe acute respiratory syndrome coronavirus 2
IQTIVEVQPQLEME

SEQ ID NO: 11865 - protein, 14 aa, Severe acute respiratory syndrome-related coronavirus
  REGION 1..14: note = Table B: HLA-DRB1*14:04L HLA-DPA1*01:03-B1*03:01L HLA-DPA1*03:01-B1*04:02L HLA-DRB1*08:01L HLA-DRB5*01:01L HLA-DQA1*05:05-B1*03:19L HLA-DRB4*01:01L HLA-DRB1*09:01L HLA-DRB3*01:01L HLA-DPA1*02:01-B1*13:01L
  REGION 1..14: note = CONT. FROM ABOVE: HLA-DPA1*01:03-B1*104:01L HLA-DRB1*07:01L HLA- DQA1*01:03-B1*06:01L
  source 1..14: note = Severe acute respiratory syndrome coronavirus 2
VQPQLEMELTPVVQ

SEQ ID NO: 11866 - protein, 13 aa, Severe acute respiratory syndrome-related coronavirus
  REGION 1..13: note = Table B: HLA-DRB1*14:04L HLA-DRB1*04:04L HLA-DRB1*08:04L HLA-DRB1*11:04L HLA-DQA1*01:01-B1*05:01L HLA-DPA1*01:03-B1*104:01L HLA-DRB1*10:01L HLA-DRB1*08:03L
  source 1..13: note = Severe acute respiratory syndrome coronavirus 2
TPVVQTIEVNSFS

SEQ ID NO: 11867 - protein, 13 aa, Severe acute respiratory syndrome-related coronavirus
  REGION 1..13: note = Table B: HLA-DRB1*14:04L HLA-DRB1*04:01L HLA-DRB1*01:01L HLA-DRB4*01:01L HLA-DPA1*01:03-B1*02:01L HLA-DPA1*01:03-B1*104:01L HLA-DRB1*08:02L
  source 1..13: note = Severe acute respiratory syndrome coronavirus 2
DNVYIKNADIVEE

SEQ ID NO: 11868 - protein, 13 aa, Severe acute respiratory syndrome-related coronavirus
  REGION 1..13: note = Table B: HLA-DRB1*14:04L HLA-DRB1*04:04L HLA-DRB1*11:03L HLA-DRB1*08:03L
  source 1..13: note = Severe acute respiratory syndrome coronavirus 2
ADIVEEAKKVKPT

SEQ ID NO: 11869 - protein, 13 aa, Severe acute respiratory syndrome-related coronavirus
  REGION 1..13: note = Table B: HLA-DRB1*14:04L HLA-DRB1*11:04L HLA-DRB1*08:01L HLA-DRB1*04:10L HLA-DRB1*09:01L HLA-DRB3*01:01L HLA-DRB1*04:08L HLA-DRB1*08:03L
  source 1..13: note = Severe acute respiratory syndrome coronavirus 2
VKPTVVVNAANVY

SEQ ID NO: 11870 - protein, 14 aa, Severe acute respiratory syndrome-related coronavirus
  REGION 1..14: note = Table B: HLA-DRB1*14:04L HLA-DRB1*04:01L HLA-DRB1*01:01L HLA-DRB1*08:01L HLA-DRB1*11:01L HLA-DRB5*01:01L HLA-DRB1*13:01L HLA-DRB1*08:03L
  source 1..14: note = Severe acute respiratory syndrome coronavirus 2
KPTVVVNAANVYLK

SEQ ID NO: 11871 - protein, 12 aa, Severe acute respiratory syndrome-related coronavirus
  REGION 1..12: note = Table B: HLA-DRB1*14:04L HLA-DRB1*01:01L
  source 1..12: note = Severe acute respiratory syndrome coronavirus 2
GALNKATNNAMQ

SEQ ID NO: 11872 - protein, 12 aa, Severe acute respiratory syndrome-related coronavirus
  REGION 1..12: note = Table B: HLA-DRB1*14:04L HLA-DRB1*04:01L HLA-DRB1*11:02L HLA-DRB4*02:01NL HLA-DRB1*13:01L HLA-DRB4*01:01L HLA-DPA1*01:03-B1*04:01L HLA-DRB1*08:02L HLA-DRB1*15:01L
  source 1..12: note = Severe acute respiratory syndrome coronavirus 2
DYIATNGPLKVG

SEQ ID NO: 11873 - protein, 12 aa, Severe acute respiratory syndrome-related coronavirus
  REGION 1..12: note = Table B: HLA-DRB1*14:04L HLA-DRB1*04:01L HLA-DRB1*04:04L HLA-DRB1*01:01L HLA-DRB1*03:01L HLA-DRB1*11:02L HLA-DQA1*01:01-B1*05:01L HLA-DRB1*08:01L HLA-DRB1*11:01L HLA-DRB5*01:01L HLA-DQA1*01-B1*05L HLA-DRB4*02:01NL
  REGION 1..12: note = CONT. FROM ABOVE: HLA-DRB5*02:02L HLA-DRB1*13:01L HLA-DRB4*01:01 L HLA-DPA1*01:03-B1*04:01L HLA-DQA1*05:05-B1*03:116L HLA-DRB1*04 :10L HLA-DRB1*09:01L HLA-DPA1*01:03-B1*04:02L HLA-DRB3*01:01L HL A-DPA1*02:01-B1*13:01L HLA-DPA1*01:03-B1*02:01L
  REGION 1..12: note = CONT. FROM ABOVE: HLA-DPA1*01:03-B1*104:01L HLA-DRB1*10:01L HLA- DRB1*08:02L HLA-DRB1*08:03L HLA-DRB1*15:01L
  source 1..12: note = Severe acute respiratory syndrome coronavirus 2
IATNGPLKVGGS

SEQ ID NO: 11874 - protein, 13 aa, Severe acute respiratory syndrome-related coronavirus
  REGION 1..13: note = Table B: HLA-DRB1*14:04L HLA-DRB1*04:01L HLA-DRB1*01:01L HLA-DRB1*11:01L HLA-DRB5*01:01L HLA-DRB1*09:01L HLA-DRB1*07:01L
  source 1..13: note = Severe acute respiratory syndrome coronavirus 2
GEDIQLLKSAYEN

SEQ ID NO: 11875 - protein, 13 aa, Severe acute respiratory syndrome-related coronavirus
  REGION 1..13: note = Table B: HLA-DRB1*14:04L
  source 1..13: note = Severe acute respiratory syndrome coronavirus 2
SAGIFGADPIHSL

SEQ ID NO: 11876 - protein, 12 aa, Severe acute respiratory syndrome-related coronavirus
  REGION 1..12: note = Table B: HLA-DRB1*14:04L HLA-DRB4*02:01NL
  source 1..12: note = Severe acute respiratory syndrome coronavirus 2
GIFGADPIHSLR

SEQ ID NO: 11877 - protein, 16 aa, Severe acute respiratory syndrome-related coronavirus
  REGION 1..16: note = Table B: HLA-DRB1*14:04L
  source 1..16: note = Severe acute respiratory syndrome coronavirus 2
VEQKIAEIPKEEVKPF

SEQ ID NO: 11878 - protein, 14 aa, Severe acute respiratory syndrome-related coronavirus
  REGION 1..14: note = Table B: HLA-DRB1*14:04L HLA-DRB1*01:01L HLA-DRB1*03:01L HLA-DRB1*11:02L HLA-DRB5*01:01L HLA-DRB1*13:01L HLA-DPA1*01:03-B1*02:01L HLA-DPA1*01:03-B1*104:01L
  source 1..14: note = Severe acute respiratory syndrome coronavirus 2
VKPFITESKPSVEQ

SEQ ID NO: 11879 - protein, 14 aa, Severe acute respiratory syndrome-related coronavirus
  REGION 1..14: note = Table B: HLA-DRB1*14:04L HLA-DRB1*11:02L HLA-DRB4*02:01NL HLA-DPA1*01:03-B1*04:01L HLA-DPA1*01:03-B1*02:01L
  source 1..14: note = Severe acute respiratory syndrome coronavirus 2
NGNLHPDSATLVSD

SEQ ID NO: 11880 - protein, 15 aa, Severe acute respiratory syndrome-related coronavirus
  REGION 1..15: note = Table B: HLA-DRB1*14:04L HLA-DRB4*02:01NL HLA-DRB5*02:02L HLA-DRB1*15:01L
  source 1..15: note = Severe acute respiratory syndrome coronavirus 2
GNLHPDSATLVSDID

SEQ ID NO: 11881 - protein, 15 aa, Severe acute respiratory syndrome-related coronavirus
  REGION 1..15: note = Table B: HLA-DRB1*14:04L HLA-DRB4*02:01NL
  source 1..15: note = Severe acute respiratory syndrome coronavirus 2
DAPYIVGDVVQEGVL

SEQ ID NO: 11882 - protein, 13 aa, Severe acute respiratory syndrome-related coronavirus
  REGION 1..13: note = Table B: HLA-DRB1*14:04L HLA-DRB1*08:77L HLA-DPA1*03:01-B1*04:02L HLA-DRB1*11:02L HLA-DQA1*05:05-B1*03:116L HLA-DPA1*01:03-B1*04:02L HLA-DRB1*12:02L HLA-DPA1*03:01-B1*105:01L
  REGION 1..13: note = CONT. FROM ABOVE: HLA-DPA1*01:03-B1*02:01L HLA-DRB1*10:01L
  source 1..13: note = Severe acute respiratory syndrome coronavirus 2
AVVIPTKKAGGTT

SEQ ID NO: 11883 - protein, 14 aa, Severe acute respiratory syndrome-related coronavirus
  REGION 1..14: note = Table B: HLA-DRB1*14:04L HLA-DRB1*04:01L HLA-DRB1*03:01L HLA-DRB4*02:01NL HLA-DRB1*13:01L HLA-DQA1*05:05-B1*03:116L HLA-DPA1*01:03-B1*02:01L HLA-DRB1*08:02L
  source 1..14: note = Severe acute respiratory syndrome coronavirus 2
DNYITTYPGQGLNG

SEQ ID NO: 11884 - protein, 13 aa, Severe acute respiratory syndrome-related coronavirus
  REGION 1..13: note = Table B: HLA-DRB1*14:04L HLA-DRB1*01:03L HLA-DRB1*04:05L HLA-DRB1*01:02L HLA-DRB4*03:01NL HLA-DPA1*01:03-B1*03:01L HLA-DRB1*03:01L HLA-DRB1*11:03L HLA-DRB1*11:04L HLA-DRB1*08:01L HLA-DRB1*11:01L HLA-DRB5*01:01L HLA-DRB1*09:01L HLA-DRB3*01:01L
  REGION 1..13: note = CONT. FROM ABOVE: HLA-DPA1*03:01-B1*105:01L HLA-DQA1*05:05-B1*03 :01L HLA-DRB1*10:01L HLA-DRB1*04:08L HLA-DRB1*08:03L
  source 1..13: note = Severe acute respiratory syndrome coronavirus 2
LPSIISNEKQEIL

SEQ ID NO: 11885 - protein, 13 aa, Severe acute respiratory syndrome-related coronavirus
  REGION 1..13: note = Table B: HLA-DRB1*14:04L HLA-DRB1*11:02L HLA-DRB1*08:01L HLA-DRB5*01:01L HLA-DRB1*13:01L HLA-DRB4*01:01L HLA-DRB1*09:01L HLA-DPA1*01:03-B1*04:02L HLA-DRB1*08:02L
  source 1..13: note = Severe acute respiratory syndrome coronavirus 2
PSIISNEKQEILG

SEQ ID NO: 11886 - protein, 14 aa, Severe acute respiratory syndrome-related coronavirus
  REGION 1..14: note = Table B: HLA-DRB1*14:04L HLA-DRB1*08:77L HLA-DRB1*11:02L HLA-DRB1*14:02L HLA-DRB1*11:01L HLA-DRB4*01:01L HLA-DPA1*01:03-B1*02:01L HLA-DRB1*08:02L
  source 1..14: note = Severe acute respiratory syndrome coronavirus 2
YKGIKIQEGVVDYG

SEQ ID NO: 11887 - protein, 14 aa, Severe acute respiratory syndrome-related coronavirus
  REGION 1..14: note = Table B: HLA-DRB1*14:04L HLA-DRB1*01:01L HLA-DRB1*08:77L HLA-DRB1*03:01L HLA-DRB1*14:02L HLA-DRB4*01:01L HLA-DRB1*09:01L HLA-DPA1*01:03-B1*02:01L
  source 1..14: note = Severe acute respiratory syndrome coronavirus 2
GIKIQEGVVDYGAR

SEQ ID NO: 11888 - protein, 14 aa, Severe acute respiratory syndrome-related coronavirus
  REGION 1..14: note = Table B: HLA-DRB1*14:04L HLA-DRB1*08:77L HLA-DRB3*02:01L HLA-DPA1*01:03-B1*03:01L HLA-DPA1*03:01-B1*04:02L HLA-DRB1*14:02L HLA-DQA1*01:01-B1*05:01L HLA-DRB1*08:01L HLA-DRB5*01:01L HLA-DRB4*01:01L HLA-DRB1*09:01L HLA-DRB3*01:01L
  REGION 1..14: note = CONT. FROM ABOVE: HLA-DPA1*02:01-B1*13:01L HLA-DPA1*01:03-B1*104 :01L HLA-DRB1*07:01L
  source 1..14: note = Severe acute respiratory syndrome coronavirus 2
VASLINTLNDLNET

SEQ ID NO: 11889 - protein, 13 aa, Severe acute respiratory syndrome-related coronavirus
  REGION 1..13: note = Table B: HLA-DRB1*14:04L HLA-DRB1*01:01L HLA-DQA1*05:05-B1*03:116L HLA-DRB3*01:01L HLA-DPA1*01:03-B1*02:01L HLA-DPA1*01:03-B1*104:01L
  source 1..13: note = Severe acute respiratory syndrome coronavirus 2
NGYLTSSSKTPEE

SEQ ID NO: 11890 - protein, 14 aa, Severe acute respiratory syndrome-related coronavirus
  REGION 1..14: note = Table B: HLA-DRB1*14:04L HLA-DRB1*11:02L HLA-DRB4*02:01NL HLA-DRB1*13:01L HLA-DPA1*01:03-B1*02:01L HLA-DRB1*08:02L
  source 1..14: note = Severe acute respiratory syndrome coronavirus 2
DKSVYYTSNPTTFH

SEQ ID NO: 11891 - protein, 16 aa, Severe acute respiratory syndrome-related coronavirus
  REGION 1..16: note = Table B: HLA-DRB1*14:04L HLA-DRB4*02:01NL HLA-DPA1*01:03-B1*02:01L HLA-DRB1*15:01L
  source 1..16: note = Severe acute respiratory syndrome coronavirus 2
NPTTFHLDGEVITFDN

SEQ ID NO: 11892 - protein, 13 aa, Severe acute respiratory syndrome-related coronavirus
  REGION 1..13: note = Table B: HLA-DRB1*14:04L HLA-DRB1*04:01L HLA-DRB1*01:01L HLA-DRB1*11:02L HLA-DRB1*11:01L HLA-DPA1*01:03-B1*02:01L
  source 1..13: note = Severe acute respiratory syndrome coronavirus 2
DGEVITFDNLKTL

SEQ ID NO: 11893 - protein, 13 aa, Severe acute respiratory syndrome-related coronavirus
  REGION 1..13: note = Table B: HLA-DRB1*14:04L HLA-DRB1*01:01L HLA-DRB1*03:01L HLA-DRB1*11:02L HLA-DRB1*11:01L HLA-DRB5*01:01L HLA-DRB1*13:01L HLA-DPA1*01:03-B1*02:01L HLA-DRB1*08:02L HLA-DRB1*15:01L
  source 1..13: note = Severe acute respiratory syndrome coronavirus 2
INLHTQVVDMSMT

SEQ ID NO: 11894 - protein, 15 aa, Severe acute respiratory syndrome-related coronavirus
  REGION 1..15: note = Table B: HLA-DRB1*14:04L HLA-DRB1*04:01L HLA-DRB1*01:01L HLA-DRB1*03:01L HLA-DRB1*11:02L HLA-DRB1*11:04L HLA-DRB1*08:01L HLA-DRB1*11:01L HLA-DRB3*01:01L HLA-DPA1*01:03-B1*104:01L HLA-DRB1*10:01L HLA-DRB1*15:01L
  source 1..15: note = Severe acute respiratory syndrome coronavirus 2
YPQVNGLTSIKWADN

SEQ ID NO: 11895 - protein, 14 aa, Severe acute respiratory syndrome-related coronavirus
  REGION 1..14: note = Table B: HLA-DRB1*14:04L HLA-DRB1*13:02L HLA-DRB1*01:03L HLA-DRB1*04:04L HLA-DRB4*03:01NL HLA-DRB1*08:04L HLA-DRB1*11:03L HLA-DRB1*11:04L HLA-DRB1*09:01L HLA-DQA1*01:03-B1*06:01L HLA-DRB1*04:08L HLA-DRB1*08:03L
  source 1..14: note = Severe acute respiratory syndrome coronavirus 2
VEAVMYMGTLSYEQ

SEQ ID NO: 11896 - protein, 14 aa, Severe acute respiratory syndrome-related coronavirus
  REGION 1..14: note = Table B: HLA-DRB1*14:04L HLA-DRB1*04:03L HLA-DRB1*13:02L HLA-DRB1*13:03M HLA-DRB1*04:02L HLA-DRB1*04:04L HLA-DRB1*01:02L HLA-DRB4*03:01NL HLA-DRB1*08:04L HLA-DRB3*02:01L HLA-DRB1*11:03L HLA-DRB1*11:04L HLA-DQA1*01:01-B1*05:01L HLA-DRB1*11:01L
  REGION 1..14: note = CONT. FROM ABOVE: HLA-DQA1*01-B1*05L HLA-DRB1*04:10L HLA-DRB1*09 :01L HLA-DRB1*12:02L HLA-DRB3*01:01L HLA-DRB1*14:54L HLA-DPA1*01 :03-B1*02:01L HLA-DPA1*01:03-B1*104:01L HLA-DQA1*05:05-B1*03:01L HLA-DRB1*14:17L HLA-DRB1*07:01L HLA-DRB1*10:01L HLA-DRB1*04:08M
  REGION 1..14: note = CONT. FROM ABOVE: HLA-DRB1*08:03L
  source 1..14: note = Severe acute respiratory syndrome coronavirus 2
APPAQYELKHGTFT

SEQ ID NO: 11897 - protein, 12 aa, Severe acute respiratory syndrome-related coronavirus
  REGION 1..12: note = Table B: HLA-DRB1*14:04L HLA-DRB1*04:04L HLA-DRB5*01:01L HLA-DRB1*09:01L HLA-DRB3*01:01L HLA-DPA1*01:03-B1*104:01L HLA-DRB1*07:01L HLA-DRB1*08:02L
  source 1..12: note = Severe acute respiratory syndrome coronavirus 2
ENSYTTTIKPVT

SEQ ID NO: 11898 - protein, 13 aa, Severe acute respiratory syndrome-related coronavirus
  REGION 1..13: note = Table B: HLA-DRB1*14:04L HLA-DRB1*04:04L HLA-DQA1*01:02-B1*06:02L HLA-DRB1*08:04L HLA-DRB1*11:03L HLA-DRB1*11:04L HLA-DRB1*14:02L HLA-DRB1*08:01L HLA-DRB1*09:01L HLA-DPA1*02:01-B1*13:01L HLA-DPA1*03:01-B1*105:01L
  REGION 1..13: note = CONT. FROM ABOVE: HLA-DQA1*05:05-B1*03:01L HLA-DPA1*01:02-B1*04: 01L HLA-DRB1*07:01L HLA-DRB1*10:01L HLA-DQA1*01:03-B1*06:01L HLA -DRB1*08:03L
  source 1..13: note = Severe acute respiratory syndrome coronavirus 2
EQPIDLVPNQPYP

SEQ ID NO: 11899 - protein, 12 aa, Severe acute respiratory syndrome-related coronavirus
  REGION 1..12: note = Table B: HLA-DRB1*14:04L HLA-DRB1*04:01L HLA-DQA1*01:02-B1*06:02L HLA-DRB1*01:01L HLA-DPA1*03:01-B1*04:02L HLA-DRB1*03:01L HLA-DQA1*01:01-B1*05:01L HLA-DRB1*08:01L HLA-DRB1*11:01L
  REGION 1..12: note = CONT. FROM ABOVE: HLA-DRB5*01:01L HLA-DRB1*13:01L HLA-DRB4*01:01 L HLA-DRB1*09:01L HLA-DPA1*01:03-B1*04:02L HLA-DRB3*01:01L HLA-D PA1*02:01-B1*13:01L HLA-DPA1*03:01-B1*105:01L HLA-DQA1*05:05-B1* 03:01L HLA-DPA1*01:02-B1*04:01L HLA-DRB1*07:01L
  REGION 1..12: note = CONT. FROM ABOVE: HLA-DQA1*01:03-B1*06:01L HLA-DRB1*15:01L
  source 1..12: note = Severe acute respiratory syndrome coronavirus 2
PIDLVPNQPYPN

SEQ ID NO: 11900 - protein, 14 aa, Severe acute respiratory syndrome-related coronavirus
  REGION 1..14: note = Table B: HLA-DRB1*14:04L HLA-DRB1*01:01L HLA-DRB3*02:01L HLA-DRB1*11:02L HLA-DQA1*01:01-B1*05:01L HLA-DRB1*11:01L HLA-DRB5*01:01L HLA-DQA1*05:05-B1*03:19L HLA-DRB1*13:01L HLA-DPA1*01:03-B1*04:01L HLA-DPA1*01:03-B1*04:02L
  REGION 1..14: note = CONT. FROM ABOVE: HLA-DPA1*01:03-B1*02:01L HLA-DPA1*01:03-B1*104 :01L HLA-DRB1*07:01L HLA-DRB1*08:02L HLA-DRB1*15:01L
  source 1..14: note = Severe acute respiratory syndrome coronavirus 2
DNIKFADDLNQLTG

SEQ ID NO: 11901 - protein, 13 aa, Severe acute respiratory syndrome-related coronavirus
  REGION 1..13: note = Table B: HLA-DRB1*14:04L HLA-DRB1*03:01L HLA-DRB1*11:02L HLA-DRB4*02:01NL HLA-DRB1*13:01L HLA-DPA1*01:03-B1*04:01L HLA-DPA1*01:03-B1*04:02L HLA-DPA1*01:03-B1*02:01L HLA-DRB1*08:02L HLA-DRB1*15:01L
  source 1..13: note = Severe acute respiratory syndrome coronavirus 2
DVLKSEDAQGMDN

SEQ ID NO: 11902 - protein, 13 aa, Severe acute respiratory syndrome-related coronavirus
  REGION 1..13: note = Table B: HLA-DRB1*14:04L HLA-DRB1*04:04L HLA-DRB1*11:01L HLA-DPA1*02:01-B1*13:01L HLA-DRB1*07:01L
  source 1..13: note = Severe acute respiratory syndrome coronavirus 2
VGDIILKPANNSL

SEQ ID NO: 11903 - protein, 13 aa, Severe acute respiratory syndrome-related coronavirus
  REGION 1..13: note = Table B: HLA-DRB1*14:04L HLA-DRB1*01:01L HLA-DRB1*03:01L HLA-DRB1*11:02L HLA-DRB5*01:01L HLA-DPA1*01:03-B1*104:01L HLA-DRB1*07:01L HLA-DRB1*08:02L HLA-DRB1*15:01L
  source 1..13: note = Severe acute respiratory syndrome coronavirus 2
GDIILKPANNSLK

SEQ ID NO: 11904 - protein, 14 aa, Severe acute respiratory syndrome-related coronavirus
  REGION 1..14: note = Table B: HLA-DRB1*14:04L HLA-DRB1*13:01L HLA-DRB1*08:02L
  source 1..14: note = Severe acute respiratory syndrome coronavirus 2
AAYVDNSSLTIKKP

SEQ ID NO: 11905 - protein, 13 aa, Severe acute respiratory syndrome-related coronavirus
  REGION 1..13: note = Table B: HLA-DRB1*14:04L HLA-DRB1*11:02L HLA-DPA1*01:03-B1*04:01L HLA-DRB1*09:01L HLA-DPA1*01:03-B1*02:01L HLA-DPA1*01:03-B1*104:01L HLA-DRB1*08:02L
  source 1..13: note = Severe acute respiratory syndrome coronavirus 2
YVDNSSLTIKKPN

SEQ ID NO: 11906 - protein, 13 aa, Severe acute respiratory syndrome-related coronavirus
  REGION 1..13: note = Table B: HLA-DRB1*14:04L HLA-DRB1*13:03L HLA-DRB1*01:03L HLA-DRB1*04:04L HLA-DRB1*04:05L HLA-DRB4*03:01NL HLA-DRB1*08:04L HLA-DRB1*11:03L HLA-DRB1*14:02L HLA-DQA1*01-B1*05L HLA-DRB1*04:10L HLA-DRB1*09:01L HLA-DPA1*02:01-B1*13:01L
  REGION 1..13: note = CONT. FROM ABOVE: HLA-DPA1*01:03-B1*104:01L HLA-DPA1*01:02-B1*04 :01L HLA-DRB1*07:01L HLA-DRB1*10:01L HLA-DRB1*04:08L
  source 1..13: note = Severe acute respiratory syndrome coronavirus 2
THGLAAVNSVPWD

SEQ ID NO: 11907 - protein, 12 aa, Severe acute respiratory syndrome-related coronavirus
  REGION 1..12: note = Table B: HLA-DRB1*14:04L HLA-DRB1*04:01L HLA-DQA1*01:02-B1*06:02L HLA-DRB1*01:01L HLA-DRB1*03:01L HLA-DRB1*08:01L HLA-DRB1*11:01L HLA-DQA1*01-B1*05L HLA-DRB4*02:01NL HLA-DRB1*13:01L HLA-DRB4*01:01L
  REGION 1..12: note = CONT. FROM ABOVE: HLA-DPA1*01:03-B1*04:01L HLA-DPA1*01:03-B1*04: 02L HLA-DRB3*01:01L HLA-DPA1*02:01-B1*13:01L HLA-DPA1*01:03-B1*1 04:01L HLA-DPA1*01:02-B1*04:01L HLA-DRB1*15:01L
  source 1..12: note = Severe acute respiratory syndrome coronavirus 2
NKVVSTTTNIVT

SEQ ID NO: 11908 - protein, 13 aa, Severe acute respiratory syndrome-related coronavirus
  REGION 1..13: note = Table B: HLA-DRB1*14:04L HLA-DRB1*11:02L HLA-DQA1*01:01-B1*05:01L HLA-DRB1*11:01L HLA-DRB1*08:02L HLA-DRB1*15:01L
  source 1..13: note = Severe acute respiratory syndrome coronavirus 2
EASFNYLKSPNFS

SEQ ID NO: 11909 - protein, 14 aa, Severe acute respiratory syndrome-related coronavirus
  REGION 1..14: note = Table B: HLA-DRB1*14:04L HLA-DRB1*03:01L HLA-DQA1*01:01-B1*05:01L HLA-DRB4*02:01NL HLA-DRB1*13:01L HLA-DPA1*01:03-B1*02:01L HLA-DRB1*08:02L HLA-DRB1*15:01L
  source 1..14: note = Severe acute respiratory syndrome coronavirus 2
REGYLNSTNVTIAT

SEQ ID NO: 11910 - protein, 14 aa, Severe acute respiratory syndrome-related coronavirus
  REGION 1..14: note = Table B: HLA-DRB1*14:04L HLA-DRB1*15:01L
  source 1..14: note = Severe acute respiratory syndrome coronavirus 2
AGSTFISDEVARDL

SEQ ID NO: 11911 - protein, 13 aa, Severe acute respiratory syndrome-related coronavirus
  REGION 1..13: note = Table B: HLA-DRB1*14:04L HLA-DRB1*11:02L HLA-DRB4*02:01NL HLA-DRB1*15:01L
  source 1..13: note = Severe acute respiratory syndrome coronavirus 2
STFISDEVARDLS

SEQ ID NO: 11912 - protein, 15 aa, Severe acute respiratory syndrome-related coronavirus
  REGION 1..15: note = Table B: HLA-DRB1*14:04L HLA-DRB1*11:02L HLA-DRB1*08:02L
  source 1..15: note = Severe acute respiratory syndrome coronavirus 2
DQSSYIVDSVTVKNG

SEQ ID NO: 11913 - protein, 13 aa, Severe acute respiratory syndrome-related coronavirus
  REGION 1..13: note = Table B: HLA-DRB1*14:04L HLA-DRB1*04:04L HLA-DRB1*08:04L HLA-DRB1*08:77L HLA-DRB3*02:01L HLA-DPA1*01:03-B1*03:01L HLA-DRB1*11:04L HLA-DRB1*14:02L HLA-DRB1*11:01L HLA-DPA1*01:03-B1*04:02L HLA-DRB1*12:02L HLA-DRB3*01:01L
  REGION 1..13: note = CONT. FROM ABOVE: HLA-DPA1*02:01-B1*13:01L HLA-DPA1*01:03-B1*104 :01L HLA-DRB1*07:01L HLA-DRB1*08:03L HLA-DRB1*15:03L
  source 1..13: note = Severe acute respiratory syndrome coronavirus 2
IVDSVTVKNGSIH

SEQ ID NO: 11914 - protein, 16 aa, Severe acute respiratory syndrome-related coronavirus
  REGION 1..16: note = Table B: HLA-DRB1*14:04L HLA-DRB1*08:02L
  source 1..16: note = Severe acute respiratory syndrome coronavirus 2
LDQALVSDVGDSAEVA

SEQ ID NO: 11915 - protein, 13 aa, Severe acute respiratory syndrome-related coronavirus
  REGION 1..13: note = Table B: HLA-DRB1*14:04L HLA-DRB1*04:01L HLA-DRB1*04:04L HLA-DRB1*01:01L HLA-DRB1*03:01L HLA-DRB1*11:02L HLA-DQA1*01:01-B1*05:01L HLA-DRB1*11:01L HLA-DRB4*02:01NL HLA-DRB1*13:01L HLA-DPA1*01:03-B1*04:02L
  REGION 1..13: note = CONT. FROM ABOVE: HLA-DPA1*01:03-B1*02:01L HLA-DRB1*08:02L HLA-D RB1*15:01L
  source 1..13: note = Severe acute respiratory syndrome coronavirus 2
VNTFSSTFNVPME

SEQ ID NO: 11916 - protein, 15 aa, Severe acute respiratory syndrome-related coronavirus
  REGION 1..15: note = Table B: HLA-DRB1*14:04L
  source 1..15: note = Severe acute respiratory syndrome coronavirus 2
LKTLVATAEAELAKN

SEQ ID NO: 11917 - protein, 14 aa, Severe acute respiratory syndrome-related coronavirus
  REGION 1..14: note = Table B: HLA-DRB1*14:04L HLA-DRB1*04:01L HLA-DRB1*01:01L HLA-DRB1*08:77L HLA-DRB1*11:02L HLA-DRB1*11:03L HLA-DRB1*11:04L HLA-DRB1*14:02L HLA-DRB1*11:01L HLA-DRB4*02:01NL HLA-DRB4*01:01L HLA-DPA1*01:03-B1*04:01L HLA-DQA1*05:05-B1*03:116L
  REGION 1..14: note = CONT. FROM ABOVE: HLA-DRB1*09:01L HLA-DRB1*12:02L HLA-DRB3*01:01 L HLA-DPA1*01:03-B1*02:01L HLA-DPA1*01:03-B1*104:01L HLA-DRB1*07 :01L HLA-DRB1*10:01L HLA-DRB1*08:02L
  source 1..14: note = Severe acute respiratory syndrome coronavirus 2
DNVLSTFISAARQG

SEQ ID NO: 11918 - protein, 13 aa, Severe acute respiratory syndrome-related coronavirus
  REGION 1..13: note = Table B: HLA-DRB1*14:04L HLA-DRB1*04:04L HLA-DRB1*03:01L HLA-DRB5*01:01L HLA-DRB1*13:01L HLA-DRB1*04:10L HLA-DRB1*07:01L HLA-DRB1*10:01L
  source 1..13: note = Severe acute respiratory syndrome coronavirus 2
STFISAARQGFVD

SEQ ID NO: 11919 - protein, 13 aa, Severe acute respiratory syndrome-related coronavirus
  REGION 1..13: note = Table B: HLA-DRB1*14:04L HLA-DRB1*04:04L HLA-DRB1*08:04L HLA-DRB1*11:03L HLA-DRB1*11:04L HLA-DQA1*01-B1*05L HLA-DRB3*01:01L HLA-DRB1*07:01L
  source 1..13: note = Severe acute respiratory syndrome coronavirus 2
TRQVVNVVTTKIA

SEQ ID NO: 11920 - protein, 15 aa, Severe acute respiratory syndrome-related coronavirus
  REGION 1..15: note = Table B: HLA-DRB1*14:04L HLA-DRB1*13:01L HLA-DQA1*05:05-B1*03:116L
  source 1..15: note = Severe acute respiratory syndrome coronavirus 2
SSEIIGYKAIDGGVT

SEQ ID NO: 11921 - protein, 14 aa, Severe acute respiratory syndrome-related coronavirus
  REGION 1..14: note = Table B: HLA-DRB1*14:04L HLA-DQA1*01:01-B1*05:01L HLA-DRB4*02:01NL HLA-DRB5*02:02L HLA-DRB1*13:01L HLA-DQA1*05:05-B1*03:116L HLA-DRB1*08:02L HLA-DRB1*15:01L
  source 1..14: note = Severe acute respiratory syndrome coronavirus 2
GGSYTNDKACPLIA

SEQ ID NO: 11922 - protein, 16 aa, Severe acute respiratory syndrome-related coronavirus
  REGION 1..16: note = Table B: HLA-DRB1*14:04L HLA-DRB1*03:01L HLA-DRB1*11:02L HLA-DRB4*01:01L HLA-DRB1*09:01L HLA-DRB1*08:02L
  source 1..16: note = Severe acute respiratory syndrome coronavirus 2
TNVLEGSVAYESLRPD

SEQ ID NO: 11923 - protein, 15 aa, Severe acute respiratory syndrome-related coronavirus
  REGION 1..15: note = Table B: HLA-DRB1*14:04L HLA-DRB1*11:02L HLA-DQA1*01:01-B1*05:01L HLA-DPA1*01:03-B1*04:02L HLA-DPA1*01:03-B1*02:01L HLA-DRB1*08:02L
  source 1..15: note = Severe acute respiratory syndrome coronavirus 2
RPDTRYVLMDGSIIQ

SEQ ID NO: 11924 - protein, 14 aa, Severe acute respiratory syndrome-related coronavirus
  REGION 1..14: note = Table B: HLA-DRB1*14:04L HLA-DRB1*13:01L HLA-DPA1*01:03-B1*02:01L HLA-DRB1*08:02L
  source 1..14: note = Severe acute respiratory syndrome coronavirus 2
DGSIIQFPNTYLEG

SEQ ID NO: 11925 - protein, 13 aa, Severe acute respiratory syndrome-related coronavirus
  REGION 1..13: note = Table B: HLA-DRB1*14:04L HLA-DRB1*13:02L HLA-DRB1*01:03L HLA-DRB1*04:04L HLA-DRB1*04:05L HLA-DQA1*01:02-B1*06:02L HLA-DRB1*08:04L HLA-DRB1*08:77L HLA-DRB3*02:01L HLA-DPA1*01:03-B1*03:01L HLA-DPA1*03:01-B1*04:02L
  REGION 1..13: note = CONT. FROM ABOVE: HLA-DRB1*11:03L HLA-DRB1*11:04L HLA-DRB1*14:02 L HLA-DQA1*01:01-B1*05:01L HLA-DRB1*08:01L HLA-DQA1*05:05-B1*03: 19L HLA-DRB4*01:01L HLA-DPA1*01:03-B1*04:01L HLA-DRB1*04:10L HLA -DRB1*09:01L HLA-DRB1*12:02M HLA-DRB3*01:01L
  REGION 1..13: note = CONT. FROM ABOVE: HLA-DPA1*02:01-B1*13:01L HLA-DRB1*14:54L HLA-D PA1*01:03-B1*104:01L HLA-DQA1*05:05-B1*03:01L HLA-DPA1*01:02-B1* 04:01L HLA-DRB1*07:01L HLA-DRB1*10:01L HLA-DQA1*01:03-B1*06:01L HLA-DRB1*04:08L HLA-DRB1*08:03L
  source 1..13: note = Severe acute respiratory syndrome coronavirus 2
TPLIQPIGALDIS

SEQ ID NO: 11926 - protein, 15 aa, Severe acute respiratory syndrome-related coronavirus
  REGION 1..15: note = Table B: HLA-DRB1*14:04L HLA-DRB3*02:01L HLA-DPA1*03:01-B1*04:02L HLA-DRB1*03:01L HLA-DRB1*11:02L HLA-DRB4*01:01L HLA-DPA1*01:03-B1*04:01L HLA-DQA1*05:05-B1*03:116L HLA-DPA1*01:03-B1*02:01L
  REGION 1..15: note = CONT. FROM ABOVE: HLA-DRB1*07:01L
  source 1..15: note = Severe acute respiratory syndrome coronavirus 2
GPFVDRQTAQAAGTD

SEQ ID NO: 11927 - protein, 12 aa, Severe acute respiratory syndrome-related coronavirus
  REGION 1..12: note = Table B: HLA-DRB1*14:04L HLA-DRB1*04:04L HLA-DRB1*04:05L HLA-DRB1*08:04L HLA-DRB1*08:77L HLA-DRB3*02:01L HLA-DPA1*01:03-B1*03:01L HLA-DPA1*03:01-B1*04:02L HLA-DRB1*03:01L HLA-DRB1*11:03L HLA-DRB1*11:04L HLA-DRB1*14:02L
  REGION 1..12: note = CONT. FROM ABOVE: HLA-DQA1*01:01-B1*05:01L HLA-DRB1*08:01L HLA-D RB1*11:01L HLA-DRB5*01:01L HLA-DQA1*01-B1*05L HLA-DQA1*05:05-B1* 03:19L HLA-DRB4*01:01L HLA-DRB1*04:10L HLA-DRB1*09:01L HLA-DPA1* 01:03-B1*04:02L HLA-DRB3*01:01L HLA-DPA1*02:01-B1*13:01L
  REGION 1..12: note = CONT. FROM ABOVE: HLA-DPA1*01:03-B1*02:01L HLA-DPA1*01:03-B1*104 :01L HLA-DRB1*07:01L HLA-DRB1*10:01L HLA-DRB1*04:08L HLA-DRB1*08 :03L
  source 1..12: note = Severe acute respiratory syndrome coronavirus 2
ILMTARTVYDDG

SEQ ID NO: 11928 - protein, 14 aa, Severe acute respiratory syndrome-related coronavirus
  REGION 1..14: note = Table B: HLA-DRB1*14:04L HLA-DRB1*01:01L HLA-DRB1*11:02L
  source 1..14: note = Severe acute respiratory syndrome coronavirus 2
NDILLAKDTTEAFE

SEQ ID NO: 11929 - protein, 14 aa, Severe acute respiratory syndrome-related coronavirus
  REGION 1..14: note = Table B: HLA-DRB1*14:04L HLA-DRB1*01:01L HLA-DRB1*11:02L HLA-DRB4*02:01NL HLA-DPA1*01:03-B1*02:01L
  source 1..14: note = Severe acute respiratory syndrome coronavirus 2
DILLAKDTTEAFEK

SEQ ID NO: 11930 - protein, 14 aa, Severe acute respiratory syndrome-related coronavirus
  REGION 1..14: note = Table B: HLA-DRB1*14:04L HLA-DRB1*13:02L HLA-DRB1*04:04L HLA-DRB1*03:01L HLA-DRB1*11:02L HLA-DRB1*11:03L HLA-DRB1*14:02L HLA-DRB1*11:01L HLA-DQA1*05:05-B1*03:19L HLA-DRB3*01:01L HLA-DPA1*03:01-B1*105:01L HLA-DPA1*01:02-B1*04:01L
  REGION 1..14: note = CONT. FROM ABOVE: HLA-DRB1*08:02L HLA-DRB1*08:03L
  source 1..14: note = Severe acute respiratory syndrome coronavirus 2
DQAMTQMYKQARSE

SEQ ID NO: 11931 - protein, 14 aa, Severe acute respiratory syndrome-related coronavirus
  REGION 1..14: note = Table B: HLA-DRB1*14:04L HLA-DRB1*04:01L HLA-DRB1*09:01L HLA-DRB3*01:01L HLA-DPA1*01:03-B1*104:01L HLA-DRB1*15:01L
  source 1..14: note = Severe acute respiratory syndrome coronavirus 2
NDALNNIINNARDG

SEQ ID NO: 11932 - protein, 13 aa, Severe acute respiratory syndrome-related coronavirus
  REGION 1..13: note = Table B: HLA-DRB1*14:04L HLA-DQA1*01:02-B1*06:02L HLA-DRB1*01:01L HLA-DPA1*03:01-B1*04:02L HLA-DRB1*03:01L HLA-DRB1*08:01L HLA-DRB1*11:01L HLA-DRB4*02:01NL HLA-DRB1*13:01L HLA-DRB4*01:01L HLA-DPA1*01:03-B1*04:01L HLA-DRB1*09:01L
  REGION 1..13: note = CONT. FROM ABOVE: HLA-DPA1*01:03-B1*04:02L HLA-DPA1*02:01-B1*13: 01L HLA-DPA1*01:03-B1*104:01L
  source 1..13: note = Severe acute respiratory syndrome coronavirus 2
IQQVVDADSKIVQ

SEQ ID NO: 11933 - protein, 12 aa, Severe acute respiratory syndrome-related coronavirus
  REGION 1..12: note = Table B: HLA-DRB1*14:04L HLA-DRB1*13:03L HLA-DRB1*04:05L HLA-DQA1*01:02-B1*06:02L HLA-DRB4*03:01NL HLA-DRB1*11:03L HLA-DPA1*01:03-B1*04:01L HLA-DRB1*04:10L HLA-DRB1*09:01L HLA-DPA1*03:01-B1*105:01L HLA-DQA1*05:05-B1*03:01L
  source 1..12: note = Severe acute respiratory syndrome coronavirus 2
DSKIVQLSEISM

SEQ ID NO: 11934 - protein, 13 aa, Severe acute respiratory syndrome-related coronavirus
  REGION 1..13: note = Table B: HLA-DRB1*14:04L HLA-DRB1*01:01L HLA-DRB1*08:04L HLA-DRB1*11:04L HLA-DRB1*14:02L HLA-DRB1*08:01L HLA-DRB4*01:01L HLA-DRB3*01:01L HLA-DPA1*02:01-B1*13:01L HLA-DRB1*08:03L HLA-DRB1*15:01L
  source 1..13: note = Severe acute respiratory syndrome coronavirus 2
SKIVQLSEISMDN

SEQ ID NO: 11935 - protein, 14 aa, Severe acute respiratory syndrome-related coronavirus
  REGION 1..14: note = Table B: HLA-DRB1*14:04L HLA-DRB1*04:01L HLA-DRB1*01:01L HLA-DRB1*08:04L HLA-DPA1*01:03-B1*03:01L HLA-DPA1*03:01-B1*04:02L HLA-DRB1*03:01L HLA-DRB1*11:04L HLA-DRB1*14:02L HLA-DRB1*08:01L HLA-DRB1*11:01L HLA-DRB5*01:01L
  REGION 1..14: note = CONT. FROM ABOVE: HLA-DRB4*01:01L HLA-DPA1*01:03-B1*04:01L HLA-D RB1*09:01L HLA-DPA1*01:03-B1*04:02L HLA-DRB3*01:01L HLA-DPA1*02: 01-B1*13:01L HLA-DPA1*01:03-B1*104:01L HLA-DPA1*01:02-B1*04:01L HLA-DRB1*07:01L HLA-DRB1*08:03L
  source 1..14: note = Severe acute respiratory syndrome coronavirus 2
IVQLSEISMDNSPN

SEQ ID NO: 11936 - protein, 13 aa, Severe acute respiratory syndrome-related coronavirus
  REGION 1..13: note = Table B: HLA-DRB1*14:04L HLA-DRB1*04:01L HLA-DRB1*04:04L HLA-DRB1*08:01L HLA-DRB5*01:01L HLA-DRB4*02:01NL HLA-DRB1*13:01L HLA-DRB4*01:01L HLA-DPA1*01:03-B1*04:01L HLA-DRB1*09:01L HLA-DPA1*02:01-B1*13:01L HLA-DPA1*01:03-B1*02:01L
  REGION 1..13: note = CONT. FROM ABOVE: HLA-DPA1*01:03-B1*104:01L HLA-DRB1*10:01L HLA- DRB1*08:02L HLA-DRB1*08:03L HLA-DRB1*15:01L
  source 1..13: note = Severe acute respiratory syndrome coronavirus 2
ALRANSAVKLQNN

SEQ ID NO: 11937 - protein, 13 aa, Severe acute respiratory syndrome-related coronavirus
  REGION 1..13: note = Table B: HLA-DRB1*14:04L HLA-DRB1*01:01L HLA-DRB3*02:01L HLA-DPA1*03:01-B1*04:02L HLA-DQA1*01:01-B1*05:01L HLA-DRB1*08:01L HLA-DRB1*11:01L HLA-DRB5*01:01L HLA-DRB3*01:01L HLA-DPA1*02:01-B1*13:01L HLA-DPA1*01:03-B1*104:01L
  REGION 1..13: note = CONT. FROM ABOVE: HLA-DRB1*07:01L HLA-DRB1*08:02L HLA-DRB1*15:01 L
  source 1..13: note = Severe acute respiratory syndrome coronavirus 2
SAVKLQNNELSPV

SEQ ID NO: 11938 - protein, 13 aa, Severe acute respiratory syndrome-related coronavirus
  REGION 1..13: note = Table B: HLA-DRB1*14:04L HLA-DRB5*01:01L
  source 1..13: note = Severe acute respiratory syndrome coronavirus 2
AVKLQNNELSPVA

SEQ ID NO: 11939 - protein, 15 aa, Severe acute respiratory syndrome-related coronavirus
  REGION 1..15: note = Table B: HLA-DRB1*14:04L HLA-DRB1*14:02L HLA-DPA1*01:03-B1*04:01L HLA-DPA1*01:03-B1*04:02L HLA-DPA1*01:03-B1*02:01L HLA-DPA1*01:03-B1*104:01L
  source 1..15: note = Severe acute respiratory syndrome coronavirus 2
DDNALAYYNTTKGGR

SEQ ID NO: 11940 - protein, 12 aa, Severe acute respiratory syndrome-related coronavirus
  REGION 1..12: note = Table B: HLA-DRB1*14:04L HLA-DRB1*13:02L HLA-DRB1*01:03L HLA-DRB1*04:05L HLA-DRB1*11:03L HLA-DRB1*14:02L HLA-DRB1*08:01L HLA-DRB1*11:01L HLA-DRB1*12:01L HLA-DRB1*16:01L HLA-DRB1*04:08L HLA-DRB1*08:03L
  source 1..12: note = Severe acute respiratory syndrome coronavirus 2
GSLAATVRLQAG

SEQ ID NO: 11941 - protein, 14 aa, Severe acute respiratory syndrome-related coronavirus
  REGION 1..14: note = Table B: HLA-DRB1*14:04L HLA-DQA1*01:01-B1*05:01L HLA-DQA1*05:05-B1*03:116L
  source 1..14: note = Severe acute respiratory syndrome coronavirus 2
AYKDYLASGGQPIT

SEQ ID NO: 11942 - protein, 13 aa, Severe acute respiratory syndrome-related coronavirus
  REGION 1..13: note = Table B: HLA-DRB1*14:04L HLA-DRB1*11:02L HLA-DQA1*01:01-B1*05:01L
  source 1..13: note = Severe acute respiratory syndrome coronavirus 2
KDYLASGGQPITN

SEQ ID NO: 11943 - protein, 14 aa, Severe acute respiratory syndrome-related coronavirus
  REGION 1..14: note = Table B: HLA-DRB1*14:04L HLA-DRB1*04:01L HLA-DRB1*04:04L HLA-DRB1*01:01L HLA-DRB1*11:04L HLA-DRB1*14:02L HLA-DRB1*08:01L HLA-DRB1*11:01L HLA-DRB5*01:01L HLA-DRB4*01:01L HLA-DPA1*01:03-B1*04:02L HLA-DRB3*01:01L
  REGION 1..14: note = CONT. FROM ABOVE: HLA-DPA1*02:01-B1*13:01L HLA-DPA1*01:03-B1*104 :01L HLA-DRB1*10:01L
  source 1..14: note = Severe acute respiratory syndrome coronavirus 2
GQAITVTPEANMDQ

SEQ ID NO: 11944 - protein, 14 aa, Severe acute respiratory syndrome-related coronavirus
  REGION 1..14: note = Table B: HLA-DRB1*14:04L HLA-DRB1*04:01L HLA-DRB1*01:01L HLA-DRB1*11:04L HLA-DQA1*01:01-B1*05:01L HLA-DRB1*08:01L HLA-DRB1*11:01L HLA-DRB5*01:01L HLA-DRB4*02:01NL HLA-DQA1*05:05-B1*03:116L HLA-DRB3*01:01L
  REGION 1..14: note = CONT. FROM ABOVE: HLA-DPA1*01:03-B1*02:01L HLA-DRB1*08:02L
  source 1..14: note = Severe acute respiratory syndrome coronavirus 2
EPMLQSADAQSFLN

SEQ ID NO: 11945 - protein, 14 aa, Severe acute respiratory syndrome-related coronavirus
  REGION 1..14: note = Table B: HLA-DRB1*14:04L
  source 1..14: note = Severe acute respiratory syndrome coronavirus 2
AFDIYNDKVAGFAK

SEQ ID NO: 11946 - protein, 14 aa, Severe acute respiratory syndrome-related coronavirus
  REGION 1..14: note = Table B: HLA-DRB1*14:04L HLA-DRB1*04:01L HLA-DRB1*13:02L HLA-DRB1*13:03L HLA-DRB1*01:01L HLA-DRB1*08:77L HLA-DRB3*02:01L HLA-DPA1*01:03-B1*03:01L HLA-DRB1*03:01L HLA-DRB1*11:02L HLA-DRB1*11:03L HLA-DRB1*14:02L HLA-DQA1*01:01-B1*05:01L
  REGION 1..14: note = CONT. FROM ABOVE: HLA-DRB1*11:01L HLA-DQA1*05:05-B1*03:19L HLA-D RB1*09:01L HLA-DPA1*01:03-B1*04:02L HLA-DRB1*12:02L HLA-DRB3*01: 01L HLA-DPA1*02:01-B1*13:01L HLA-DPA1*01:03-B1*02:01L HLA-DPA1*0 1:03-B1*104:01L HLA-DQA1*05:05-B1*03:01L
  REGION 1..14: note = CONT. FROM ABOVE: HLA-DPA1*01:02-B1*04:01L HLA-DRB1*07:01L HLA-D RB1*10:01L HLA-DRB1*08:02L HLA-DRB1*08:03L
  source 1..14: note = Severe acute respiratory syndrome coronavirus 2
NPDILRVYANLGER

SEQ ID NO: 11947 - protein, 12 aa, Severe acute respiratory syndrome-related coronavirus
  REGION 1..12: note = Table B: HLA-DRB1*14:04L HLA-DRB1*04:10L
  source 1..12: note = Severe acute respiratory syndrome coronavirus 2
GVPFVVSTGYHF

SEQ ID NO: 11948 - protein, 13 aa, Severe acute respiratory syndrome-related coronavirus
  REGION 1..13: note = Table B: HLA-DRB1*14:04L HLA-DRB1*04:01L HLA-DRB3*01:01L
  source 1..13: note = Severe acute respiratory syndrome coronavirus 2
LGVVHNQDVNLHS

SEQ ID NO: 11949 - protein, 14 aa, Severe acute respiratory syndrome-related coronavirus
  REGION 1..14: note = Table B: HLA-DRB1*14:04L HLA-DPA1*01:03-B1*02:01L
  source 1..14: note = Severe acute respiratory syndrome coronavirus 2
LLVYAADPAMHAAS

SEQ ID NO: 11950 - protein, 14 aa, Severe acute respiratory syndrome-related coronavirus
  REGION 1..14: note = Table B: HLA-DRB1*14:04L HLA-DQA1*01:01-B1*05:01L HLA-DPA1*01:03-B1*04:01L HLA-DPA1*01:03-B1*02:01L
  source 1..14: note = Severe acute respiratory syndrome coronavirus 2
LVYAADPAMHAASG

SEQ ID NO: 11951 - protein, 16 aa, Severe acute respiratory syndrome-related coronavirus
  REGION 1..16: note = Table B: HLA-DRB1*14:04L HLA-DRB1*03:01L HLA-DRB1*11:02L HLA-DRB1*11:01L HLA-DRB5*01:01L HLA-DRB4*02:01NL HLA-DRB1*13:01L HLA-DPA1*01:03-B1*04:01L HLA-DQA1*05:05-B1*03:116L HLA-DRB1*09:01L HLA-DPA1*01:03-B1*04:02L HLA-DRB3*01:01L
  REGION 1..16: note = CONT. FROM ABOVE: HLA-DPA1*01:03-B1*02:01L HLA-DPA1*01:03-B1*104 :01L HLA-DRB1*07:01L HLA-DRB1*08:02L HLA-DRB1*15:01L
  source 1..16: note = Severe acute respiratory syndrome coronavirus 2
VAALTNNVAFQTVKPG

SEQ ID NO: 11952 - protein, 13 aa, Severe acute respiratory syndrome-related coronavirus
  REGION 1..13: note = Table B: HLA-DRB1*14:04L HLA-DRB1*04:01L HLA-DRB1*04:04L HLA-DRB1*03:01L HLA-DRB1*11:02L HLA-DRB4*02:01NL HLA-DPA1*01:03-B1*02:01L HLA-DRB1*08:02L
  source 1..13: note = Severe acute respiratory syndrome coronavirus 2
NVAFQTVKPGNFN

SEQ ID NO: 11953 - protein, 12 aa, Severe acute respiratory syndrome-related coronavirus
  REGION 1..12: note = Table B: HLA-DRB1*14:04L HLA-DRB4*02:01NL HLA-DRB1*13:01L HLA-DRB1*08:02L
  source 1..12: note = Severe acute respiratory syndrome coronavirus 2
QVIVNNLDKSAG

SEQ ID NO: 11954 - protein, 14 aa, Severe acute respiratory syndrome-related coronavirus
  REGION 1..14: note = Table B: HLA-DRB1*14:04L HLA-DRB1*11:02L HLA-DQA1*05:05-B1*03:116L HLA-DRB1*08:02L
  source 1..14: note = Severe acute respiratory syndrome coronavirus 2
VIVNNLDKSAGFPF

SEQ ID NO: 11955 - protein, 14 aa, Severe acute respiratory syndrome-related coronavirus
  REGION 1..14: note = Table B: HLA-DRB1*14:04L HLA-DRB1*04:01L HLA-DPA1*01:03-B1*02:01L
  source 1..14: note = Severe acute respiratory syndrome coronavirus 2
IVNNLDKSAGFPFN

SEQ ID NO: 11956 - protein, 13 aa, Severe acute respiratory syndrome-related coronavirus
  REGION 1..13: note = Table B: HLA-DRB1*14:04L HLA-DPA1*01:03-B1*104:01L
  source 1..13: note = Severe acute respiratory syndrome coronavirus 2
ALFAYTKRNVIPT

SEQ ID NO: 11957 - protein, 13 aa, Severe acute respiratory syndrome-related coronavirus
  REGION 1..13: note = Table B: HLA-DRB1*14:04L HLA-DRB1*04:01L HLA-DRB1*04:04L HLA-DRB1*01:01L HLA-DRB1*03:01L HLA-DQA1*01:01-B1*05:01L HLA-DRB1*08:01L HLA-DRB4*01:01L HLA-DPA1*01:03-B1*04:02L HLA-DPA1*01:03-B1*02:01L HLA-DRB1*08:02L HLA-DRB1*15:01L
  source 1..13: note = Severe acute respiratory syndrome coronavirus 2
VNALLSTDGNKIA

SEQ ID NO: 11958 - protein, 15 aa, Severe acute respiratory syndrome-related coronavirus
  REGION 1..15: note = Table B: HLA-DRB1*14:04L HLA-DQA1*01:01-B1*05:01L HLA-DQA1*01-B1*05L
  source 1..15: note = Severe acute respiratory syndrome coronavirus 2
IADKYVRNLQHRLYE

SEQ ID NO: 11959 - protein, 14 aa, Severe acute respiratory syndrome-related coronavirus
  REGION 1..14: note = Table B: HLA-DRB1*14:04L HLA-DQA1*01:01-B1*05:01L HLA-DQA1*05:05-B1*03:116L HLA-DPA1*01:03-B1*02:01L HLA-DPA1*01:03-B1*104:01L HLA-DRB1*08:02L HLA-DRB1*15:01L
  source 1..14: note = Severe acute respiratory syndrome coronavirus 2
VDDIVKTDGTLMIE

SEQ ID NO: 11960 - protein, 13 aa, Severe acute respiratory syndrome-related coronavirus
  REGION 1..13: note = Table B: HLA-DRB1*14:04L HLA-DRB1*11:02L HLA-DRB4*02:01NL HLA-DPA1*01:03-B1*02:01L HLA-DPA1*01:03-B1*104:01L HLA-DRB1*15:01L
  source 1..13: note = Severe acute respiratory syndrome coronavirus 2
DIVKTDGTLMIER

SEQ ID NO: 11961 - protein, 12 aa, Severe acute respiratory syndrome-related coronavirus
  REGION 1..12: note = Table B: HLA-DRB1*14:04L HLA-DRB1*01:01L HLA-DRB1*01:02L HLA-DRB1*08:04L HLA-DRB3*02:01L HLA-DRB1*09:01L HLA-DRB3*01:01L HLA-DRB1*07:01L
  source 1..12: note = Severe acute respiratory syndrome coronavirus 2
SVMLTNDNTSRY

SEQ ID NO: 11962 - protein, 14 aa, Severe acute respiratory syndrome-related coronavirus
  REGION 1..14: note = Table B: HLA-DRB1*14:04L HLA-DRB1*01:01L HLA-DRB1*08:77L HLA-DRB3*02:01L HLA-DRB1*03:01L HLA-DRB1*11:02L HLA-DRB1*11:03L HLA-DQA1*01:01-B1*05:01L HLA-DRB5*01:01L HLA-DRB4*01:01L HLA-DRB1*09:01L HLA-DRB1*12:02L HLA-DPA1*01:03-B1*104:01L
  REGION 1..14: note = CONT. FROM ABOVE: HLA-DRB1*07:01L HLA-DRB1*08:02L
  source 1..14: note = Severe acute respiratory syndrome coronavirus 2
EAMYTPHTVLQAVG

SEQ ID NO: 11963 - protein, 13 aa, Severe acute respiratory syndrome-related coronavirus
  REGION 1..13: note = Table B: HLA-DRB1*14:04L HLA-DRB1*01:03L HLA-DRB1*04:05L HLA-DRB3*02:01L HLA-DPA1*03:01-B1*04:02L HLA-DRB1*11:03L
  source 1..13: note = Severe acute respiratory syndrome coronavirus 2
YDHVISTSHKLVL

SEQ ID NO: 11964 - protein, 16 aa, Severe acute respiratory syndrome-related coronavirus
  REGION 1..16: note = Table B: HLA-DRB1*14:04L
  source 1..16: note = Severe acute respiratory syndrome coronavirus 2
DAVVYRGTTTYKLNVG

SEQ ID NO: 11965 - protein, 12 aa, Severe acute respiratory syndrome-related coronavirus
  REGION 1..12: note = Table B: HLA-DRB1*14:04L HLA-DRB4*02:01NL HLA-DRB1*09:01L HLA-DPA1*02:01-B1*13:01L HLA-DPA1*01:03-B1*02:01L
  source 1..12: note = Severe acute respiratory syndrome coronavirus 2
DEFSSNVANYQK

SEQ ID NO: 11966 - protein, 12 aa, Severe acute respiratory syndrome-related coronavirus
  REGION 1..12: note = Table B: HLA-DRB1*14:04L HLA-DPA1*01:03-B1*03:01L HLA-DRB1*03:01L HLA-DRB1*11:02L HLA-DRB4*01:01L HLA-DPA1*01:03-B1*04:01L HLA-DQA1*05:05-B1*03:116L HLA-DRB1*04:10L HLA-DRB1*09:01L HLA-DPA1*02:01-B1*13:01L
  REGION 1..12: note = CONT. FROM ABOVE: HLA-DPA1*01:03-B1*02:01L HLA-DPA1*01:03-B1*104 :01L HLA-DRB1*07:01L
  source 1..12: note = Severe acute respiratory syndrome coronavirus 2
FSSNVANYQKVG

SEQ ID NO: 11967 - protein, 14 aa, Severe acute respiratory syndrome-related coronavirus
  REGION 1..14: note = Table B: HLA-DRB1*14:04L HLA-DRB1*03:01L HLA-DRB1*11:01L HLA-DRB1*08:03L
  source 1..14: note = Severe acute respiratory syndrome coronavirus 2
SSNVANYQKVGMQK

SEQ ID NO: 11968 - protein, 13 aa, Severe acute respiratory syndrome-related coronavirus
  REGION 1..13: note = Table B: HLA-DRB1*14:04L HLA-DRB3*02:01L HLA-DPA1*03:01-B1*04:02L HLA-DRB1*03:01L HLA-DRB4*02:01NL HLA-DRB1*13:01L HLA-DRB1*09:01L HLA-DRB3*01:01L HLA-DPA1*02:01-B1*13:01L HLA-DPA1*01:03-B1*02:01L
  REGION 1..13: note = CONT. FROM ABOVE: HLA-DPA1*01:03-B1*104:01L HLA-DPA1*01:02-B1*04 :01L HLA-DRB1*08:02L
  source 1..13: note = Severe acute respiratory syndrome coronavirus 2
VYIGDPAQLPAPR

SEQ ID NO: 11969 - protein, 15 aa, Severe acute respiratory syndrome-related coronavirus
  REGION 1..15: note = Table B: HLA-DRB1*14:04L HLA-DQA1*01-B1*05L HLA-DRB4*02:01NL HLA-DRB4*01:01L HLA-DQA1*05:05-B1*03:116L HLA-DRB1*04:10L HLA-DRB1*09:01L HLA-DPA1*02:01-B1*13:01L HLA-DPA1*01:03-B1*02:01L HLA-DPA1*01:03-B1*104:01L
  REGION 1..15: note = CONT. FROM ABOVE: HLA-DQA1*05:05-B1*03:01L
  source 1..15: note = Severe acute respiratory syndrome coronavirus 2
VSALVYDNKLKAHKD

SEQ ID NO: 11970 - protein, 12 aa, Severe acute respiratory syndrome-related coronavirus
  REGION 1..12: note = Table B: HLA-DRB1*14:04L HLA-DRB1*04:01L HLA-DRB1*04:04L HLA-DQA1*01:02-B1*06:02L HLA-DRB1*01:01L HLA-DRB1*03:01L HLA-DRB1*08:01L HLA-DRB1*11:01L HLA-DRB5*01:01L HLA-DQA1*05:05-B1*03:19L HLA-DRB4*02:01NL HLA-DRB1*13:01L
  REGION 1..12: note = CONT. FROM ABOVE: HLA-DRB4*01:01L HLA-DPA1*01:03-B1*04:01L HLA-D RB1*09:01L HLA-DPA1*01:03-B1*04:02L HLA-DPA1*02:01-B1*13:01L HLA -DRB1*07:01L HLA-DRB1*10:01L HLA-DRB1*08:03L
  source 1..12: note = Severe acute respiratory syndrome coronavirus 2
GVITHDVSSAIN

SEQ ID NO: 11971 - protein, 14 aa, Severe acute respiratory syndrome-related coronavirus
  REGION 1..14: note = Table B: HLA-DRB1*14:04L HLA-DRB1*04:01L HLA-DRB1*11:02L HLA-DRB4*02:01NL HLA-DRB1*13:01L HLA-DRB4*01:01L HLA-DPA1*01:03-B1*04:01L HLA-DRB1*09:01L HLA-DPA1*01:03-B1*104:01L HLA-DRB1*07:01L HLA-DRB1*08:02L
  source 1..14: note = Severe acute respiratory syndrome coronavirus 2
VITHDVSSAINRPQ

SEQ ID NO: 11972 - protein, 14 aa, Severe acute respiratory syndrome-related coronavirus
  REGION 1..14: note = Table B: HLA-DRB1*14:04L HLA-DRB1*04:01L
  source 1..14: note = Severe acute respiratory syndrome coronavirus 2
THDVSSAINRPQIG

SEQ ID NO: 11973 - protein, 13 aa, Severe acute respiratory syndrome-related coronavirus
  REGION 1..13: note = Table B: HLA-DRB1*14:04L HLA-DRB1*08:01L
  source 1..13: note = Severe acute respiratory syndrome coronavirus 2
ASKILGLPTQTVD

SEQ ID NO: 11974 - protein, 13 aa, Severe acute respiratory syndrome-related coronavirus
  REGION 1..13: note = Table B: HLA-DRB1*14:04L HLA-DRB1*04:01L HLA-DRB1*08:01L HLA-DRB1*11:01L HLA-DRB4*01:01L HLA-DRB3*01:01L HLA-DRB1*15:01L
  source 1..13: note = Severe acute respiratory syndrome coronavirus 2
SKILGLPTQTVDS

SEQ ID NO: 11975 - protein, 12 aa, Severe acute respiratory syndrome-related coronavirus
  REGION 1..12: note = Table B: HLA-DRB1*14:04L HLA-DPA1*03:01-B1*04:02L HLA-DRB1*03:01L HLA-DRB1*08:01L HLA-DRB1*13:01L HLA-DPA1*01:03-B1*04:02L HLA-DRB3*01:01L HLA-DPA1*02:01-B1*13:01L HLA-DPA1*01:03-B1*104:01L
  REGION 1..12: note = CONT. FROM ABOVE: HLA-DRB1*08:02L
  source 1..12: note = Severe acute respiratory syndrome coronavirus 2
VIFTQTTETAHS

SEQ ID NO: 11976 - protein, 14 aa, Severe acute respiratory syndrome-related coronavirus
  REGION 1..14: note = Table B: HLA-DRB1*14:04L HLA-DRB1*04:01L HLA-DRB1*01:01L HLA-DRB1*08:04L HLA-DRB1*08:77L HLA-DRB3*02:01L HLA-DPA1*03:01-B1*04:02L HLA-DRB1*03:01L HLA-DRB1*11:02L HLA-DRB1*11:03L HLA-DRB1*14:02L HLA-DQA1*01-B1*05L
  REGION 1..14: note = CONT. FROM ABOVE: HLA-DRB1*13:01L HLA-DPA1*01:03-B1*04:01L HLA-D RB1*04:10L HLA-DRB1*09:01L HLA-DPA1*01:03-B1*04:02L HLA-DRB1*12: 02L HLA-DPA1*01:03-B1*02:01L HLA-DPA1*01:03-B1*104:01L HLA-DRB1* 10:01L HLA-DRB1*08:02L HLA-DRB1*08:03L HLA-DRB1*15:01L
  source 1..14: note = Severe acute respiratory syndrome coronavirus 2
VNRFNVAITRAKVG

SEQ ID NO: 11977 - protein, 14 aa, Severe acute respiratory syndrome-related coronavirus
  REGION 1..14: note = Table B: HLA-DRB1*14:04L HLA-DRB3*02:01L HLA-DPA1*03:01-B1*04:02L HLA-DRB1*03:01L HLA-DQA1*01:01-B1*05:01L HLA-DRB1*08:01L HLA-DRB4*02:01NL HLA-DRB4*01:01L HLA-DRB1*09:01L HLA-DPA1*01:03-B1*04:02L
  REGION 1..14: note = CONT. FROM ABOVE: HLA-DRB3*01:01L HLA-DPA1*02:01-B1*13:01L HLA-D PA1*01:03-B1*104:01L HLA-DRB1*07:01L HLA-DRB1*08:02L HLA-DRB1*15 :01L
  source 1..14: note = Severe acute respiratory syndrome coronavirus 2
SKVITGLHPTQAPT

SEQ ID NO: 11978 - protein, 16 aa, Severe acute respiratory syndrome-related coronavirus
  REGION 1..16: note = Table B: HLA-DRB1*14:04L HLA-DRB1*04:01L HLA-DRB1*01:01L HLA-DRB1*03:01L HLA-DRB1*11:02L HLA-DRB1*11:01L HLA-DRB4*01:01L HLA-DPA1*01:03-B1*04:01L HLA-DPA1*01:03-B1*04:02L HLA-DRB3*01:01L HLA-DPA1*01:03-B1*02:01L
  REGION 1..16: note = CONT. FROM ABOVE: HLA-DPA1*01:02-B1*04:01L HLA-DRB1*07:01L HLA-D RB1*08:02L HLA-DRB1*15:01L
  source 1..16: note = Severe acute respiratory syndrome coronavirus 2
GVNLVAVPTGYVDTPN

SEQ ID NO: 11979 - protein, 14 aa, Severe acute respiratory syndrome-related coronavirus
  REGION 1..14: note = Table B: HLA-DRB1*14:04L HLA-DRB1*03:01L HLA-DRB1*11:02L HLA-DRB1*11:03L HLA-DQA1*01:01-B1*05:01L HLA-DRB5*01:01L HLA-DRB1*13:01L HLA-DRB1*09:01L HLA-DRB1*12:02L HLA-DPA1*01:03-B1*104:01L HLA-DRB1*07:01L
  REGION 1..14: note = CONT. FROM ABOVE: HLA-DQA1*01:03-B1*06:01L HLA-DRB1*08:02L HLA-D RB1*15:01L
  source 1..14: note = Severe acute respiratory syndrome coronavirus 2
FPVLHDIGNPKAIK

SEQ ID NO: 11980 - protein, 14 aa, Severe acute respiratory syndrome-related coronavirus
  REGION 1..14: note = Table B: HLA-DRB1*14:04L HLA-DRB1*03:01L HLA-DRB1*11:02L HLA-DRB5*01:01L HLA-DRB1*13:01L HLA-DRB4*01:01L HLA-DQA1*05:05-B1*03:116L HLA-DPA1*01:03-B1*02:01L HLA-DRB1*15:01L
  source 1..14: note = Severe acute respiratory syndrome coronavirus 2
IEELFYSYATHSDK

SEQ ID NO: 11981 - protein, 11 aa, Severe acute respiratory syndrome-related coronavirus
  REGION 1..11: note = Table B: HLA-DRB1*14:04L HLA-DRB1*04:04L HLA-DRB1*03:01L HLA-DRB1*11:04L HLA-DRB5*02:02L HLA-DRB1*04:10L HLA-DRB3*01:01L HLA-DRB1*14:17L
  source 1..11: note = Severe acute respiratory syndrome coronavirus 2
SAFVNLKQLPF

SEQ ID NO: 11982 - protein, 14 aa, Severe acute respiratory syndrome-related coronavirus
  REGION 1..14: note = Table B: HLA-DRB1*14:04L HLA-DRB1*04:01L HLA-DRB1*04:04L HLA-DRB1*03:01L HLA-DQA1*01:01-B1*05:01L HLA-DRB1*13:01L HLA-DPA1*01:03-B1*04:01L HLA-DRB1*04:10L HLA-DRB1*09:01L HLA-DPA1*01:03-B1*104:01L HLA-DRB1*07:01L HLA-DRB1*10:01L
  source 1..14: note = Severe acute respiratory syndrome coronavirus 2
ENVAFNVVNKGHFD

SEQ ID NO: 11983 - protein, 13 aa, Severe acute respiratory syndrome-related coronavirus
  REGION 1..13: note = Table B: HLA-DRB1*14:04L HLA-DRB1*15:01L
  source 1..13: note = Severe acute respiratory syndrome coronavirus 2
EVPVSIINNTVYT

SEQ ID NO: 11984 - protein, 13 aa, Severe acute respiratory syndrome-related coronavirus
  REGION 1..13: note = Table B: HLA-DRB1*14:04L
  source 1..13: note = Severe acute respiratory syndrome coronavirus 2
VPVSIINNTVYTK

SEQ ID NO: 11985 - protein, 13 aa, Severe acute respiratory syndrome-related coronavirus
  REGION 1..13: note = Table B: HLA-DRB1*14:04L HLA-DRB1*04:01L HLA-DRB1*01:01L HLA-DRB1*03:01L HLA-DRB1*11:02L HLA-DRB5*01:01L HLA-DRB4*02:01NL HLA-DRB1*13:01L HLA-DRB4*01:01L HLA-DRB1*07:01L HLA-DRB1*15:01L
  source 1..13: note = Severe acute respiratory syndrome coronavirus 2
VELFENKTTLPVN

SEQ ID NO: 11986 - protein, 14 aa, Severe acute respiratory syndrome-related coronavirus
  REGION 1..14: note = Table B: HLA-DRB1*14:04L HLA-DRB1*11:02L HLA-DQA1*01:01-B1*05:01L HLA-DRB1*08:01L HLA-DRB1*13:01L HLA-DPA1*01:03-B1*04:01L HLA-DRB3*01:01L HLA-DPA1*02:01-B1*13:01L HLA-DPA1*01:03-B1*02:01L
  REGION 1..14: note = CONT. FROM ABOVE: HLA-DRB1*08:02L HLA-DRB1*15:01L
  source 1..14: note = Severe acute respiratory syndrome coronavirus 2
VKILNNLGVDIAAN

SEQ ID NO: 11987 - protein, 14 aa, Severe acute respiratory syndrome-related coronavirus
  REGION 1..14: note = Table B: HLA-DRB1*14:04L HLA-DRB1*04:01L HLA-DRB1*01:01L HLA-DRB5*01:01L HLA-DRB1*13:01L HLA-DRB3*01:01L HLA-DRB1*08:02L
  source 1..14: note = Severe acute respiratory syndrome coronavirus 2
GVDIAANTVIWDYK

SEQ ID NO: 11988 - protein, 14 aa, Severe acute respiratory syndrome-related coronavirus
  REGION 1..14: note = Table B: HLA-DRB1*14:04L HLA-DRB1*01:01L HLA-DRB3*02:01L HLA-DRB1*03:01L HLA-DRB1*11:02L HLA-DRB1*08:01L HLA-DRB1*11:01L HLA-DRB5*01:01L HLA-DQA1*01-B1*05L HLA-DRB4*01:01L HLA-DRB1*09:01L HLA-DPA1*01:03-B1*04:02L
  REGION 1..14: note = CONT. FROM ABOVE: HLA-DPA1*01:03-B1*104:01L HLA-DRB1*07:01L HLA- DRB1*08:02L
  source 1..14: note = Severe acute respiratory syndrome coronavirus 2
VLITEGSVKGLQPS

SEQ ID NO: 11989 - protein, 14 aa, Severe acute respiratory syndrome-related coronavirus
  REGION 1..14: note = Table B: HLA-DRB1*14:04L HLA-DRB1*08:04L HLA-DRB1*04:08L
  source 1..14: note = Severe acute respiratory syndrome coronavirus 2
VDGVVQQLPETYFT

SEQ ID NO: 11990 - protein, 14 aa, Severe acute respiratory syndrome-related coronavirus
  REGION 1..14: note = Table B: HLA-DRB1*14:04L HLA-DRB1*04:01L HLA-DRB1*01:01L HLA-DRB1*03:01L HLA-DRB1*11:02L HLA-DRB5*01:01L
  source 1..14: note = Severe acute respiratory syndrome coronavirus 2
LPETYFTQSRNLQE

SEQ ID NO: 11991 - protein, 14 aa, Severe acute respiratory syndrome-related coronavirus
  REGION 1..14: note = Table B: HLA-DRB1*14:04L HLA-DRB1*11:02L HLA-DRB4*02:01NL HLA-DPA1*01:03-B1*04:01L HLA-DQA1*05:05-B1*03:116L HLA-DPA1*01:03-B1*04:02L HLA-DPA1*01:03-B1*02:01L HLA-DPA1*01:03-B1*104:01L HLA-DQA1*01:03-B1*06:01L
  REGION 1..14: note = CONT. FROM ABOVE: HLA-DRB1*08:02L HLA-DRB1*15:01L
  source 1..14: note = Severe acute respiratory syndrome coronavirus 2
VKNYFITDAQTGSS

SEQ ID NO: 11992 - protein, 11 aa, Severe acute respiratory syndrome-related coronavirus
  REGION 1..11: note = Table B: HLA-DRB1*14:04L HLA-DPA1*03:01-B1*04:02L HLA-DRB1*03:01L HLA-DRB4*02:01NL HLA-DRB5*02:02L HLA-DPA1*01:03-B1*04:01L HLA-DRB1*09:01L HLA-DPA1*02:01-B1*13:01L HLA-DPA1*01:03-B1*02:01L
  REGION 1..11: note = CONT. FROM ABOVE: HLA-DPA1*01:03-B1*104:01L HLA-DRB1*07:01L HLA- DRB1*15:03L
  source 1..11: note = Severe acute respiratory syndrome coronavirus 2
FITDAQTGSSK

SEQ ID NO: 11993 - protein, 12 aa, Severe acute respiratory syndrome-related coronavirus
  REGION 1..12: note = Table B: HLA-DRB1*14:04L HLA-DRB1*01:01L HLA-DRB1*08:01L HLA-DRB1*11:01L HLA-DRB5*01:01L HLA-DRB4*01:01L
  source 1..12: note = Severe acute respiratory syndrome coronavirus 2
EIIKSQDLSVVS

SEQ ID NO: 11994 - protein, 12 aa, Severe acute respiratory syndrome-related coronavirus
  REGION 1..12: note = Table B: HLA-DRB1*14:04L HLA-DQA1*01:01-B1*05:01L HLA-DRB1*11:01L HLA-DPA1*01:03-B1*04:02L HLA-DPA1*02:01-B1*13:01L
  source 1..12: note = Severe acute respiratory syndrome coronavirus 2
IIKSQDLSVVSK

SEQ ID NO: 11995 - protein, 14 aa, Severe acute respiratory syndrome-related coronavirus
  REGION 1..14: note = Table B: HLA-DRB1*14:04L HLA-DRB1*13:03L HLA-DRB1*01:03L HLA-DRB1*04:04L HLA-DRB4*03:01NL HLA-DRB1*08:04L HLA-DRB3*02:01L HLA-DPA1*03:01-B1*04:02L HLA-DRB1*11:03L HLA-DRB1*11:04L HLA-DRB1*14:02L HLA-DQA1*01:01-B1*05:01L HLA-DRB1*08:01L
  REGION 1..14: note = CONT. FROM ABOVE: HLA-DRB1*11:01L HLA-DPA1*01:03-B1*04:01L HLA-D RB1*04:10L HLA-DRB1*09:01L HLA-DPA1*01:03-B1*04:02L HLA-DRB1*12: 02L HLA-DRB3*01:01L HLA-DPA1*02:01-B1*13:01L HLA-DPA1*01:03-B1*0 2:01L HLA-DPA1*01:03-B1*104:01L HLA-DPA1*01:02-B1*04:01L
  REGION 1..14: note = CONT. FROM ABOVE: HLA-DRB1*07:01L HLA-DRB1*04:08L HLA-DRB1*08:03 L
  source 1..14: note = Severe acute respiratory syndrome coronavirus 2
LPKGIMMNVAKYTQ

SEQ ID NO: 11996 - protein, 13 aa, Severe acute respiratory syndrome-related coronavirus
  REGION 1..13: note = Table B: HLA-DRB1*14:04L HLA-DRB1*13:02L HLA-DRB1*04:04L HLA-DRB4*03:01NL HLA-DRB3*02:01L HLA-DPA1*01:03-B1*03:01L HLA-DPA1*03:01-B1*04:02L HLA-DRB1*11:02L HLA-DRB1*11:03L HLA-DRB1*11:04L HLA-DRB1*11:01L HLA-DQA1*01-B1*05L
  REGION 1..13: note = CONT. FROM ABOVE: HLA-DPA1*01:03-B1*04:02L HLA-DRB1*12:02L HLA-D RB3*01:01L HLA-DPA1*01:03-B1*02:01L HLA-DPA1*01:02-B1*04:01L HLA -DRB1*10:01L HLA-DRB1*08:02L HLA-DRB1*08:03L
  source 1..13: note = Severe acute respiratory syndrome coronavirus 2
GSVAIKITEHSWN

SEQ ID NO: 11997 - protein, 13 aa, Severe acute respiratory syndrome-related coronavirus
  REGION 1..13: note = Table B: HLA-DRB1*14:04L HLA-DQA1*01:01-B1*05:01L HLA-DRB1*08:01L HLA-DRB4*02:01NL HLA-DRB1*13:01L HLA-DQA1*05:05-B1*03:116L HLA-DPA1*02:01-B1*13:01L HLA-DPA1*01:03-B1*02:01L HLA-DPA1*01:03-B1*104:01L
  REGION 1..13: note = CONT. FROM ABOVE: HLA-DPA1*01:02-B1*04:01L HLA-DRB1*08:02L HLA-D RB1*15:01L
  source 1..13: note = Severe acute respiratory syndrome coronavirus 2
TAFVTNVNASSSE

SEQ ID NO: 11998 - protein, 13 aa, Severe acute respiratory syndrome-related coronavirus
  REGION 1..13: note = Table B: HLA-DRB1*14:04L HLA-DRB1*04:01L HLA-DRB1*01:01L HLA-DRB1*11:02L HLA-DRB5*01:01L HLA-DRB4*01:01L HLA-DQA1*05:05-B1*03:116L HLA-DRB1*15:01L
  source 1..13: note = Severe acute respiratory syndrome coronavirus 2
ANYIFWRNTNPIQ

SEQ ID NO: 11999 - protein, 13 aa, Severe acute respiratory syndrome-related coronavirus
  REGION 1..13: note = Table B: HLA-DRB1*14:04L HLA-DRB1*04:04L HLA-DRB1*11:04L HLA-DQA1*01:01-B1*05:01L HLA-DRB1*08:01L HLA-DRB4*01:01L HLA-DPA1*01:03-B1*04:01L HLA-DRB1*10:01L HLA-DRB1*04:08L HLA-DRB1*08:03L
  source 1..13: note = Severe acute respiratory syndrome coronavirus 2
GTAVMSLKEGQIN

SEQ ID NO: 12000 - protein, 13 aa, Severe acute respiratory syndrome-related coronavirus
  REGION 1..13: note = Table B: HLA-DRB1*14:04L HLA-DRB1*13:03L HLA-DRB1*01:03L HLA-DQA1*01:02-B1*06:02L HLA-DRB1*08:04L HLA-DRB1*08:77L HLA-DRB3*02:01L HLA-DPA1*01:03-B1*03:01L HLA-DPA1*03:01-B1*04:02L HLA-DRB1*11:03L HLA-DRB1*11:04L
  REGION 1..13: note = CONT. FROM ABOVE: HLA-DRB1*09:01L HLA-DPA1*02:01-B1*13:01L HLA-D PA1*03:01-B1*105:01L HLA-DQA1*05:05-B1*03:01L HLA-DRB1*07:01L HL A-DRB1*10:01L HLA-DQA1*01:03-B1*06:01L HLA-DRB1*04:08L HLA-DRB1* 08:03L
  source 1..13: note = Severe acute respiratory syndrome coronavirus 2
NNRVVISSDVLVN

SEQ ID NO: 12001 - protein, 16 aa, Severe acute respiratory syndrome-related coronavirus
  REGION 1..16: note = Table B: HLA-DRB1*14:04L HLA-DRB1*11:02L HLA-DRB4*02:01NL HLA-DRB1*13:01L HLA-DRB4*01:01L HLA-DRB1*12:02L HLA-DRB1*15:01L
  source 1..16: note = Severe acute respiratory syndrome coronavirus 2
YPDKVFRSSVLHSTQD

SEQ ID NO: 12002 - protein, 13 aa, Severe acute respiratory syndrome-related coronavirus
  REGION 1..13: note = Table B: HLA-DRB1*14:04L HLA-DRB1*04:04L HLA-DRB4*01:01L HLA-DRB1*09:01L HLA-DRB1*07:01L HLA-DRB1*08:03L
  source 1..13: note = Severe acute respiratory syndrome coronavirus 2
QSLLIVNNATNVV

SEQ ID NO: 12003 - protein, 11 aa, Severe acute respiratory syndrome-related coronavirus
  REGION 1..11: note = Table B: HLA-DRB1*14:04L HLA-DPA1*01:03-B1*03:01L HLA-DRB1*03:01L HLA-DRB1*11:02L HLA-DQA1*01:01-B1*05:01L HLA-DRB1*11:01L HLA-DQA1*01-B1*05L HLA-DRB4*02:01NL HLA-DRB1*13:01L HLA-DRB4*01:01L HLA-DPA1*01:03-B1*04:01L
  REGION 1..11: note = CONT. FROM ABOVE: HLA-DRB1*09:01L HLA-DPA1*01:03-B1*04:02L HLA-D RB3*01:01L HLA-DPA1*01:03-B1*02:01L HLA-DPA1*01:03-B1*104:01L HL A-DRB1*08:02L HLA-DRB1*15:01L
  source 1..11: note = Severe acute respiratory syndrome coronavirus 2
IVNNATNVVIK

SEQ ID NO: 12004 - protein, 12 aa, Severe acute respiratory syndrome-related coronavirus
  REGION 1..12: note = Table B: HLA-DRB1*14:04L HLA-DRB1*08:04L HLA-DPA1*01:03-B1*03:01L HLA-DRB1*11:04L HLA-DRB1*14:02L HLA-DQA1*01:01-B1*05:01L HLA-DRB1*08:01L HLA-DQA1*05:05-B1*03:19L HLA-DRB4*01:01L HLA-DRB1*09:01L
  REGION 1..12: note = CONT. FROM ABOVE: HLA-DRB3*01:01L HLA-DQA1*05:05-B1*03:01L HLA-D RB1*07:01L HLA-DRB1*08:03L HLA-DRB1*15:01L
  source 1..12: note = Severe acute respiratory syndrome coronavirus 2
SALEPLVDLPIG

SEQ ID NO: 12005 - protein, 15 aa, Severe acute respiratory syndrome-related coronavirus
  REGION 1..15: note = Table B: HLA-DRB1*14:04L HLA-DRB5*01:01L HLA-DRB4*02:01NL HLA-DRB1*13:01L
  source 1..15: note = Severe acute respiratory syndrome coronavirus 2
LLKYNENGTITDAVD

SEQ ID NO: 12006 - protein, 16 aa, Severe acute respiratory syndrome-related coronavirus
  REGION 1..16: note = Table B: HLA-DRB1*14:04L HLA-DRB4*01:01L
  source 1..16: note = Severe acute respiratory syndrome coronavirus 2
VEKGIYQTSNFRVQPT

SEQ ID NO: 12007 - protein, 13 aa, Severe acute respiratory syndrome-related coronavirus
  REGION 1..13: note = Table B: HLA-DRB1*14:04L HLA-DRB1*11:02L HLA-DRB4*02:01NL HLA-DPA1*01:03-B1*04:01L HLA-DPA1*01:03-B1*02:01L HLA-DPA1*01:03-B1*104:01L
  source 1..13: note = Severe acute respiratory syndrome coronavirus 2
SNFRVQPTESIVR

SEQ ID NO: 12008 - protein, 14 aa, Severe acute respiratory syndrome-related coronavirus
  REGION 1..14: note = Table B: HLA-DRB1*14:04L HLA-DRB1*01:01L HLA-DRB1*11:02L HLA-DRB5*01:01L HLA-DQA1*01-B1*05L HLA-DRB1*13:01L HLA-DRB4*01:01L HLA-DRB1*09:01L HLA-DPA1*01:03-B1*04:02L HLA-DRB1*12:02L HLA-DPA1*01:03-B1*02:01L
  REGION 1..14: note = CONT. FROM ABOVE: HLA-DPA1*01:03-B1*104:01L HLA-DRB1*07:01L HLA- DRB1*08:02L
  source 1..14: note = Severe acute respiratory syndrome coronavirus 2
FVIRGDEVRQIAPG

SEQ ID NO: 12009 - protein, 13 aa, Severe acute respiratory syndrome-related coronavirus
  REGION 1..13: note = Table B: HLA-DRB1*14:04L HLA-DRB1*04:01L HLA-DRB3*02:01L HLA-DRB1*11:03L HLA-DRB1*11:04L HLA-DRB1*14:02L HLA-DRB1*09:01L HLA-DPA1*01:03-B1*104:01L HLA-DRB1*07:01L
  source 1..13: note = Severe acute respiratory syndrome coronavirus 2
GDEVRQIAPGQTG

SEQ ID NO: 12010 - protein, 13 aa, Severe acute respiratory syndrome-related coronavirus
  REGION 1..13: note = Table B: HLA-DRB1*14:04L HLA-DRB1*04:01L HLA-DRB1*13:02L HLA-DRB1*01:03L HLA-DRB1*04:04L HLA-DRB1*04:05L HLA-DQA1*01:02-B1*06:02L HLA-DRB1*01:02L HLA-DRB1*08:04L HLA-DRB1*08:77L HLA-DRB3*02:01L HLA-DPA1*01:03-B1*03:01L
  REGION 1..13: note = CONT. FROM ABOVE: HLA-DRB1*11:03L HLA-DRB1*11:04L HLA-DRB1*14:02 L HLA-DQA1*01:01-B1*05:01L HLA-DRB1*08:01L HLA-DRB1*11:01L HLA-D RB5*01:01L HLA-DQA1*05:05-B1*03:19L HLA-DRB4*01:01L HLA-DPA1*01: 03-B1*04:01L HLA-DRB1*04:10M HLA-DRB1*09:01L
  REGION 1..13: note = CONT. FROM ABOVE: HLA-DPA1*01:03-B1*04:02L HLA-DRB1*12:01L HLA-D RB1*12:02L HLA-DRB3*01:01L HLA-DPA1*02:01-B1*13:01L HLA-DPA1*03: 01-B1*105:01L HLA-DPA1*01:03-B1*104:01L HLA-DQA1*05:05-B1*03:01L HLA-DRB1*07:01L HLA-DRB1*10:01L HLA-DQA1*01:03-B1*06:01L
  REGION 1..13: note = CONT. FROM ABOVE: HLA-DRB1*04:08L HLA-DRB1*08:03L HLA-DRB1*15:03 L
  source 1..13: note = Severe acute respiratory syndrome coronavirus 2
VPVAIHADQLTPT

SEQ ID NO: 12011 - protein, 14 aa, Severe acute respiratory syndrome-related coronavirus
  REGION 1..14: note = Table B: HLA-DRB1*14:04L HLA-DRB1*01:01L HLA-DRB1*08:77L HLA-DRB3*02:01L HLA-DRB1*15:01L
  source 1..14: note = Severe acute respiratory syndrome coronavirus 2
QSIIAYTMSLGAEN

SEQ ID NO: 12012 - protein, 12 aa, Severe acute respiratory syndrome-related coronavirus
  REGION 1..12: note = Table B: HLA-DRB1*14:04L HLA-DQA1*01:02-B1*06:02L HLA-DQA1*01:01-B1*05:01L HLA-DPA1*01:03-B1*04:01L HLA-DPA1*01:03-B1*04:02L HLA-DPA1*02:01-B1*13:01L HLA-DPA1*01:03-B1*104:01L HLA-DQA1*01:03-B1*06:01L
  source 1..12: note = Severe acute respiratory syndrome coronavirus 2
FSQILPDPSKPS

SEQ ID NO: 12013 - protein, 12 aa, Severe acute respiratory syndrome-related coronavirus
  REGION 1..12: note = Table B: HLA-DRB1*14:04L HLA-DRB1*11:02L HLA-DQA1*01:01-B1*05:01L HLA-DRB4*02:01NL HLA-DPA1*01:03-B1*04:01L HLA-DPA1*01:03-B1*02:01L HLA-DPA1*01:03-B1*104:01L HLA-DQA1*01:03-B1*06:01L
  REGION 1..12: note = CONT. FROM ABOVE: HLA-DRB1*08:02L
  source 1..12: note = Severe acute respiratory syndrome coronavirus 2
SQILPDPSKPSK

SEQ ID NO: 12014 - protein, 14 aa, Severe acute respiratory syndrome-related coronavirus
  REGION 1..14: note = Table B: HLA-DRB1*14:04L HLA-DRB1*04:01L HLA-DRB1*01:01L HLA-DRB1*03:01L HLA-DRB1*11:02L HLA-DRB5*01:01L HLA-DRB1*13:01L HLA-DRB4*01:01L HLA-DPA1*01:03-B1*04:01L HLA-DRB1*09:01L HLA-DPA1*01:03-B1*02:01L HLA-DRB1*07:01L
  source 1..14: note = Severe acute respiratory syndrome coronavirus 2
EDLLFNKVTLADAG

SEQ ID NO: 12015 - protein, 14 aa, Severe acute respiratory syndrome-related coronavirus
  REGION 1..14: note = Table B: HLA-DRB1*14:04L HLA-DRB1*01:01L HLA-DRB1*08:77L HLA-DRB1*03:01L HLA-DRB1*13:01L HLA-DRB1*07:01L
  source 1..14: note = Severe acute respiratory syndrome coronavirus 2
QNVLYENQKLIANQ

SEQ ID NO: 12016 - protein, 14 aa, Severe acute respiratory syndrome-related coronavirus
  REGION 1..14: note = Table B: HLA-DRB1*14:04L HLA-DRB1*01:01L HLA-DRB1*03:01L HLA-DRB1*11:02L HLA-DQA1*01:01-B1*05:01L HLA-DRB1*13:01L HLA-DRB4*01:01L HLA-DRB1*09:01L HLA-DRB1*07:01L HLA-DRB1*08:02L HLA-DRB1*15:01L
  source 1..14: note = Severe acute respiratory syndrome coronavirus 2
NQKLIANQFNSAIG

SEQ ID NO: 12017 - protein, 14 aa, Severe acute respiratory syndrome-related coronavirus
  REGION 1..14: note = Table B: HLA-DRB1*14:04L HLA-DRB1*13:02L HLA-DRB1*01:01L HLA-DRB1*11:01L HLA-DRB5*01:01L HLA-DRB1*08:02L
  source 1..14: note = Severe acute respiratory syndrome coronavirus 2
NSAIGKIQDSLSST

SEQ ID NO: 12018 - protein, 16 aa, Severe acute respiratory syndrome-related coronavirus
  REGION 1..16: note = Table B: HLA-DRB1*14:04L HLA-DRB1*03:01L HLA-DRB1*11:02L HLA-DRB1*13:01L HLA-DPA1*01:03-B1*04:01L HLA-DRB3*01:01L
  source 1..16: note = Severe acute respiratory syndrome coronavirus 2
IQDSLSSTASALGKLQ

SEQ ID NO: 12019 - protein, 14 aa, Severe acute respiratory syndrome-related coronavirus
  REGION 1..14: note = Table B: HLA-DRB1*14:04L HLA-DRB1*01:01L HLA-DRB3*02:01L HLA-DPA1*03:01-B1*04:02L HLA-DRB1*03:01L HLA-DRB1*14:02L HLA-DRB1*08:01L HLA-DRB1*11:01L HLA-DRB5*01:01L HLA-DRB4*01:01L HLA-DRB3*01:01L HLA-DQA1*01:03-B1*06:01L HLA-DRB1*15:01L
  source 1..14: note = Severe acute respiratory syndrome coronavirus 2
LGKLQDVVNQNAQA

SEQ ID NO: 12020 - protein, 14 aa, Severe acute respiratory syndrome-related coronavirus
  REGION 1..14: note = Table B: HLA-DRB1*14:04L HLA-DRB1*13:02L HLA-DRB1*04:04L HLA-DRB1*11:02L HLA-DRB1*14:02L HLA-DPA1*01:03-B1*04:02L HLA-DRB1*12:01L HLA-DRB3*01:01L HLA-DPA1*02:01-B1*13:01L HLA-DPA1*01:03-B1*02:01L HLA-DPA1*01:03-B1*104:01L
  REGION 1..14: note = CONT. FROM ABOVE: HLA-DRB1*16:01L HLA-DRB1*08:02L HLA-DRB1*08:03 L
  source 1..14: note = Severe acute respiratory syndrome coronavirus 2
AQALNTLVKQLSSN

SEQ ID NO: 12021 - protein, 14 aa, Severe acute respiratory syndrome-related coronavirus
  REGION 1..14: note = Table B: HLA-DRB1*14:04L HLA-DRB4*01:01L HLA-DRB1*09:01L HLA-DPA1*01:03-B1*104:01L HLA-DRB1*08:03L
  source 1..14: note = Severe acute respiratory syndrome coronavirus 2
AEVQIDRLITGRLQ

SEQ ID NO: 12022 - protein, 14 aa, Severe acute respiratory syndrome-related coronavirus
  REGION 1..14: note = Table B: HLA-DRB1*14:04L HLA-DRB1*01:01L HLA-DPA1*03:01-B1*04:02L HLA-DRB1*14:01L HLA-DRB1*11:03L HLA-DRB1*14:54L HLA-DRB1*07:01L HLA-DRB1*10:01L
  source 1..14: note = Severe acute respiratory syndrome coronavirus 2
QQLIRAAEIRASAN

SEQ ID NO: 12023 - protein, 14 aa, Severe acute respiratory syndrome-related coronavirus
  REGION 1..14: note = Table B: HLA-DRB1*14:04L HLA-DRB1*01:01L HLA-DPA1*03:01-B1*04:02L HLA-DRB1*11:02L HLA-DRB1*11:01L HLA-DRB1*13:01L HLA-DPA1*01:03-B1*04:02L HLA-DPA1*02:01-B1*13:01L HLA-DPA1*01:03-B1*104:01L
  REGION 1..14: note = CONT. FROM ABOVE: HLA-DPA1*01:02-B1*04:01L
  source 1..14: note = Severe acute respiratory syndrome coronavirus 2
PQIITTDNTFVSGN

SEQ ID NO: 12024 - protein, 11 aa, Severe acute respiratory syndrome-related coronavirus
  REGION 1..11: note = Table B: HLA-DRB1*14:04L HLA-DRB1*04:01L HLA-DRB1*13:02L HLA-DRB1*04:02L HLA-DRB1*04:05L HLA-DRB1*01:01L HLA-DRB4*03:01NL HLA-DRB3*02:01L HLA-DRB1*11:02L HLA-DRB1*11:03L HLA-DRB1*11:01L HLA-DRB5*01:01L HLA-DRB1*12:02L HLA-DRB1*14:54L
  REGION 1..11: note = CONT. FROM ABOVE: HLA-DQA1*05:05-B1*03:01L HLA-DRB1*14:17L HLA-D RB1*08:02L
  source 1..11: note = Severe acute respiratory syndrome coronavirus 2
VVIGIVNNTVY

SEQ ID NO: 12025 - protein, 14 aa, Severe acute respiratory syndrome-related coronavirus
  REGION 1..14: note = Table B: HLA-DRB1*14:04L HLA-DRB1*13:01L HLA-DRB1*15:01L
  source 1..14: note = Severe acute respiratory syndrome coronavirus 2
LDKYFKNHTSPDVD

SEQ ID NO: 12026 - protein, 13 aa, Severe acute respiratory syndrome-related coronavirus
  REGION 1..13: note = Table B: HLA-DRB1*14:04L HLA-DRB1*04:01L HLA-DRB1*03:01L HLA-DRB1*11:01L HLA-DPA1*01:03-B1*04:01L HLA-DRB3*01:01L HLA-DPA1*01:03-B1*02:01L HLA-DPA1*01:02-B1*04:01L HLA-DRB1*08:02L HLA-DRB1*15:01L
  source 1..13: note = Severe acute respiratory syndrome coronavirus 2
LGDISGINASVVN

SEQ ID NO: 12027 - protein, 13 aa, Severe acute respiratory syndrome-related coronavirus
  REGION 1..13: note = Table B: HLA-DRB1*14:04L HLA-DRB1*01:01L HLA-DRB3*02:01L HLA-DPA1*03:01-B1*04:02L HLA-DQA1*01-B1*05L HLA-DRB4*01:01L HLA-DRB1*09:01L HLA-DPA1*02:01-B1*13:01L HLA-DPA1*01:03-B1*02:01L HLA-DPA1*01:03-B1*104:01L
  REGION 1..13: note = CONT. FROM ABOVE: HLA-DPA1*01:02-B1*04:01L HLA-DRB1*07:01L HLA-D RB1*08:02L
  source 1..13: note = Severe acute respiratory syndrome coronavirus 2
ISGINASVVNIQK

SEQ ID NO: 12028 - protein, 13 aa, Severe acute respiratory syndrome-related coronavirus
  REGION 1..13: note = Table B: HLA-DRB1*14:04L HLA-DRB3*02:01L HLA-DPA1*03:01-B1*04:02L HLA-DPA1*02:01-B1*13:01L HLA-DPA1*01:03-B1*104:01L
  source 1..13: note = Severe acute respiratory syndrome coronavirus 2
INASVVNIQKEID

SEQ ID NO: 12029 - protein, 12 aa, Severe acute respiratory syndrome-related coronavirus
  REGION 1..12: note = Table B: HLA-DRB1*14:04L HLA-DRB1*14:02L HLA-DQA1*05:05-B1*03:116L HLA-DRB1*09:01L HLA-DPA1*01:03-B1*02:01L HLA-DRB1*07:01L
  source 1..12: note = Severe acute respiratory syndrome coronavirus 2
ASVVNIQKEIDR

SEQ ID NO: 12030 - protein, 14 aa, Severe acute respiratory syndrome-related coronavirus
  REGION 1..14: note = Table B: HLA-DRB1*14:04L HLA-DRB1*04:01L HLA-DRB1*04:04L HLA-DRB1*11:02L HLA-DRB1*13:01L HLA-DPA1*01:03-B1*02:01L HLA-DRB1*04:08L HLA-DRB1*08:02L
  source 1..14: note = Severe acute respiratory syndrome coronavirus 2
LNEVAKNLNESLID

SEQ ID NO: 12031 - protein, 12 aa, Severe acute respiratory syndrome-related coronavirus
  REGION 1..12: note = Table B: HLA-DRB1*14:04L HLA-DRB1*04:01L HLA-DRB1*03:01L HLA-DRB1*11:02L HLA-DQA1*01:01-B1*05:01L HLA-DRB4*02:01NL HLA-DRB4*01:01L HLA-DQA1*05:05-B1*03:116L HLA-DRB3*01:01L HLA-DPA1*01:03-B1*02:01L HLA-DRB1*08:02L HLA-DRB1*15:01L
  source 1..12: note = Severe acute respiratory syndrome coronavirus 2
DFVRATATIPIQ

SEQ ID NO: 12032 - protein, 12 aa, Severe acute respiratory syndrome-related coronavirus
  REGION 1..12: note = Table B: HLA-DRB1*14:04L HLA-DQA1*01:01-B1*05:01L HLA-DQA1*01-B1*05L HLA-DRB4*01:01L HLA-DPA1*01:03-B1*04:02L HLA-DRB3*01:01L HLA-DRB1*10:01L
  source 1..12: note = Severe acute respiratory syndrome coronavirus 2
LAVFQSASKIIT

SEQ ID NO: 12033 - protein, 13 aa, Severe acute respiratory syndrome-related coronavirus
  REGION 1..13: note = Table B: HLA-DRB1*14:04L HLA-DPA1*01:03-B1*03:01L HLA-DRB1*14:02L HLA-DRB1*09:01L HLA-DRB3*01:01L HLA-DPA1*03:01-B1*105:01L HLA-DQA1*05:05-B1*03:01L HLA-DRB1*07:01L
  source 1..13: note = Severe acute respiratory syndrome coronavirus 2
EHVQIHTIDGSSG

SEQ ID NO: 12034 - protein, 12 aa, Severe acute respiratory syndrome-related coronavirus
  REGION 1..12: note = Table B: HLA-DRB1*14:04L HLA-DRB1*13:02L HLA-DRB1*01:02L HLA-DRB1*11:02L HLA-DRB1*12:02L
  source 1..12: note = Severe acute respiratory syndrome coronavirus 2
IVNVSLVKPSFY

SEQ ID NO: 12035 - protein, 14 aa, Severe acute respiratory syndrome-related coronavirus
  REGION 1..14: note = Table B: HLA-DRB1*14:04L HLA-DRB1*01:01L HLA-DQA1*01:01-B1*05:01L HLA-DRB5*01:01L HLA-DRB4*02:01NL HLA-DRB1*13:01L HLA-DQA1*05:05-B1*03:116L HLA-DRB1*07:01L HLA-DRB1*15:01L
  source 1..14: note = Severe acute respiratory syndrome coronavirus 2
AAVYRINWITGGIA

SEQ ID NO: 12036 - protein, 13 aa, Severe acute respiratory syndrome-related coronavirus
  REGION 1..13: note = Table B: HLA-DRB1*14:04L HLA-DRB1*04:04L HLA-DRB1*01:01L HLA-DRB1*08:04L HLA-DRB1*03:01L HLA-DRB1*08:01L HLA-DRB1*11:01L HLA-DRB4*02:01NL HLA-DRB4*01:01L HLA-DRB3*01:01L HLA-DPA1*01:03-B1*104:01L HLA-DRB1*10:01L HLA-DRB1*04:08L
  REGION 1..13: note = CONT. FROM ABOVE: HLA-DRB1*08:03L HLA-DRB1*15:01L
  source 1..13: note = Severe acute respiratory syndrome coronavirus 2
LPKEITVATSRTL

SEQ ID NO: 12037 - protein, 13 aa, Severe acute respiratory syndrome-related coronavirus
  REGION 1..13: note = Table B: HLA-DRB1*14:04L HLA-DRB1*01:01L HLA-DRB1*03:01L HLA-DRB1*11:02L HLA-DQA1*05:05-B1*03:19L HLA-DRB4*02:01NL HLA-DRB1*13:01L HLA-DRB4*01:01L HLA-DPA1*01:03-B1*04:02L HLA-DPA1*01:03-B1*02:01L HLA-DPA1*01:03-B1*104:01L
  REGION 1..13: note = CONT. FROM ABOVE: HLA-DRB1*08:02L
  source 1..13: note = Severe acute respiratory syndrome coronavirus 2
IGNYKLNTDHSSS

SEQ ID NO: 12038 - protein, 14 aa, Severe acute respiratory syndrome-related coronavirus
  REGION 1..14: note = Table B: HLA-DRB1*14:04L HLA-DRB1*04:04L HLA-DRB1*08:77L HLA-DRB1*03:01L HLA-DRB1*11:02L HLA-DQA1*05:05-B1*03:19L HLA-DPA1*01:03-B1*04:02L HLA-DPA1*02:01-B1*13:01L HLA-DQA1*05:05-B1*03:01L HLA-DRB1*07:01L
  REGION 1..14: note = CONT. FROM ABOVE: HLA-DQA1*01:03-B1*06:01L HLA-DRB1*08:02L
  source 1..14: note = Severe acute respiratory syndrome coronavirus 2
INLIIKNLSKSLTE

SEQ ID NO: 12039 - protein, 12 aa, Severe acute respiratory syndrome-related coronavirus
  REGION 1..12: note = Table B: HLA-DRB1*14:04L HLA-DRB1*04:01L HLA-DRB1*08:04L HLA-DRB5*01:01L HLA-DPA1*01:03-B1*02:01L HLA-DRB1*15:01L
  source 1..12: note = Severe acute respiratory syndrome coronavirus 2
SPFHPLADNKFA

SEQ ID NO: 12040 - protein, 12 aa, Severe acute respiratory syndrome-related coronavirus
  REGION 1..12: note = Table B: HLA-DRB1*14:04L HLA-DRB1*04:01L HLA-DRB1*01:01L HLA-DRB4*01:01L HLA-DRB3*01:01L
  source 1..12: note = Severe acute respiratory syndrome coronavirus 2
GIITTVAAFHQE

SEQ ID NO: 12041 - protein, 12 aa, Severe acute respiratory syndrome-related coronavirus
  REGION 1..12: note = Table B: HLA-DRB1*14:04L HLA-DRB1*11:02L HLA-DRB4*02:01NL HLA-DRB1*08:02L HLA-DRB1*15:01L
  source 1..12: note = Severe acute respiratory syndrome coronavirus 2
QPYVVDDPCPIH

SEQ ID NO: 12042 - protein, 13 aa, Severe acute respiratory syndrome-related coronavirus
  REGION 1..13: note = Table B: HLA-DRB1*14:04L HLA-DRB1*11:01L HLA-DPA1*01:03-B1*02:01L HLA-DRB1*15:01L
  source 1..13: note = Severe acute respiratory syndrome coronavirus 2
KSPIQYIDIGNYT

SEQ ID NO: 12043 - protein, 14 aa, Severe acute respiratory syndrome-related coronavirus
  REGION 1..14: note = Table B: HLA-DRB1*14:04L HLA-DRB1*04:01L HLA-DPA1*01:03-B1*02:01L HLA-DRB1*15:01L
  source 1..14: note = Severe acute respiratory syndrome coronavirus 2
SPIQYIDIGNYTVS

SEQ ID NO: 12044 - protein, 14 aa, Severe acute respiratory syndrome-related coronavirus
  REGION 1..14: note = Table B: HLA-DRB1*14:04L HLA-DRB1*03:01L HLA-DRB5*01:01L HLA-DRB4*02:01NL HLA-DRB1*13:01L HLA-DRB1*15:01L
  source 1..14: note = Severe acute respiratory syndrome coronavirus 2
ASWFTALTQHGKED

SEQ ID NO: 12045 - protein, 14 aa, Severe acute respiratory syndrome-related coronavirus
  REGION 1..14: note = Table B: HLA-DRB1*14:04L HLA-DRB1*01:01L HLA-DRB1*11:02L HLA-DQA1*01:01-B1*05:01L HLA-DRB1*08:01L HLA-DRB1*11:01L HLA-DRB5*01:01L HLA-DPA1*01:03-B1*04:02L HLA-DRB1*07:01L HLA-DRB1*08:02L
  source 1..14: note = Severe acute respiratory syndrome coronavirus 2
KDGIIWVATEGALN

SEQ ID NO: 12046 - protein, 14 aa, Severe acute respiratory syndrome-related coronavirus
  REGION 1..14: note = Table B: HLA-DRB1*14:04L HLA-DPA1*01:03-B1*02:01L HLA-DPA1*01:03-B1*104:01L HLA-DRB1*07:01L
  source 1..14: note = Severe acute respiratory syndrome coronavirus 2
TGAIKLDDKDPNFK

SEQ ID NO: 12047 - protein, 12 aa, Severe acute respiratory syndrome-related coronavirus
  REGION 1..12: note = Table B: HLA-DRB1*14:04L HLA-DRB1*13:02L HLA-DRB1*04:04L HLA-DRB3*02:01L HLA-DRB1*11:03L HLA-DRB1*14:02L HLA-DRB1*11:01L HLA-DQA1*05:05-B1*03:19L HLA-DQA1*05:05-B1*03:116L HLA-DPA1*01:03-B1*04:02L HLA-DRB1*12:02L HLA-DRB3*01:01L
  REGION 1..12: note = CONT. FROM ABOVE: HLA-DPA1*02:01-B1*13:01L HLA-DPA1*01:03-B1*02: 01L HLA-DQA1*05:05-B1*03:01L HLA-DRB1*10:01L HLA-DRB1*08:02L
  source 1..12: note = Severe acute respiratory syndrome coronavirus 2
DQVILLNKHIDA

SEQ ID NO: 12048 - protein, 11 aa, Severe acute respiratory syndrome-related coronavirus
  REGION 1..11: note = Table B: HLA-DRB1*14:04L HLA-DRB1*04:01L HLA-DRB1*04:04L HLA-DRB1*08:04L HLA-DRB1*11:02L HLA-DRB1*11:04L HLA-DRB1*08:01L HLA-DRB5*01:01L HLA-DRB5*02:02L HLA-DRB1*13:01L HLA-DRB3*01:01L HLA-DPA1*01:03-B1*02:01L HLA-DPA1*01:03-B1*104:01L
  REGION 1..11: note = CONT. FROM ABOVE: HLA-DRB1*07:01L HLA-DRB1*04:08M HLA-DRB1*08:02 L HLA-DRB1*15:01L
  source 1..11: note = Severe acute respiratory syndrome coronavirus 2
YIAQVDVVNFN

SEQ ID NO: 12049 - protein, 14 aa, Severe acute respiratory syndrome-related coronavirus
  REGION 1..14: note = Table B: HLA-DRB3*02:02L
  source 1..14: note = Severe acute respiratory syndrome coronavirus 2
DYIATNGPLKVGGS

SEQ ID NO: 12050 - protein, 18 aa, Severe acute respiratory syndrome-related coronavirus
  REGION 1..18: note = Table B: HLA-DRB3*02:02L
  source 1..18: note = Severe acute respiratory syndrome coronavirus 2
QPIDLVPNQPYPNASFDN

SEQ ID NO: 12051 - protein, 16 aa, Severe acute respiratory syndrome-related coronavirus
  REGION 1..16: note = Table B: HLA-DRB3*02:02L
  source 1..16: note = Severe acute respiratory syndrome coronavirus 2
ISDEFSSNVANYQKVG

SEQ ID NO: 12052 - protein, 14 aa, Severe acute respiratory syndrome-related coronavirus
  REGION 1..14: note = Table B: HLA-DRB1*04:01L HLA-DRB1*04:04L HLA-DRB1*01:01L HLA-DRB1*11:02L HLA-DRB1*13:01L HLA-DRB1*08:02L
  source 1..14: note = Severe acute respiratory syndrome coronavirus 2
VEEVLSEARQHLKD

SEQ ID NO: 12053 - protein, 14 aa, Severe acute respiratory syndrome-related coronavirus
  REGION 1..14: note = Table B: HLA-DRB1*04:01L HLA-DRB1*04:04L HLA-DRB1*01:01L HLA-DRB1*08:04L HLA-DRB1*08:77L HLA-DRB1*11:02L HLA-DRB1*13:01L HLA-DRB1*10:01L HLA-DRB1*08:02L HLA-DRB1*08:03L
  source 1..14: note = Severe acute respiratory syndrome coronavirus 2
EEVLSEARQHLKDG

SEQ ID NO: 12054 - protein, 15 aa, Severe acute respiratory syndrome-related coronavirus
  REGION 1..15: note = Table B: HLA-DRB1*04:01L HLA-DRB1*13:02L HLA-DRB1*01:01L
  source 1..15: note = Severe acute respiratory syndrome coronavirus 2
PYVFIKRSDARTAPH

SEQ ID NO: 12055 - protein, 18 aa, Severe acute respiratory syndrome-related coronavirus
  REGION 1..18: note = Table B: HLA-DRB1*04:01L
  source 1..18: note = Severe acute respiratory syndrome coronavirus 2
YRKVLLRKNGNKGAGGHS

SEQ ID NO: 12056 - protein, 14 aa, Severe acute respiratory syndrome-related coronavirus
  REGION 1..14: note = Table B: HLA-DRB1*04:01L HLA-DRB1*04:04L HLA-DRB4*03:01NL HLA-DRB3*02:01L HLA-DRB1*11:02L HLA-DRB1*11:03L HLA-DQA1*01:01-B1*05:01L HLA-DRB1*04:10L HLA-DRB1*12:02L HLA-DRB3*01:01L HLA-DPA1*01:03-B1*02:01L HLA-DRB1*14:17L
  source 1..14: note = Severe acute respiratory syndrome coronavirus 2
GHSYGADLKSFDLG

SEQ ID NO: 12057 - protein, 17 aa, Severe acute respiratory syndrome-related coronavirus
  REGION 1..17: note = Table B: HLA-DRB1*04:01L HLA-DRB1*04:04L HLA-DRB3*02:01L HLA-DRB1*03:01L HLA-DRB1*11:02L HLA-DRB1*11:03L HLA-DRB1*14:02L HLA-DRB1*11:01L HLA-DQA1*05:05-B1*03:19L HLA-DPA1*01:03-B1*04:02L HLA-DPA1*01:03-B1*02:01L
  REGION 1..17: note = CONT. FROM ABOVE: HLA-DPA1*01:03-B1*104:01L HLA-DRB1*10:01L HLA- DRB1*08:02L
  source 1..17: note = Severe acute respiratory syndrome coronavirus 2
DPYEDFQENWNTKHSSG

SEQ ID NO: 12058 - protein, 13 aa, Severe acute respiratory syndrome-related coronavirus
  REGION 1..13: note = Table B: HLA-DRB1*04:01L HLA-DRB1*08:04L HLA-DRB1*11:04L
  source 1..13: note = Severe acute respiratory syndrome coronavirus 2
RELMRELNGGAYT

SEQ ID NO: 12059 - protein, 10 aa, Severe acute respiratory syndrome-related coronavirus
  REGION 1..10: note = Table B: HLA-DRB1*04:01L HLA-DRB1*13:02L HLA-DRB1*13:03L HLA-DRB1*01:03L HLA-DRB1*04:02L HLA-DRB1*01:01L HLA-DRB4*03:01NL HLA-DRB3*02:01L HLA-DRB1*14:01L HLA-DRB1*11:04L HLA-DRB1*08:01L HLA-DRB1*11:01L HLA-DRB5*01:01L HLA-DPA1*01:03-B1*04:02L
  REGION 1..10: note = CONT. FROM ABOVE: HLA-DRB1*12:01L HLA-DRB3*01:01L HLA-DQA1*03:01 -B1*03:02M HLA-DQA1*05:05-B1*03:01L HLA-DRB1*14:17L HLA-DRB1*16: 01L HLA-DRB1*08:02L HLA-DQA1*02:01-B1*03:03L HLA-DRB1*15:01L
  source 1..10: note = Severe acute respiratory syndrome coronavirus 2
RELNGGAYTR

SEQ ID NO: 12060 - protein, 14 aa, Severe acute respiratory syndrome-related coronavirus
  REGION 1..14: note = Table B: HLA-DRB1*04:01L HLA-DRB1*08:04L HLA-DRB1*14:01L HLA-DRB1*11:04L HLA-DRB1*11:01L HLA-DRB1*12:01L HLA-DRB3*01:01L HLA-DPA1*03:01-B1*105:01L HLA-DQA1*03:01-B1*03:02L HLA-DQA1*02:01-B1*03:03L HLA-DRB1*15:03L
  source 1..14: note = Severe acute respiratory syndrome coronavirus 2
YPLECIKDLLARAG

SEQ ID NO: 12061 - protein, 14 aa, Severe acute respiratory syndrome-related coronavirus
  REGION 1..14: note = Table B: HLA-DRB1*04:01L
  source 1..14: note = Severe acute respiratory syndrome coronavirus 2
SEQLDFIDTKRGVY

SEQ ID NO: 12062 - protein, 11 aa, Severe acute respiratory syndrome-related coronavirus
  REGION 1..11: note = Table B: HLA-DRB1*04:01L HLA-DRB1*13:02L HLA-DRB1*04:04L HLA-DRB1*01:01L HLA-DRB1*01:02L HLA-DRB4*03:01NL HLA-DRB1*08:04L HLA-DRB1*14:01L HLA-DRB1*11:04L HLA-DRB1*08:01L HLA-DRB1*11:01L HLA-DRB1*04:10L HLA-DRB1*12:01L HLA-DRB1*14:54L
  REGION 1..11: note = CONT. FROM ABOVE: HLA-DQA1*05:05-B1*03:01L HLA-DRB1*04:08L
  source 1..11: note = Severe acute respiratory syndrome coronavirus 2
WYTERSEKSYE

SEQ ID NO: 12063 - protein, 13 aa, Severe acute respiratory syndrome-related coronavirus
  REGION 1..13: note = Table B: HLA-DRB1*04:01L HLA-DRB1*08:04L HLA-DRB1*03:01L HLA-DQA1*01:01-B1*05:01L HLA-DRB4*02:01NL HLA-DRB1*04:10L HLA-DPA1*01:03-B1*04:02L HLA-DRB1*14:54L HLA-DRB1*08:03L
  source 1..13: note = Severe acute respiratory syndrome coronavirus 2
EKSYELQTPFEIK

SEQ ID NO: 12064 - protein, 13 aa, Severe acute respiratory syndrome-related coronavirus
  REGION 1..13: note = Table B: HLA-DRB1*04:01L HLA-DRB1*01:01L HLA-DRB1*03:01L
  source 1..13: note = Severe acute respiratory syndrome coronavirus 2
NSIIKTIQPRVEK

SEQ ID NO: 12065 - protein, 13 aa, Severe acute respiratory syndrome-related coronavirus
  REGION 1..13: note = Table B: HLA-DRB1*04:01L HLA-DRB1*13:02L HLA-DRB1*13:03L HLA-DRB1*01:01L HLA-DRB1*08:04L HLA-DRB1*08:77L HLA-DPA1*01:03-B1*03:01L HLA-DRB1*11:03L HLA-DRB1*11:04L HLA-DRB1*14:02L HLA-DQA1*01:01-B1*05:01L HLA-DRB1*08:01L
  REGION 1..13: note = CONT. FROM ABOVE: HLA-DRB1*11:01L HLA-DQA1*01-B1*05L HLA-DQA1*05 :05-B1*03:19L HLA-DQA1*05:01-B1*02:01L HLA-DRB1*12:02L HLA-DRB3* 01:01L HLA-DPA1*02:01-B1*13:01L HLA-DPA1*03:01-B1*105:01L HLA-DR B1*14:54L HLA-DPA1*01:03-B1*104:01L HLA-DPA1*01:02-B1*04:01L
  REGION 1..13: note = CONT. FROM ABOVE: HLA-DRB1*07:01L HLA-DRB1*10:01L HLA-DRB1*08:03 L
  source 1..13: note = Severe acute respiratory syndrome coronavirus 2
GRIRSVYPVASPN

SEQ ID NO: 12066 - protein, 16 aa, Severe acute respiratory syndrome-related coronavirus
  REGION 1..16: note = Table B: HLA-DRB1*04:01L HLA-DRB1*01:01L HLA-DRB1*08:04L HLA-DRB3*02:01L HLA-DRB1*11:02L HLA-DRB1*11:01L HLA-DQA1*05:01-B1*02:01L HLA-DRB4*01:01L HLA-DQA1*03:01-B1*03:02L HLA-DRB1*10:01L HLA-DRB1*08:02L
  source 1..16: note = Severe acute respiratory syndrome coronavirus 2
TGDFVKATCEFCGTEN

SEQ ID NO: 12067 - protein, 12 aa, Severe acute respiratory syndrome-related coronavirus
  REGION 1..12: note = Table B: HLA-DRB1*04:01L HLA-DRB1*11:03L HLA-DQA1*01:01-B1*05:01L HLA-DRB1*07:01L
  source 1..12: note = Severe acute respiratory syndrome coronavirus 2
GYLPQNAVVKIY

SEQ ID NO: 12068 - protein, 16 aa, Severe acute respiratory syndrome-related coronavirus
  REGION 1..16: note = Table B: HLA-DRB1*04:01L HLA-DRB1*13:02L HLA-DRB1*01:01L HLA-DRB1*08:04L HLA-DRB3*02:01L HLA-DPA1*03:01-B1*04:02L HLA-DRB1*14:01L HLA-DRB1*11:02L HLA-DRB1*11:03L HLA-DRB1*11:04L HLA-DRB1*14:02L HLA-DRB1*11:01L HLA-DRB3*01:01L
  REGION 1..16: note = CONT. FROM ABOVE: HLA-DPA1*01:02-B1*04:01L HLA-DRB1*07:01L HLA-D RB1*10:01L HLA-DRB1*08:03L
  source 1..16: note = Severe acute respiratory syndrome coronavirus 2
GPEHSLAEYHNESGLK

SEQ ID NO: 12069 - protein, 14 aa, Severe acute respiratory syndrome-related coronavirus
  REGION 1..14: note = Table B: HLA-DRB1*04:01L
  source 1..14: note = Severe acute respiratory syndrome coronavirus 2
LAEYHNESGLKTIL

SEQ ID NO: 12070 - protein, 14 aa, Severe acute respiratory syndrome-related coronavirus
  REGION 1..14: note = Table B: HLA-DRB1*04:01L HLA-DRB1*11:01L HLA-DRB3*01:01L
  source 1..14: note = Severe acute respiratory syndrome coronavirus 2
AEYHNESGLKTILR

SEQ ID NO: 12071 - protein, 15 aa, Severe acute respiratory syndrome-related coronavirus
  REGION 1..15: note = Table B: HLA-DRB1*04:01L HLA-DRB1*04:04L HLA-DRB1*08:04L HLA-DRB1*14:01L HLA-DRB1*08:01L HLA-DRB1*11:01L HLA-DRB4*01:01L HLA-DRB3*01:01L HLA-DPA1*01:02-B1*04:01L HLA-DRB1*08:03L
  source 1..15: note = Severe acute respiratory syndrome coronavirus 2
HTGVVGEGSEGLNDN

SEQ ID NO: 12072 - protein, 15 aa, Severe acute respiratory syndrome-related coronavirus
  REGION 1..15: note = Table B: HLA-DRB1*04:01L HLA-DRB3*02:01L HLA-DPA1*03:01-B1*04:02L HLA-DRB1*11:02L HLA-DQA1*01-B1*05L HLA-DRB4*01:01L HLA-DPA1*01:03-B1*04:02L HLA-DPA1*01:03-B1*104:01L HLA-DRB1*14:17L HLA-DRB1*10:01L
  REGION 1..15: note = CONT. FROM ABOVE: HLA-DRB1*08:02L HLA-DRB1*08:03L
  source 1..15: note = Severe acute respiratory syndrome coronavirus 2
LEILQKEKVNINIVG

SEQ ID NO: 12073 - protein, 14 aa, Severe acute respiratory syndrome-related coronavirus
  REGION 1..14: note = Table B: HLA-DRB1*04:01L HLA-DRB1*04:04L HLA-DRB1*03:01L HLA-DRB1*11:02L HLA-DRB1*08:01L HLA-DRB1*11:01L HLA-DRB4*02:01NL HLA-DRB4*01:01L HLA-DPA1*01:03-B1*04:02L HLA-DRB3*01:01L HLA-DPA1*01:03-B1*104:01L HLA-DRB1*08:02L HLA-DRB1*15:01L
  source 1..14: note = Severe acute respiratory syndrome coronavirus 2
LASFSASTSAFVET

SEQ ID NO: 12074 - protein, 14 aa, Severe acute respiratory syndrome-related coronavirus
  REGION 1..14: note = Table B: HLA-DRB1*04:01L HLA-DRB1*01:01L HLA-DRB1*03:01L HLA-DRB1*11:03L HLA-DRB1*13:01L HLA-DRB1*14:54L HLA-DPA1*01:03-B1*104:01L HLA-DQA1*05:05-B1*03:01L HLA-DRB1*07:01L HLA-DRB1*10:01L
  source 1..14: note = Severe acute respiratory syndrome coronavirus 2
VKGLDYKAFKQIVE

SEQ ID NO: 12075 - protein, 13 aa, Severe acute respiratory syndrome-related coronavirus
  REGION 1..13: note = Table B: HLA-DRB1*04:01L HLA-DRB1*11:03L HLA-DPA1*03:01-B1*105:01L HLA-DRB1*15:01L
  source 1..13: note = Severe acute respiratory syndrome coronavirus 2
GNFKVTKGKAKKG

SEQ ID NO: 12076 - protein, 11 aa, Severe acute respiratory syndrome-related coronavirus
  REGION 1..11: note = Table B: HLA-DRB1*04:01L HLA-DRB3*02:01L HLA-DPA1*01:03-B1*03:01L HLA-DRB1*11:01L HLA-DRB1*12:02L HLA-DRB3*01:01L HLA-DRB1*07:01L HLA-DRB1*04:08L
  source 1..11: note = Severe acute respiratory syndrome coronavirus 2
RTLETAQNSVR

SEQ ID NO: 12077 - protein, 13 aa, Severe acute respiratory syndrome-related coronavirus
  REGION 1..13: note = Table B: HLA-DRB1*04:01L HLA-DRB1*01:01L HLA-DRB1*08:04L HLA-DRB1*11:03L HLA-DRB1*11:04L HLA-DRB1*11:01L HLA-DRB1*09:01L HLA-DRB1*12:02L HLA-DRB3*01:01L HLA-DRB1*08:03L
  source 1..13: note = Severe acute respiratory syndrome coronavirus 2
AAITILDGISQYS

SEQ ID NO: 12078 - protein, 15 aa, Severe acute respiratory syndrome-related coronavirus
  REGION 1..15: note = Table B: HLA-DRB1*04:01L HLA-DRB1*01:01L HLA-DRB3*02:01L HLA-DRB1*11:03L HLA-DRB1*13:01L HLA-DRB1*09:01L HLA-DRB1*07:01L HLA-DRB1*08:02L HLA-DRB1*08:03L
  source 1..15: note = Severe acute respiratory syndrome coronavirus 2
TSQWLTNIFGTVYEK

SEQ ID NO: 12079 - protein, 14 aa, Severe acute respiratory syndrome-related coronavirus
  REGION 1..14: note = Table B: HLA-DRB1*04:01L HLA-DRB1*01:01L HLA-DRB1*03:01L HLA-DQA1*01:01-B1*05:01L HLA-DRB1*13:01L HLA-DRB1*14:54L HLA-DRB1*10:01L
  source 1..14: note = Severe acute respiratory syndrome coronavirus 2
TNIFGTVYEKLKPV

SEQ ID NO: 12080 - protein, 14 aa, Severe acute respiratory syndrome-related coronavirus
  REGION 1..14: note = Table B: HLA-DRB1*04:01L HLA-DRB1*04:04L HLA-DRB1*01:01L HLA-DRB1*08:02L
  source 1..14: note = Severe acute respiratory syndrome coronavirus 2
GTVYEKLKPVLDWL

SEQ ID NO: 12081 - protein, 14 aa, Severe acute respiratory syndrome-related coronavirus
  REGION 1..14: note = Table B: HLA-DRB1*04:01L HLA-DRB1*04:04L HLA-DRB1*01:01L HLA-DRB1*11:01L
  source 1..14: note = Severe acute respiratory syndrome coronavirus 2
TVYEKLKPVLDWLE

SEQ ID NO: 12082 - protein, 13 aa, Severe acute respiratory syndrome-related coronavirus
  REGION 1..13: note = Table B: HLA-DRB1*04:01L HLA-DRB1*01:01L HLA-DRB4*03:01NL HLA-DRB1*08:77L HLA-DRB1*03:01L HLA-DQA1*01:01-B1*05:01L HLA-DRB1*14:54L HLA-DRB1*14:17L HLA-DRB1*10:01L
  source 1..13: note = Severe acute respiratory syndrome coronavirus 2
GVEFLRDGWEIVK

SEQ ID NO: 12083 - protein, 15 aa, Severe acute respiratory syndrome-related coronavirus
  REGION 1..15: note = Table B: HLA-DRB1*04:01L HLA-DRB1*11:02L HLA-DRB1*14:02L HLA-DRB4*01:01L HLA-DPA1*01:03-B1*04:02L HLA-DRB3*01:01L
  source 1..15: note = Severe acute respiratory syndrome coronavirus 2
TGLLMPLKAPKEIIF

SEQ ID NO: 12084 - protein, 15 aa, Severe acute respiratory syndrome-related coronavirus
  REGION 1..15: note = Table B: HLA-DRB1*04:01L HLA-DRB1*03:01L HLA-DRB1*11:02L HLA-DRB1*11:04M HLA-DQA1*01:01-B1*05:01L HLA-DRB1*08:01L HLA-DRB1*11:01L HLA-DRB5*01:01L HLA-DRB4*02:01NL HLA-DRB1*13:01L HLA-DRB4*01:01L HLA-DRB1*04:10L HLA-DPA1*01:03-B1*04:02L
  REGION 1..15: note = CONT. FROM ABOVE: HLA-DRB3*01:01L HLA-DPA1*01:03-B1*02:01L HLA-D RB1*08:02L HLA-DRB1*08:03L HLA-DRB1*15:01L
  source 1..15: note = Severe acute respiratory syndrome coronavirus 2
APKEIIFLEGETLPT

SEQ ID NO: 12085 - protein, 17 aa, Severe acute respiratory syndrome-related coronavirus
  REGION 1..17: note = Table B: HLA-DRB1*04:01L HLA-DRB1*11:02L HLA-DRB1*11:01L HLA-DPA1*01:03-B1*02:01L HLA-DRB1*08:02L HLA-DRB1*08:03L
  source 1..17: note = Severe acute respiratory syndrome coronavirus 2
LPTEVLTEEVVLKTGDL

SEQ ID NO: 12086 - protein, 16 aa, Severe acute respiratory syndrome-related coronavirus
  REGION 1..16: note = Table B: HLA-DRB1*04:01L HLA-DRB1*04:04L HLA-DRB1*08:77L HLA-DRB1*11:01L HLA-DQA1*05:05-B1*03:116L HLA-DRB3*01:01L HLA-DPA1*01:03-B1*02:01L HLA-DRB1*07:01L HLA-DRB1*08:03L
  source 1..16: note = Severe acute respiratory syndrome coronavirus 2
EVVLKTGDLQPLEQPT

SEQ ID NO: 12087 - protein, 16 aa, Severe acute respiratory syndrome-related coronavirus
  REGION 1..16: note = Table B: HLA-DRB1*04:01L HLA-DRB1*04:04L HLA-DRB1*11:01L
  source 1..16: note = Severe acute respiratory syndrome coronavirus 2
DTEKYCALAPNMMVTN

SEQ ID NO: 12088 - protein, 15 aa, Severe acute respiratory syndrome-related coronavirus
  REGION 1..15: note = Table B: HLA-DRB1*04:01L HLA-DRB1*01:01L HLA-DRB1*03:01L HLA-DRB1*11:02L HLA-DRB5*01:01L HLA-DRB1*13:01L HLA-DPA1*01:03-B1*04:02L HLA-DRB1*08:02L HLA-DRB1*15:01L
  source 1..15: note = Severe acute respiratory syndrome coronavirus 2
APNMMVTNNTFTLKG

SEQ ID NO: 12089 - protein, 13 aa, Severe acute respiratory syndrome-related coronavirus
  REGION 1..13: note = Table B: HLA-DRB1*04:01L HLA-DRB1*04:04L HLA-DPA1*01:03-B1*03:01L HLA-DQA1*01-B1*05L HLA-DPA1*01:03-B1*04:02L HLA-DRB3*01:01L HLA-DPA1*02:01-B1*13:01L HLA-DPA1*01:03-B1*02:01L
  REGION 1..13: note = CONT. FROM ABOVE: HLA-DPA1*01:02-B1*04:01L HLA-DRB1*07:01L HLA-D RB1*08:02L
  source 1..13: note = Severe acute respiratory syndrome coronavirus 2
NNTFTLKGGAPTK

SEQ ID NO: 12090 - protein, 14 aa, Severe acute respiratory syndrome-related coronavirus
  REGION 1..14: note = Table B: HLA-DRB1*04:01L HLA-DRB1*13:02L HLA-DRB1*01:03L HLA-DRB1*04:02L HLA-DRB1*04:04L HLA-DQA1*01:02-B1*06:02L HLA-DRB1*01:02L HLA-DRB4*03:01NL HLA-DRB1*08:04L HLA-DRB1*08:77L HLA-DPA1*03:01-B1*04:02L HLA-DRB1*03:01L HLA-DRB1*14:01L
  REGION 1..14: note = CONT. FROM ABOVE: HLA-DRB1*11:03L HLA-DRB1*11:04L HLA-DQA1*05:05 -B1*03:19L HLA-DRB1*13:01L HLA-DRB4*01:01L HLA-DRB1*04:10L HLA-D RB1*12:01L HLA-DRB3*01:01L HLA-DPA1*02:01-B1*13:01L HLA-DRB1*14: 54L HLA-DQA1*05:05-B1*03:01L HLA-DRB1*14:17L HLA-DRB1*10:01L
  REGION 1..14: note = CONT. FROM ABOVE: HLA-DQA1*01:03-B1*06:01L HLA-DRB1*04:08L HLA-D RB1*15:03L
  source 1..14: note = Severe acute respiratory syndrome coronavirus 2
KVTFGDDTVIEVQG

SEQ ID NO: 12091 - protein, 13 aa, Severe acute respiratory syndrome-related coronavirus
  REGION 1..13: note = Table B: HLA-DRB1*04:01L HLA-DRB1*01:01L HLA-DRB1*08:77L HLA-DRB1*11:02L HLA-DRB1*11:03L HLA-DRB1*11:04L HLA-DRB1*14:02L HLA-DQA1*01:01-B1*05:01L HLA-DRB1*11:01L HLA-DRB4*01:01L HLA-DRB1*09:01L HLA-DRB1*12:02L HLA-DRB3*01:01L
  REGION 1..13: note = CONT. FROM ABOVE: HLA-DPA1*01:03-B1*02:01L HLA-DRB1*07:01L HLA-D RB1*08:03L HLA-DRB1*15:01L
  source 1..13: note = Severe acute respiratory syndrome coronavirus 2
DTVIEVQGYKSVN

SEQ ID NO: 12092 - protein, 14 aa, Severe acute respiratory syndrome-related coronavirus
  REGION 1..14: note = Table B: HLA-DRB1*04:01L HLA-DRB1*13:02L HLA-DRB1*13:03L HLA-DRB1*01:01L HLA-DRB4*03:01NL HLA-DRB1*08:04L HLA-DRB1*08:77L HLA-DRB3*02:01L HLA-DRB1*03:01L HLA-DRB1*14:01L HLA-DRB1*11:02L HLA-DRB1*11:03L HLA-DRB1*11:04L HLA-DRB1*14:02M
  REGION 1..14: note = CONT. FROM ABOVE: HLA-DQA1*01:01-B1*05:01L HLA-DRB1*08:01L HLA-D RB1*11:01L HLA-DQA1*01-B1*05L HLA-DRB4*01:01L HLA-DPA1*01:03-B1* 04:01L HLA-DRB1*04:10L HLA-DRB1*09:01L HLA-DRB1*12:02L HLA-DRB3* 01:01L HLA-DRB1*14:54L HLA-DPA1*01:03-B1*02:01L
  REGION 1..14: note = CONT. FROM ABOVE: HLA-DPA1*01:03-B1*104:01L HLA-DRB1*07:01L HLA- DRB1*08:02L HLA-DRB1*08:03L
  source 1..14: note = Severe acute respiratory syndrome coronavirus 2
VNEFACVVADAVIK

SEQ ID NO: 12093 - protein, 12 aa, Severe acute respiratory syndrome-related coronavirus
  REGION 1..12: note = Table B: HLA-DRB1*04:01L HLA-DRB1*04:04L HLA-DQA1*01:02-B1*06:02L HLA-DRB1*01:02L HLA-DRB1*08:04L HLA-DPA1*01:03-B1*03:01L HLA-DRB1*11:04L HLA-DQA1*01:01-B1*05:01L HLA-DQA1*05:05-B1*03:19L
  REGION 1..12: note = CONT. FROM ABOVE: HLA-DRB1*10:01L HLA-DRB1*15:03L
  source 1..12: note = Severe acute respiratory syndrome coronavirus 2
EYGTEDDYQGKP

SEQ ID NO: 12094 - protein, 15 aa, Severe acute respiratory syndrome-related coronavirus
  REGION 1..15: note = Table B: HLA-DRB1*04:01L HLA-DRB1*01:01L HLA-DRB3*02:01L HLA-DPA1*03:01-B1*04:02L HLA-DRB1*14:01L HLA-DRB1*11:03L HLA-DRB1*11:04L HLA-DRB1*14:02L HLA-DQA1*01:01-B1*05:01L HLA-DRB1*08:01L HLA-DRB1*11:01L HLA-DRB5*01:01L HLA-DRB4*01:01L
  REGION 1..15: note = CONT. FROM ABOVE: HLA-DPA1*01:03-B1*04:02L HLA-DRB3*01:01L HLA-D PA1*01:03-B1*02:01L HLA-DPA1*01:02-B1*04:01L HLA-DRB1*07:01L HLA -DRB1*08:02L HLA-DRB1*08:03L
  source 1..15: note = Severe acute respiratory syndrome coronavirus 2
KPLEFGATSAALQPE

SEQ ID NO: 12095 - protein, 14 aa, Severe acute respiratory syndrome-related coronavirus
  REGION 1..14: note = Table B: HLA-DRB1*04:01L HLA-DRB1*04:05L HLA-DPA1*01:03-B1*03:01L HLA-DRB1*03:01L HLA-DRB1*11:03L HLA-DRB1*11:04L HLA-DRB5*01:01L HLA-DRB4*01:01L HLA-DRB1*12:01L HLA-DPA1*03:01-B1*105:01L HLA-DRB1*04:08L
  source 1..14: note = Severe acute respiratory syndrome coronavirus 2
EEDWLDDDSQQTVG

SEQ ID NO: 12096 - protein, 14 aa, Severe acute respiratory syndrome-related coronavirus
  REGION 1..14: note = Table B: HLA-DRB1*04:01L HLA-DRB1*01:01L HLA-DPA1*01:03-B1*03:01L HLA-DQA1*05:05-B1*03:19L HLA-DRB4*01:01L
  source 1..14: note = Severe acute respiratory syndrome coronavirus 2
QPQLEMELTPVVQT

SEQ ID NO: 12097 - protein, 14 aa, Severe acute respiratory syndrome-related coronavirus
  REGION 1..14: note = Table B: HLA-DRB1*04:01L HLA-DRB1*01:01L HLA-DRB1*03:01L HLA-DRB1*11:02L HLA-DRB1*08:01L HLA-DRB1*11:01L HLA-DRB5*01:01L HLA-DRB4*02:01NL HLA-DRB1*13:01L HLA-DPA1*01:03-B1*04:02L HLA-DRB3*01:01L HLA-DPA1*01:03-B1*02:01L HLA-DRB1*08:02L
  source 1..14: note = Severe acute respiratory syndrome coronavirus 2
TPVVQTIEVNSFSG

SEQ ID NO: 12098 - protein, 13 aa, Severe acute respiratory syndrome-related coronavirus
  REGION 1..13: note = Table B: HLA-DRB1*04:01L HLA-DRB1*08:04L HLA-DRB5*01:01L HLA-DRB4*02:01NL HLA-DRB1*04:10L HLA-DRB1*08:03L HLA-DRB1*15:01L
  source 1..13: note = Severe acute respiratory syndrome coronavirus 2
SGYLKLTDNVYIK

SEQ ID NO: 12099 - protein, 14 aa, Severe acute respiratory syndrome-related coronavirus
  REGION 1..14: note = Table B: HLA-DRB1*04:01L HLA-DRB1*01:01L HLA-DRB4*01:01L HLA-DRB1*09:01L HLA-DPA1*01:03-B1*02:01L HLA-DRB1*08:02L
  source 1..14: note = Severe acute respiratory syndrome coronavirus 2
NVYIKNADIVEEAK

SEQ ID NO: 12100 - protein, 14 aa, Severe acute respiratory syndrome-related coronavirus
  REGION 1..14: note = Table B: HLA-DRB1*04:01L HLA-DRB1*13:02L HLA-DRB1*01:01L HLA-DRB1*08:04L HLA-DPA1*01:03-B1*03:01L HLA-DRB1*14:01L HLA-DRB1*11:03L HLA-DRB1*11:04L HLA-DQA1*01:01-B1*05:01L HLA-DRB1*08:01L HLA-DRB1*11:01L HLA-DRB1*04:10L HLA-DRB3*01:01L
  REGION 1..14: note = CONT. FROM ABOVE: HLA-DPA1*02:01-B1*13:01L HLA-DRB1*14:54L HLA-D PA1*01:03-B1*104:01L HLA-DRB1*07:01L HLA-DRB1*10:01L HLA-DRB1*08 :03L HLA-DRB1*15:03L
  source 1..14: note = Severe acute respiratory syndrome coronavirus 2
AKKVKPTVVVNAAN

SEQ ID NO: 12101 - protein, 16 aa, Severe acute respiratory syndrome-related coronavirus
  REGION 1..16: note = Table B: HLA-DRB1*04:01L HLA-DRB1*11:02L
  source 1..16: note = Severe acute respiratory syndrome coronavirus 2
ANVYLKHGGGVAGALN

SEQ ID NO: 12102 - protein, 11 aa, Severe acute respiratory syndrome-related coronavirus
  REGION 1..11: note = Table B: HLA-DRB1*04:01L HLA-DRB1*04:04L HLA-DPA1*03:01-B1*04:02L HLA-DRB1*11:01L HLA-DPA1*01:03-B1*04:01L HLA-DRB1*09:01L HLA-DRB3*01:01L HLA-DPA1*02:01-B1*13:01L
  source 1..11: note = Severe acute respiratory syndrome coronavirus 2
DDYIATNGPLK

SEQ ID NO: 12103 - protein, 16 aa, Severe acute respiratory syndrome-related coronavirus
  REGION 1..16: note = Table B: HLA-DRB1*04:01L HLA-DRB1*01:01L HLA-DRB1*03:01L HLA-DRB1*11:02L HLA-DRB1*14:02L HLA-DRB4*01:01L HLA-DRB1*09:01L HLA-DRB1*10:01L HLA-DRB1*08:02L
  source 1..16: note = Severe acute respiratory syndrome coronavirus 2
VDTVRTNVYLAVFDKN

SEQ ID NO: 12104 - protein, 14 aa, Severe acute respiratory syndrome-related coronavirus
  REGION 1..14: note = Table B: HLA-DRB1*04:01L HLA-DRB1*11:04L HLA-DRB1*11:01L HLA-DRB1*04:10L HLA-DRB1*12:02L HLA-DPA1*01:03-B1*02:01L HLA-DRB1*08:03L HLA-DRB1*15:01L
  source 1..14: note = Severe acute respiratory syndrome coronavirus 2
TNVYLAVFDKNLYD

SEQ ID NO: 12105 - protein, 11 aa, Severe acute respiratory syndrome-related coronavirus
  REGION 1..11: note = Table B: HLA-DRB1*04:01L HLA-DRB1*04:03L HLA-DRB1*13:03L HLA-DRB1*01:03L HLA-DRB1*04:02L HLA-DRB1*04:04L HLA-DRB1*04:05L HLA-DQA1*01:02-B1*06:02L HLA-DRB1*01:02L HLA-DRB4*03:01NL HLA-DRB1*08:04L HLA-DRB1*14:01L HLA-DRB1*11:04L HLA-DRB1*12:01L
  REGION 1..11: note = CONT. FROM ABOVE: HLA-DPA1*03:01-B1*105:01L HLA-DQA1*03:01-B1*03 :02L HLA-DRB1*14:54L HLA-DRB1*14:17L HLA-DRB1*10:01L HLA-DRB1*16 :01L HLA-DRB1*04:08L HLA-DQA1*02:01-B1*03:03L HLA-DRB1*15:03L
  source 1..11: note = Severe acute respiratory syndrome coronavirus 2
FLEMKSEKQVE

SEQ ID NO: 12106 - protein, 15 aa, Severe acute respiratory syndrome-related coronavirus
  REGION 1..15: note = Table B: HLA-DRB1*04:01L HLA-DRB3*02:01L HLA-DRB1*11:02L HLA-DPA1*01:03-B1*04:02L HLA-DPA1*01:03-B1*02:01L HLA-DRB1*10:01L
  source 1..15: note = Severe acute respiratory syndrome coronavirus 2
VEQKIAEIPKEEVKP

SEQ ID NO: 12107 - protein, 16 aa, Severe acute respiratory syndrome-related coronavirus
  REGION 1..16: note = Table B: HLA-DRB1*04:01L HLA-DRB1*01:01L HLA-DRB1*08:04L HLA-DRB3*02:01L HLA-DPA1*01:03-B1*03:01L HLA-DPA1*03:01-B1*04:02L HLA-DRB1*03:01L HLA-DRB1*11:03L HLA-DRB1*11:04L HLA-DRB1*11:01L HLA-DRB3*01:01L
  REGION 1..16: note = CONT. FROM ABOVE: HLA-DPA1*01:03-B1*104:01L HLA-DRB1*07:01L HLA- DRB1*10:01L HLA-DRB1*08:03L HLA-DRB1*15:01L
  source 1..16: note = Severe acute respiratory syndrome coronavirus 2
IPKEEVKPFITESKPS

SEQ ID NO: 12108 - protein, 13 aa, Severe acute respiratory syndrome-related coronavirus
  REGION 1..13: note = Table B: HLA-DRB1*04:01L HLA-DRB1*04:04L HLA-DRB1*11:03L HLA-DRB1*11:01L HLA-DRB1*04:10L HLA-DPA1*01:03-B1*04:02L HLA-DRB1*12:02L HLA-DRB3*01:01L HLA-DPA1*02:01-B1*13:01L HLA-DRB1*10:01L HLA-DRB1*08:02L
  source 1..13: note = Severe acute respiratory syndrome coronavirus 2
KPFITESKPSVEQ

SEQ ID NO: 12109 - protein, 13 aa, Severe acute respiratory syndrome-related coronavirus
  REGION 1..13: note = Table B: HLA-DRB1*04:01L HLA-DRB1*01:01L HLA-DRB1*09:01L
  source 1..13: note = Severe acute respiratory syndrome coronavirus 2
TTTLEETKFLTEN

SEQ ID NO: 12110 - protein, 15 aa, Severe acute respiratory syndrome-related coronavirus
  REGION 1..15: note = Table B: HLA-DRB1*04:01L HLA-DPA1*02:01-B1*13:01L HLA-DPA1*01:03-B1*02:01L HLA-DPA1*01:03-B1*104:01L
  source 1..15: note = Severe acute respiratory syndrome coronavirus 2
NLLLYIDINGNLHPD

SEQ ID NO: 12111 - protein, 13 aa, Severe acute respiratory syndrome-related coronavirus
  REGION 1..13: note = Table B: HLA-DRB1*04:01L HLA-DRB1*04:04L HLA-DQA1*01:02-B1*06:02L HLA-DRB1*01:01L HLA-DQA1*05:05-B1*03:19L HLA-DRB4*01:01L HLA-DPA1*01:03-B1*04:02L HLA-DQA1*05:05-B1*03:01L
  source 1..13: note = Severe acute respiratory syndrome coronavirus 2
GNLHPDSATLVSD

SEQ ID NO: 12112 - protein, 14 aa, Severe acute respiratory syndrome-related coronavirus
  REGION 1..14: note = Table B: HLA-DRB1*04:01L HLA-DRB1*04:04L HLA-DRB1*01:01L HLA-DRB1*11:02L HLA-DRB1*11:01L HLA-DRB5*01:01L HLA-DRB1*13:01L HLA-DPA1*01:03-B1*04:01L HLA-DRB1*04:10L HLA-DRB1*09:01L HLA-DPA1*01:03-B1*02:01L HLA-DRB1*07:01L HLA-DRB1*10:01L
  REGION 1..14: note = CONT. FROM ABOVE: HLA-DRB1*08:02L HLA-DRB1*08:03L
  source 1..14: note = Severe acute respiratory syndrome coronavirus 2
NLHPDSATLVSDID

SEQ ID NO: 12113 - protein, 14 aa, Severe acute respiratory syndrome-related coronavirus
  REGION 1..14: note = Table B: HLA-DRB1*04:01L HLA-DRB1*13:02L HLA-DRB1*13:03L HLA-DRB1*01:03L HLA-DRB1*04:02L HLA-DRB1*04:05L HLA-DRB1*01:02L HLA-DRB4*03:01NL HLA-DRB1*08:04L HLA-DRB1*08:77L HLA-DPA1*01:03-B1*03:01L HLA-DRB1*14:01L HLA-DRB1*11:03L
  REGION 1..14: note = CONT. FROM ABOVE: HLA-DRB1*11:04L HLA-DPA1*01:03-B1*04:02L HLA-D RB1*12:01L HLA-DRB3*01:01L HLA-DRB1*14:54L HLA-DRB1*14:17L HLA-D RB1*10:01L HLA-DRB1*16:01L HLA-DRB1*04:08L
  source 1..14: note = Severe acute respiratory syndrome coronavirus 2
SATLVSDIDITFLK

SEQ ID NO: 12114 - protein, 14 aa, Severe acute respiratory syndrome-related coronavirus
  REGION 1..14: note = Table B: HLA-DRB1*04:01L HLA-DQA1*05:05-B1*03:116L HLA-DPA1*01:03-B1*02:01L HLA-DPA1*01:03-B1*104:01L HLA-DRB1*08:02L
  source 1..14: note = Severe acute respiratory syndrome coronavirus 2
DITFLKKDAPYIVG

SEQ ID NO: 12115 - protein, 13 aa, Severe acute respiratory syndrome-related coronavirus
  REGION 1..13: note = Table B: HLA-DRB1*04:01L HLA-DRB1*13:02L HLA-DRB1*13:03L HLA-DRB1*01:03L HLA-DRB1*04:04L HLA-DRB1*01:02L HLA-DRB1*08:04L HLA-DRB1*08:77L HLA-DPA1*01:03-B1*03:01L HLA-DPA1*03:01-B1*04:02L HLA-DRB1*03:01L HLA-DRB1*14:01L
  REGION 1..13: note = CONT. FROM ABOVE: HLA-DRB1*14:02L HLA-DRB4*01:01L HLA-DPA1*01:03 -B1*04:01L HLA-DRB1*04:10L HLA-DPA1*01:03-B1*04:02L HLA-DPA1*02: 01-B1*13:01L HLA-DPA1*01:03-B1*104:01L HLA-DPA1*01:02-B1*04:01L HLA-DRB1*10:01L
  source 1..13: note = Severe acute respiratory syndrome coronavirus 2
PYIVGDVVQEGVL

SEQ ID NO: 12116 - protein, 14 aa, Severe acute respiratory syndrome-related coronavirus
  REGION 1..14: note = Table B: HLA-DRB1*04:01L HLA-DRB1*01:03L HLA-DRB1*04:04L HLA-DRB1*04:05L HLA-DRB4*03:01NL HLA-DRB1*08:04L HLA-DPA1*01:03-B1*03:01L HLA-DRB1*11:04L HLA-DRB1*04:10L HLA-DRB1*12:01L HLA-DRB1*14:54L HLA-DRB1*04:08L
  source 1..14: note = Severe acute respiratory syndrome coronavirus 2
VGDVVQEGVLTAVV

SEQ ID NO: 12117 - protein, 14 aa, Severe acute respiratory syndrome-related coronavirus
  REGION 1..14: note = Table B: HLA-DRB1*04:01L HLA-DRB1*01:01L HLA-DRB3*02:01L HLA-DPA1*01:03-B1*03:01L HLA-DRB1*03:01L HLA-DQA1*05:01-B1*02:01L HLA-DRB1*13:01L HLA-DPA1*02:01-B1*13:01L HLA-DPA1*01:03-B1*104:01L
  REGION 1..14: note = CONT. FROM ABOVE: HLA-DPA1*01:02-B1*04:01L HLA-DRB1*07:01L
  source 1..14: note = Severe acute respiratory syndrome coronavirus 2
TAVVIPTKKAGGTT

SEQ ID NO: 12118 - protein, 14 aa, Severe acute respiratory syndrome-related coronavirus
  REGION 1..14: note = Table B: HLA-DRB1*04:01L HLA-DRB1*01:01L HLA-DPA1*01:03-B1*03:01L HLA-DRB1*03:01L HLA-DRB1*13:01L HLA-DPA1*02:01-B1*13:01L HLA-DPA1*01:03-B1*104:01L HLA-DPA1*01:02-B1*04:01L HLA-DRB1*07:01L
  source 1..14: note = Severe acute respiratory syndrome coronavirus 2
AVVIPTKKAGGTTE

SEQ ID NO: 12119 - protein, 16 aa, Severe acute respiratory syndrome-related coronavirus
  REGION 1..16: note = Table B: HLA-DRB1*04:01L HLA-DRB1*03:01L HLA-DRB4*01:01L HLA-DRB3*01:01L HLA-DPA1*01:03-B1*02:01L HLA-DRB1*08:02L
  source 1..16: note = Severe acute respiratory syndrome coronavirus 2
VPTDNYITTYPGQGLN

SEQ ID NO: 12120 - protein, 12 aa, Severe acute respiratory syndrome-related coronavirus
  REGION 1..12: note = Table B: HLA-DRB1*04:01L HLA-DRB1*13:02L HLA-DRB1*01:01L HLA-DRB1*08:04L HLA-DRB1*08:77L HLA-DRB3*02:01L HLA-DPA1*01:03-B1*03:01L HLA-DPA1*03:01-B1*04:02L HLA-DRB1*14:01L HLA-DRB1*11:03L HLA-DRB1*11:04L HLA-DRB1*14:02L
  REGION 1..12: note = CONT. FROM ABOVE: HLA-DQA1*01:01-B1*05:01L HLA-DRB1*08:01L HLA-D RB1*11:01L HLA-DQA1*05:05-B1*03:19L HLA-DRB4*01:01L HLA-DRB1*09: 01L HLA-DPA1*01:03-B1*04:02L HLA-DRB3*01:01L HLA-DPA1*02:01-B1*1 3:01L HLA-DPA1*01:03-B1*02:01L HLA-DPA1*01:03-B1*104:01L
  REGION 1..12: note = CONT. FROM ABOVE: HLA-DRB1*07:01L HLA-DRB1*08:02L HLA-DRB1*08:03 L
  source 1..12: note = Severe acute respiratory syndrome coronavirus 2
FYILPSIISNEK

SEQ ID NO: 12121 - protein, 14 aa, Severe acute respiratory syndrome-related coronavirus
  REGION 1..14: note = Table B: HLA-DRB1*04:01L HLA-DRB1*04:04L HLA-DRB1*01:01L HLA-DQA1*01-B1*05L HLA-DRB4*02:01NL HLA-DPA1*01:03-B1*04:01L HLA-DQA1*05:05-B1*03:116L HLA-DPA1*02:01-B1*13:01L HLA-DPA1*01:03-B1*02:01L HLA-DRB1*07:01L HLA-DRB1*15:01L
  source 1..14: note = Severe acute respiratory syndrome coronavirus 2
LPSIISNEKQEILG

SEQ ID NO: 12122 - protein, 14 aa, Severe acute respiratory syndrome-related coronavirus
  REGION 1..14: note = Table B: HLA-DRB1*04:01L HLA-DRB1*11:01L
  source 1..14: note = Severe acute respiratory syndrome coronavirus 2
KQEILGTVSWNLRE

SEQ ID NO: 12123 - protein, 14 aa, Severe acute respiratory syndrome-related coronavirus
  REGION 1..14: note = Table B: HLA-DRB1*04:01L HLA-DRB1*01:01L HLA-DRB1*11:01L HLA-DRB3*01:01L HLA-DPA1*01:03-B1*02:01L HLA-DRB1*07:01L
  source 1..14: note = Severe acute respiratory syndrome coronavirus 2
RKYKGIKIQEGVVD

SEQ ID NO: 12124 - protein, 13 aa, Severe acute respiratory syndrome-related coronavirus
  REGION 1..13: note = Table B: HLA-DRB1*04:01L HLA-DRB1*13:03L HLA-DRB1*01:01L HLA-DRB1*08:04L HLA-DRB1*11:03L HLA-DRB1*11:04L HLA-DRB1*08:01L HLA-DRB1*09:01L HLA-DRB1*12:02L HLA-DRB3*01:01L HLA-DPA1*01:03-B1*104:01L HLA-DPA1*01:02-B1*04:01L
  REGION 1..13: note = CONT. FROM ABOVE: HLA-DRB1*07:01L HLA-DRB1*08:03L
  source 1..13: note = Severe acute respiratory syndrome coronavirus 2
KGIKIQEGVVDYG

SEQ ID NO: 12125 - protein, 13 aa, Severe acute respiratory syndrome-related coronavirus
  REGION 1..13: note = Table B: HLA-DRB1*04:01L HLA-DRB1*08:04L HLA-DRB3*02:01L HLA-DPA1*03:01-B1*04:02L HLA-DRB1*11:03L HLA-DRB1*11:04L HLA-DRB1*11:01L HLA-DRB1*12:02L HLA-DRB3*01:01L HLA-DPA1*02:01-B1*13:01L HLA-DPA1*01:03-B1*104:01L
  REGION 1..13: note = CONT. FROM ABOVE: HLA-DRB1*07:01L HLA-DRB1*10:01L HLA-DRB1*08:03 L
  source 1..13: note = Severe acute respiratory syndrome coronavirus 2
IKIQEGVVDYGAR

SEQ ID NO: 12126 - protein, 14 aa, Severe acute respiratory syndrome-related coronavirus
  REGION 1..14: note = Table B: HLA-DRB1*04:01L HLA-DPA1*01:03-B1*03:01L HLA-DPA1*01:03-B1*04:01L HLA-DRB1*09:01L HLA-DPA1*01:03-B1*04:02L HLA-DRB1*10:01L HLA-DRB1*08:03L
  source 1..14: note = Severe acute respiratory syndrome coronavirus 2
GARFYFYTSKTTVA

SEQ ID NO: 12127 - protein, 14 aa, Severe acute respiratory syndrome-related coronavirus
  REGION 1..14: note = Table B: HLA-DRB1*04:01L HLA-DRB1*03:01L HLA-DRB1*13:01L HLA-DPA1*01:03-B1*02:01L HLA-DRB1*08:02L
  source 1..14: note = Severe acute respiratory syndrome coronavirus 2
ARFYFYTSKTTVAS

SEQ ID NO: 12128 - protein, 15 aa, Severe acute respiratory syndrome-related coronavirus
  REGION 1..15: note = Table B: HLA-DRB1*04:01L HLA-DRB4*01:01L
  source 1..15: note = Severe acute respiratory syndrome coronavirus 2
FYFYTSKTTVASLIN

SEQ ID NO: 12129 - protein, 13 aa, Severe acute respiratory syndrome-related coronavirus
  REGION 1..13: note = Table B: HLA-DRB1*04:01L HLA-DRB1*13:02L HLA-DRB1*08:04L HLA-DRB1*11:03L HLA-DRB1*12:02L
  source 1..13: note = Severe acute respiratory syndrome coronavirus 2
ASLINTLNDLNET

SEQ ID NO: 12130 - protein, 13 aa, Severe acute respiratory syndrome-related coronavirus
  REGION 1..13: note = Table B: HLA-DRB1*04:01L HLA-DRB1*01:01L HLA-DRB3*01:01L HLA-DRB1*07:01L
  source 1..13: note = Severe acute respiratory syndrome coronavirus 2
RYMRSLKVPATVS

SEQ ID NO: 12131 - protein, 15 aa, Severe acute respiratory syndrome-related coronavirus
  REGION 1..15: note = Table B: HLA-DRB1*04:01L HLA-DRB1*04:04L HLA-DRB1*14:01L HLA-DRB1*11:03L HLA-DRB1*11:04L HLA-DRB1*14:02L HLA-DRB5*01:01L HLA-DPA1*01:03-B1*104:01L HLA-DRB1*10:01L HLA-DRB1*08:03L
  source 1..15: note = Severe acute respiratory syndrome coronavirus 2
VPATVSVSSPDAVTA

SEQ ID NO: 12132 - protein, 15 aa, Severe acute respiratory syndrome-related coronavirus
  REGION 1..15: note = Table B: HLA-DRB1*04:01L
  source 1..15: note = Severe acute respiratory syndrome coronavirus 2
TAYNGYLTSSSKTPE

SEQ ID NO: 12133 - protein, 13 aa, Severe acute respiratory syndrome-related coronavirus
  REGION 1..13: note = Table B: HLA-DRB1*04:01L HLA-DRB3*01:01L HLA-DPA1*01:03-B1*02:01L
  source 1..13: note = Severe acute respiratory syndrome coronavirus 2
GYLTSSSKTPEEH

SEQ ID NO: 12134 - protein, 16 aa, Severe acute respiratory syndrome-related coronavirus
  REGION 1..16: note = Table B: HLA-DRB1*04:01L HLA-DRB1*01:01L HLA-DRB1*11:02L HLA-DRB1*11:04L HLA-DRB1*11:01L HLA-DPA1*01:03-B1*02:01L HLA-DRB1*08:02L
  source 1..16: note = Severe acute respiratory syndrome coronavirus 2
TPEEHFIETISLAGSY

SEQ ID NO: 12135 - protein, 14 aa, Severe acute respiratory syndrome-related coronavirus
  REGION 1..14: note = Table B: HLA-DRB1*04:01L HLA-DRB1*11:01L HLA-DPA1*02:01-B1*13:01L HLA-DPA1*01:03-B1*02:01L HLA-DRB1*08:02L HLA-DRB1*08:03L
  source 1..14: note = Severe acute respiratory syndrome coronavirus 2
EHFIETISLAGSYK

SEQ ID NO: 12136 - protein, 14 aa, Severe acute respiratory syndrome-related coronavirus
  REGION 1..14: note = Table B: HLA-DRB1*04:01L HLA-DRB1*11:02L HLA-DRB1*11:03L HLA-DRB1*14:02L HLA-DRB1*09:01L HLA-DPA1*01:03-B1*104:01L HLA-DPA1*01:02-B1*04:01L HLA-DRB1*07:01L HLA-DRB1*08:02L
  source 1..14: note = Severe acute respiratory syndrome coronavirus 2
IETISLAGSYKDWS

SEQ ID NO: 12137 - protein, 14 aa, Severe acute respiratory syndrome-related coronavirus
  REGION 1..14: note = Table B: HLA-DRB1*04:01L HLA-DRB1*13:02L HLA-DRB1*13:03L HLA-DRB1*01:01L HLA-DRB1*08:04L HLA-DRB1*08:77L HLA-DRB3*02:01L HLA-DPA1*03:01-B1*04:02L HLA-DRB1*14:01L HLA-DRB1*11:03L HLA-DRB1*11:04L HLA-DRB1*14:02L HLA-DQA1*01:01-B1*05:01L
  REGION 1..14: note = CONT. FROM ABOVE: HLA-DRB1*08:01L HLA-DRB1*11:01L HLA-DQA1*01-B1 *05L HLA-DRB4*01:01L HLA-DRB1*09:01L HLA-DPA1*01:03-B1*04:02L HL A-DPA1*01:03-B1*104:01L HLA-DRB1*07:01L HLA-DRB1*08:02L HLA-DRB1 *08:03L
  source 1..14: note = Severe acute respiratory syndrome coronavirus 2
DWSYSGQSTQLGIE

SEQ ID NO: 12138 - protein, 12 aa, Severe acute respiratory syndrome-related coronavirus
  REGION 1..12: note = Table B: HLA-DRB1*04:01L HLA-DRB1*03:01L HLA-DRB5*01:01L HLA-DRB1*09:01L HLA-DRB3*01:01L HLA-DPA1*01:03-B1*104:01L HLA-DRB1*15:01L
  source 1..12: note = Severe acute respiratory syndrome coronavirus 2
SVYYTSNPTTFH

SEQ ID NO: 12139 - protein, 15 aa, Severe acute respiratory syndrome-related coronavirus
  REGION 1..15: note = Table B: HLA-DRB1*04:01L HLA-DRB1*11:02L
  source 1..15: note = Severe acute respiratory syndrome coronavirus 2
NPTTFHLDGEVITFD

SEQ ID NO: 12140 - protein, 15 aa, Severe acute respiratory syndrome-related coronavirus
  REGION 1..15: note = Table B: HLA-DRB1*04:01L
  source 1..15: note = Severe acute respiratory syndrome coronavirus 2
PTTFHLDGEVITFDN

SEQ ID NO: 12141 - protein, 14 aa, Severe acute respiratory syndrome-related coronavirus
  REGION 1..14: note = Table B: HLA-DRB1*04:01L HLA-DRB1*03:01L HLA-DRB1*11:02L HLA-DRB1*11:01L HLA-DPA1*01:03-B1*02:01L
  source 1..14: note = Severe acute respiratory syndrome coronavirus 2
GEVITFDNLKTLLS

SEQ ID NO: 12142 - protein, 14 aa, Severe acute respiratory syndrome-related coronavirus
  REGION 1..14: note = Table B: HLA-DRB1*04:01L HLA-DRB1*13:03L HLA-DRB1*01:01L HLA-DRB1*03:01L HLA-DRB1*11:02L HLA-DRB1*11:03L HLA-DRB3*01:01L HLA-DPA1*01:03-B1*02:01L HLA-DQA1*05:05-B1*03:01L HLA-DRB1*10:01L HLA-DRB1*08:02L HLA-DRB1*08:03L
  source 1..14: note = Severe acute respiratory syndrome coronavirus 2
VITFDNLKTLLSLR

SEQ ID NO: 12143 - protein, 14 aa, Severe acute respiratory syndrome-related coronavirus
  REGION 1..14: note = Table B: HLA-DRB1*04:01L
  source 1..14: note = Severe acute respiratory syndrome coronavirus 2
ITFDNLKTLLSLRE

SEQ ID NO: 12144 - protein, 14 aa, Severe acute respiratory syndrome-related coronavirus
  REGION 1..14: note = Table B: HLA-DRB1*04:01L HLA-DRB1*01:01L HLA-DRB1*11:03L HLA-DRB1*11:04L HLA-DRB1*11:01L HLA-DRB3*01:01L HLA-DPA1*01:03-B1*02:01L HLA-DRB1*07:01L
  source 1..14: note = Severe acute respiratory syndrome coronavirus 2
REVRTIKVFTTVDN

SEQ ID NO: 12145 - protein, 14 aa, Severe acute respiratory syndrome-related coronavirus
  REGION 1..14: note = Table B: HLA-DRB1*04:01L HLA-DRB1*01:01L HLA-DRB1*08:77L HLA-DRB1*11:02L HLA-DRB1*11:03L HLA-DRB1*11:04L HLA-DRB1*14:02L HLA-DRB1*11:01L HLA-DRB4*01:01L HLA-DRB1*09:01L HLA-DRB1*12:02L HLA-DRB3*01:01L HLA-DPA1*01:03-B1*02:01L HLA-DRB1*07:01L
  REGION 1..14: note = CONT. FROM ABOVE: HLA-DRB1*08:02L HLA-DRB1*15:01L
  source 1..14: note = Severe acute respiratory syndrome coronavirus 2
VRTIKVFTTVDNIN

SEQ ID NO: 12146 - protein, 11 aa, Severe acute respiratory syndrome-related coronavirus
  REGION 1..11: note = Table B: HLA-DRB1*04:01L HLA-DRB1*04:04L HLA-DRB1*01:01L HLA-DRB1*08:04L HLA-DPA1*01:03-B1*03:01L HLA-DPA1*03:01-B1*04:02L HLA-DRB1*11:04L HLA-DQA1*01:01-B1*05:01L HLA-DRB1*08:01L HLA-DRB5*01:01L
  REGION 1..11: note = CONT. FROM ABOVE: HLA-DPA1*01:03-B1*04:01L HLA-DRB1*09:01L HLA-D PA1*01:03-B1*04:02L HLA-DPA1*02:01-B1*13:01L HLA-DRB1*07:01L HLA -DRB1*08:03L
  source 1..11: note = Severe acute respiratory syndrome coronavirus 2
VFTTVDNINLH

SEQ ID NO: 12147 - protein, 16 aa, Severe acute respiratory syndrome-related coronavirus
  REGION 1..16: note = Table B: HLA-DRB1*04:01L HLA-DRB1*04:04L HLA-DRB1*01:01L HLA-DRB1*08:04L HLA-DRB1*03:01L HLA-DRB3*01:01L HLA-DPA1*01:03-B1*02:01L
  source 1..16: note = Severe acute respiratory syndrome coronavirus 2
GPTYLDGADVTKIKPH

SEQ ID NO: 12148 - protein, 15 aa, Severe acute respiratory syndrome-related coronavirus
  REGION 1..15: note = Table B: HLA-DRB1*04:01L HLA-DRB1*13:02L HLA-DRB1*01:01L HLA-DRB1*08:04L HLA-DRB1*11:01L HLA-DQA1*05:05-B1*03:19L HLA-DRB3*01:01L HLA-DPA1*02:01-B1*13:01L HLA-DRB1*07:01L HLA-DRB1*10:01L
  source 1..15: note = Severe acute respiratory syndrome coronavirus 2
GADVTKIKPHNSHEG

SEQ ID NO: 12149 - protein, 14 aa, Severe acute respiratory syndrome-related coronavirus
  REGION 1..14: note = Table B: HLA-DRB1*04:01L HLA-DRB1*13:02L HLA-DRB1*01:01L HLA-DRB1*08:04L HLA-DRB1*03:01L HLA-DRB1*11:03L HLA-DRB1*11:01L HLA-DQA1*01-B1*05L HLA-DPA1*02:01-B1*13:01L HLA-DPA1*03:01-B1*105:01L HLA-DRB1*07:01L HLA-DRB1*10:01L
  REGION 1..14: note = CONT. FROM ABOVE: HLA-DQA1*01:03-B1*06:01L HLA-DRB1*08:03L HLA-D RB1*15:01L
  source 1..14: note = Severe acute respiratory syndrome coronavirus 2
VTKIKPHNSHEGKT

SEQ ID NO: 12150 - protein, 11 aa, Severe acute respiratory syndrome-related coronavirus
  REGION 1..11: note = Table B: HLA-DRB1*04:01L HLA-DRB1*04:04L HLA-DRB1*01:02L HLA-DRB1*04:10L HLA-DRB1*10:01L HLA-DRB1*04:08L
  source 1..11: note = Severe acute respiratory syndrome coronavirus 2
FYVLPNDDTLR

SEQ ID NO: 12151 - protein, 20 aa, Severe acute respiratory syndrome-related coronavirus
  REGION 1..20: note = Table B: HLA-DRB1*04:01L HLA-DRB1*09:01L HLA-DRB1*07:01L HLA-DRB1*08:02L
  source 1..20: note = Severe acute respiratory syndrome coronavirus 2
LPNDDTLRVEAFEYYHTTDP

SEQ ID NO: 12152 - protein, 18 aa, Severe acute respiratory syndrome-related coronavirus
  REGION 1..18: note = Table B: HLA-DRB1*04:01L HLA-DRB1*13:01L HLA-DRB1*09:01L HLA-DRB1*07:01L HLA-DRB1*08:02L
  source 1..18: note = Severe acute respiratory syndrome coronavirus 2
DDTLRVEAFEYYHTTDPS

SEQ ID NO: 12153 - protein, 13 aa, Severe acute respiratory syndrome-related coronavirus
  REGION 1..13: note = Table B: HLA-DRB1*04:01L HLA-DRB4*03:01NL HLA-DRB1*11:03L HLA-DPA1*02:01-B1*13:01L HLA-DPA1*03:01-B1*105:01L HLA-DRB1*10:01L HLA-DQA1*01:03-B1*06:01L HLA-DRB1*08:03L HLA-DRB1*15:01L
  source 1..13: note = Severe acute respiratory syndrome coronavirus 2
LGRYMSALNHTKK

SEQ ID NO: 12154 - protein, 14 aa, Severe acute respiratory syndrome-related coronavirus
  REGION 1..14: note = Table B: HLA-DRB1*04:01L HLA-DRB1*13:02L HLA-DPA1*01:03-B1*03:01L HLA-DRB1*11:03L HLA-DRB1*14:02L HLA-DRB3*01:01L HLA-DPA1*02:01-B1*13:01L HLA-DPA1*03:01-B1*105:01L HLA-DQA1*05:05-B1*03:01L
  REGION 1..14: note = CONT. FROM ABOVE: HLA-DRB1*10:01L HLA-DQA1*01:03-B1*06:01L HLA-D RB1*08:02L HLA-DRB1*08:03L
  source 1..14: note = Severe acute respiratory syndrome coronavirus 2
LQQIELKFNPPALQ

SEQ ID NO: 12155 - protein, 13 aa, Severe acute respiratory syndrome-related coronavirus
  REGION 1..13: note = Table B: HLA-DRB1*04:01L HLA-DRB1*04:04L HLA-DRB3*02:01L HLA-DPA1*01:03-B1*03:01L HLA-DPA1*03:01-B1*04:02L HLA-DRB1*03:01L HLA-DRB1*11:02L HLA-DRB4*01:01L HLA-DPA1*01:03-B1*04:01L HLA-DQA1*05:05-B1*03:116L
  REGION 1..13: note = CONT. FROM ABOVE: HLA-DPA1*01:03-B1*04:02L HLA-DRB3*01:01L HLA-D PA1*01:03-B1*02:01L HLA-DPA1*01:03-B1*104:01L HLA-DRB1*08:02L HL A-DRB1*15:01L
  source 1..13: note = Severe acute respiratory syndrome coronavirus 2
DAYYRARAGEAAN

SEQ ID NO: 12156 - protein, 14 aa, Severe acute respiratory syndrome-related coronavirus
  REGION 1..14: note = Table B: HLA-DRB1*04:01L HLA-DRB1*14:02L HLA-DQA1*05:05-B1*03:19L HLA-DRB1*09:01L HLA-DPA1*01:03-B1*02:01L HLA-DPA1*01:03-B1*104:01L HLA-DRB1*07:01L
  source 1..14: note = Severe acute respiratory syndrome coronavirus 2
ETMSYLFQHANLDS

SEQ ID NO: 12157 - protein, 16 aa, Severe acute respiratory syndrome-related coronavirus
  REGION 1..16: note = Table B: HLA-DRB1*04:01L HLA-DRB1*01:01L
  source 1..16: note = Severe acute respiratory syndrome coronavirus 2
AVMYMGTLSYEQFKKG

SEQ ID NO: 12158 - protein, 14 aa, Severe acute respiratory syndrome-related coronavirus
  REGION 1..14: note = Table B: HLA-DRB1*04:01L HLA-DRB3*02:01L HLA-DRB1*03:01L HLA-DRB1*11:02L HLA-DRB1*13:01L HLA-DQA1*05:05-B1*03:116L HLA-DRB1*09:01L HLA-DRB1*08:02L HLA-DRB1*15:01L
  source 1..14: note = Severe acute respiratory syndrome coronavirus 2
MGTLSYEQFKKGVQ

SEQ ID NO: 12159 - protein, 14 aa, Severe acute respiratory syndrome-related coronavirus
  REGION 1..14: note = Table B: HLA-DRB1*04:01L HLA-DRB1*03:01L HLA-DRB1*11:02L HLA-DRB1*11:01L HLA-DPA1*01:03-B1*02:01L HLA-DRB1*08:02L
  source 1..14: note = Severe acute respiratory syndrome coronavirus 2
ATKYLVQQESPFVM

SEQ ID NO: 12160 - protein, 15 aa, Severe acute respiratory syndrome-related coronavirus
  REGION 1..15: note = Table B: HLA-DRB1*04:01L HLA-DRB1*01:01L HLA-DPA1*03:01-B1*04:02L HLA-DRB1*11:02L HLA-DRB1*11:03L HLA-DRB1*13:01L HLA-DPA1*02:01-B1*13:01L HLA-DPA1*01:03-B1*02:01L HLA-DQA1*05:05-B1*03:01L
  REGION 1..15: note = CONT. FROM ABOVE: HLA-DRB1*07:01L HLA-DRB1*10:01L HLA-DRB1*08:03 L
  source 1..15: note = Severe acute respiratory syndrome coronavirus 2
YKHITSKETLYCIDG

SEQ ID NO: 12161 - protein, 14 aa, Severe acute respiratory syndrome-related coronavirus
  REGION 1..14: note = Table B: HLA-DRB1*04:01L HLA-DRB1*04:04L HLA-DRB1*11:04L HLA-DRB1*08:01L HLA-DRB1*07:01L
  source 1..14: note = Severe acute respiratory syndrome coronavirus 2
KETLYCIDGALLTK

SEQ ID NO: 12162 - protein, 18 aa, Severe acute respiratory syndrome-related coronavirus
  REGION 1..18: note = Table B: HLA-DRB1*04:01L HLA-DRB1*11:01L
  source 1..18: note = Severe acute respiratory syndrome coronavirus 2
GPITDVFYKENSYTTTIK

SEQ ID NO: 12163 - protein, 16 aa, Severe acute respiratory syndrome-related coronavirus
  REGION 1..16: note = Table B: HLA-DRB1*04:01L HLA-DRB1*04:04L HLA-DRB1*08:04L HLA-DPA1*03:01-B1*04:02L HLA-DRB1*14:01L HLA-DRB1*14:02L HLA-DRB1*11:01L HLA-DRB3*01:01L HLA-DRB1*07:01L
  source 1..16: note = Severe acute respiratory syndrome coronavirus 2
TDVFYKENSYTTTIKP

SEQ ID NO: 12164 - protein, 18 aa, Severe acute respiratory syndrome-related coronavirus
  REGION 1..18: note = Table B: HLA-DRB1*04:01L HLA-DRB1*04:03L HLA-DRB1*04:04L HLA-DRB1*01:01L HLA-DRB1*08:04L HLA-DRB3*02:01L HLA-DPA1*03:01-B1*04:02L HLA-DRB1*03:01L HLA-DRB1*14:01L HLA-DRB1*11:02L HLA-DRB1*11:03L HLA-DRB1*11:04L HLA-DRB1*14:02L
  REGION 1..18: note = CONT. FROM ABOVE: HLA-DRB1*08:01L HLA-DRB1*11:01L HLA-DQA1*05:01 -B1*02:01L HLA-DRB3*01:01L HLA-DPA1*01:03-B1*104:01L HLA-DPA1*01 :02-B1*04:01L HLA-DRB1*07:01L HLA-DRB1*10:01L HLA-DRB1*08:02L
  source 1..18: note = Severe acute respiratory syndrome coronavirus 2
KPVTYKLDGVVCTEIDPK

SEQ ID NO: 12165 - protein, 13 aa, Severe acute respiratory syndrome-related coronavirus
  REGION 1..13: note = Table B: HLA-DRB1*04:01L HLA-DRB1*01:01L HLA-DRB3*02:01L HLA-DRB1*11:03L HLA-DRB1*11:04L HLA-DRB1*08:01L HLA-DRB1*11:01L HLA-DPA1*01:03-B1*04:01L HLA-DRB1*09:01L HLA-DRB1*12:02L HLA-DRB3*01:01L HLA-DPA1*01:03-B1*02:01L
  REGION 1..13: note = CONT. FROM ABOVE: HLA-DPA1*01:03-B1*104:01L HLA-DRB1*07:01L HLA- DRB1*08:03L
  source 1..13: note = Severe acute respiratory syndrome coronavirus 2
SYFTEQPIDLVPN

SEQ ID NO: 12166 - protein, 12 aa, Severe acute respiratory syndrome-related coronavirus
  REGION 1..12: note = Table B: HLA-DRB1*04:01L HLA-DRB1*04:04L HLA-DRB1*01:01L HLA-DRB3*02:01L HLA-DPA1*01:03-B1*03:01L HLA-DPA1*03:01-B1*04:02L HLA-DRB1*03:01L HLA-DRB1*11:01L HLA-DRB5*01:01L HLA-DRB1*09:01L HLA-DPA1*03:01-B1*105:01L
  REGION 1..12: note = CONT. FROM ABOVE: HLA-DPA1*01:02-B1*04:01L HLA-DRB1*07:01L HLA-D RB1*10:01L HLA-DQA1*01:03-B1*06:01L HLA-DRB1*08:03L
  source 1..12: note = Severe acute respiratory syndrome coronavirus 2
DLVPNQPYPNAS

SEQ ID NO: 12167 - protein, 13 aa, Severe acute respiratory syndrome-related coronavirus
  REGION 1..13: note = Table B: HLA-DRB1*04:01L HLA-DRB1*11:03L HLA-DRB1*14:02L HLA-DRB4*01:01L HLA-DRB1*09:01L
  source 1..13: note = Severe acute respiratory syndrome coronavirus 2
DNIKFADDLNQLT

SEQ ID NO: 12168 - protein, 12 aa, Severe acute respiratory syndrome-related coronavirus
  REGION 1..12: note = Table B: HLA-DRB1*04:01L HLA-DRB1*13:02L HLA-DRB1*13:03L HLA-DRB1*01:03L HLA-DRB1*04:04L HLA-DQA1*01:02-B1*06:02L HLA-DRB1*01:02L HLA-DRB4*03:01NL HLA-DRB1*08:04L HLA-DRB1*11:04L HLA-DRB1*04:10L HLA-DRB1*12:01L HLA-DRB3*01:01L
  REGION 1..12: note = CONT. FROM ABOVE: HLA-DPA1*03:01-B1*105:01L HLA-DRB1*14:54L HLA- DRB1*10:01L HLA-DRB1*04:08L HLA-DRB1*08:03L
  source 1..12: note = Severe acute respiratory syndrome coronavirus 2
IKFADDLNQLTG

SEQ ID NO: 12169 - protein, 16 aa, Severe acute respiratory syndrome-related coronavirus
  REGION 1..16: note = Table B: HLA-DRB1*04:01L HLA-DPA1*01:03-B1*03:01L HLA-DPA1*03:01-B1*04:02L HLA-DPA1*01:03-B1*104:01L
  source 1..16: note = Severe acute respiratory syndrome coronavirus 2
DDLNQLTGYKKPASRE

SEQ ID NO: 12170 - protein, 16 aa, Severe acute respiratory syndrome-related coronavirus
  REGION 1..16: note = Table B: HLA-DRB1*04:01L HLA-DPA1*01:03-B1*03:01L HLA-DPA1*01:03-B1*104:01L HLA-DRB1*10:01L
  source 1..16: note = Severe acute respiratory syndrome coronavirus 2
LNQLTGYKKPASRELK

SEQ ID NO: 12171 - protein, 14 aa, Severe acute respiratory syndrome-related coronavirus
  REGION 1..14: note = Table B: HLA-DRB1*04:01L HLA-DRB1*13:02L HLA-DRB1*13:03L HLA-DRB1*04:04L HLA-DRB1*01:02L HLA-DRB4*03:01NL HLA-DRB1*08:04L HLA-DRB1*08:77L HLA-DRB3*02:01L HLA-DPA1*03:01-B1*04:02L HLA-DRB1*03:01L HLA-DRB1*14:01L HLA-DRB1*11:03L HLA-DRB1*11:04L
  REGION 1..14: note = CONT. FROM ABOVE: HLA-DRB1*14:02L HLA-DRB1*08:01L HLA-DRB1*11:01 L HLA-DRB4*01:01L HLA-DPA1*01:03-B1*04:01L HLA-DRB1*04:10L HLA-D RB1*09:01L HLA-DPA1*01:03-B1*04:02L HLA-DRB1*12:01L HLA-DRB1*12: 02L HLA-DRB3*01:01L HLA-DPA1*02:01-B1*13:01L HLA-DRB1*14:54L
  REGION 1..14: note = CONT. FROM ABOVE: HLA-DPA1*01:03-B1*104:01L HLA-DRB1*14:17L HLA- DPA1*01:02-B1*04:01L HLA-DRB1*07:01L HLA-DRB1*10:01L HLA-DRB1*08 :02L HLA-DRB1*08:03L HLA-DRB1*15:03L
  source 1..14: note = Severe acute respiratory syndrome coronavirus 2
FPDLNGDVVAIDYK

SEQ ID NO: 12172 - protein, 13 aa, Severe acute respiratory syndrome-related coronavirus
  REGION 1..13: note = Table B: HLA-DRB1*04:01L HLA-DRB1*01:01L HLA-DPA1*03:01-B1*04:02L HLA-DRB1*11:01L HLA-DRB5*01:01L HLA-DRB4*01:01L HLA-DRB1*09:01L HLA-DPA1*01:03-B1*04:02L HLA-DRB3*01:01L HLA-DPA1*01:03-B1*104:01L HLA-DRB1*07:01L
  source 1..13: note = Severe acute respiratory syndrome coronavirus 2
SNSFDVLKSEDAQ

SEQ ID NO: 12173 - protein, 11 aa, Severe acute respiratory syndrome-related coronavirus
  REGION 1..11: note = Table B: HLA-DRB1*04:01L HLA-DRB1*13:03L HLA-DRB1*01:03L HLA-DRB1*04:04L HLA-DRB1*04:05L HLA-DRB1*01:02L HLA-DRB4*03:01NL HLA-DRB1*11:04L HLA-DQA1*05:01-B1*02:01L HLA-DRB1*04:10L HLA-DRB1*12:01L HLA-DRB1*14:54L HLA-DRB1*10:01L HLA-DRB1*16:01L
  REGION 1..11: note = CONT. FROM ABOVE: HLA-DRB1*04:08L
  source 1..11: note = Severe acute respiratory syndrome coronavirus 2
FDVLKSEDAQG

SEQ ID NO: 12174 - protein, 12 aa, Severe acute respiratory syndrome-related coronavirus
  REGION 1..12: note = Table B: HLA-DRB1*04:01L HLA-DRB1*08:04L HLA-DRB1*11:03L HLA-DQA1*01:01-B1*05:01L HLA-DRB1*11:01L HLA-DRB1*12:02L HLA-DRB3*01:01L HLA-DPA1*02:01-B1*13:01L HLA-DQA1*05:05-B1*03:01L HLA-DRB1*08:03L
  source 1..12: note = Severe acute respiratory syndrome coronavirus 2
DIILKPANNSLK

SEQ ID NO: 12175 - protein, 14 aa, Severe acute respiratory syndrome-related coronavirus
  REGION 1..14: note = Table B: HLA-DRB1*04:01L HLA-DRB1*01:01L HLA-DRB1*08:77L HLA-DRB1*11:02L HLA-DRB1*14:02L HLA-DQA1*01:01-B1*05:01L HLA-DRB1*11:01L HLA-DRB4*01:01L HLA-DPA1*01:03-B1*04:01L HLA-DPA1*01:03-B1*04:02L HLA-DRB1*12:02L HLA-DRB3*01:01L
  REGION 1..14: note = CONT. FROM ABOVE: HLA-DPA1*01:03-B1*02:01L HLA-DPA1*01:03-B1*104 :01L HLA-DRB1*07:01L
  source 1..14: note = Severe acute respiratory syndrome coronavirus 2
TDLMAAYVDNSSLT

SEQ ID NO: 12176 - protein, 13 aa, Severe acute respiratory syndrome-related coronavirus
  REGION 1..13: note = Table B: HLA-DRB1*04:01L HLA-DRB1*08:04L HLA-DRB1*11:04L HLA-DRB1*11:01L HLA-DRB3*01:01L
  source 1..13: note = Severe acute respiratory syndrome coronavirus 2
SRVLGLKTLATHG

SEQ ID NO: 12177 - protein, 14 aa, Severe acute respiratory syndrome-related coronavirus
  REGION 1..14: note = Table B: HLA-DRB1*04:01L HLA-DRB1*11:03L HLA-DRB1*11:04L HLA-DRB1*08:01L HLA-DRB1*11:01L HLA-DRB3*01:01L HLA-DRB1*10:01L HLA-DRB1*15:01L
  source 1..14: note = Severe acute respiratory syndrome coronavirus 2
VLGLKTLATHGLAA

SEQ ID NO: 12178 - protein, 14 aa, Severe acute respiratory syndrome-related coronavirus
  REGION 1..14: note = Table B: HLA-DRB1*04:01L HLA-DRB1*01:01L HLA-DRB1*08:77L HLA-DRB1*03:01L HLA-DRB1*11:02L HLA-DRB1*11:03L HLA-DRB1*11:04L HLA-DRB1*14:02L HLA-DRB1*11:01L HLA-DRB4*01:01L HLA-DRB1*09:01L HLA-DRB1*12:02L HLA-DRB3*01:01L HLA-DRB1*07:01L HLA-DRB1*10:01L
  REGION 1..14: note = CONT. FROM ABOVE: HLA-DRB1*08:02L HLA-DRB1*08:03L
  source 1..14: note = Severe acute respiratory syndrome coronavirus 2
LAAVNSVPWDTIAN

SEQ ID NO: 12179 - protein, 10 aa, Severe acute respiratory syndrome-related coronavirus
  REGION 1..10: note = Table B: HLA-DRB1*04:01L HLA-DRB1*13:02M HLA-DRB1*13:03M HLA-DRB1*01:03L HLA-DRB1*04:02L HLA-DRB1*04:04L HLA-DRB1*01:01L HLA-DRB4*03:01NM HLA-DRB3*02:01L HLA-DRB1*14:01L HLA-DRB1*11:04M HLA-DRB1*14:02L HLA-DRB1*08:01M HLA-DRB1*11:01L HLA-DRB5*01:01M
  REGION 1..10: note = CONT. FROM ABOVE: HLA-DRB4*02:01NL HLA-DRB1*13:01L HLA-DPA1*01:0 3-B1*04:02L HLA-DRB1*12:01M HLA-DRB1*12:02M HLA-DRB3*01:01L HLA- DPA1*03:01-B1*105:01L HLA-DQA1*03:01-B1*03:02M HLA-DRB1*14:54L H LA-DQA1*05:05-B1*03:01M HLA-DRB1*14:17L HLA-DRB1*16:01L
  REGION 1..10: note = CONT. FROM ABOVE: HLA-DQA1*01:03-B1*06:01L HLA-DRB1*08:02L HLA-D RB1*08:03L HLA-DQA1*02:01-B1*03:03L HLA-DRB1*15:01L
  source 1..10: note = Severe acute respiratory syndrome coronavirus 2
VSTTTNIVTR

SEQ ID NO: 12180 - protein, 14 aa, Severe acute respiratory syndrome-related coronavirus
  REGION 1..14: note = Table B: HLA-DRB1*04:01L HLA-DRB1*03:01L HLA-DRB1*14:02L HLA-DRB1*11:01L HLA-DRB1*04:10L HLA-DPA1*02:01-B1*13:01L HLA-DPA1*01:02-B1*04:01L
  source 1..14: note = Severe acute respiratory syndrome coronavirus 2
NSRIKASMPTTIAK

SEQ ID NO: 12181 - protein, 13 aa, Severe acute respiratory syndrome-related coronavirus
  REGION 1..13: note = Table B: HLA-DRB1*04:01L HLA-DRB1*15:01L
  source 1..13: note = Severe acute respiratory syndrome coronavirus 2
ASFNYLKSPNFSK

SEQ ID NO: 12182 - protein, 14 aa, Severe acute respiratory syndrome-related coronavirus
  REGION 1..14: note = Table B: HLA-DRB1*04:01L HLA-DRB1*08:01L HLA-DPA1*01:03-B1*02:01L HLA-DRB1*08:02L
  source 1..14: note = Severe acute respiratory syndrome coronavirus 2
LGSLIYSTAALGVL

SEQ ID NO: 12183 - protein, 15 aa, Severe acute respiratory syndrome-related coronavirus
  REGION 1..15: note = Table B: HLA-DRB1*04:01L HLA-DRB1*01:01L HLA-DRB1*08:04L HLA-DRB1*14:01L HLA-DRB1*11:03L HLA-DQA1*01-B1*05L HLA-DRB1*09:01L HLA-DRB1*08:03L
  source 1..15: note = Severe acute respiratory syndrome coronavirus 2
TAALGVLMSNLGMPS

SEQ ID NO: 12184 - protein, 13 aa, Severe acute respiratory syndrome-related coronavirus
  REGION 1..13: note = Table B: HLA-DRB1*04:01L HLA-DRB1*04:04L HLA-DRB1*08:04L HLA-DRB1*11:01L HLA-DRB4*01:01L HLA-DRB3*01:01L
  source 1..13: note = Severe acute respiratory syndrome coronavirus 2
EGYLNSTNVTIAT

SEQ ID NO: 12185 - protein, 14 aa, Severe acute respiratory syndrome-related coronavirus
  REGION 1..14: note = Table B: HLA-DRB1*04:01L HLA-DRB1*13:02L HLA-DRB1*13:03L HLA-DRB1*01:03L HLA-DRB1*01:01L HLA-DRB1*08:77L HLA-DRB3*02:01L HLA-DPA1*01:03-B1*03:01L HLA-DPA1*03:01-B1*04:02L HLA-DRB1*14:01L HLA-DRB1*11:03L HLA-DRB1*11:04L HLA-DRB1*14:02L
  REGION 1..14: note = CONT. FROM ABOVE: HLA-DRB1*11:01L HLA-DRB4*01:01L HLA-DRB1*09:01 L HLA-DRB1*12:02L HLA-DPA1*01:03-B1*104:01L HLA-DRB1*08:02L HLA- DRB1*08:03L
  source 1..14: note = Severe acute respiratory syndrome coronavirus 2
LSGLDSLDTYPSLE

SEQ ID NO: 12186 - protein, 14 aa, Severe acute respiratory syndrome-related coronavirus
  REGION 1..14: note = Table B: HLA-DRB1*04:01L HLA-DPA1*01:03-B1*03:01L HLA-DRB1*08:03L
  source 1..14: note = Severe acute respiratory syndrome coronavirus 2
SGLDSLDTYPSLET

SEQ ID NO: 12187 - protein, 14 aa, Severe acute respiratory syndrome-related coronavirus
  REGION 1..14: note = Table B: HLA-DRB1*04:01L HLA-DRB1*03:01L HLA-DRB1*11:02L HLA-DRB1*11:04L HLA-DRB1*11:01L HLA-DQA1*05:05-B1*03:19L HLA-DRB4*01:01L HLA-DPA1*01:03-B1*02:01L HLA-DRB1*08:02L
  source 1..14: note = Severe acute respiratory syndrome coronavirus 2
ISSFKWDLTAFGLV

SEQ ID NO: 12188 - protein, 14 aa, Severe acute respiratory syndrome-related coronavirus
  REGION 1..14: note = Table B: HLA-DRB1*04:01L HLA-DRB1*01:01L HLA-DRB1*08:04L HLA-DRB1*11:03L HLA-DRB1*11:04L HLA-DRB1*14:02L HLA-DRB1*11:01L HLA-DQA1*01-B1*05L HLA-DRB1*09:01L HLA-DPA1*01:03-B1*04:02L HLA-DRB3*01:01L HLA-DPA1*02:01-B1*13:01L
  REGION 1..14: note = CONT. FROM ABOVE: HLA-DPA1*01:03-B1*104:01L HLA-DRB1*07:01L HLA- DRB1*08:03L
  source 1..14: note = Severe acute respiratory syndrome coronavirus 2
INLVQMAPISAMVR

SEQ ID NO: 12189 - protein, 15 aa, Severe acute respiratory syndrome-related coronavirus
  REGION 1..15: note = Table B: HLA-DRB1*04:01L HLA-DRB1*09:01L
  source 1..15: note = Severe acute respiratory syndrome coronavirus 2
SFYYVWKSYVHVVDG

SEQ ID NO: 12190 - protein, 12 aa, Severe acute respiratory syndrome-related coronavirus
  REGION 1..12: note = Table B: HLA-DRB1*04:01L HLA-DRB1*13:02L HLA-DRB1*04:04L HLA-DRB1*01:01L HLA-DRB1*08:04L HLA-DRB3*02:01L HLA-DPA1*01:03-B1*03:01L HLA-DPA1*03:01-B1*04:02L HLA-DRB1*14:01L HLA-DRB1*11:03L HLA-DRB1*11:04L
  REGION 1..12: note = CONT. FROM ABOVE: HLA-DQA1*01:01-B1*05:01L HLA-DRB1*11:01L HLA-D RB1*09:01L HLA-DRB1*12:02L HLA-DRB3*01:01L HLA-DPA1*02:01-B1*13: 01L HLA-DPA1*01:02-B1*04:01L HLA-DRB1*07:01L HLA-DRB1*10:01L HLA -DRB1*08:03L HLA-DRB1*15:01L
  source 1..12: note = Severe acute respiratory syndrome coronavirus 2
RSFYVYANGGKG

SEQ ID NO: 12191 - protein, 14 aa, Severe acute respiratory syndrome-related coronavirus
  REGION 1..14: note = Table B: HLA-DRB1*04:01L HLA-DRB1*04:10L HLA-DRB1*07:01L
  source 1..14: note = Severe acute respiratory syndrome coronavirus 2
ISDEVARDLSLQFK

SEQ ID NO: 12192 - protein, 15 aa, Severe acute respiratory syndrome-related coronavirus
  REGION 1..15: note = Table B: HLA-DRB1*04:01L
  source 1..15: note = Severe acute respiratory syndrome coronavirus 2
SDEVARDLSLQFKRP

SEQ ID NO: 12193 - protein, 12 aa, Severe acute respiratory syndrome-related coronavirus
  REGION 1..12: note = Table B: HLA-DRB1*04:01L HLA-DRB1*08:04L HLA-DRB3*02:01L HLA-DPA1*01:03-B1*03:01L HLA-DPA1*03:01-B1*04:02L HLA-DRB1*03:01L HLA-DRB1*11:03L HLA-DRB1*11:04L HLA-DRB1*11:01L HLA-DRB5*01:01L HLA-DRB4*02:01NL HLA-DRB1*13:01L HLA-DRB1*04:10L
  REGION 1..12: note = CONT. FROM ABOVE: HLA-DRB1*09:01L HLA-DRB1*12:02L HLA-DRB3*01:01 L HLA-DPA1*03:01-B1*105:01L HLA-DPA1*01:02-B1*04:01L HLA-DRB1*10 :01L HLA-DRB1*08:03L HLA-DRB1*15:03L
  source 1..12: note = Severe acute respiratory syndrome coronavirus 2
SSYIVDSVTVKN

SEQ ID NO: 12194 - protein, 11 aa, Severe acute respiratory syndrome-related coronavirus
  REGION 1..11: note = Table B: HLA-DRB1*04:01L HLA-DRB1*04:04L HLA-DRB1*08:04L HLA-DRB3*02:01L HLA-DPA1*01:03-B1*03:01L HLA-DRB1*11:03L HLA-DRB1*11:04L HLA-DRB1*12:02L HLA-DPA1*03:01-B1*105:01L HLA-DQA1*05:05-B1*03:01L HLA-DPA1*01:02-B1*04:01L
  REGION 1..11: note = CONT. FROM ABOVE: HLA-DRB1*15:03L
  source 1..11: note = Severe acute respiratory syndrome coronavirus 2
YIVDSVTVKNG

SEQ ID NO: 12195 - protein, 14 aa, Severe acute respiratory syndrome-related coronavirus
  REGION 1..14: note = Table B: HLA-DRB1*04:01L HLA-DRB1*01:01L HLA-DPA1*03:01-B1*04:02L HLA-DRB1*11:03L HLA-DRB1*07:01L HLA-DRB1*08:03L
  source 1..14: note = Severe acute respiratory syndrome coronavirus 2
GSIHLYFDKAGQKT

SEQ ID NO: 12196 - protein, 11 aa, Severe acute respiratory syndrome-related coronavirus
  REGION 1..11: note = Table B: HLA-DRB1*04:01L HLA-DRB1*01:01L HLA-DQA1*05:05-B1*03:01L
  source 1..11: note = Severe acute respiratory syndrome coronavirus 2
LYFDKAGQKTY

SEQ ID NO: 12197 - protein, 10 aa, Severe acute respiratory syndrome-related coronavirus
  REGION 1..10: note = Table B: HLA-DRB1*04:01L HLA-DRB1*04:03M HLA-DRB1*13:02L HLA-DRB1*13:03L HLA-DRB1*01:03L HLA-DRB1*04:02M HLA-DRB1*04:04L HLA-DRB1*04:05L HLA-DQA1*01:02-B1*06:02L HLA-DRB1*01:02L HLA-DRB4*03:01NL HLA-DRB1*08:04L HLA-DRB1*14:01L HLA-DRB1*11:03L
  REGION 1..10: note = CONT. FROM ABOVE: HLA-DRB1*11:04L HLA-DRB1*11:01L HLA-DQA1*01-B1 *05L HLA-DQA1*05:01-B1*02:01L HLA-DRB1*04:10M HLA-DRB1*12:01L HL A-DRB1*12:02L HLA-DPA1*03:01-B1*105:01L HLA-DQA1*03:01-B1*03:02L HLA-DRB1*14:54L HLA-DQA1*05:05-B1*03:01L HLA-DRB1*14:17M
  REGION 1..10: note = CONT. FROM ABOVE: HLA-DRB1*10:01L HLA-DRB1*16:01L HLA-DRB1*04:08 M HLA-DRB1*08:03L HLA-DQA1*02:01-B1*03:03L HLA-DRB1*15:03L
  source 1..10: note = Severe acute respiratory syndrome coronavirus 2
FVNLDNLRAN

SEQ ID NO: 12198 - protein, 16 aa, Severe acute respiratory syndrome-related coronavirus
  REGION 1..16: note = Table B: HLA-DRB1*04:01L HLA-DRB1*01:01L HLA-DPA1*03:01-B1*04:02L HLA-DRB1*11:02L HLA-DRB1*13:01L HLA-DRB4*01:01L HLA-DQA1*05:05-B1*03:116L HLA-DRB1*04:10L HLA-DRB1*09:01L HLA-DPA1*01:03-B1*04:02L
  REGION 1..16: note = CONT. FROM ABOVE: HLA-DPA1*01:03-B1*02:01L HLA-DPA1*01:03-B1*104 :01L HLA-DPA1*01:02-B1*04:01L HLA-DRB1*07:01L HLA-DRB1*10:01L HL A-DRB1*08:02L HLA-DRB1*08:03L
  source 1..16: note = Severe acute respiratory syndrome coronavirus 2
LDNLRANNTKGSLPIN

SEQ ID NO: 12199 - protein, 14 aa, Severe acute respiratory syndrome-related coronavirus
  REGION 1..14: note = Table B: HLA-DRB1*04:01L HLA-DRB1*01:01L HLA-DRB1*11:02L HLA-DRB5*01:01L HLA-DRB1*08:03L
  source 1..14: note = Severe acute respiratory syndrome coronavirus 2
INVIVFDGKSKCEE

SEQ ID NO: 12200 - protein, 14 aa, Severe acute respiratory syndrome-related coronavirus
  REGION 1..14: note = Table B: HLA-DRB1*04:01L HLA-DRB1*11:02L HLA-DRB5*01:01L HLA-DRB1*13:01L HLA-DRB1*08:03L
  source 1..14: note = Severe acute respiratory syndrome coronavirus 2
NVIVFDGKSKCEES

SEQ ID NO: 12201 - protein, 11 aa, Severe acute respiratory syndrome-related coronavirus
  REGION 1..11: note = Table B: HLA-DRB1*04:01L HLA-DRB1*04:03L HLA-DRB1*04:02L HLA-DRB1*04:05L HLA-DRB1*11:03L HLA-DRB1*14:54L HLA-DRB1*04:08L
  source 1..11: note = Severe acute respiratory syndrome coronavirus 2
EESSAKSASVY

SEQ ID NO: 12202 - protein, 14 aa, Severe acute respiratory syndrome-related coronavirus
  REGION 1..14: note = Table B: HLA-DRB1*04:01L HLA-DRB1*04:04L HLA-DRB1*01:02L HLA-DRB1*08:04L HLA-DRB1*08:77L HLA-DPA1*01:03-B1*03:01L HLA-DRB1*14:01L HLA-DRB1*11:03L HLA-DRB1*11:04L HLA-DRB1*14:02L HLA-DRB5*01:01L HLA-DRB4*01:01L HLA-DRB1*12:02L HLA-DRB3*01:01L
  REGION 1..14: note = CONT. FROM ABOVE: HLA-DPA1*02:01-B1*13:01L HLA-DPA1*03:01-B1*105 :01L HLA-DRB1*10:01L HLA-DRB1*04:08L HLA-DRB1*08:03L HLA-DRB1*15 :03L
  source 1..14: note = Severe acute respiratory syndrome coronavirus 2
DQALVSDVGDSAEV

SEQ ID NO: 12203 - protein, 14 aa, Severe acute respiratory syndrome-related coronavirus
  REGION 1..14: note = Table B: HLA-DRB1*04:01L HLA-DRB1*13:03L HLA-DRB1*01:03L HLA-DRB1*04:04L HLA-DRB1*01:02L HLA-DRB1*11:04L HLA-DRB1*12:01L HLA-DRB1*14:54L HLA-DRB1*10:01L HLA-DRB1*04:08L
  source 1..14: note = Severe acute respiratory syndrome coronavirus 2
QALVSDVGDSAEVA

SEQ ID NO: 12204 - protein, 11 aa, Severe acute respiratory syndrome-related coronavirus
  REGION 1..11: note = Table B: HLA-DRB1*04:01L HLA-DRB1*04:04L HLA-DQA1*01:02-B1*06:02L HLA-DRB1*01:01L HLA-DRB1*01:02L HLA-DRB1*08:04L HLA-DRB1*08:77L HLA-DRB3*02:01L HLA-DPA1*01:03-B1*03:01L HLA-DPA1*03:01-B1*04:02L
  REGION 1..11: note = CONT. FROM ABOVE: HLA-DRB1*14:01L HLA-DRB1*11:03L HLA-DRB1*11:04 L HLA-DRB1*08:01L HLA-DRB1*11:01L HLA-DRB4*02:01NL HLA-DRB1*13:0 1L HLA-DRB4*01:01L HLA-DPA1*01:03-B1*04:01L HLA-DQA1*05:05-B1*03 :116L HLA-DRB1*04:10L HLA-DRB1*09:01L HLA-DRB1*12:02L
  REGION 1..11: note = CONT. FROM ABOVE: HLA-DRB3*01:01L HLA-DPA1*02:01-B1*13:01L HLA-D PA1*01:03-B1*104:01L HLA-DPA1*01:02-B1*04:01L HLA-DRB1*07:01L HL A-DRB1*10:01L HLA-DRB1*04:08L HLA-DRB1*08:02L HLA-DRB1*08:03L HL A-DRB1*15:03L
  source 1..11: note = Severe acute respiratory syndrome coronavirus 2
DVGDSAEVAVK

SEQ ID NO: 12205 - protein, 13 aa, Severe acute respiratory syndrome-related coronavirus
  REGION 1..13: note = Table B: HLA-DRB1*04:01L HLA-DRB1*08:04L HLA-DRB1*11:01L HLA-DRB3*01:01L HLA-DPA1*01:03-B1*104:01L HLA-DRB1*08:03L HLA-DRB1*15:01L
  source 1..13: note = Severe acute respiratory syndrome coronavirus 2
NTFSSTFNVPMEK

SEQ ID NO: 12206 - protein, 15 aa, Severe acute respiratory syndrome-related coronavirus
  REGION 1..15: note = Table B: HLA-DRB1*04:01L HLA-DRB1*11:01L HLA-DRB3*01:01L
  source 1..15: note = Severe acute respiratory syndrome coronavirus 2
NVPMEKLKTLVATAE

SEQ ID NO: 12207 - protein, 12 aa, Severe acute respiratory syndrome-related coronavirus
  REGION 1..12: note = Table B: HLA-DRB1*04:01L HLA-DRB1*01:01L HLA-DRB1*08:04L HLA-DRB1*11:03L HLA-DRB1*09:01L HLA-DRB3*01:01L HLA-DRB1*10:01L
  source 1..12: note = Severe acute respiratory syndrome coronavirus 2
LVATAEAELAKN

SEQ ID NO: 12208 - protein, 14 aa, Severe acute respiratory syndrome-related coronavirus
  REGION 1..14: note = Table B: HLA-DRB1*04:01L HLA-DRB1*04:04L HLA-DRB1*08:77L HLA-DRB1*03:01L HLA-DRB1*11:02L HLA-DRB1*11:03L HLA-DRB1*11:04L HLA-DRB1*14:02L HLA-DRB1*11:01L HLA-DRB4*01:01L HLA-DQA1*05:05-B1*03:116L HLA-DRB1*09:01L
  REGION 1..14: note = CONT. FROM ABOVE: HLA-DPA1*01:03-B1*04:02L HLA-DRB3*01:01L HLA-D PA1*01:03-B1*02:01L HLA-DPA1*01:03-B1*104:01L HLA-DRB1*07:01L HL A-DRB1*10:01L HLA-DRB1*08:02L HLA-DRB1*08:03L
  source 1..14: note = Severe acute respiratory syndrome coronavirus 2
EAELAKNVSLDNVL

SEQ ID NO: 12209 - protein, 14 aa, Severe acute respiratory syndrome-related coronavirus
  REGION 1..14: note = Table B: HLA-DRB1*04:01L HLA-DRB1*04:04L HLA-DRB1*08:04L HLA-DPA1*03:01-B1*04:02L HLA-DRB1*11:03L HLA-DRB1*13:01L HLA-DRB1*09:01L HLA-DRB1*12:02L HLA-DRB1*10:01L
  source 1..14: note = Severe acute respiratory syndrome coronavirus 2
GFVDSDVETKDVVE

SEQ ID NO: 12210 - protein, 15 aa, Severe acute respiratory syndrome-related coronavirus
  REGION 1..15: note = Table B: HLA-DRB1*04:01L HLA-DRB1*01:01L HLA-DRB1*08:77L HLA-DRB1*11:02L HLA-DQA1*01:01-B1*05:01L HLA-DRB1*13:01L HLA-DRB1*09:01L HLA-DPA1*01:03-B1*104:01L HLA-DRB1*08:02L HLA-DRB1*15:01L
  source 1..15: note = Severe acute respiratory syndrome coronavirus 2
NYMLTYNKVENMTPR

SEQ ID NO: 12211 - protein, 15 aa, Severe acute respiratory syndrome-related coronavirus
  REGION 1..15: note = Table B: HLA-DRB1*04:01L HLA-DRB1*04:03L HLA-DRB1*04:02L HLA-DRB1*04:04L HLA-DRB1*11:04L HLA-DRB1*11:01L HLA-DQA1*05:05-B1*03:19L HLA-DRB1*15:03L
  source 1..15: note = Severe acute respiratory syndrome coronavirus 2
TPRDLGACIDCSARH

SEQ ID NO: 12212 - protein, 16 aa, Severe acute respiratory syndrome-related coronavirus
  REGION 1..16: note = Table B: HLA-DRB1*04:01L HLA-DRB3*02:01L HLA-DRB1*10:01L
  source 1..16: note = Severe acute respiratory syndrome coronavirus 2
SARHINAQVAKSHNIA

SEQ ID NO: 12213 - protein, 14 aa, Severe acute respiratory syndrome-related coronavirus
  REGION 1..14: note = Table B: HLA-DRB1*04:01L HLA-DRB1*14:02L HLA-DRB1*08:02L
  source 1..14: note = Severe acute respiratory syndrome coronavirus 2
SHNIALIWNVKDFM

SEQ ID NO: 12214 - protein, 16 aa, Severe acute respiratory syndrome-related coronavirus
  REGION 1..16: note = Table B: HLA-DRB1*04:01L HLA-DRB3*02:01L HLA-DRB4*01:01L
  source 1..16: note = Severe acute respiratory syndrome coronavirus 2
IALIWNVKDFMSLSEQ

SEQ ID NO: 12215 - protein, 14 aa, Severe acute respiratory syndrome-related coronavirus
  REGION 1..14: note = Table B: HLA-DRB1*04:01L HLA-DRB3*02:01L HLA-DRB1*03:01L HLA-DRB1*11:03L HLA-DRB1*11:04L HLA-DRB1*14:02L HLA-DRB1*11:01L HLA-DPA1*02:01-B1*13:01L HLA-DRB1*10:01L HLA-DRB1*15:01L
  source 1..14: note = Severe acute respiratory syndrome coronavirus 2
VKDFMSLSEQLRKQ

SEQ ID NO: 12216 - protein, 14 aa, Severe acute respiratory syndrome-related coronavirus
  REGION 1..14: note = Table B: HLA-DRB1*04:01L HLA-DRB1*13:02L HLA-DRB1*01:01L HLA-DRB1*03:01L HLA-DRB1*11:03L HLA-DQA1*03:01-B1*03:02L HLA-DRB1*14:17L HLA-DRB1*07:01L
  source 1..14: note = Severe acute respiratory syndrome coronavirus 2
SEQLRKQIRSAAKK

SEQ ID NO: 12217 - protein, 15 aa, Severe acute respiratory syndrome-related coronavirus
  REGION 1..15: note = Table B: HLA-DRB1*04:01L HLA-DRB1*01:01L HLA-DRB1*11:01L
  source 1..15: note = Severe acute respiratory syndrome coronavirus 2
TRQVVNVVTTKIALK

SEQ ID NO: 12218 - protein, 13 aa, Severe acute respiratory syndrome-related coronavirus
  REGION 1..13: note = Table B: HLA-DRB1*04:01L HLA-DRB1*04:04L HLA-DRB1*11:02L HLA-DRB1*11:04L HLA-DRB1*11:01L HLA-DRB3*01:01L HLA-DRB1*08:02L
  source 1..13: note = Severe acute respiratory syndrome coronavirus 2
AAIFYLITPVHVM

SEQ ID NO: 12219 - protein, 13 aa, Severe acute respiratory syndrome-related coronavirus
  REGION 1..13: note = Table B: HLA-DRB1*04:01L HLA-DRB1*04:04L HLA-DRB1*11:04L HLA-DRB1*11:01L HLA-DRB3*01:01L
  source 1..13: note = Severe acute respiratory syndrome coronavirus 2
AIFYLITPVHVMS

SEQ ID NO: 12220 - protein, 13 aa, Severe acute respiratory syndrome-related coronavirus
  REGION 1..13: note = Table B: HLA-DRB1*04:01L HLA-DRB1*11:02L HLA-DRB4*01:01L HLA-DPA1*01:03-B1*02:01L HLA-DRB1*08:02L
  source 1..13: note = Severe acute respiratory syndrome coronavirus 2
EIIGYKAIDGGVT

SEQ ID NO: 12221 - protein, 13 aa, Severe acute respiratory syndrome-related coronavirus
  REGION 1..13: note = Table B: HLA-DRB1*04:01L
  source 1..13: note = Severe acute respiratory syndrome coronavirus 2
IIGYKAIDGGVTR

SEQ ID NO: 12222 - protein, 15 aa, Severe acute respiratory syndrome-related coronavirus
  REGION 1..15: note = Table B: HLA-DRB1*04:01L HLA-DRB1*13:02L HLA-DRB4*03:01NL HLA-DRB1*08:04L HLA-DRB1*11:04L HLA-DRB1*08:01L HLA-DRB1*11:01L HLA-DRB1*04:10L HLA-DRB3*01:01L
  source 1..15: note = Severe acute respiratory syndrome coronavirus 2
VTRDIASTDTCFANK

SEQ ID NO: 12223 - protein, 15 aa, Severe acute respiratory syndrome-related coronavirus
  REGION 1..15: note = Table B: HLA-DRB1*04:01L HLA-DRB1*01:01L
  source 1..15: note = Severe acute respiratory syndrome coronavirus 2
TRDIASTDTCFANKH

SEQ ID NO: 12224 - protein, 13 aa, Severe acute respiratory syndrome-related coronavirus
  REGION 1..13: note = Table B: HLA-DRB1*04:01L HLA-DRB1*04:04L HLA-DRB1*01:01L HLA-DRB1*11:02L HLA-DRB1*11:03L HLA-DRB1*11:04L HLA-DRB1*08:01L HLA-DRB1*11:01L HLA-DRB4*01:01L HLA-DRB1*09:01L HLA-DPA1*01:03-B1*02:01L HLA-DPA1*01:03-B1*104:01L
  REGION 1..13: note = CONT. FROM ABOVE: HLA-DQA1*05:05-B1*03:01L HLA-DRB1*10:01L HLA-D QA1*01:03-B1*06:01L HLA-DRB1*08:03L
  source 1..13: note = Severe acute respiratory syndrome coronavirus 2
GSYTNDKACPLIA

SEQ ID NO: 12225 - protein, 15 aa, Severe acute respiratory syndrome-related coronavirus
  REGION 1..15: note = Table B: HLA-DRB1*04:01L HLA-DRB1*08:04L
  source 1..15: note = Severe acute respiratory syndrome coronavirus 2
IAAVITREVGFVVPG

SEQ ID NO: 12226 - protein, 15 aa, Severe acute respiratory syndrome-related coronavirus
  REGION 1..15: note = Table B: HLA-DRB1*04:01L HLA-DRB1*01:01L HLA-DRB1*03:01L HLA-DRB1*11:01L
  source 1..15: note = Severe acute respiratory syndrome coronavirus 2
LPGTILRTTNGDFLH

SEQ ID NO: 12227 - protein, 15 aa, Severe acute respiratory syndrome-related coronavirus
  REGION 1..15: note = Table B: HLA-DRB1*04:01L HLA-DRB1*01:01L HLA-DRB1*03:01L HLA-DRB1*13:01L HLA-DRB4*01:01L HLA-DQA1*05:05-B1*03:116L HLA-DRB1*08:02L
  source 1..15: note = Severe acute respiratory syndrome coronavirus 2
TPSKLIEYTDFATSA

SEQ ID NO: 12228 - protein, 12 aa, Severe acute respiratory syndrome-related coronavirus
  REGION 1..12: note = Table B: HLA-DRB1*04:01L HLA-DRB1*04:04L HLA-DRB1*01:01L HLA-DRB1*08:04L HLA-DRB1*11:02L HLA-DRB1*11:03L HLA-DRB1*11:04L HLA-DQA1*01:01-B1*05:01L HLA-DRB1*08:01L HLA-DRB1*11:01L HLA-DQA1*05:05-B1*03:116L HLA-DRB1*04:10L HLA-DRB1*09:01L
  REGION 1..12: note = CONT. FROM ABOVE: HLA-DRB1*12:02L HLA-DRB3*01:01L HLA-DRB1*08:02 L HLA-DRB1*08:03L
  source 1..12: note = Severe acute respiratory syndrome coronavirus 2
IFKDASGKPVPY

SEQ ID NO: 12229 - protein, 15 aa, Severe acute respiratory syndrome-related coronavirus
  REGION 1..15: note = Table B: HLA-DRB1*04:01L HLA-DRB1*13:02L HLA-DRB1*13:03L HLA-DRB4*03:01NL HLA-DRB1*08:04L HLA-DRB3*02:01L HLA-DRB1*14:01L HLA-DRB1*11:04L HLA-DRB1*11:01L HLA-DQA1*01-B1*05L HLA-DPA1*01:03-B1*02:01L HLA-DPA1*01:02-B1*04:01L
  REGION 1..15: note = CONT. FROM ABOVE: HLA-DRB1*10:01L
  source 1..15: note = Severe acute respiratory syndrome coronavirus 2
TNVLEGSVAYESLRP

SEQ ID NO: 12230 - protein, 15 aa, Severe acute respiratory syndrome-related coronavirus
  REGION 1..15: note = Table B: HLA-DRB1*04:01L HLA-DRB1*01:01L HLA-DRB1*08:04L HLA-DRB1*08:77L HLA-DRB1*14:01L HLA-DRB1*11:03L HLA-DRB1*11:04L HLA-DRB1*12:02L HLA-DRB3*01:01L HLA-DPA1*01:03-B1*02:01L HLA-DRB1*10:01L
  source 1..15: note = Severe acute respiratory syndrome coronavirus 2
NVLEGSVAYESLRPD

SEQ ID NO: 12231 - protein, 14 aa, Severe acute respiratory syndrome-related coronavirus
  REGION 1..14: note = Table B: HLA-DRB1*04:01L HLA-DRB1*01:01L HLA-DRB1*11:04L HLA-DRB1*11:01L HLA-DRB3*01:01L HLA-DRB1*07:01L
  source 1..14: note = Severe acute respiratory syndrome coronavirus 2
SVAYESLRPDTRYV

SEQ ID NO: 12232 - protein, 15 aa, Severe acute respiratory syndrome-related coronavirus
  REGION 1..15: note = Table B: HLA-DRB1*04:01L HLA-DRB3*02:01L HLA-DRB1*08:03L HLA-DRB1*15:01L
  source 1..15: note = Severe acute respiratory syndrome coronavirus 2
YESLRPDTRYVLMDG

SEQ ID NO: 12233 - protein, 12 aa, Severe acute respiratory syndrome-related coronavirus
  REGION 1..12: note = Table B: HLA-DRB1*04:01L HLA-DRB1*04:03L HLA-DRB1*13:02L HLA-DRB1*04:02L HLA-DRB1*04:04L HLA-DRB1*04:05L HLA-DRB1*01:02L HLA-DRB4*03:01NL HLA-DRB1*08:04L HLA-DRB3*02:01L HLA-DPA1*01:03-B1*03:01L HLA-DRB1*03:01L HLA-DRB1*11:03L
  REGION 1..12: note = CONT. FROM ABOVE: HLA-DRB1*11:04L HLA-DQA1*01-B1*05L HLA-DRB1*04 :10L HLA-DRB1*12:01L HLA-DRB1*14:54L HLA-DQA1*05:05-B1*03:01L HL A-DRB1*14:17L HLA-DRB1*04:08L
  source 1..12: note = Severe acute respiratory syndrome coronavirus 2
VLMDGSIIQFPN

SEQ ID NO: 12234 - protein, 13 aa, Severe acute respiratory syndrome-related coronavirus
  REGION 1..13: note = Table B: HLA-DRB1*04:01L HLA-DRB1*01:01L HLA-DRB1*08:04L HLA-DRB1*11:02L HLA-DRB1*11:01L HLA-DRB3*01:01L HLA-DRB1*10:01L
  source 1..13: note = Severe acute respiratory syndrome coronavirus 2
GSIIQFPNTYLEG

SEQ ID NO: 12235 - protein, 15 aa, Severe acute respiratory syndrome-related coronavirus
  REGION 1..15: note = Table B: HLA-DRB1*04:01L HLA-DRB1*01:01L HLA-DRB3*02:01L HLA-DRB1*11:02L HLA-DRB1*13:01L HLA-DRB1*07:01L HLA-DRB1*10:01L HLA-DRB1*08:02L HLA-DRB1*08:03L
  source 1..15: note = Severe acute respiratory syndrome coronavirus 2
GRWVLNNDYYRSLPG

SEQ ID NO: 12236 - protein, 15 aa, Severe acute respiratory syndrome-related coronavirus
  REGION 1..15: note = Table B: HLA-DRB1*04:01L HLA-DRB3*01:01L HLA-DRB1*15:01L
  source 1..15: note = Severe acute respiratory syndrome coronavirus 2
NDYYRSLPGVFCGVD

SEQ ID NO: 12237 - protein, 16 aa, Severe acute respiratory syndrome-related coronavirus
  REGION 1..16: note = Table B: HLA-DRB1*04:01L HLA-DRB1*11:02L HLA-DRB4*01:01L HLA-DRB1*08:02L
  source 1..16: note = Severe acute respiratory syndrome coronavirus 2
VNLLTNMFTPLIQPIG

SEQ ID NO: 12238 - protein, 14 aa, Severe acute respiratory syndrome-related coronavirus
  REGION 1..14: note = Table B: HLA-DRB1*04:01L HLA-DRB1*01:01L HLA-DRB1*08:02L
  source 1..14: note = Severe acute respiratory syndrome coronavirus 2
TNMFTPLIQPIGAL

SEQ ID NO: 12239 - protein, 14 aa, Severe acute respiratory syndrome-related coronavirus
  REGION 1..14: note = Table B: HLA-DRB1*04:01L HLA-DRB1*04:04L HLA-DRB1*01:01L HLA-DPA1*01:03-B1*03:01L
  source 1..14: note = Severe acute respiratory syndrome coronavirus 2
NMFTPLIQPIGALD

SEQ ID NO: 12240 - protein, 14 aa, Severe acute respiratory syndrome-related coronavirus
  REGION 1..14: note = Table B: HLA-DRB1*04:01L HLA-DRB1*01:01L HLA-DRB1*11:01L HLA-DRB1*15:01L
  source 1..14: note = Severe acute respiratory syndrome coronavirus 2
TPLIQPIGALDISA

SEQ ID NO: 12241 - protein, 14 aa, Severe acute respiratory syndrome-related coronavirus
  REGION 1..14: note = Table B: HLA-DRB1*04:01L HLA-DRB1*11:01L HLA-DRB3*01:01L HLA-DRB1*08:02L
  source 1..14: note = Severe acute respiratory syndrome coronavirus 2
TPVYSFLPGVYSVI

SEQ ID NO: 12242 - protein, 12 aa, Severe acute respiratory syndrome-related coronavirus
  REGION 1..12: note = Table B: HLA-DRB1*04:01L HLA-DRB1*04:04L HLA-DRB1*04:05L HLA-DRB1*01:02L HLA-DRB1*08:04L HLA-DRB3*02:01L HLA-DPA1*01:03-B1*03:01L HLA-DPA1*03:01-B1*04:02L HLA-DRB1*14:02L HLA-DQA1*01:01-B1*05:01L HLA-DRB4*01:01L
  REGION 1..12: note = CONT. FROM ABOVE: HLA-DRB1*04:10L HLA-DPA1*01:03-B1*04:02L HLA-D PA1*02:01-B1*13:01L HLA-DRB1*10:01L HLA-DRB1*04:08L
  source 1..12: note = Severe acute respiratory syndrome coronavirus 2
LTNDVSFLAHIQ

SEQ ID NO: 12243 - protein, 15 aa, Severe acute respiratory syndrome-related coronavirus
  REGION 1..15: note = Table B: HLA-DRB1*04:01L
  source 1..15: note = Severe acute respiratory syndrome coronavirus 2
RRVVFNGVSFSTFEE

SEQ ID NO: 12244 - protein, 17 aa, Severe acute respiratory syndrome-related coronavirus
  REGION 1..17: note = Table B: HLA-DRB1*04:01L HLA-DRB3*02:01L HLA-DRB1*09:01L HLA-DRB1*15:01L
  source 1..17: note = Severe acute respiratory syndrome coronavirus 2
LPLTQYNRYLALYNKYK

SEQ ID NO: 12245 - protein, 14 aa, Severe acute respiratory syndrome-related coronavirus
  REGION 1..14: note = Table B: HLA-DRB1*04:01L HLA-DRB1*01:01L HLA-DRB3*02:01L HLA-DRB1*11:02L HLA-DRB1*11:03L HLA-DRB1*14:02L HLA-DQA1*01:01-B1*05:01L HLA-DPA1*01:03-B1*02:01L HLA-DRB1*08:02L HLA-DRB1*15:01L
  source 1..14: note = Severe acute respiratory syndrome coronavirus 2
YNKYKYFSGAMDTT

SEQ ID NO: 12246 - protein, 14 aa, Severe acute respiratory syndrome-related coronavirus
  REGION 1..14: note = Table B: HLA-DRB1*04:01L HLA-DRB1*04:03L HLA-DRB1*14:01L HLA-DQA1*01:03-B1*06:01L
  source 1..14: note = Severe acute respiratory syndrome coronavirus 2
TTSYREAACCHLAK

SEQ ID NO: 12247 - protein, 17 aa, Severe acute respiratory syndrome-related coronavirus
  REGION 1..17: note = Table B: HLA-DRB1*04:01L HLA-DRB1*01:01L HLA-DRB1*08:04L HLA-DRB1*08:77L HLA-DRB1*11:04L HLA-DPA1*01:03-B1*04:01L HLA-DRB3*01:01L HLA-DRB1*07:01L HLA-DRB1*08:03L
  source 1..17: note = Severe acute respiratory syndrome coronavirus 2
QPPQTSITSAVLQSGFR

SEQ ID NO: 12248 - protein, 14 aa, Severe acute respiratory syndrome-related coronavirus
  REGION 1..14: note = Table B: HLA-DRB1*04:01L HLA-DRB1*13:02L HLA-DRB1*13:03L HLA-DRB1*01:01L HLA-DRB1*08:04L HLA-DRB1*11:04L HLA-DRB1*11:01L HLA-DPA1*01:03-B1*04:02L HLA-DRB3*01:01L HLA-DPA1*03:01-B1*105:01L HLA-DQA1*05:05-B1*03:01L
  REGION 1..14: note = CONT. FROM ABOVE: HLA-DRB1*10:01L
  source 1..14: note = Severe acute respiratory syndrome coronavirus 2
SGFRKMAFPSGKVE

SEQ ID NO: 12249 - protein, 15 aa, Severe acute respiratory syndrome-related coronavirus
  REGION 1..15: note = Table B: HLA-DRB1*04:01L HLA-DRB1*13:02L HLA-DRB1*04:04L HLA-DRB1*01:01L HLA-DRB3*01:01L HLA-DPA1*01:03-B1*02:01L HLA-DRB1*07:01L HLA-DRB1*10:01L HLA-DRB1*08:03L
  source 1..15: note = Severe acute respiratory syndrome coronavirus 2
NPNYEDLLIRKSNHN

SEQ ID NO: 12250 - protein, 14 aa, Severe acute respiratory syndrome-related coronavirus
  REGION 1..14: note = Table B: HLA-DRB1*04:01L HLA-DQA1*01:02-B1*06:02L HLA-DRB1*08:04L HLA-DRB1*08:77L HLA-DRB3*02:01L HLA-DRB1*11:03L HLA-DRB1*11:04L HLA-DRB1*11:01L HLA-DQA1*01-B1*05L HLA-DPA1*02:01-B1*13:01L HLA-DPA1*03:01-B1*105:01L
  REGION 1..14: note = CONT. FROM ABOVE: HLA-DPA1*01:02-B1*04:01L HLA-DRB1*10:01L
  source 1..14: note = Severe acute respiratory syndrome coronavirus 2
VLKLKVDTANPKTP

SEQ ID NO: 12251 - protein, 14 aa, Severe acute respiratory syndrome-related coronavirus
  REGION 1..14: note = Table B: HLA-DRB1*04:01L HLA-DRB1*13:02L HLA-DRB1*01:01L HLA-DRB3*02:01L HLA-DPA1*01:03-B1*03:01L HLA-DPA1*03:01-B1*04:02L HLA-DRB1*03:01L HLA-DRB1*11:02L HLA-DRB1*11:03L HLA-DRB1*14:02L HLA-DQA1*01:01-B1*05:01L
  REGION 1..14: note = CONT. FROM ABOVE: HLA-DQA1*01-B1*05L HLA-DPA1*01:03-B1*04:01L HL A-DQA1*05:05-B1*03:116L HLA-DRB1*09:01L HLA-DPA1*01:03-B1*104:01 L HLA-DRB1*07:01L HLA-DRB1*08:02L HLA-DRB1*08:03L
  source 1..14: note = Severe acute respiratory syndrome coronavirus 2
TPKYKFVRIQPGQT

SEQ ID NO: 12252 - protein, 13 aa, Severe acute respiratory syndrome-related coronavirus
  REGION 1..13: note = Table B: HLA-DRB1*04:01L HLA-DRB3*01:01L
  source 1..13: note = Severe acute respiratory syndrome coronavirus 2
YKFVRIQPGQTFS

SEQ ID NO: 12253 - protein, 16 aa, Severe acute respiratory syndrome-related coronavirus
  REGION 1..16: note = Table B: HLA-DRB1*04:01L HLA-DRB1*08:04L HLA-DRB1*11:03L HLA-DRB1*11:04L HLA-DRB1*11:01L HLA-DRB4*02:01NL HLA-DRB1*09:01L HLA-DRB1*08:02L HLA-DRB1*08:03L
  source 1..16: note = Severe acute respiratory syndrome coronavirus 2
LPTGVHAGTDLEGNFY

SEQ ID NO: 12254 - protein, 13 aa, Severe acute respiratory syndrome-related coronavirus
  REGION 1..13: note = Table B: HLA-DRB1*04:01L HLA-DRB1*13:02L HLA-DRB1*04:04L HLA-DQA1*01:02-B1*06:02L HLA-DRB1*01:01L HLA-DRB1*01:02L HLA-DRB1*08:04L HLA-DRB1*08:77L HLA-DPA1*01:03-B1*03:01L HLA-DRB1*11:03L HLA-DRB1*11:04L HLA-DRB1*14:02L HLA-DRB1*11:01L
  REGION 1..13: note = CONT. FROM ABOVE: HLA-DRB5*01:01L HLA-DQA1*05:05-B1*03:19L HLA-D RB1*09:01L HLA-DPA1*01:03-B1*04:02L HLA-DRB1*12:02L HLA-DRB3*01: 01L HLA-DPA1*03:01-B1*105:01L HLA-DQA1*05:05-B1*03:01L HLA-DRB1* 10:01L HLA-DRB1*08:02L HLA-DRB1*08:03L HLA-DRB1*15:03L
  source 1..13: note = Severe acute respiratory syndrome coronavirus 2
GPFVDRQTAQAAG

SEQ ID NO: 12255 - protein, 14 aa, Severe acute respiratory syndrome-related coronavirus
  REGION 1..14: note = Table B: HLA-DRB1*04:01L HLA-DRB1*04:04L HLA-DRB1*08:04L HLA-DRB1*11:01L HLA-DRB1*10:01L HLA-DRB1*15:03L
  source 1..14: note = Severe acute respiratory syndrome coronavirus 2
PFVDRQTAQAAGTD

SEQ ID NO: 12256 - protein, 16 aa, Severe acute respiratory syndrome-related coronavirus
  REGION 1..16: note = Table B: HLA-DRB1*04:01L HLA-DRB1*01:01L HLA-DRB3*02:01L HLA-DRB1*14:01L HLA-DRB1*11:02L HLA-DRB1*11:03L HLA-DRB1*11:01L HLA-DPA1*01:03-B1*04:01L HLA-DRB1*09:01L HLA-DRB1*07:01L
  source 1..16: note = Severe acute respiratory syndrome coronavirus 2
VNVLAWLYAAVINGDR

SEQ ID NO: 12257 - protein, 17 aa, Severe acute respiratory syndrome-related coronavirus
  REGION 1..17: note = Table B: HLA-DRB1*04:01L
  source 1..17: note = Severe acute respiratory syndrome coronavirus 2
GDRWFLNRFTTTLNDFN

SEQ ID NO: 12258 - protein, 15 aa, Severe acute respiratory syndrome-related coronavirus
  REGION 1..15: note = Table B: HLA-DRB1*04:01L HLA-DRB3*02:01L HLA-DRB1*14:01L HLA-DRB1*14:02L HLA-DRB4*01:01L HLA-DRB1*09:01L HLA-DRB3*01:01L HLA-DPA1*01:03-B1*02:01L HLA-DRB1*07:01L HLA-DRB1*08:03L
  source 1..15: note = Severe acute respiratory syndrome coronavirus 2
LNRFTTTLNDFNLVA

SEQ ID NO: 12259 - protein, 15 aa, Severe acute respiratory syndrome-related coronavirus
  REGION 1..15: note = Table B: HLA-DRB1*04:01L HLA-DRB1*01:01L HLA-DRB1*07:01L HLA-DRB1*08:02L
  source 1..15: note = Severe acute respiratory syndrome coronavirus 2
AMKYNYEPLTQDHVD

SEQ ID NO: 12260 - protein, 15 aa, Severe acute respiratory syndrome-related coronavirus
  REGION 1..15: note = Table B: HLA-DRB1*04:01L HLA-DRB1*01:01L
  source 1..15: note = Severe acute respiratory syndrome coronavirus 2
TQDHVDILGPLSAQT

SEQ ID NO: 12261 - protein, 14 aa, Severe acute respiratory syndrome-related coronavirus
  REGION 1..14: note = Table B: HLA-DRB1*04:01L HLA-DRB1*13:02L HLA-DRB1*13:03L HLA-DRB1*01:01L HLA-DRB1*08:04L HLA-DRB1*08:77L HLA-DRB1*14:01L HLA-DRB1*11:03L HLA-DRB1*11:04L HLA-DRB1*14:02L HLA-DRB1*11:01L HLA-DQA1*01-B1*05L HLA-DRB4*01:01L HLA-DRB1*12:02L
  REGION 1..14: note = CONT. FROM ABOVE: HLA-DPA1*01:03-B1*104:01L HLA-DRB1*07:01L HLA- DQA1*01:03-B1*06:01L HLA-DRB1*08:03L HLA-DRB1*15:03L
  source 1..14: note = Severe acute respiratory syndrome coronavirus 2
DHVDILGPLSAQTG

SEQ ID NO: 12262 - protein, 14 aa, Severe acute respiratory syndrome-related coronavirus
  REGION 1..14: note = Table B: HLA-DRB1*04:01L HLA-DRB1*11:04L HLA-DRB1*04:10L HLA-DRB1*08:03L
  source 1..14: note = Severe acute respiratory syndrome coronavirus 2
LGPLSAQTGIAVLD

SEQ ID NO: 12263 - protein, 16 aa, Severe acute respiratory syndrome-related coronavirus
  REGION 1..16: note = Table B: HLA-DRB1*04:01L HLA-DRB1*04:04L HLA-DRB1*03:01L HLA-DRB1*10:01L
  source 1..16: note = Severe acute respiratory syndrome coronavirus 2
GSALLEDEFTPFDVVR

SEQ ID NO: 12264 - protein, 11 aa, Severe acute respiratory syndrome-related coronavirus
  REGION 1..11: note = Table B: HLA-DRB1*04:01L HLA-DRB1*01:01L HLA-DRB1*08:77L HLA-DRB1*11:03L HLA-DRB1*11:04L HLA-DRB1*14:02L HLA-DRB1*11:01L HLA-DRB4*01:01L HLA-DRB1*09:01L HLA-DRB1*12:02L HLA-DRB3*01:01L HLA-DPA1*01:03-B1*104:01L HLA-DRB1*07:01L HLA-DRB1*08:03L
  source 1..11: note = Severe acute respiratory syndrome coronavirus 2
DEFTPFDVVRQ

SEQ ID NO: 12265 - protein, 11 aa, Severe acute respiratory syndrome-related coronavirus
  REGION 1..11: note = Table B: HLA-DRB1*04:01L HLA-DRB1*13:02L HLA-DRB1*04:05L HLA-DRB1*01:01L HLA-DRB1*11:03L HLA-DRB1*11:01L HLA-DRB5*01:01L HLA-DQA1*03:01-B1*03:02L
  source 1..11: note = Severe acute respiratory syndrome coronavirus 2
FLLPSLATVAY

SEQ ID NO: 12266 - protein, 13 aa, Severe acute respiratory syndrome-related coronavirus
  REGION 1..13: note = Table B: HLA-DRB1*04:01L HLA-DRB1*11:02L HLA-DRB4*02:01NL HLA-DRB1*13:01L HLA-DPA1*01:03-B1*04:01L HLA-DQA1*05:05-B1*03:116L HLA-DRB1*08:02L
  source 1..13: note = Severe acute respiratory syndrome coronavirus 2
LILMTARTVYDDG

SEQ ID NO: 12267 - protein, 15 aa, Severe acute respiratory syndrome-related coronavirus
  REGION 1..15: note = Table B: HLA-DRB1*04:01L HLA-DRB1*04:05L HLA-DRB1*14:01L HLA-DRB1*08:01L HLA-DRB1*11:01L HLA-DRB1*07:01L
  source 1..15: note = Severe acute respiratory syndrome coronavirus 2
RRVWTLMNVLTLVYK

SEQ ID NO: 12268 - protein, 13 aa, Severe acute respiratory syndrome-related coronavirus
  REGION 1..13: note = Table B: HLA-DRB1*04:01L HLA-DRB1*11:02L HLA-DRB1*11:01L HLA-DRB1*04:10L HLA-DPA1*01:03-B1*04:02L HLA-DRB1*12:02L HLA-DRB1*14:54L HLA-DPA1*01:03-B1*104:01L
  source 1..13: note = Severe acute respiratory syndrome coronavirus 2
LVYKVYYGNALDQ

SEQ ID NO: 12269 - protein, 13 aa, Severe acute respiratory syndrome-related coronavirus
  REGION 1..13: note = Table B: HLA-DRB1*04:01L HLA-DRB1*01:01L HLA-DRB1*08:04L HLA-DRB1*03:01L HLA-DRB1*11:02L HLA-DRB1*11:04L HLA-DRB1*08:01L HLA-DRB1*11:01L HLA-DRB5*01:01L HLA-DRB4*01:01L HLA-DPA1*01:03-B1*04:01L HLA-DQA1*05:05-B1*03:116L
  REGION 1..13: note = CONT. FROM ABOVE: HLA-DRB1*12:02L HLA-DRB3*01:01L HLA-DPA1*01:03 -B1*02:01L HLA-DRB1*07:01L HLA-DRB1*08:02L HLA-DRB1*08:03L
  source 1..13: note = Severe acute respiratory syndrome coronavirus 2
KVYYGNALDQAIS

SEQ ID NO: 12270 - protein, 13 aa, Severe acute respiratory syndrome-related coronavirus
  REGION 1..13: note = Table B: HLA-DRB1*04:01L HLA-DRB1*13:02L HLA-DRB1*04:04L HLA-DRB1*08:04L HLA-DRB1*14:01L HLA-DRB1*11:03L HLA-DRB1*11:04L HLA-DQA1*01:01-B1*05:01L HLA-DRB1*11:01L HLA-DRB1*09:01L HLA-DRB1*12:02L HLA-DRB3*01:01L HLA-DRB1*07:01L HLA-DRB1*08:02L
  REGION 1..13: note = CONT. FROM ABOVE: HLA-DRB1*08:03L
  source 1..13: note = Severe acute respiratory syndrome coronavirus 2
GVYDYLVSTQEFR

SEQ ID NO: 12271 - protein, 13 aa, Severe acute respiratory syndrome-related coronavirus
  REGION 1..13: note = Table B: HLA-DRB1*04:01L HLA-DRB1*13:02L HLA-DRB1*13:03L HLA-DRB1*04:04L HLA-DRB1*11:01L HLA-DRB3*01:01L HLA-DRB1*14:17L HLA-DQA1*01:03-B1*06:01L
  source 1..13: note = Severe acute respiratory syndrome coronavirus 2
EFRYMNSQGLLPP

SEQ ID NO: 12272 - protein, 13 aa, Severe acute respiratory syndrome-related coronavirus
  REGION 1..13: note = Table B: HLA-DRB1*04:01L HLA-DRB1*01:01L HLA-DRB1*11:04L HLA-DRB1*08:01L HLA-DRB1*11:01L HLA-DQA1*05:05-B1*03:01L HLA-DRB1*10:01L
  source 1..13: note = Severe acute respiratory syndrome coronavirus 2
SVLQQLRVESSSK

SEQ ID NO: 12273 - protein, 14 aa, Severe acute respiratory syndrome-related coronavirus
  REGION 1..14: note = Table B: HLA-DRB1*04:01L HLA-DRB1*04:04L HLA-DRB1*11:04L HLA-DRB1*11:01L HLA-DRB3*01:01L HLA-DRB1*10:01L
  source 1..14: note = Severe acute respiratory syndrome coronavirus 2
LQQLRVESSSKLWA

SEQ ID NO: 12274 - protein, 14 aa, Severe acute respiratory syndrome-related coronavirus
  REGION 1..14: note = Table B: HLA-DRB1*04:01L HLA-DRB1*13:02L HLA-DRB1*11:03L HLA-DRB1*11:04L HLA-DRB1*14:02L HLA-DRB1*08:01L HLA-DRB1*11:01L HLA-DQA1*01-B1*05L HLA-DRB3*01:01L HLA-DRB1*07:01L HLA-DRB1*10:01L HLA-DRB1*15:01L
  source 1..14: note = Severe acute respiratory syndrome coronavirus 2
QQLRVESSSKLWAQ

SEQ ID NO: 12275 - protein, 13 aa, Severe acute respiratory syndrome-related coronavirus
  REGION 1..13: note = Table B: HLA-DRB1*04:01L HLA-DRB1*13:02L HLA-DRB1*08:77L HLA-DPA1*01:03-B1*03:01L HLA-DRB1*11:03L HLA-DRB5*01:01L HLA-DRB4*01:01L HLA-DRB1*09:01L HLA-DRB3*01:01L HLA-DRB1*07:01L
  source 1..13: note = Severe acute respiratory syndrome coronavirus 2
HNDILLAKDTTEA

SEQ ID NO: 12276 - protein, 13 aa, Severe acute respiratory syndrome-related coronavirus
  REGION 1..13: note = Table B: HLA-DRB1*04:01L HLA-DRB1*11:03L HLA-DRB1*11:04L HLA-DQA1*01:01-B1*05:01L HLA-DRB1*08:01L HLA-DRB1*11:01L HLA-DRB5*01:01L HLA-DRB1*13:01L HLA-DPA1*01:03-B1*04:01L HLA-DRB1*09:01L HLA-DPA1*01:03-B1*04:02L
  REGION 1..13: note = CONT. FROM ABOVE: HLA-DPA1*01:03-B1*104:01L HLA-DQA1*05:05-B1*03 :01L HLA-DPA1*01:02-B1*04:01L HLA-DRB1*07:01L HLA-DRB1*08:02L HL A-DRB1*08:03L
  source 1..13: note = Severe acute respiratory syndrome coronavirus 2
DILLAKDTTEAFE

SEQ ID NO: 12277 - protein, 12 aa, Severe acute respiratory syndrome-related coronavirus
  REGION 1..12: note = Table B: HLA-DRB1*04:01L HLA-DRB1*08:04L HLA-DRB1*08:77L HLA-DPA1*01:03-B1*03:01L HLA-DRB1*03:01L HLA-DRB1*11:04L HLA-DRB1*08:01L
  source 1..12: note = Severe acute respiratory syndrome coronavirus 2
LLAKDTTEAFEK

SEQ ID NO: 12278 - protein, 13 aa, Severe acute respiratory syndrome-related coronavirus
  REGION 1..13: note = Table B: HLA-DRB1*04:01L HLA-DRB1*04:04L HLA-DRB1*01:01L HLA-DRB1*08:04L HLA-DQA1*01-B1*05L HLA-DRB4*01:01L
  source 1..13: note = Severe acute respiratory syndrome coronavirus 2
EAFEKMVSLLSVL

SEQ ID NO: 12279 - protein, 10 aa, Severe acute respiratory syndrome-related coronavirus
  REGION 1..10: note = Table B: HLA-DRB1*04:01L HLA-DRB1*04:03L HLA-DRB1*13:02L HLA-DRB1*13:03L HLA-DRB1*01:03L HLA-DRB1*04:02L HLA-DRB1*01:01L HLA-DRB4*03:01NL HLA-DRB3*02:01L HLA-DRB1*14:01L HLA-DRB1*11:04L HLA-DRB1*14:02L HLA-DRB1*08:01L HLA-DRB5*01:01L
  REGION 1..10: note = CONT. FROM ABOVE: HLA-DPA1*01:03-B1*04:02L HLA-DRB1*12:01L HLA-D RB1*12:02L HLA-DPA1*03:01-B1*105:01L HLA-DQA1*03:01-B1*03:02M HL A-DQA1*05:05-B1*03:01L HLA-DRB1*14:17L HLA-DRB1*16:01L HLA-DQA1* 01:03-B1*06:01L HLA-DRB1*08:02L HLA-DQA1*02:01-B1*03:03L
  source 1..10: note = Severe acute respiratory syndrome coronavirus 2
SMQGAVDINK

SEQ ID NO: 12280 - protein, 14 aa, Severe acute respiratory syndrome-related coronavirus
  REGION 1..14: note = Table B: HLA-DRB1*04:01L HLA-DRB1*01:03L HLA-DRB1*04:04L HLA-DRB1*04:05L HLA-DRB1*01:02L HLA-DRB1*08:04L HLA-DRB3*02:01L HLA-DPA1*01:03-B1*03:01L HLA-DRB1*03:01L HLA-DRB1*11:03L HLA-DRB1*11:04L HLA-DRB1*14:02L HLA-DRB1*08:01L HLA-DRB1*11:01L
  REGION 1..14: note = CONT. FROM ABOVE: HLA-DRB1*04:08L
  source 1..14: note = Severe acute respiratory syndrome coronavirus 2
EEMLDNRATLQAIA

SEQ ID NO: 12281 - protein, 16 aa, Severe acute respiratory syndrome-related coronavirus
  REGION 1..16: note = Table B: HLA-DRB1*04:01L HLA-DRB1*13:02L HLA-DRB1*01:01L HLA-DRB1*08:04L HLA-DRB3*02:01L HLA-DRB1*11:02L HLA-DRB1*11:03L HLA-DRB1*11:01L HLA-DRB1*09:01L HLA-DRB3*01:01L HLA-DRB1*07:01L HLA-DRB1*08:02L HLA-DRB1*15:01L
  source 1..16: note = Severe acute respiratory syndrome coronavirus 2
RATLQAIASEFSSLPS

SEQ ID NO: 12282 - protein, 12 aa, Severe acute respiratory syndrome-related coronavirus
  REGION 1..12: note = Table B: HLA-DRB1*04:01L HLA-DRB1*11:03L
  source 1..12: note = Severe acute respiratory syndrome coronavirus 2
EFSSLPSYAAFA

SEQ ID NO: 12283 - protein, 12 aa, Severe acute respiratory syndrome-related coronavirus
  REGION 1..12: note = Table B: HLA-DRB1*04:01L HLA-DRB1*04:05L HLA-DRB1*01:01L HLA-DRB1*11:03L
  source 1..12: note = Severe acute respiratory syndrome coronavirus 2
FSSLPSYAAFAT

SEQ ID NO: 12284 - protein, 14 aa, Severe acute respiratory syndrome-related coronavirus
  REGION 1..14: note = Table B: HLA-DRB1*04:01L HLA-DRB1*01:01L HLA-DRB1*11:04L HLA-DRB1*11:01L HLA-DRB1*09:01L HLA-DRB1*07:01L
  source 1..14: note = Severe acute respiratory syndrome coronavirus 2
PSYAAFATAQEAYE

SEQ ID NO: 12285 - protein, 14 aa, Severe acute respiratory syndrome-related coronavirus
  REGION 1..14: note = Table B: HLA-DRB1*04:01L HLA-DRB1*11:03L HLA-DRB1*11:04L HLA-DRB1*11:01L HLA-DRB1*09:01L HLA-DRB1*07:01L
  source 1..14: note = Severe acute respiratory syndrome coronavirus 2
YAAFATAQEAYEQA

SEQ ID NO: 12286 - protein, 13 aa, Severe acute respiratory syndrome-related coronavirus
  REGION 1..13: note = Table B: HLA-DRB1*04:01L HLA-DRB1*01:02L HLA-DPA1*01:03-B1*03:01L HLA-DRB1*11:01L HLA-DRB4*01:01L HLA-DRB1*07:01L
  source 1..13: note = Severe acute respiratory syndrome coronavirus 2
QEAYEQAVANGDS

SEQ ID NO: 12287 - protein, 13 aa, Severe acute respiratory syndrome-related coronavirus
  REGION 1..13: note = Table B: HLA-DRB1*04:01L HLA-DRB1*01:01L HLA-DRB3*02:01L HLA-DRB1*11:01L HLA-DRB4*01:01L HLA-DRB1*07:01L HLA-DRB1*15:03L
  source 1..13: note = Severe acute respiratory syndrome coronavirus 2
EAYEQAVANGDSE

SEQ ID NO: 12288 - protein, 14 aa, Severe acute respiratory syndrome-related coronavirus
  REGION 1..14: note = Table B: HLA-DRB1*04:01L HLA-DRB1*08:04L HLA-DRB1*14:01L HLA-DRB1*11:04L HLA-DRB3*01:01L HLA-DRB1*07:01L HLA-DRB1*10:01L HLA-DRB1*15:03L
  source 1..14: note = Severe acute respiratory syndrome coronavirus 2
KKSLNVAKSEFDRD

SEQ ID NO: 12289 - protein, 11 aa, Severe acute respiratory syndrome-related coronavirus
  REGION 1..11: note = Table B: HLA-DRB1*04:01L HLA-DQA1*05:05-B1*03:01L
  source 1..11: note = Severe acute respiratory syndrome coronavirus 2
KMADQAMTQMY

SEQ ID NO: 12290 - protein, 16 aa, Severe acute respiratory syndrome-related coronavirus
  REGION 1..16: note = Table B: HLA-DRB1*04:01L HLA-DPA1*01:03-B1*04:01L HLA-DQA1*05:05-B1*03:116L HLA-DRB1*12:02L HLA-DPA1*01:03-B1*104:01L
  source 1..16: note = Severe acute respiratory syndrome coronavirus 2
ADQAMTQMYKQARSED

SEQ ID NO: 12291 - protein, 16 aa, Severe acute respiratory syndrome-related coronavirus
  REGION 1..16: note = Table B: HLA-DRB1*04:01L HLA-DQA1*05:05-B1*03:116L HLA-DPA1*01:03-B1*104:01L
  source 1..16: note = Severe acute respiratory syndrome coronavirus 2
DQAMTQMYKQARSEDK

SEQ ID NO: 12292 - protein, 14 aa, Severe acute respiratory syndrome-related coronavirus
  REGION 1..14: note = Table B: HLA-DRB1*04:01L
  source 1..14: note = Severe acute respiratory syndrome coronavirus 2
TQMYKQARSEDKRA

SEQ ID NO: 12293 - protein, 13 aa, Severe acute respiratory syndrome-related coronavirus
  REGION 1..13: note = Table B: HLA-DRB1*04:01L HLA-DRB1*13:02L HLA-DRB1*13:03L HLA-DQA1*01:02-B1*06:02L HLA-DRB4*03:01NL HLA-DPA1*01:03-B1*03:01L HLA-DRB1*14:01L HLA-DRB1*11:04L HLA-DRB1*08:01L HLA-DRB3*01:01L HLA-DPA1*03:01-B1*105:01L
  REGION 1..13: note = CONT. FROM ABOVE: HLA-DRB1*14:54L HLA-DPA1*01:03-B1*104:01L HLA- DRB1*07:01L HLA-DRB1*10:01L
  source 1..13: note = Severe acute respiratory syndrome coronavirus 2
TMLRKLDNDALNN

SEQ ID NO: 12294 - protein, 15 aa, Severe acute respiratory syndrome-related coronavirus
  REGION 1..15: note = Table B: HLA-DRB1*04:01L HLA-DRB1*01:01L HLA-DPA1*01:03-B1*02:01L
  source 1..15: note = Severe acute respiratory syndrome coronavirus 2
MLRKLDNDALNNIIN

SEQ ID NO: 12295 - protein, 15 aa, Severe acute respiratory syndrome-related coronavirus
  REGION 1..15: note = Table B: HLA-DRB1*04:01L HLA-DPA1*01:03-B1*02:01L
  source 1..15: note = Severe acute respiratory syndrome coronavirus 2
LRKLDNDALNNIINN

SEQ ID NO: 12296 - protein, 14 aa, Severe acute respiratory syndrome-related coronavirus
  REGION 1..14: note = Table B: HLA-DRB1*04:01L HLA-DRB1*11:01L HLA-DRB4*01:01L HLA-DRB3*01:01L HLA-DPA1*01:03-B1*02:01L
  source 1..14: note = Severe acute respiratory syndrome coronavirus 2
VPLNIIPLTTAAKL

SEQ ID NO: 12297 - protein, 14 aa, Severe acute respiratory syndrome-related coronavirus
  REGION 1..14: note = Table B: HLA-DRB1*04:01L HLA-DRB1*01:01L HLA-DRB1*11:03L HLA-DRB1*11:04L HLA-DRB1*08:01L HLA-DRB1*11:01L HLA-DRB1*09:01L HLA-DRB3*01:01L HLA-DRB1*07:01L HLA-DRB1*08:03L HLA-DRB1*15:01L
  source 1..14: note = Severe acute respiratory syndrome coronavirus 2
AKLMVVIPDYNTYK

SEQ ID NO: 12298 - protein, 14 aa, Severe acute respiratory syndrome-related coronavirus
  REGION 1..14: note = Table B: HLA-DRB1*04:01L HLA-DRB1*08:01L HLA-DPA1*01:03-B1*02:01L
  source 1..14: note = Severe acute respiratory syndrome coronavirus 2
LMVVIPDYNTYKNT

SEQ ID NO: 12299 - protein, 14 aa, Severe acute respiratory syndrome-related coronavirus
  REGION 1..14: note = Table B: HLA-DRB1*04:01L HLA-DRB1*01:03L HLA-DRB1*04:04L HLA-DRB1*01:02L HLA-DRB1*08:01L HLA-DQA1*05:05-B1*03:19L HLA-DRB1*12:01L HLA-DPA1*03:01-B1*105:01L HLA-DQA1*05:05-B1*03:01L HLA-DQA1*02:01-B1*03:03L
  source 1..14: note = Severe acute respiratory syndrome coronavirus 2
YNTYKNTCDGTTFT

SEQ ID NO: 12300 - protein, 15 aa, Severe acute respiratory syndrome-related coronavirus
  REGION 1..15: note = Table B: HLA-DRB1*04:01L HLA-DRB1*04:04L HLA-DRB1*14:01L HLA-DRB1*07:01L HLA-DRB1*08:02L
  source 1..15: note = Severe acute respiratory syndrome coronavirus 2
DGTTFTYASALWEIQ

SEQ ID NO: 12301 - protein, 14 aa, Severe acute respiratory syndrome-related coronavirus
  REGION 1..14: note = Table B: HLA-DRB1*04:01L HLA-DRB1*03:01L HLA-DRB1*11:02L HLA-DQA1*01:01-B1*05:01L HLA-DRB1*11:01L HLA-DRB5*01:01L HLA-DRB4*02:01NL HLA-DRB1*13:01L HLA-DPA1*01:03-B1*04:02L HLA-DPA1*01:03-B1*02:01L HLA-DPA1*01:03-B1*104:01L
  REGION 1..14: note = CONT. FROM ABOVE: HLA-DRB1*08:02L
  source 1..14: note = Severe acute respiratory syndrome coronavirus 2
DSKIVQLSEISMDN

SEQ ID NO: 12302 - protein, 12 aa, Severe acute respiratory syndrome-related coronavirus
  REGION 1..12: note = Table B: HLA-DRB1*04:01L HLA-DRB1*13:02L HLA-DRB1*08:04L HLA-DPA1*01:03-B1*03:01L HLA-DRB1*11:03L HLA-DRB1*11:04L HLA-DRB1*08:01L HLA-DRB1*11:01L HLA-DQA1*01-B1*05L HLA-DQA1*05:05-B1*03:19L HLA-DRB1*04:10L
  REGION 1..12: note = CONT. FROM ABOVE: HLA-DPA1*03:01-B1*105:01L
  source 1..12: note = Severe acute respiratory syndrome coronavirus 2
IVTALRANSAVK

SEQ ID NO: 12303 - protein, 14 aa, Severe acute respiratory syndrome-related coronavirus
  REGION 1..14: note = Table B: HLA-DRB1*04:01L HLA-DRB3*02:01L HLA-DRB1*11:02L HLA-DRB1*11:01L HLA-DQA1*05:05-B1*03:19L HLA-DRB1*09:01L HLA-DRB3*01:01L HLA-DPA1*02:01-B1*13:01L HLA-DRB1*07:01L
  source 1..14: note = Severe acute respiratory syndrome coronavirus 2
DNALAYYNTTKGGR

SEQ ID NO: 12304 - protein, 14 aa, Severe acute respiratory syndrome-related coronavirus
  REGION 1..14: note = Table B: HLA-DRB1*04:01L HLA-DRB1*11:04L HLA-DRB1*08:01L HLA-DPA1*01:03-B1*04:02L HLA-DRB1*10:01L HLA-DRB1*08:03L
  source 1..14: note = Severe acute respiratory syndrome coronavirus 2
RFVLALLSDLQDLK

SEQ ID NO: 12305 - protein, 15 aa, Severe acute respiratory syndrome-related coronavirus
  REGION 1..15: note = Table B: HLA-DRB1*04:01L HLA-DRB1*01:01L HLA-DRB1*11:03L HLA-DRB1*14:02L HLA-DRB1*10:01L
  source 1..15: note = Severe acute respiratory syndrome coronavirus 2
DLQDLKWARFPKSDG

SEQ ID NO: 12306 - protein, 16 aa, Severe acute respiratory syndrome-related coronavirus
  REGION 1..16: note = Table B: HLA-DRB1*04:01L HLA-DRB1*01:01L HLA-DRB3*02:01L HLA-DRB1*11:02L HLA-DQA1*05:01-B1*02:01L
  source 1..16: note = Severe acute respiratory syndrome coronavirus 2
LQDLKWARFPKSDGTG

SEQ ID NO: 12307 - protein, 13 aa, Severe acute respiratory syndrome-related coronavirus
  REGION 1..13: note = Table B: HLA-DRB1*04:01L HLA-DRB1*01:01L HLA-DRB1*08:04L HLA-DRB1*08:77L HLA-DRB3*02:01L HLA-DRB1*11:03L HLA-DRB1*11:04L HLA-DRB1*14:02L HLA-DQA1*01:01-B1*05:01L HLA-DRB1*11:01L HLA-DRB1*09:01L HLA-DRB1*12:02L HLA-DRB3*01:01L
  REGION 1..13: note = CONT. FROM ABOVE: HLA-DPA1*01:03-B1*02:01L HLA-DPA1*01:03-B1*104 :01L HLA-DRB1*07:01L HLA-DRB1*08:03L
  source 1..13: note = Severe acute respiratory syndrome coronavirus 2
TGTIYTELEPPCR

SEQ ID NO: 12308 - protein, 14 aa, Severe acute respiratory syndrome-related coronavirus
  REGION 1..14: note = Table B: HLA-DRB1*04:01L HLA-DRB1*13:02L HLA-DRB1*04:02L HLA-DRB1*04:04L HLA-DRB1*01:01L HLA-DRB3*02:01L HLA-DRB1*11:02L HLA-DRB1*11:03L HLA-DRB1*14:02L HLA-DQA1*01-B1*05L HLA-DQA1*05:01-B1*02:01L HLA-DPA1*01:03-B1*04:01L
  REGION 1..14: note = CONT. FROM ABOVE: HLA-DQA1*05:05-B1*03:116L HLA-DRB1*09:01L HLA- DRB3*01:01L HLA-DPA1*01:03-B1*02:01L HLA-DPA1*01:03-B1*104:01L H LA-DRB1*07:01L HLA-DRB1*10:01L HLA-DRB1*08:02L
  source 1..14: note = Severe acute respiratory syndrome coronavirus 2
VKYLYFIKGLNNLN

SEQ ID NO: 12309 - protein, 13 aa, Severe acute respiratory syndrome-related coronavirus
  REGION 1..13: note = Table B: HLA-DRB1*04:01L HLA-DRB1*01:01L HLA-DPA1*01:03-B1*03:01L HLA-DRB1*11:03L HLA-DRB1*14:02L HLA-DRB1*11:01L HLA-DQA1*05:05-B1*03:19L HLA-DQA1*05:01-B1*02:01L HLA-DPA1*01:03-B1*04:02L
  REGION 1..13: note = CONT. FROM ABOVE: HLA-DPA1*01:03-B1*02:01L HLA-DRB1*07:01L HLA-D RB1*08:03L
  source 1..13: note = Severe acute respiratory syndrome coronavirus 2
LYFIKGLNNLNRG

SEQ ID NO: 12310 - protein, 16 aa, Severe acute respiratory syndrome-related coronavirus
  REGION 1..16: note = Table B: HLA-DRB1*04:01L HLA-DRB1*01:01L HLA-DRB1*08:77L HLA-DRB1*11:03L HLA-DRB1*11:04L HLA-DRB1*14:02L HLA-DQA1*01-B1*05L
  source 1..16: note = Severe acute respiratory syndrome coronavirus 2
AATVRLQAGNATEVPA

SEQ ID NO: 12311 - protein, 15 aa, Severe acute respiratory syndrome-related coronavirus
  REGION 1..15: note = Table B: HLA-DRB1*04:01L HLA-DRB1*04:04L HLA-DRB1*01:01L HLA-DRB3*02:01L HLA-DRB1*14:01L HLA-DRB1*11:03L HLA-DRB1*11:04L HLA-DQA1*01-B1*05L HLA-DQA1*05:05-B1*03:116L HLA-DRB1*04:10L HLA-DRB1*09:01L HLA-DRB1*14:54L HLA-DRB1*10:01L HLA-DRB1*08:03L
  source 1..15: note = Severe acute respiratory syndrome coronavirus 2
TVRLQAGNATEVPAN

SEQ ID NO: 12312 - protein, 11 aa, Severe acute respiratory syndrome-related coronavirus
  REGION 1..11: note = Table B: HLA-DRB1*04:01L HLA-DRB3*02:01L HLA-DRB1*11:03L HLA-DRB1*11:01L HLA-DRB5*01:01L HLA-DRB1*12:02L HLA-DRB1*08:02L
  source 1..11: note = Severe acute respiratory syndrome coronavirus 2
AVDAAKAYKDY

SEQ ID NO: 12313 - protein, 15 aa, Severe acute respiratory syndrome-related coronavirus
  REGION 1..15: note = Table B: HLA-DRB1*04:01L
  source 1..15: note = Severe acute respiratory syndrome coronavirus 2
AKAYKDYLASGGQPI

SEQ ID NO: 12314 - protein, 12 aa, Severe acute respiratory syndrome-related coronavirus
  REGION 1..12: note = Table B: HLA-DRB1*04:01L HLA-DRB1*04:04L HLA-DQA1*01:02-B1*06:02L HLA-DRB1*03:01L HLA-DRB1*08:01L HLA-DRB1*11:01L HLA-DQA1*01-B1*05L HLA-DRB4*02:01NL HLA-DRB4*01:01L HLA-DPA1*01:03-B1*04:02L HLA-DRB3*01:01L
  REGION 1..12: note = CONT. FROM ABOVE: HLA-DPA1*02:01-B1*13:01L HLA-DPA1*01:03-B1*02: 01L HLA-DPA1*01:03-B1*104:01L HLA-DPA1*01:02-B1*04:01L HLA-DRB1* 10:01L HLA-DRB1*08:02L HLA-DRB1*08:03L HLA-DRB1*15:01L
  source 1..12: note = Severe acute respiratory syndrome coronavirus 2
KDYLASGGQPIT

SEQ ID NO: 12315 - protein, 12 aa, Severe acute respiratory syndrome-related coronavirus
  REGION 1..12: note = Table B: HLA-DRB1*04:01L HLA-DRB1*04:04L HLA-DRB1*03:01L HLA-DRB1*08:01L HLA-DRB1*11:01L HLA-DQA1*01-B1*05L HLA-DRB4*02:01NL HLA-DRB5*02:02L HLA-DRB4*01:01L HLA-DQA1*05:05-B1*03:116L HLA-DPA1*01:03-B1*04:02L
  REGION 1..12: note = CONT. FROM ABOVE: HLA-DRB3*01:01L HLA-DPA1*02:01-B1*13:01L HLA-D PA1*01:03-B1*02:01L HLA-DPA1*01:03-B1*104:01L HLA-DRB1*08:02L HL A-DRB1*08:03L HLA-DRB1*15:01L
  source 1..12: note = Severe acute respiratory syndrome coronavirus 2
DYLASGGQPITN

SEQ ID NO: 12316 - protein, 14 aa, Severe acute respiratory syndrome-related coronavirus
  REGION 1..14: note = Table B: HLA-DRB1*04:01L HLA-DRB1*13:02L HLA-DRB1*08:04L HLA-DRB1*14:01L HLA-DRB1*11:04L HLA-DRB4*01:01L HLA-DRB1*10:01L HLA-DRB1*08:03L
  source 1..14: note = Severe acute respiratory syndrome coronavirus 2
AITVTPEANMDQES

SEQ ID NO: 12317 - protein, 12 aa, Severe acute respiratory syndrome-related coronavirus
  REGION 1..12: note = Table B: HLA-DRB1*04:01L HLA-DRB1*13:03L HLA-DRB1*01:03L HLA-DRB1*04:02L HLA-DRB1*04:04L HLA-DRB1*04:05L HLA-DQA1*01:02-B1*06:02L HLA-DRB1*01:02L HLA-DRB4*03:01NL HLA-DRB1*08:04L HLA-DRB1*11:04L HLA-DRB1*08:01L HLA-DRB1*11:01L
  REGION 1..12: note = CONT. FROM ABOVE: HLA-DRB1*04:10L HLA-DRB1*12:01L HLA-DQA1*03:01 -B1*03:02L HLA-DRB1*14:54L HLA-DRB1*10:01L HLA-DRB1*16:01L HLA-D RB1*08:03L HLA-DQA1*02:01-B1*03:03L HLA-DRB1*15:03L
  source 1..12: note = Severe acute respiratory syndrome coronavirus 2
GKYVQIPTTCAN

SEQ ID NO: 12318 - protein, 14 aa, Severe acute respiratory syndrome-related coronavirus
  REGION 1..14: note = Table B: HLA-DRB1*04:01L HLA-DRB1*01:01L HLA-DRB1*11:01L HLA-DRB3*01:01L
  source 1..14: note = Severe acute respiratory syndrome coronavirus 2
REPMLQSADAQSFL

SEQ ID NO: 12319 - protein, 10 aa, Severe acute respiratory syndrome-related coronavirus
  REGION 1..10: note = Table B: HLA-DRB1*04:01L HLA-DRB1*13:02M HLA-DRB1*13:03M HLA-DRB1*04:02L HLA-DRB1*01:01L HLA-DRB4*03:01NL HLA-DRB3*02:01L HLA-DRB1*14:01L HLA-DRB1*11:04L HLA-DRB1*14:02L HLA-DRB1*08:01M HLA-DRB5*01:01L HLA-DPA1*01:03-B1*04:02L HLA-DRB1*12:01M
  REGION 1..10: note = CONT. FROM ABOVE: HLA-DRB1*12:02L HLA-DQA1*03:01-B1*03:02M HLA-D QA1*05:05-B1*03:01M HLA-DRB1*14:17L HLA-DRB1*16:01L HLA-DQA1*01: 03-B1*06:01L HLA-DRB1*08:02L HLA-DQA1*02:01-B1*03:03L HLA-DRB1*1 5:01L
  source 1..10: note = Severe acute respiratory syndrome coronavirus 2
SADAQSFLNR

SEQ ID NO: 12320 - protein, 13 aa, Severe acute respiratory syndrome-related coronavirus
  REGION 1..13: note = Table B: HLA-DRB1*04:01L HLA-DRB4*03:01NL HLA-DRB3*02:01L HLA-DRB1*11:03L HLA-DRB1*14:02L HLA-DRB1*12:02L HLA-DRB1*14:54L HLA-DPA1*01:03-B1*02:01L HLA-DPA1*01:03-B1*104:01L HLA-DQA1*05:05-B1*03:01L HLA-DRB1*07:01L HLA-DRB1*08:02L
  source 1..13: note = Severe acute respiratory syndrome coronavirus 2
DVVYRAFDIYNDK

SEQ ID NO: 12321 - protein, 12 aa, Severe acute respiratory syndrome-related coronavirus
  REGION 1..12: note = Table B: HLA-DRB1*04:01L HLA-DRB1*01:03L HLA-DRB1*04:04L HLA-DRB1*04:05L HLA-DQA1*01:02-B1*06:02L HLA-DRB1*01:01L HLA-DRB1*08:04L HLA-DRB1*14:01L HLA-DRB1*11:04L HLA-DRB1*08:01L HLA-DRB1*11:01L HLA-DQA1*01-B1*05L HLA-DQA1*05:05-B1*03:19L
  REGION 1..12: note = CONT. FROM ABOVE: HLA-DRB1*04:10L HLA-DPA1*01:03-B1*04:02L HLA-D RB1*12:01L HLA-DPA1*03:01-B1*105:01L HLA-DQA1*03:01-B1*03:02L HL A-DQA1*05:05-B1*03:01L HLA-DRB1*10:01L HLA-DQA1*02:01-B1*03:03L HLA-DRB1*15:03L
  source 1..12: note = Severe acute respiratory syndrome coronavirus 2
IYNLLKDCPAVA

SEQ ID NO: 12322 - protein, 10 aa, Severe acute respiratory syndrome-related coronavirus
  REGION 1..10: note = Table B: HLA-DRB1*04:01L HLA-DRB1*04:03L HLA-DRB1*13:02L HLA-DRB1*13:03L HLA-DRB1*01:03L HLA-DRB1*04:02L HLA-DRB1*04:04L HLA-DRB1*04:05L HLA-DRB1*01:02L HLA-DRB4*03:01NL HLA-DRB1*14:01L HLA-DRB1*11:04L HLA-DRB1*08:01L HLA-DQA1*01-B1*05L
  REGION 1..10: note = CONT. FROM ABOVE: HLA-DRB1*04:10L HLA-DRB1*12:01L HLA-DRB3*01:01 L HLA-DQA1*03:01-B1*03:02L HLA-DRB1*14:54L HLA-DRB1*14:17L HLA-D RB1*10:01L HLA-DRB1*16:01L HLA-DRB1*04:08L HLA-DQA1*02:01-B1*03: 03L
  source 1..10: note = Severe acute respiratory syndrome coronavirus 2
FRIDGDMVPH

SEQ ID NO: 12323 - protein, 15 aa, Severe acute respiratory syndrome-related coronavirus
  REGION 1..15: note = Table B: HLA-DRB1*04:01L HLA-DRB1*08:04L HLA-DRB1*08:77L HLA-DRB3*02:01L HLA-DPA1*01:03-B1*03:01L HLA-DPA1*03:01-B1*04:02L HLA-DRB1*11:02L HLA-DRB1*14:02L HLA-DRB1*14:54L HLA-DRB1*10:01L HLA-DRB1*08:03L
  source 1..15: note = Severe acute respiratory syndrome coronavirus 2
IDGDMVPHISRQRLT

SEQ ID NO: 12324 - protein, 14 aa, Severe acute respiratory syndrome-related coronavirus
  REGION 1..14: note = Table B: HLA-DRB1*04:01L HLA-DRB1*04:02L HLA-DRB1*04:04L HLA-DRB1*01:01L HLA-DRB1*08:04L HLA-DPA1*01:03-B1*03:01L HLA-DRB1*14:01L HLA-DRB1*11:04L HLA-DRB1*11:01L HLA-DPA1*01:03-B1*04:01L HLA-DRB3*01:01L
  REGION 1..14: note = CONT. FROM ABOVE: HLA-DPA1*01:03-B1*02:01L HLA-DPA1*01:03-B1*104 :01L HLA-DRB1*07:01L HLA-DRB1*10:01L HLA-DRB1*08:03L
  source 1..14: note = Severe acute respiratory syndrome coronavirus 2
LTKYTMADLVYALR

SEQ ID NO: 12325 - protein, 14 aa, Severe acute respiratory syndrome-related coronavirus
  REGION 1..14: note = Table B: HLA-DRB1*04:01L HLA-DRB1*11:01L HLA-DRB1*15:01L
  source 1..14: note = Severe acute respiratory syndrome coronavirus 2
KDWYDFVENPDILR

SEQ ID NO: 12326 - protein, 14 aa, Severe acute respiratory syndrome-related coronavirus
  REGION 1..14: note = Table B: HLA-DRB1*04:01L HLA-DRB1*08:04L HLA-DRB1*11:02L HLA-DRB1*10:01L HLA-DRB1*15:01L
  source 1..14: note = Severe acute respiratory syndrome coronavirus 2
ILRVYANLGERVRQ

SEQ ID NO: 12327 - protein, 16 aa, Severe acute respiratory syndrome-related coronavirus
  REGION 1..16: note = Table B: HLA-DRB1*04:01L HLA-DPA1*01:03-B1*04:02L
  source 1..16: note = Severe acute respiratory syndrome coronavirus 2
NAGIVGVLTLDNQDLN

SEQ ID NO: 12328 - protein, 13 aa, Severe acute respiratory syndrome-related coronavirus
  REGION 1..13: note = Table B: HLA-DRB1*04:01L HLA-DRB1*13:02L HLA-DRB1*13:03L HLA-DRB1*01:03L HLA-DRB1*04:04L HLA-DRB1*01:02L HLA-DRB1*08:04L HLA-DRB1*08:77L HLA-DRB3*02:01L HLA-DPA1*01:03-B1*03:01L HLA-DRB1*14:01L HLA-DRB1*11:03L HLA-DRB1*11:04L HLA-DRB1*14:02L
  REGION 1..13: note = CONT. FROM ABOVE: HLA-DRB5*01:01L HLA-DRB1*12:02L HLA-DRB3*01:01 L HLA-DPA1*03:01-B1*105:01L HLA-DRB1*10:01L HLA-DRB1*04:08L HLA- DRB1*08:03L HLA-DRB1*15:03L
  source 1..13: note = Severe acute respiratory syndrome coronavirus 2
VGVLTLDNQDLNG

SEQ ID NO: 12329 - protein, 16 aa, Severe acute respiratory syndrome-related coronavirus
  REGION 1..16: note = Table B: HLA-DRB1*04:01L HLA-DRB4*01:01L
  source 1..16: note = Severe acute respiratory syndrome coronavirus 2
NGNWYDFGDFIQTTPG

SEQ ID NO: 12330 - protein, 14 aa, Severe acute respiratory syndrome-related coronavirus
  REGION 1..14: note = Table B: HLA-DRB1*04:01L HLA-DRB1*01:01L HLA-DRB1*08:04L HLA-DRB1*03:01L HLA-DRB1*08:01L HLA-DRB1*11:01L HLA-DRB5*01:01L HLA-DRB4*02:01NL HLA-DRB4*01:01L HLA-DRB3*01:01L HLA-DPA1*02:01-B1*13:01L HLA-DPA1*01:03-B1*104:01L
  REGION 1..14: note = CONT. FROM ABOVE: HLA-DRB1*08:02L HLA-DRB1*08:03L HLA-DRB1*15:01 L
  source 1..14: note = Severe acute respiratory syndrome coronavirus 2
GDFIQTTPGSGVPV

SEQ ID NO: 12331 - protein, 15 aa, Severe acute respiratory syndrome-related coronavirus
  REGION 1..15: note = Table B: HLA-DRB1*04:01L HLA-DQA1*05:01-B1*02:01L
  source 1..15: note = Severe acute respiratory syndrome coronavirus 2
MPILTLTRALTAESH

SEQ ID NO: 12332 - protein, 14 aa, Severe acute respiratory syndrome-related coronavirus
  REGION 1..14: note = Table B: HLA-DRB1*04:01L HLA-DRB1*08:04L HLA-DPA1*01:03-B1*03:01L HLA-DRB1*11:04L HLA-DRB1*08:01L HLA-DPA1*02:01-B1*13:01L HLA-DRB1*10:01L
  source 1..14: note = Severe acute respiratory syndrome coronavirus 2
LTLTRALTAESHVD

SEQ ID NO: 12333 - protein, 13 aa, Severe acute respiratory syndrome-related coronavirus
  REGION 1..13: note = Table B: HLA-DRB1*04:01L HLA-DRB1*04:02L HLA-DRB1*04:04L HLA-DRB1*08:77L HLA-DRB3*02:01L HLA-DRB1*11:03L HLA-DRB1*11:04L HLA-DRB1*11:01L HLA-DQA1*05:05-B1*03:19L HLA-DRB1*13:01L HLA-DRB4*01:01L HLA-DPA1*01:03-B1*04:01L
  REGION 1..13: note = CONT. FROM ABOVE: HLA-DPA1*01:03-B1*04:02L HLA-DPA1*01:03-B1*02: 01L HLA-DRB1*14:17L HLA-DRB1*10:01L HLA-DQA1*01:03-B1*06:01L HLA -DRB1*08:03L HLA-DQA1*02:01-B1*03:03L
  source 1..13: note = Severe acute respiratory syndrome coronavirus 2
DLLKYDFTEERLK

SEQ ID NO: 12334 - protein, 12 aa, Severe acute respiratory syndrome-related coronavirus
  REGION 1..12: note = Table B: HLA-DRB1*04:01L HLA-DRB4*03:01NL HLA-DRB1*08:04L HLA-DRB1*08:77L HLA-DRB3*02:01L HLA-DRB1*03:01L HLA-DRB1*11:02L HLA-DRB1*11:03L HLA-DRB1*11:04L HLA-DRB1*11:01L HLA-DQA1*01-B1*05L HLA-DRB4*01:01L HLA-DPA1*01:03-B1*04:01L
  REGION 1..12: note = CONT. FROM ABOVE: HLA-DRB1*12:02L HLA-DRB3*01:01L HLA-DRB1*14:54 L HLA-DQA1*05:05-B1*03:01L HLA-DRB1*04:08L
  source 1..12: note = Severe acute respiratory syndrome coronavirus 2
KIFVDGVPFVVS

SEQ ID NO: 12335 - protein, 14 aa, Severe acute respiratory syndrome-related coronavirus
  REGION 1..14: note = Table B: HLA-DRB1*04:01L HLA-DRB1*11:02L
  source 1..14: note = Severe acute respiratory syndrome coronavirus 2
GVPFVVSTGYHFRE

SEQ ID NO: 12336 - protein, 14 aa, Severe acute respiratory syndrome-related coronavirus
  REGION 1..14: note = Table B: HLA-DRB1*04:01L HLA-DRB3*01:01L HLA-DRB1*08:02L
  source 1..14: note = Severe acute respiratory syndrome coronavirus 2
HFRELGVVHNQDVN

SEQ ID NO: 12337 - protein, 13 aa, Severe acute respiratory syndrome-related coronavirus
  REGION 1..13: note = Table B: HLA-DRB1*04:01L HLA-DPA1*01:03-B1*03:01L HLA-DRB3*01:01L HLA-DQA1*05:05-B1*03:01L
  source 1..13: note = Severe acute respiratory syndrome coronavirus 2
GVVHNQDVNLHSS

SEQ ID NO: 12338 - protein, 15 aa, Severe acute respiratory syndrome-related coronavirus
  REGION 1..15: note = Table B: HLA-DRB1*04:01L HLA-DRB1*01:01L HLA-DRB1*14:01L HLA-DRB1*11:04L HLA-DRB3*01:01L
  source 1..15: note = Severe acute respiratory syndrome coronavirus 2
RLSFKELLVYAADPA

SEQ ID NO: 12339 - protein, 13 aa, Severe acute respiratory syndrome-related coronavirus
  REGION 1..13: note = Table B: HLA-DRB1*04:01L HLA-DRB1*13:02L HLA-DRB1*01:01L HLA-DRB1*08:04L HLA-DRB1*08:77L HLA-DRB3*02:01L HLA-DPA1*01:03-B1*03:01L HLA-DRB1*11:03L HLA-DRB1*11:04L HLA-DRB1*14:02L HLA-DQA1*01:01-B1*05:01L HLA-DRB1*08:01L
  REGION 1..13: note = CONT. FROM ABOVE: HLA-DPA1*01:03-B1*04:01L HLA-DRB1*09:01L HLA-D PA1*01:03-B1*04:02L HLA-DRB1*12:02L HLA-DRB3*01:01L HLA-DPA1*01: 03-B1*104:01L HLA-DRB1*07:01L HLA-DRB1*10:01L HLA-DRB1*08:03L HL A-DRB1*15:01L
  source 1..13: note = Severe acute respiratory syndrome coronavirus 2
KELLVYAADPAMH

SEQ ID NO: 12340 - protein, 13 aa, Severe acute respiratory syndrome-related coronavirus
  REGION 1..13: note = Table B: HLA-DRB1*04:01L HLA-DRB1*03:01L HLA-DRB1*08:01L HLA-DRB1*11:01L HLA-DRB1*13:01L HLA-DRB4*01:01L HLA-DPA1*01:03-B1*04:01L HLA-DPA1*01:03-B1*04:02L HLA-DPA1*01:03-B1*104:01L HLA-DRB1*07:01L
  source 1..13: note = Severe acute respiratory syndrome coronavirus 2
ELLVYAADPAMHA

SEQ ID NO: 12341 - protein, 15 aa, Severe acute respiratory syndrome-related coronavirus
  REGION 1..15: note = Table B: HLA-DRB1*04:01L HLA-DRB1*03:01L HLA-DRB1*11:02L HLA-DPA1*01:03-B1*02:01L HLA-DRB1*08:02L
  source 1..15: note = Severe acute respiratory syndrome coronavirus 2
DPAMHAASGNLLLDK

SEQ ID NO: 12342 - protein, 11 aa, Severe acute respiratory syndrome-related coronavirus
  REGION 1..11: note = Table B: HLA-DRB1*04:01L HLA-DRB1*04:04L HLA-DRB1*01:01L HLA-DRB1*01:02L HLA-DRB4*03:01NL HLA-DRB1*08:04L HLA-DRB1*11:03L HLA-DRB1*11:04L HLA-DQA1*01-B1*05L HLA-DRB4*01:01L HLA-DRB1*04:10L HLA-DRB1*12:02L HLA-DRB1*14:54L
  REGION 1..11: note = CONT. FROM ABOVE: HLA-DQA1*05:05-B1*03:01L HLA-DRB1*10:01L HLA-D RB1*04:08L HLA-DRB1*08:03L
  source 1..11: note = Severe acute respiratory syndrome coronavirus 2
VAALTNNVAFQ

SEQ ID NO: 12343 - protein, 14 aa, Severe acute respiratory syndrome-related coronavirus
  REGION 1..14: note = Table B: HLA-DRB1*04:01L HLA-DRB1*04:02L HLA-DRB1*04:04L HLA-DRB1*11:04L HLA-DRB3*01:01L
  source 1..14: note = Severe acute respiratory syndrome coronavirus 2
KDFYDFAVSKGFFK

SEQ ID NO: 12344 - protein, 13 aa, Severe acute respiratory syndrome-related coronavirus
  REGION 1..13: note = Table B: HLA-DRB1*04:01L HLA-DRB1*04:04L HLA-DRB1*01:01L HLA-DRB1*11:01L HLA-DRB3*01:01L HLA-DRB1*07:01L
  source 1..13: note = Severe acute respiratory syndrome coronavirus 2
KGFFKEGSSVELK

SEQ ID NO: 12345 - protein, 13 aa, Severe acute respiratory syndrome-related coronavirus
  REGION 1..13: note = Table B: HLA-DRB1*04:01L HLA-DRB1*13:02L HLA-DRB1*04:04L HLA-DRB1*01:01L HLA-DRB1*11:04L HLA-DRB1*11:01L HLA-DRB3*01:01L HLA-DRB1*07:01L
  source 1..13: note = Severe acute respiratory syndrome coronavirus 2
GFFKEGSSVELKH

SEQ ID NO: 12346 - protein, 12 aa, Severe acute respiratory syndrome-related coronavirus
  REGION 1..12: note = Table B: HLA-DRB1*04:01L HLA-DRB1*04:05L HLA-DRB1*01:02L HLA-DRB1*08:04L HLA-DRB1*15:03L
  source 1..12: note = Severe acute respiratory syndrome coronavirus 2
FFFAQDGNAAIS

SEQ ID NO: 12347 - protein, 14 aa, Severe acute respiratory syndrome-related coronavirus
  REGION 1..14: note = Table B: HLA-DRB1*04:01L HLA-DRB1*04:03L HLA-DRB1*13:03L HLA-DRB1*04:02L HLA-DRB1*04:04L HLA-DRB1*01:01L HLA-DRB1*08:04L HLA-DRB1*08:77L HLA-DRB3*02:01L HLA-DRB1*03:01L HLA-DRB1*11:02L HLA-DRB1*11:03L HLA-DRB1*13:01L HLA-DQA1*05:05-B1*03:116L
  REGION 1..14: note = CONT. FROM ABOVE: HLA-DRB1*09:01L HLA-DRB1*10:01L HLA-DRB1*08:02 L HLA-DRB1*08:03L
  source 1..14: note = Severe acute respiratory syndrome coronavirus 2
DYYRYNLPTMCDIR

SEQ ID NO: 12348 - protein, 11 aa, Severe acute respiratory syndrome-related coronavirus
  REGION 1..11: note = Table B: HLA-DRB1*04:01L HLA-DQA1*01:02-B1*06:02L HLA-DRB1*01:01L HLA-DRB3*02:01L HLA-DPA1*01:03-B1*03:01L HLA-DPA1*03:01-B1*04:02L HLA-DRB1*03:01L HLA-DQA1*01:01-B1*05:01L HLA-DRB1*08:01L HLA-DRB1*11:01L
  REGION 1..11: note = CONT. FROM ABOVE: HLA-DRB5*01:01L HLA-DQA1*05:05-B1*03:19L HLA-D RB4*01:01L HLA-DRB1*09:01L HLA-DPA1*01:03-B1*04:02L HLA-DRB3*01: 01L HLA-DPA1*02:01-B1*13:01L HLA-DPA1*03:01-B1*105:01L HLA-DPA1* 01:03-B1*02:01L HLA-DPA1*01:03-B1*104:01L
  REGION 1..11: note = CONT. FROM ABOVE: HLA-DQA1*05:05-B1*03:01L HLA-DPA1*01:02-B1*04: 01L HLA-DRB1*07:01L HLA-DQA1*01:03-B1*06:01L
  source 1..11: note = Severe acute respiratory syndrome coronavirus 2
VIVNNLDKSAG

SEQ ID NO: 12349 - protein, 14 aa, Severe acute respiratory syndrome-related coronavirus
  REGION 1..14: note = Table B: HLA-DRB1*04:01L HLA-DRB1*04:04L HLA-DRB1*01:01L
  source 1..14: note = Severe acute respiratory syndrome coronavirus 2
MSYEDQDALFAYTK

SEQ ID NO: 12350 - protein, 14 aa, Severe acute respiratory syndrome-related coronavirus
  REGION 1..14: note = Table B: HLA-DRB1*04:01L HLA-DRB1*13:02L HLA-DRB1*13:03L HLA-DRB1*01:01L HLA-DRB1*08:04L HLA-DRB1*08:01L HLA-DRB1*11:01L HLA-DRB3*01:01L HLA-DPA1*01:03-B1*104:01L HLA-DRB1*07:01L
  source 1..14: note = Severe acute respiratory syndrome coronavirus 2
KRNVIPTITQMNLK

SEQ ID NO: 12351 - protein, 14 aa, Severe acute respiratory syndrome-related coronavirus
  REGION 1..14: note = Table B: HLA-DRB1*04:01L
  source 1..14: note = Severe acute respiratory syndrome coronavirus 2
QMNLKYAISAKNRA

SEQ ID NO: 12352 - protein, 14 aa, Severe acute respiratory syndrome-related coronavirus
  REGION 1..14: note = Table B: HLA-DRB1*04:01L HLA-DRB1*03:01L HLA-DQA1*01:01-B1*05:01L HLA-DQA1*05:05-B1*03:19L
  source 1..14: note = Severe acute respiratory syndrome coronavirus 2
MNLKYAISAKNRAR

SEQ ID NO: 12353 - protein, 14 aa, Severe acute respiratory syndrome-related coronavirus
  REGION 1..14: note = Table B: HLA-DRB1*04:01L HLA-DRB1*03:01L HLA-DPA1*03:01-B1*105:01L HLA-DRB1*10:01L HLA-DQA1*01:03-B1*06:01L
  source 1..14: note = Severe acute respiratory syndrome coronavirus 2
NLKYAISAKNRART

SEQ ID NO: 12354 - protein, 15 aa, Severe acute respiratory syndrome-related coronavirus
  REGION 1..15: note = Table B: HLA-DRB1*04:01L HLA-DRB1*14:01L
  source 1..15: note = Severe acute respiratory syndrome coronavirus 2
GVSICSTMTNRQFHQ

SEQ ID NO: 12355 - protein, 13 aa, Severe acute respiratory syndrome-related coronavirus
  REGION 1..13: note = Table B: HLA-DRB1*04:01L HLA-DRB1*04:04L HLA-DRB1*04:05L HLA-DRB1*01:01L HLA-DRB1*14:01L HLA-DRB1*11:04L HLA-DRB1*12:01L HLA-DRB1*10:01L
  source 1..13: note = Severe acute respiratory syndrome coronavirus 2
KLLKSIAATRGAT

SEQ ID NO: 12356 - protein, 14 aa, Severe acute respiratory syndrome-related coronavirus
  REGION 1..14: note = Table B: HLA-DRB1*04:01L HLA-DRB1*04:04L HLA-DRB1*08:01L HLA-DRB1*11:01L HLA-DRB4*02:01NL HLA-DRB3*01:01L HLA-DRB1*15:01L
  source 1..14: note = Severe acute respiratory syndrome coronavirus 2
KSIAATRGATVVIG

SEQ ID NO: 12357 - protein, 15 aa, Severe acute respiratory syndrome-related coronavirus
  REGION 1..15: note = Table B: HLA-DRB1*04:01L HLA-DRB1*08:04L HLA-DPA1*01:03-B1*04:01L HLA-DPA1*01:03-B1*104:01L HLA-DRB1*07:01L
  source 1..15: note = Severe acute respiratory syndrome coronavirus 2
HNMLKTVYSDVENPH

SEQ ID NO: 12358 - protein, 14 aa, Severe acute respiratory syndrome-related coronavirus
  REGION 1..14: note = Table B: HLA-DRB1*04:01L
  source 1..14: note = Severe acute respiratory syndrome coronavirus 2
SHRFYRLANECAQV

SEQ ID NO: 12359 - protein, 16 aa, Severe acute respiratory syndrome-related coronavirus
  REGION 1..16: note = Table B: HLA-DRB1*04:01L HLA-DRB1*04:04L HLA-DRB1*01:01L HLA-DPA1*01:03-B1*04:02L HLA-DPA1*02:01-B1*13:01L HLA-DPA1*01:03-B1*104:01L HLA-DRB1*07:01L HLA-DRB1*10:01L HLA-DRB1*08:02L
  source 1..16: note = Severe acute respiratory syndrome coronavirus 2
GGSLYVKPGGTSSGDA

SEQ ID NO: 12360 - protein, 14 aa, Severe acute respiratory syndrome-related coronavirus
  REGION 1..14: note = Table B: HLA-DRB1*04:01L HLA-DRB1*13:02L HLA-DRB1*08:04L HLA-DPA1*03:01-B1*04:02L HLA-DRB1*11:02L HLA-DRB1*11:03L HLA-DRB1*11:04L HLA-DQA1*01:01-B1*05:01L HLA-DRB1*08:01L HLA-DRB1*11:01L HLA-DQA1*01-B1*05L HLA-DRB4*01:01L
  REGION 1..14: note = CONT. FROM ABOVE: HLA-DRB1*09:01L HLA-DRB3*01:01L HLA-DPA1*02:01 -B1*13:01L HLA-DPA1*01:02-B1*04:01L HLA-DRB1*07:01L HLA-DRB1*08: 02L HLA-DRB1*08:03L
  source 1..14: note = Severe acute respiratory syndrome coronavirus 2
SVFNICQAVTANVN

SEQ ID NO: 12361 - protein, 13 aa, Severe acute respiratory syndrome-related coronavirus
  REGION 1..13: note = Table B: HLA-DRB1*04:01L HLA-DRB1*03:01L HLA-DPA1*01:03-B1*02:01L
  source 1..13: note = Severe acute respiratory syndrome coronavirus 2
ALLSTDGNKIADK

SEQ ID NO: 12362 - protein, 13 aa, Severe acute respiratory syndrome-related coronavirus
  REGION 1..13: note = Table B: HLA-DRB1*04:01L HLA-DRB1*04:04L HLA-DRB1*01:01L HLA-DRB1*08:77L HLA-DRB1*11:02L HLA-DRB1*09:01L HLA-DRB1*12:02L HLA-DRB1*14:54L HLA-DPA1*01:03-B1*02:01L HLA-DQA1*05:05-B1*03:01L HLA-DRB1*14:17L HLA-DRB1*10:01L
  REGION 1..13: note = CONT. FROM ABOVE: HLA-DRB1*08:02L HLA-DRB1*08:03L
  source 1..13: note = Severe acute respiratory syndrome coronavirus 2
DKYVRNLQHRLYE

SEQ ID NO: 12363 - protein, 15 aa, Severe acute respiratory syndrome-related coronavirus
  REGION 1..15: note = Table B: HLA-DRB1*04:01L HLA-DRB1*11:03L HLA-DRB1*07:01L
  source 1..15: note = Severe acute respiratory syndrome coronavirus 2
VDTDFVNEFYAYLRK

SEQ ID NO: 12364 - protein, 14 aa, Severe acute respiratory syndrome-related coronavirus
  REGION 1..14: note = Table B: HLA-DRB1*04:01L HLA-DRB1*13:03L HLA-DRB1*04:02L HLA-DRB1*01:01L HLA-DRB1*08:04L HLA-DRB1*11:03L HLA-DRB1*14:02L HLA-DRB1*13:01L HLA-DQA1*05:05-B1*03:01L HLA-DRB1*07:01L HLA-DRB1*08:03L HLA-DRB1*15:01L
  source 1..14: note = Severe acute respiratory syndrome coronavirus 2
TDFVNEFYAYLRKH

SEQ ID NO: 12365 - protein, 16 aa, Severe acute respiratory syndrome-related coronavirus
  REGION 1..16: note = Table B: HLA-DRB1*04:01L HLA-DRB1*08:77L HLA-DRB1*11:03L HLA-DRB1*11:01L HLA-DPA1*01:03-B1*104:01L HLA-DPA1*01:02-B1*04:01L HLA-DRB1*10:01L HLA-DRB1*08:02L
  source 1..16: note = Severe acute respiratory syndrome coronavirus 2
SMMILSDDAVVCFNST

SEQ ID NO: 12366 - protein, 13 aa, Severe acute respiratory syndrome-related coronavirus
  REGION 1..13: note = Table B: HLA-DRB1*04:01L HLA-DRB1*13:02L HLA-DRB1*13:03L HLA-DRB1*04:04L HLA-DRB1*04:05L HLA-DRB1*08:04L HLA-DRB1*08:77L HLA-DRB3*02:01L HLA-DPA1*01:03-B1*03:01L HLA-DPA1*03:01-B1*04:02L HLA-DRB1*11:04L HLA-DRB1*14:02L
  REGION 1..13: note = CONT. FROM ABOVE: HLA-DQA1*01:01-B1*05:01L HLA-DRB1*08:01L HLA-D RB1*11:01L HLA-DQA1*05:01-B1*02:01L HLA-DPA1*01:03-B1*04:01L HLA -DRB1*04:10L HLA-DRB1*12:01L HLA-DPA1*01:03-B1*02:01L HLA-DPA1*0 1:02-B1*04:01L HLA-DRB1*10:01L HLA-DRB1*16:01L HLA-DRB1*15:03L
  source 1..13: note = Severe acute respiratory syndrome coronavirus 2
STYASQGLVASIK

SEQ ID NO: 12367 - protein, 14 aa, Severe acute respiratory syndrome-related coronavirus
  REGION 1..14: note = Table B: HLA-DRB1*04:01L HLA-DRB1*11:02L HLA-DRB1*04:10L HLA-DRB1*09:01L HLA-DRB1*14:17L
  source 1..14: note = Severe acute respiratory syndrome coronavirus 2
SIKNFKSVLYYQNN

SEQ ID NO: 12368 - protein, 14 aa, Severe acute respiratory syndrome-related coronavirus
  REGION 1..14: note = Table B: HLA-DRB1*04:01L HLA-DRB1*01:01L HLA-DRB1*08:77L HLA-DRB3*02:01L HLA-DRB1*03:01L HLA-DRB1*11:02L HLA-DRB1*11:03L HLA-DRB1*14:02M HLA-DQA1*01:01-B1*05:01L HLA-DRB4*01:01L HLA-DQA1*05:05-B1*03:116L HLA-DRB1*04:10L HLA-DRB1*09:01L
  REGION 1..14: note = CONT. FROM ABOVE: HLA-DRB1*12:02L HLA-DRB3*01:01L HLA-DPA1*02:01 -B1*13:01L HLA-DPA1*01:03-B1*104:01L HLA-DRB1*07:01L HLA-DRB1*10 :01L HLA-DRB1*08:02L HLA-DRB1*08:03L
  source 1..14: note = Severe acute respiratory syndrome coronavirus 2
VLYYQNNVFMSEAK

SEQ ID NO: 12369 - protein, 15 aa, Severe acute respiratory syndrome-related coronavirus
  REGION 1..15: note = Table B: HLA-DRB1*04:01L HLA-DRB1*14:17L HLA-DRB1*10:01L
  source 1..15: note = Severe acute respiratory syndrome coronavirus 2
GPHEFCSQHTMLVKQ

SEQ ID NO: 12370 - protein, 13 aa, Severe acute respiratory syndrome-related coronavirus
  REGION 1..13: note = Table B: HLA-DRB1*04:01L HLA-DRB1*04:04L HLA-DRB1*11:02L HLA-DRB1*08:01L HLA-DPA1*01:03-B1*04:02L
  source 1..13: note = Severe acute respiratory syndrome coronavirus 2
DDIVKTDGTLMIE

SEQ ID NO: 12371 - protein, 10 aa, Severe acute respiratory syndrome-related coronavirus
  REGION 1..10: note = Table B: HLA-DRB1*04:01L HLA-DRB1*13:02L HLA-DRB1*13:03L HLA-DRB1*04:02L HLA-DRB1*01:01L HLA-DRB4*03:01NL HLA-DRB3*02:01L HLA-DRB1*14:01L HLA-DRB1*11:04L HLA-DRB1*14:02L HLA-DRB1*08:01L HLA-DRB5*01:01L HLA-DPA1*01:03-B1*04:02L HLA-DRB1*12:01L
  REGION 1..10: note = CONT. FROM ABOVE: HLA-DRB1*12:02L HLA-DQA1*03:01-B1*03:02M HLA-D QA1*05:05-B1*03:01L HLA-DRB1*14:17L HLA-DRB1*16:01L HLA-DRB1*08: 02L HLA-DQA1*02:01-B1*03:03L
  source 1..10: note = Severe acute respiratory syndrome coronavirus 2
KTDGTLMIER

SEQ ID NO: 12372 - protein, 14 aa, Severe acute respiratory syndrome-related coronavirus
  REGION 1..14: note = Table B: HLA-DRB1*04:01L HLA-DRB1*01:01L
  source 1..14: note = Severe acute respiratory syndrome coronavirus 2
TDGTLMIERFVSLA

SEQ ID NO: 12373 - protein, 16 aa, Severe acute respiratory syndrome-related coronavirus
  REGION 1..16: note = Table B: HLA-DRB1*04:01L HLA-DRB1*13:03L HLA-DRB1*11:02L HLA-DRB1*11:03L HLA-DRB1*11:04L HLA-DRB4*01:01L HLA-DRB3*01:01L HLA-DPA1*01:02-B1*04:01L HLA-DRB1*07:01L
  source 1..16: note = Severe acute respiratory syndrome coronavirus 2
TGHMLDMYSVMLTNDN

SEQ ID NO: 12374 - protein, 14 aa, Severe acute respiratory syndrome-related coronavirus
  REGION 1..14: note = Table B: HLA-DRB1*04:01L HLA-DRB1*13:03L HLA-DRB1*01:02L HLA-DRB1*11:03L HLA-DRB1*11:04L HLA-DRB1*08:03L HLA-DRB1*15:03L
  source 1..14: note = Severe acute respiratory syndrome coronavirus 2
LDMYSVMLTNDNTS

SEQ ID NO: 12375 - protein, 11 aa, Severe acute respiratory syndrome-related coronavirus
  REGION 1..11: note = Table B: HLA-DRB1*04:01L HLA-DRB1*13:02L HLA-DRB1*08:01L HLA-DRB5*01:01L HLA-DQA1*01-B1*05L HLA-DRB1*12:02L HLA-DQA1*05:05-B1*03:01L HLA-DRB1*08:03L
  source 1..11: note = Severe acute respiratory syndrome coronavirus 2
SVMLTNDNTSR

SEQ ID NO: 12376 - protein, 16 aa, Severe acute respiratory syndrome-related coronavirus
  REGION 1..16: note = Table B: HLA-DRB1*04:01L HLA-DRB1*01:01L HLA-DRB1*11:03L HLA-DRB1*13:01L HLA-DRB1*14:54L HLA-DRB1*07:01L HLA-DRB1*10:01L
  source 1..16: note = Severe acute respiratory syndrome coronavirus 2
SRYWEPEFYEAMYTPH

SEQ ID NO: 12377 - protein, 13 aa, Severe acute respiratory syndrome-related coronavirus
  REGION 1..13: note = Table B: HLA-DRB1*04:01L HLA-DRB1*13:02L HLA-DRB1*04:04L HLA-DRB1*01:02L HLA-DRB1*08:04L HLA-DRB1*08:77L HLA-DRB3*02:01L HLA-DPA1*01:03-B1*03:01L HLA-DRB1*14:01L HLA-DRB1*11:03L HLA-DRB1*11:04L HLA-DRB1*14:02L HLA-DQA1*01:01-B1*05:01L
  REGION 1..13: note = CONT. FROM ABOVE: HLA-DRB1*11:01L HLA-DRB5*01:01L HLA-DQA1*05:05 -B1*03:19L HLA-DRB4*01:01L HLA-DPA1*01:03-B1*04:01L HLA-DRB1*09: 01L HLA-DRB1*12:02L HLA-DRB3*01:01L HLA-DPA1*02:01-B1*13:01L HLA -DRB1*14:54L HLA-DPA1*01:03-B1*02:01L HLA-DPA1*01:03-B1*104:01L
  REGION 1..13: note = CONT. FROM ABOVE: HLA-DQA1*05:05-B1*03:01L HLA-DRB1*07:01L HLA-D RB1*10:01L HLA-DRB1*08:02L HLA-DRB1*08:03L
  source 1..13: note = Severe acute respiratory syndrome coronavirus 2
EPEFYEAMYTPHT

SEQ ID NO: 12378 - protein, 11 aa, Severe acute respiratory syndrome-related coronavirus
  REGION 1..11: note = Table B: HLA-DRB1*04:01L HLA-DRB1*04:03L HLA-DRB1*01:03L HLA-DRB1*04:02L HLA-DRB1*04:04L HLA-DRB1*04:05L HLA-DRB4*03:01NL HLA-DRB1*14:17L HLA-DRB1*04:08L
  source 1..11: note = Severe acute respiratory syndrome coronavirus 2
YEAMYTPHTVL

SEQ ID NO: 12379 - protein, 13 aa, Severe acute respiratory syndrome-related coronavirus
  REGION 1..13: note = Table B: HLA-DRB1*04:01L HLA-DRB1*13:02L HLA-DRB1*11:04L HLA-DRB1*14:02L HLA-DRB1*11:01L HLA-DRB3*01:01L HLA-DPA1*01:03-B1*02:01L HLA-DRB1*10:01L HLA-DRB1*08:03L
  source 1..13: note = Severe acute respiratory syndrome coronavirus 2
AMYTPHTVLQAVG

SEQ ID NO: 12380 - protein, 20 aa, Severe acute respiratory syndrome-related coronavirus
  REGION 1..20: note = Table B: HLA-DRB1*04:01L HLA-DRB1*01:01L HLA-DPA1*01:03-B1*02:01L HLA-DRB1*07:01L
  source 1..20: note = Severe acute respiratory syndrome coronavirus 2
DVTQLYLGGMSYYCKSHKPP

SEQ ID NO: 12381 - protein, 14 aa, Severe acute respiratory syndrome-related coronavirus
  REGION 1..14: note = Table B: HLA-DRB1*04:01L HLA-DRB1*01:01L HLA-DPA1*01:03-B1*03:01L HLA-DRB1*11:02L HLA-DRB1*14:02L HLA-DQA1*05:05-B1*03:19L HLA-DPA1*02:01-B1*13:01L HLA-DPA1*01:03-B1*02:01L HLA-DPA1*01:03-B1*104:01L
  REGION 1..14: note = CONT. FROM ABOVE: HLA-DRB1*10:01L HLA-DRB1*08:02L
  source 1..14: note = Severe acute respiratory syndrome coronavirus 2
NGQVFGLYKNTCVG

SEQ ID NO: 12382 - protein, 14 aa, Severe acute respiratory syndrome-related coronavirus
  REGION 1..14: note = Table B: HLA-DRB1*04:01L HLA-DRB1*01:01L HLA-DRB3*02:01L HLA-DPA1*03:01-B1*04:02L HLA-DRB1*11:02L HLA-DRB1*11:03L HLA-DRB1*14:02L HLA-DPA1*01:03-B1*04:02L HLA-DRB3*01:01L HLA-DPA1*01:03-B1*104:01L HLA-DPA1*01:02-B1*04:01L
  REGION 1..14: note = CONT. FROM ABOVE: HLA-DRB1*07:01L HLA-DQA1*01:03-B1*06:01L
  source 1..14: note = Severe acute respiratory syndrome coronavirus 2
VFGLYKNTCVGSDN

SEQ ID NO: 12383 - protein, 12 aa, Severe acute respiratory syndrome-related coronavirus
  REGION 1..12: note = Table B: HLA-DRB1*04:01L HLA-DRB1*13:02L HLA-DRB1*04:04L HLA-DRB1*01:02L HLA-DRB1*08:04L HLA-DPA1*01:03-B1*03:01L HLA-DRB1*14:01L HLA-DRB1*11:04L HLA-DQA1*01:01-B1*05:01L HLA-DRB1*11:01L HLA-DQA1*05:05-B1*03:19L
  REGION 1..12: note = CONT. FROM ABOVE: HLA-DQA1*05:01-B1*02:01L HLA-DRB1*12:01L HLA-D RB1*12:02L HLA-DPA1*02:01-B1*13:01L HLA-DRB1*14:54L HLA-DRB1*10: 01L HLA-DRB1*08:03L HLA-DRB1*15:03L
  source 1..12: note = Severe acute respiratory syndrome coronavirus 2
GDYILANTCTER

SEQ ID NO: 12384 - protein, 14 aa, Severe acute respiratory syndrome-related coronavirus
  REGION 1..14: note = Table B: HLA-DRB1*04:01L HLA-DRB1*01:01L HLA-DRB3*02:01L HLA-DRB1*14:02L HLA-DRB3*01:01L HLA-DRB1*07:01L HLA-DRB1*15:01L
  source 1..14: note = Severe acute respiratory syndrome coronavirus 2
RLKLFAAETLKATE

SEQ ID NO: 12385 - protein, 12 aa, Severe acute respiratory syndrome-related coronavirus
  REGION 1..12: note = Table B: HLA-DRB1*04:01L HLA-DRB1*13:02L HLA-DRB1*13:03L HLA-DRB1*08:04L HLA-DPA1*01:03-B1*03:01L HLA-DRB1*14:01L HLA-DRB1*11:04L HLA-DRB1*14:02L HLA-DQA1*01:01-B1*05:01L HLA-DRB1*08:01L HLA-DRB1*11:01L HLA-DRB1*04:10L
  REGION 1..12: note = CONT. FROM ABOVE: HLA-DPA1*01:03-B1*02:01L HLA-DPA1*01:03-B1*104 :01L HLA-DRB1*10:01L
  source 1..12: note = Severe acute respiratory syndrome coronavirus 2
LFAAETLKATEE

SEQ ID NO: 12386 - protein, 14 aa, Severe acute respiratory syndrome-related coronavirus
  REGION 1..14: note = Table B: HLA-DRB1*04:01L HLA-DRB1*04:04L HLA-DRB1*08:77L HLA-DRB3*02:01L HLA-DPA1*01:03-B1*03:01L HLA-DRB1*03:01L HLA-DRB1*11:04L HLA-DRB1*14:02L HLA-DRB1*08:01L HLA-DRB1*11:01L HLA-DQA1*01-B1*05L HLA-DRB1*09:01L HLA-DRB3*01:01L
  REGION 1..14: note = CONT. FROM ABOVE: HLA-DPA1*02:01-B1*13:01L HLA-DPA1*01:02-B1*04: 01L HLA-DRB1*15:01L
  source 1..14: note = Severe acute respiratory syndrome coronavirus 2
EETFKLSYGIATVR

SEQ ID NO: 12387 - protein, 14 aa, Severe acute respiratory syndrome-related coronavirus
  REGION 1..14: note = Table B: HLA-DRB1*04:01L HLA-DRB1*01:01L HLA-DRB1*03:01L HLA-DRB1*11:04L HLA-DRB1*11:01L HLA-DRB3*01:01L HLA-DPA1*01:03-B1*104:01L HLA-DRB1*07:01L HLA-DRB1*10:01L
  source 1..14: note = Severe acute respiratory syndrome coronavirus 2
IATVREVLSDRELH

SEQ ID NO: 12388 - protein, 15 aa, Severe acute respiratory syndrome-related coronavirus
  REGION 1..15: note = Table B: HLA-DRB1*04:01L HLA-DRB1*11:02L HLA-DRB4*01:01L
  source 1..15: note = Severe acute respiratory syndrome coronavirus 2
VREVLSDRELHLSWE

SEQ ID NO: 12389 - protein, 12 aa, Severe acute respiratory syndrome-related coronavirus
  REGION 1..12: note = Table B: HLA-DRB1*04:01L HLA-DRB1*08:04L HLA-DPA1*01:03-B1*03:01L HLA-DRB1*03:01L HLA-DRB1*14:02L HLA-DQA1*01:01-B1*05:01L HLA-DRB5*01:01L HLA-DQA1*01-B1*05L HLA-DQA1*05:05-B1*03:19L HLA-DRB1*13:01L
  REGION 1..12: note = CONT. FROM ABOVE: HLA-DPA1*01:03-B1*04:01L HLA-DRB1*09:01L HLA-D PA1*01:03-B1*04:02L HLA-DPA1*01:03-B1*104:01L HLA-DQA1*05:05-B1* 03:01L HLA-DRB1*10:01L HLA-DRB1*08:03L HLA-DRB1*15:01L
  source 1..12: note = Severe acute respiratory syndrome coronavirus 2
TGYRVTKNSKVQ

SEQ ID NO: 12390 - protein, 12 aa, Severe acute respiratory syndrome-related coronavirus
  REGION 1..12: note = Table B: HLA-DRB1*04:01L HLA-DRB1*13:02L HLA-DRB1*04:04L HLA-DQA1*01:02-B1*06:02L HLA-DRB1*01:02L HLA-DRB1*08:04L HLA-DRB3*02:01L HLA-DRB1*14:01L HLA-DRB1*11:03L HLA-DRB1*11:04L HLA-DRB1*14:02L HLA-DQA1*01:01-B1*05:01L HLA-DRB1*08:01L
  REGION 1..12: note = CONT. FROM ABOVE: HLA-DRB1*11:01L HLA-DRB5*01:01L HLA-DRB1*09:01 L HLA-DRB1*12:02L HLA-DRB3*01:01L HLA-DPA1*02:01-B1*13:01L HLA-D PA1*03:01-B1*105:01L HLA-DQA1*05:05-B1*03:01L HLA-DRB1*07:01L HL A-DQA1*01:03-B1*06:01L HLA-DRB1*08:03L
  source 1..12: note = Severe acute respiratory syndrome coronavirus 2
IGEYTFEKGDYG

SEQ ID NO: 12391 - protein, 13 aa, Severe acute respiratory syndrome-related coronavirus
  REGION 1..13: note = Table B: HLA-DRB1*04:01L HLA-DRB1*13:02L HLA-DRB1*04:04L HLA-DRB1*01:01L HLA-DRB1*08:04L HLA-DRB1*14:01L HLA-DRB1*11:03L HLA-DRB1*11:04L HLA-DRB1*14:02L HLA-DPA1*02:01-B1*13:01L HLA-DRB1*08:03L
  source 1..13: note = Severe acute respiratory syndrome coronavirus 2
GEYTFEKGDYGDA

SEQ ID NO: 12392 - protein, 16 aa, Severe acute respiratory syndrome-related coronavirus
  REGION 1..16: note = Table B: HLA-DRB1*04:01L HLA-DRB1*01:01L HLA-DRB1*14:01L HLA-DRB1*11:04L HLA-DRB1*14:02L HLA-DRB3*01:01L
  source 1..16: note = Severe acute respiratory syndrome coronavirus 2
EKGDYGDAVVYRGTTT

SEQ ID NO: 12393 - protein, 14 aa, Severe acute respiratory syndrome-related coronavirus
  REGION 1..14: note = Table B: HLA-DRB1*04:01L HLA-DRB1*03:01L HLA-DRB1*11:02L HLA-DRB5*02:02L HLA-DPA1*01:03-B1*02:01L HLA-DRB1*08:02L HLA-DRB1*15:01L
  source 1..14: note = Severe acute respiratory syndrome coronavirus 2
VGDYFVLTSHTVMP

SEQ ID NO: 12394 - protein, 14 aa, Severe acute respiratory syndrome-related coronavirus
  REGION 1..14: note = Table B: HLA-DRB1*04:01L HLA-DRB1*11:02L HLA-DRB1*08:02L
  source 1..14: note = Severe acute respiratory syndrome coronavirus 2
GDYFVLTSHTVMPL

SEQ ID NO: 12395 - protein, 16 aa, Severe acute respiratory syndrome-related coronavirus
  REGION 1..16: note = Table B: HLA-DRB1*04:01L HLA-DRB1*13:03L HLA-DRB1*08:77L HLA-DRB1*03:01L HLA-DRB1*11:02L HLA-DRB1*11:03L HLA-DRB1*11:01L HLA-DQA1*01-B1*05L HLA-DPA1*01:03-B1*04:01L HLA-DRB1*12:02L HLA-DRB3*01:01L HLA-DRB1*10:01L HLA-DRB1*08:03L
  source 1..16: note = Severe acute respiratory syndrome coronavirus 2
YFVLTSHTVMPLSAPT

SEQ ID NO: 12396 - protein, 14 aa, Severe acute respiratory syndrome-related coronavirus
  REGION 1..14: note = Table B: HLA-DRB1*04:01L HLA-DRB1*04:04L HLA-DPA1*01:03-B1*03:01L HLA-DQA1*01-B1*05L
  source 1..14: note = Severe acute respiratory syndrome coronavirus 2
HTVMPLSAPTLVPQ

SEQ ID NO: 12397 - protein, 16 aa, Severe acute respiratory syndrome-related coronavirus
  REGION 1..16: note = Table B: HLA-DRB1*04:01L
  source 1..16: note = Severe acute respiratory syndrome coronavirus 2
SAPTLVPQEHYVRITG

SEQ ID NO: 12398 - protein, 17 aa, Severe acute respiratory syndrome-related coronavirus
  REGION 1..17: note = Table B: HLA-DRB1*04:01L HLA-DRB1*01:01L HLA-DPA1*01:03-B1*04:01L
  source 1..17: note = Severe acute respiratory syndrome coronavirus 2
VPQEHYVRITGLYPTLN

SEQ ID NO: 12399 - protein, 13 aa, Severe acute respiratory syndrome-related coronavirus
  REGION 1..13: note = Table B: HLA-DRB1*04:01L HLA-DRB1*04:02L HLA-DRB1*11:03L HLA-DRB1*14:02L HLA-DQA1*01-B1*05L HLA-DQA1*05:05-B1*03:01L HLA-DQA1*02:01-B1*03:03L
  source 1..13: note = Severe acute respiratory syndrome coronavirus 2
QKYSTLQGPPGTG

SEQ ID NO: 12400 - protein, 10 aa, Severe acute respiratory syndrome-related coronavirus
  REGION 1..10: note = Table B: HLA-DRB1*04:01L HLA-DRB1*04:03L HLA-DRB1*13:02L HLA-DRB1*13:03L HLA-DRB1*01:03L HLA-DRB1*04:02L HLA-DRB1*04:04L HLA-DRB1*01:01L HLA-DRB4*03:01NL HLA-DRB3*02:01L HLA-DRB1*14:01L HLA-DRB1*11:04L HLA-DRB1*14:02L HLA-DRB1*08:01L HLA-DRB1*11:01L
  REGION 1..10: note = CONT. FROM ABOVE: HLA-DRB5*01:01L HLA-DPA1*01:03-B1*04:02L HLA-D RB1*12:01L HLA-DRB1*12:02L HLA-DRB3*01:01L HLA-DPA1*03:01-B1*105 :01L HLA-DQA1*03:01-B1*03:02L HLA-DRB1*14:54L HLA-DQA1*05:05-B1* 03:01L HLA-DRB1*14:17L HLA-DRB1*16:01L HLA-DRB1*08:02L
  REGION 1..10: note = CONT. FROM ABOVE: HLA-DRB1*08:03L HLA-DQA1*02:01-B1*03:03L HLA-D RB1*15:01L
  source 1..10: note = Severe acute respiratory syndrome coronavirus 2
TLQGPPGTGK

SEQ ID NO: 12401 - protein, 17 aa, Severe acute respiratory syndrome-related coronavirus
  REGION 1..17: note = Table B: HLA-DRB1*04:01L HLA-DRB1*11:03L HLA-DRB1*08:03L
  source 1..17: note = Severe acute respiratory syndrome coronavirus 2
GKSHFAIGLALYYPSAR

SEQ ID NO: 12402 - protein, 14 aa, Severe acute respiratory syndrome-related coronavirus
  REGION 1..14: note = Table B: HLA-DRB1*04:01L HLA-DRB1*01:01L HLA-DRB4*03:01NL HLA-DRB1*11:02L HLA-DRB1*11:03L HLA-DQA1*01:01-B1*05:01L HLA-DRB1*04:10L HLA-DRB3*01:01L HLA-DRB1*14:54L HLA-DRB1*07:01L HLA-DRB1*08:02L
  source 1..14: note = Severe acute respiratory syndrome coronavirus 2
ARIVYTACSHAAVD

SEQ ID NO: 12403 - protein, 13 aa, Severe acute respiratory syndrome-related coronavirus
  REGION 1..13: note = Table B: HLA-DRB1*04:01L HLA-DRB1*13:02L HLA-DRB1*04:04L HLA-DQA1*01:02-B1*06:02L HLA-DRB1*01:01L HLA-DRB1*14:01L HLA-DRB1*11:04L HLA-DRB1*11:01L HLA-DPA1*01:03-B1*04:02L HLA-DRB3*01:01L HLA-DPA1*01:03-B1*02:01L
  source 1..13: note = Severe acute respiratory syndrome coronavirus 2
KALKYLPIDKCSR

SEQ ID NO: 12404 - protein, 13 aa, Severe acute respiratory syndrome-related coronavirus
  REGION 1..13: note = Table B: HLA-DRB1*04:01L
  source 1..13: note = Severe acute respiratory syndrome coronavirus 2
FDKFKVNSTLEQY

SEQ ID NO: 12405 - protein, 14 aa, Severe acute respiratory syndrome-related coronavirus
  REGION 1..14: note = Table B: HLA-DRB1*04:01L HLA-DRB1*01:01L
  source 1..14: note = Severe acute respiratory syndrome coronavirus 2
DKFKVNSTLEQYVF

SEQ ID NO: 12406 - protein, 14 aa, Severe acute respiratory syndrome-related coronavirus
  REGION 1..14: note = Table B: HLA-DRB1*04:01L HLA-DRB1*01:01L HLA-DRB3*02:01L HLA-DPA1*01:03-B1*03:01L HLA-DRB1*11:03L HLA-DRB1*11:04L HLA-DRB1*14:02L HLA-DRB1*08:01L HLA-DRB1*11:01L HLA-DRB4*01:01L HLA-DPA1*01:03-B1*04:01L HLA-DRB1*09:01L
  REGION 1..14: note = CONT. FROM ABOVE: HLA-DPA1*02:01-B1*13:01L HLA-DPA1*01:03-B1*02: 01L HLA-DPA1*01:03-B1*104:01L HLA-DRB1*07:01L HLA-DRB1*08:03L
  source 1..14: note = Severe acute respiratory syndrome coronavirus 2
LEQYVFCTVNALPE

SEQ ID NO: 12407 - protein, 14 aa, Severe acute respiratory syndrome-related coronavirus
  REGION 1..14: note = Table B: HLA-DRB1*04:01L HLA-DRB1*01:01L
  source 1..14: note = Severe acute respiratory syndrome coronavirus 2
ADIVVFDEISMATN

SEQ ID NO: 12408 - protein, 14 aa, Severe acute respiratory syndrome-related coronavirus
  REGION 1..14: note = Table B: HLA-DRB1*04:01L HLA-DRB1*01:01L HLA-DQA1*01:01-B1*05:01L HLA-DRB1*08:01L HLA-DPA1*01:03-B1*02:01L HLA-DRB1*08:02L
  source 1..14: note = Severe acute respiratory syndrome coronavirus 2
IVVFDEISMATNYD

SEQ ID NO: 12409 - protein, 11 aa, Severe acute respiratory syndrome-related coronavirus
  REGION 1..11: note = Table B: HLA-DRB1*04:01L HLA-DRB1*04:04L HLA-DRB1*01:02L HLA-DRB1*08:04L HLA-DRB1*11:04L HLA-DRB1*08:01L HLA-DRB1*12:02L HLA-DPA1*02:01-B1*13:01L HLA-DRB1*10:01L HLA-DRB1*08:03L
  source 1..11: note = Severe acute respiratory syndrome coronavirus 2
KHYVYIGDPAQ

SEQ ID NO: 12410 - protein, 12 aa, Severe acute respiratory syndrome-related coronavirus
  REGION 1..12: note = Table B: HLA-DRB1*04:01L HLA-DRB1*13:03L HLA-DRB1*01:03L HLA-DRB1*04:04L HLA-DRB1*04:05L HLA-DRB4*03:01NL HLA-DRB1*08:77L HLA-DRB1*11:03L HLA-DRB1*11:04L HLA-DRB1*04:10L HLA-DRB1*12:01L HLA-DRB1*14:54L HLA-DRB1*10:01L HLA-DRB1*04:08L HLA-DRB1*08:03L
  source 1..12: note = Severe acute respiratory syndrome coronavirus 2
YVYIGDPAQLPA

SEQ ID NO: 12411 - protein, 12 aa, Severe acute respiratory syndrome-related coronavirus
  REGION 1..12: note = Table B: HLA-DRB1*04:01L HLA-DRB1*04:04L HLA-DRB1*01:01L HLA-DRB1*01:02L HLA-DRB1*08:04L HLA-DPA1*01:03-B1*03:01L HLA-DRB1*14:01L HLA-DRB1*11:03L HLA-DRB1*11:01L HLA-DPA1*01:03-B1*04:02L HLA-DPA1*03:01-B1*105:01L
  REGION 1..12: note = CONT. FROM ABOVE: HLA-DRB1*07:01L HLA-DRB1*10:01L HLA-DRB1*08:03 L HLA-DRB1*15:03L
  source 1..12: note = Severe acute respiratory syndrome coronavirus 2
YIGDPAQLPAPR

SEQ ID NO: 12412 - protein, 12 aa, Severe acute respiratory syndrome-related coronavirus
  REGION 1..12: note = Table B: HLA-DRB1*04:01L HLA-DRB1*13:02L HLA-DRB1*13:03L HLA-DRB1*04:02L HLA-DRB1*04:04L HLA-DRB1*04:05L HLA-DRB4*03:01NL HLA-DRB1*08:04L HLA-DRB1*08:77L HLA-DRB3*02:01L HLA-DRB1*11:03L HLA-DRB1*11:04L HLA-DRB5*02:02L HLA-DRB3*01:01L HLA-DRB1*14:54L
  REGION 1..12: note = CONT. FROM ABOVE: HLA-DPA1*01:03-B1*02:01L HLA-DRB1*14:17L HLA-D RB1*07:01L HLA-DRB1*10:01L
  source 1..12: note = Severe acute respiratory syndrome coronavirus 2
KGTLEPEYFNSV

SEQ ID NO: 12413 - protein, 12 aa, Severe acute respiratory syndrome-related coronavirus
  REGION 1..12: note = Table B: HLA-DRB1*04:01L HLA-DRB1*13:02L HLA-DRB1*04:04L HLA-DRB1*04:05L HLA-DRB1*01:01L HLA-DRB1*01:02L HLA-DRB1*08:04L HLA-DRB3*02:01L HLA-DPA1*03:01-B1*04:02L HLA-DRB1*11:03L HLA-DRB1*11:04L HLA-DQA1*01:01-B1*05:01L HLA-DRB5*01:01L
  REGION 1..12: note = CONT. FROM ABOVE: HLA-DRB1*04:10L HLA-DRB1*09:01L HLA-DRB1*12:02 L HLA-DPA1*02:01-B1*13:01L HLA-DPA1*03:01-B1*105:01L HLA-DQA1*05 :05-B1*03:01L HLA-DPA1*01:02-B1*04:01L HLA-DRB1*07:01L HLA-DRB1* 04:08L HLA-DRB1*08:03L
  source 1..12: note = Severe acute respiratory syndrome coronavirus 2
IVDTVSALVYDN

SEQ ID NO: 12414 - protein, 12 aa, Severe acute respiratory syndrome-related coronavirus
  REGION 1..12: note = Table B: HLA-DRB1*04:01L HLA-DQA1*01:02-B1*06:02L HLA-DPA1*01:03-B1*03:01L HLA-DRB1*13:01L
  source 1..12: note = Severe acute respiratory syndrome coronavirus 2
ALVYDNKLKAHK

SEQ ID NO: 12415 - protein, 14 aa, Severe acute respiratory syndrome-related coronavirus
  REGION 1..14: note = Table B: HLA-DRB1*04:01L HLA-DRB1*08:77L HLA-DPA1*01:03-B1*03:01L HLA-DRB1*11:01L HLA-DRB4*01:01L HLA-DPA1*01:03-B1*04:01L HLA-DPA1*01:03-B1*04:02L HLA-DRB3*01:01L HLA-DPA1*01:03-B1*02:01L
  REGION 1..14: note = CONT. FROM ABOVE: HLA-DPA1*01:03-B1*104:01L HLA-DRB1*08:02L
  source 1..14: note = Severe acute respiratory syndrome coronavirus 2
AVFISPYNSQNAVA

SEQ ID NO: 12416 - protein, 14 aa, Severe acute respiratory syndrome-related coronavirus
  REGION 1..14: note = Table B: HLA-DRB1*04:01L HLA-DRB1*08:04L HLA-DRB3*02:01L HLA-DPA1*01:03-B1*03:01L HLA-DRB1*03:01L HLA-DRB1*14:02L HLA-DQA1*01:01-B1*05:01L HLA-DRB1*08:01L HLA-DRB5*01:01L HLA-DRB1*09:01L HLA-DRB3*01:01L HLA-DPA1*02:01-B1*13:01L
  REGION 1..14: note = CONT. FROM ABOVE: HLA-DPA1*01:03-B1*104:01L HLA-DRB1*07:01L
  source 1..14: note = Severe acute respiratory syndrome coronavirus 2
ILGLPTQTVDSSQG

SEQ ID NO: 12417 - protein, 15 aa, Severe acute respiratory syndrome-related coronavirus
  REGION 1..15: note = Table B: HLA-DRB1*04:01L HLA-DRB1*01:01L HLA-DRB1*08:77L HLA-DRB3*02:01L HLA-DRB1*11:02L HLA-DRB1*11:03L HLA-DRB4*01:01L HLA-DQA1*05:05-B1*03:116L HLA-DRB1*04:10L HLA-DRB1*09:01L HLA-DRB1*07:01L HLA-DRB1*08:02L
  source 1..15: note = Severe acute respiratory syndrome coronavirus 2
GSEYDYVIFTQTTET

SEQ ID NO: 12418 - protein, 14 aa, Severe acute respiratory syndrome-related coronavirus
  REGION 1..14: note = Table B: HLA-DRB1*04:01L HLA-DRB1*01:01L HLA-DRB1*08:04L HLA-DPA1*01:03-B1*03:01L HLA-DRB1*11:03L HLA-DRB1*11:04L HLA-DRB1*14:02L HLA-DQA1*01:01-B1*05:01L HLA-DRB1*11:01L HLA-DPA1*01:03-B1*04:01L HLA-DPA1*01:03-B1*02:01L
  REGION 1..14: note = CONT. FROM ABOVE: HLA-DPA1*01:03-B1*104:01L HLA-DRB1*07:01L HLA- DRB1*10:01L HLA-DRB1*08:03L
  source 1..14: note = Severe acute respiratory syndrome coronavirus 2
DKLQFTSLEIPRRN

SEQ ID NO: 12419 - protein, 13 aa, Severe acute respiratory syndrome-related coronavirus
  REGION 1..13: note = Table B: HLA-DRB1*04:01L HLA-DRB1*11:04L
  source 1..13: note = Severe acute respiratory syndrome coronavirus 2
RNVATLQAENVTG

SEQ ID NO: 12420 - protein, 14 aa, Severe acute respiratory syndrome-related coronavirus
  REGION 1..14: note = Table B: HLA-DRB1*04:01L HLA-DRB1*04:04L HLA-DRB1*08:04L HLA-DRB1*03:01L HLA-DRB1*11:03L HLA-DRB1*11:04L HLA-DRB1*08:01L HLA-DRB1*11:01L HLA-DRB3*01:01L
  source 1..14: note = Severe acute respiratory syndrome coronavirus 2
VATLQAENVTGLFK

SEQ ID NO: 12421 - protein, 16 aa, Severe acute respiratory syndrome-related coronavirus
  REGION 1..16: note = Table B: HLA-DRB1*04:01L HLA-DRB1*04:02L HLA-DRB1*01:01L HLA-DRB1*03:01L HLA-DRB1*11:02L HLA-DRB1*11:03L HLA-DQA1*01:01-B1*05:01L HLA-DRB1*04:10L HLA-DRB1*07:01L HLA-DRB1*08:02L
  source 1..16: note = Severe acute respiratory syndrome coronavirus 2
VDTKFKTEGLCVDIPG

SEQ ID NO: 12422 - protein, 13 aa, Severe acute respiratory syndrome-related coronavirus
  REGION 1..13: note = Table B: HLA-DRB1*04:01L HLA-DRB1*04:03L HLA-DRB1*04:04L HLA-DRB1*04:05L HLA-DRB1*11:04L
  source 1..13: note = Severe acute respiratory syndrome coronavirus 2
MTYRRLISMMGFK

SEQ ID NO: 12423 - protein, 14 aa, Severe acute respiratory syndrome-related coronavirus
  REGION 1..14: note = Table B: HLA-DRB1*04:01L HLA-DRB1*04:04L HLA-DRB1*01:01L HLA-DRB1*08:04L HLA-DRB1*03:01L HLA-DRB1*11:01L HLA-DRB1*10:01L HLA-DRB1*15:01L
  source 1..14: note = Severe acute respiratory syndrome coronavirus 2
YPNMFITREEAIRH

SEQ ID NO: 12424 - protein, 16 aa, Severe acute respiratory syndrome-related coronavirus
  REGION 1..16: note = Table B: HLA-DRB1*04:01L HLA-DRB1*11:02L HLA-DRB1*11:03L HLA-DRB1*09:01L HLA-DRB1*08:02L HLA-DRB1*08:03L
  source 1..16: note = Severe acute respiratory syndrome coronavirus 2
EEAIRHVRAWIGFDVE

SEQ ID NO: 12425 - protein, 11 aa, Severe acute respiratory syndrome-related coronavirus
  REGION 1..11: note = Table B: HLA-DRB1*04:01L HLA-DRB1*04:04L HLA-DRB1*11:04L HLA-DRB1*04:10L HLA-DRB1*14:54L HLA-DRB1*14:17L HLA-DRB1*04:08L
  source 1..11: note = Severe acute respiratory syndrome coronavirus 2
YVDTPNNTDFS

SEQ ID NO: 12426 - protein, 17 aa, Severe acute respiratory syndrome-related coronavirus
  REGION 1..17: note = Table B: HLA-DRB1*04:01L HLA-DRB1*13:03L HLA-DRB1*04:04L HLA-DRB1*11:03L HLA-DRB1*11:04L HLA-DQA1*03:01-B1*03:02L HLA-DQA1*05:05-B1*03:01L HLA-DRB1*10:01L
  source 1..17: note = Severe acute respiratory syndrome coronavirus 2
PPPGDQFKHLIPLMYKG

SEQ ID NO: 12427 - protein, 14 aa, Severe acute respiratory syndrome-related coronavirus
  REGION 1..14: note = Table B: HLA-DRB1*04:01L HLA-DRB1*04:04L HLA-DRB1*04:05L HLA-DRB1*01:01L HLA-DRB1*08:77L HLA-DRB3*02:01L HLA-DRB1*03:01L HLA-DRB1*11:02L HLA-DRB1*11:03L HLA-DRB1*14:02L HLA-DQA1*01:01-B1*05:01L HLA-DRB1*09:01L
  REGION 1..14: note = CONT. FROM ABOVE: HLA-DPA1*01:03-B1*104:01L HLA-DRB1*14:17L HLA- DRB1*07:01L HLA-DRB1*10:01L HLA-DRB1*08:03L
  source 1..14: note = Severe acute respiratory syndrome coronavirus 2
IPLMYKGLPWNVVR

SEQ ID NO: 12428 - protein, 14 aa, Severe acute respiratory syndrome-related coronavirus
  REGION 1..14: note = Table B: HLA-DRB1*04:01L HLA-DRB1*04:04L HLA-DRB1*01:01L HLA-DRB3*02:01L HLA-DRB1*11:02L HLA-DRB1*11:03L HLA-DRB1*09:01L HLA-DRB3*01:01L HLA-DRB1*07:01L HLA-DRB1*10:01L HLA-DRB1*08:02L
  source 1..14: note = Severe acute respiratory syndrome coronavirus 2
GFDYVYNPFMIDVQ

SEQ ID NO: 12429 - protein, 13 aa, Severe acute respiratory syndrome-related coronavirus
  REGION 1..13: note = Table B: HLA-DRB1*04:01L HLA-DRB1*01:01L HLA-DRB1*08:77L HLA-DRB1*11:02L HLA-DQA1*01:01-B1*05:01L HLA-DRB4*01:01L HLA-DQA1*05:05-B1*03:116L HLA-DRB1*04:10L HLA-DRB1*09:01L HLA-DRB1*08:02L
  source 1..13: note = Severe acute respiratory syndrome coronavirus 2
DYVYNPFMIDVQQ

SEQ ID NO: 12430 - protein, 14 aa, Severe acute respiratory syndrome-related coronavirus
  REGION 1..14: note = Table B: HLA-DRB1*04:01L HLA-DRB1*11:02L HLA-DRB1*11:03L HLA-DRB1*11:04L HLA-DRB1*08:01L HLA-DRB1*11:01L HLA-DRB1*12:02L HLA-DRB3*01:01L HLA-DRB1*14:54L HLA-DPA1*01:03-B1*02:01L HLA-DRB1*10:01L HLA-DRB1*08:02L
  source 1..14: note = Severe acute respiratory syndrome coronavirus 2
NPFMIDVQQWGFTG

SEQ ID NO: 12431 - protein, 14 aa, Severe acute respiratory syndrome-related coronavirus
  REGION 1..14: note = Table B: HLA-DRB1*04:01L HLA-DRB1*01:01L HLA-DRB1*14:01L HLA-DRB1*11:03L HLA-DRB1*14:02L HLA-DQA1*01:01-B1*05:01L HLA-DRB1*11:01L HLA-DPA1*01:03-B1*04:02L HLA-DRB3*01:01L HLA-DPA1*01:03-B1*104:01L HLA-DRB1*07:01L
  source 1..14: note = Severe acute respiratory syndrome coronavirus 2
VQQWGFTGNLQSNH

SEQ ID NO: 12432 - protein, 16 aa, Severe acute respiratory syndrome-related coronavirus
  REGION 1..16: note = Table B: HLA-DRB1*04:01L HLA-DRB3*02:01L HLA-DPA1*02:01-B1*13:01L HLA-DRB1*07:01L HLA-DRB1*08:03L
  source 1..16: note = Severe acute respiratory syndrome coronavirus 2
TGNLQSNHDLYCQVHG

SEQ ID NO: 12433 - protein, 14 aa, Severe acute respiratory syndrome-related coronavirus
  REGION 1..14: note = Table B: HLA-DRB1*04:01L HLA-DRB1*04:04L HLA-DRB1*01:01L HLA-DRB1*08:04L HLA-DRB1*11:03L HLA-DRB1*09:01L HLA-DPA1*01:03-B1*104:01L HLA-DRB1*07:01L HLA-DRB1*08:03L
  source 1..14: note = Severe acute respiratory syndrome coronavirus 2
RVDWTIEYPIIGDE

SEQ ID NO: 12434 - protein, 16 aa, Severe acute respiratory syndrome-related coronavirus
  REGION 1..16: note = Table B: HLA-DRB1*04:01L HLA-DRB1*01:01L
  source 1..16: note = Severe acute respiratory syndrome coronavirus 2
IGDELKINAACRKVQH

SEQ ID NO: 12435 - protein, 14 aa, Severe acute respiratory syndrome-related coronavirus
  REGION 1..14: note = Table B: HLA-DRB1*04:01L HLA-DRB1*03:01L HLA-DRB1*11:03L
  source 1..14: note = Severe acute respiratory syndrome coronavirus 2
KAALLADKFPVLHD

SEQ ID NO: 12436 - protein, 13 aa, Severe acute respiratory syndrome-related coronavirus
  REGION 1..13: note = Table B: HLA-DRB1*04:01L HLA-DQA1*01:02-B1*06:02L HLA-DRB3*02:01L HLA-DPA1*01:03-B1*03:01L HLA-DPA1*03:01-B1*04:02L HLA-DRB4*01:01L HLA-DPA1*01:03-B1*04:02L HLA-DPA1*03:01-B1*105:01L
  REGION 1..13: note = CONT. FROM ABOVE: HLA-DQA1*05:05-B1*03:01L HLA-DRB1*08:03L
  source 1..13: note = Severe acute respiratory syndrome coronavirus 2
FPVLHDIGNPKAI

SEQ ID NO: 12437 - protein, 13 aa, Severe acute respiratory syndrome-related coronavirus
  REGION 1..13: note = Table B: HLA-DRB1*04:01L HLA-DRB1*01:01L HLA-DRB1*08:04L HLA-DRB1*14:01L HLA-DRB1*11:04L HLA-DRB1*08:01L HLA-DRB1*11:01L HLA-DRB1*04:10L HLA-DRB1*12:01L HLA-DRB3*01:01L HLA-DPA1*03:01-B1*105:01L HLA-DRB1*14:54L
  REGION 1..13: note = CONT. FROM ABOVE: HLA-DQA1*05:05-B1*03:01L HLA-DRB1*10:01L
  source 1..13: note = Severe acute respiratory syndrome coronavirus 2
PVLHDIGNPKAIK

SEQ ID NO: 12438 - protein, 16 aa, Severe acute respiratory syndrome-related coronavirus
  REGION 1..16: note = Table B: HLA-DRB1*04:01L HLA-DRB1*01:01L HLA-DRB1*03:01L HLA-DRB1*11:02L
  source 1..16: note = Severe acute respiratory syndrome coronavirus 2
NPKAIKCVPQADVEWK

SEQ ID NO: 12439 - protein, 16 aa, Severe acute respiratory syndrome-related coronavirus
  REGION 1..16: note = Table B: HLA-DRB1*04:01L HLA-DRB1*01:01L
  source 1..16: note = Severe acute respiratory syndrome coronavirus 2
SDKAYKIEELFYSYAT

SEQ ID NO: 12440 - protein, 16 aa, Severe acute respiratory syndrome-related coronavirus
  REGION 1..16: note = Table B: HLA-DRB1*04:01L HLA-DRB1*01:01L HLA-DRB3*02:01L HLA-DRB1*11:03L HLA-DRB1*07:01L
  source 1..16: note = Severe acute respiratory syndrome coronavirus 2
DKAYKIEELFYSYATH

SEQ ID NO: 12441 - protein, 12 aa, Severe acute respiratory syndrome-related coronavirus
  REGION 1..12: note = Table B: HLA-DRB1*04:01L HLA-DRB1*13:02L HLA-DRB1*08:04L HLA-DPA1*01:03-B1*03:01L HLA-DPA1*03:01-B1*04:02L HLA-DRB1*14:01L HLA-DRB1*11:04L HLA-DRB1*14:02L HLA-DRB1*11:01L HLA-DQA1*05:05-B1*03:19L HLA-DRB1*09:01L
  REGION 1..12: note = CONT. FROM ABOVE: HLA-DPA1*01:03-B1*04:02L HLA-DRB1*12:02L HLA-D RB3*01:01L HLA-DPA1*02:01-B1*13:01L HLA-DQA1*05:05-B1*03:01L HLA -DRB1*07:01L
  source 1..12: note = Severe acute respiratory syndrome coronavirus 2
ELFYSYATHSDK

SEQ ID NO: 12442 - protein, 14 aa, Severe acute respiratory syndrome-related coronavirus
  REGION 1..14: note = Table B: HLA-DRB1*04:01L HLA-DRB1*13:02L HLA-DRB1*01:03L HLA-DRB1*04:04L HLA-DRB1*04:05L HLA-DRB1*01:01L HLA-DRB1*08:04L HLA-DPA1*01:03-B1*03:01L HLA-DRB1*11:04L HLA-DRB1*11:01L HLA-DRB1*10:01L HLA-DRB1*16:01L
  source 1..14: note = Severe acute respiratory syndrome coronavirus 2
TRVLSNLNLPGCDG

SEQ ID NO: 12443 - protein, 16 aa, Severe acute respiratory syndrome-related coronavirus
  REGION 1..16: note = Table B: HLA-DRB1*04:01L HLA-DRB1*13:02L HLA-DRB1*04:04L HLA-DRB1*08:04L HLA-DRB1*11:04L HLA-DRB1*11:01L HLA-DPA1*01:03-B1*04:02L HLA-DRB3*01:01L HLA-DPA1*01:03-B1*02:01L HLA-DPA1*01:03-B1*104:01L
  REGION 1..16: note = CONT. FROM ABOVE: HLA-DRB1*07:01L
  source 1..16: note = Severe acute respiratory syndrome coronavirus 2
KHAFHTPAFDKSAFVN

SEQ ID NO: 12444 - protein, 12 aa, Severe acute respiratory syndrome-related coronavirus
  REGION 1..12: note = Table B: HLA-DRB1*04:01L HLA-DRB1*04:02L HLA-DRB1*04:04L HLA-DRB4*03:01NL HLA-DRB1*08:04L HLA-DRB1*03:01L HLA-DRB1*11:03L HLA-DRB1*11:04L HLA-DRB1*14:02L HLA-DQA1*01:01-B1*05:01L HLA-DRB1*11:01L HLA-DRB5*01:01L HLA-DRB4*01:01L HLA-DRB1*04:10L
  REGION 1..12: note = CONT. FROM ABOVE: HLA-DRB1*09:01L HLA-DRB1*12:02L HLA-DRB3*01:01 L HLA-DRB1*14:54L HLA-DPA1*01:03-B1*02:01L HLA-DQA1*05:05-B1*03: 01L HLA-DRB1*14:17L HLA-DRB1*10:01L HLA-DRB1*08:03L
  source 1..12: note = Severe acute respiratory syndrome coronavirus 2
TPAFDKSAFVNL

SEQ ID NO: 12445 - protein, 12 aa, Severe acute respiratory syndrome-related coronavirus
  REGION 1..12: note = Table B: HLA-DRB1*04:01L HLA-DRB1*13:03L HLA-DRB1*01:03L HLA-DRB1*04:04L HLA-DRB1*04:05L HLA-DQA1*01:02-B1*06:02L HLA-DRB1*01:02L HLA-DRB1*08:04L HLA-DQA1*01-B1*05L HLA-DQA1*05:01-B1*02:01L HLA-DRB1*12:01L
  REGION 1..12: note = CONT. FROM ABOVE: HLA-DPA1*03:01-B1*105:01L HLA-DQA1*03:01-B1*03 :02L HLA-DRB1*14:54L HLA-DRB1*16:01L HLA-DQA1*02:01-B1*03:03L HL A-DRB1*15:03L
  source 1..12: note = Severe acute respiratory syndrome coronavirus 2
FYYSDSPCESHG

SEQ ID NO: 12446 - protein, 14 aa, Severe acute respiratory syndrome-related coronavirus
  REGION 1..14: note = Table B: HLA-DRB1*04:01L HLA-DRB1*01:01L HLA-DRB1*08:77L HLA-DRB3*02:01L HLA-DRB1*03:01L HLA-DRB1*11:03L HLA-DRB1*11:04L HLA-DRB1*14:02L HLA-DRB1*08:01L HLA-DRB1*11:01L HLA-DRB4*01:01L HLA-DPA1*01:03-B1*04:01L HLA-DRB1*09:01L HLA-DRB1*12:02L
  REGION 1..14: note = CONT. FROM ABOVE: HLA-DPA1*01:03-B1*02:01L HLA-DPA1*01:03-B1*104 :01L HLA-DRB1*07:01L HLA-DRB1*10:01L HLA-DRB1*08:03L
  source 1..14: note = Severe acute respiratory syndrome coronavirus 2
GKQVVSDIDYVPLK

SEQ ID NO: 12447 - protein, 14 aa, Severe acute respiratory syndrome-related coronavirus
  REGION 1..14: note = Table B: HLA-DRB1*04:01L HLA-DRB1*01:01L HLA-DRB1*11:01L HLA-DRB1*09:01L HLA-DRB3*01:01L
  source 1..14: note = Severe acute respiratory syndrome coronavirus 2
ANEYRLYLDAYNMM

SEQ ID NO: 12448 - protein, 11 aa, Severe acute respiratory syndrome-related coronavirus
  REGION 1..11: note = Table B: HLA-DRB1*04:01L HLA-DRB1*13:02L HLA-DRB1*13:03L HLA-DRB1*04:02L HLA-DRB1*04:04L HLA-DRB1*01:01L HLA-DRB4*03:01NL HLA-DRB1*08:04L HLA-DPA1*01:03-B1*03:01L HLA-DPA1*03:01-B1*04:02L HLA-DRB1*14:01L HLA-DRB1*11:03L
  REGION 1..11: note = CONT. FROM ABOVE: HLA-DRB1*11:04L HLA-DQA1*01:01-B1*05:01L HLA-D RB1*08:01L HLA-DRB1*11:01L HLA-DQA1*05:05-B1*03:19L HLA-DQA1*05: 01-B1*02:01L HLA-DRB1*04:10L HLA-DPA1*01:03-B1*04:02L HLA-DRB1*1 2:02L HLA-DPA1*02:01-B1*13:01L HLA-DRB1*14:54L
  REGION 1..11: note = CONT. FROM ABOVE: HLA-DQA1*05:05-B1*03:01L HLA-DRB1*10:01L HLA-D RB1*08:03L HLA-DRB1*15:03L
  source 1..11: note = Severe acute respiratory syndrome coronavirus 2
NTFTRLQSLEN

SEQ ID NO: 12449 - protein, 12 aa, Severe acute respiratory syndrome-related coronavirus
  REGION 1..12: note = Table B: HLA-DRB1*04:01L HLA-DRB1*01:01L HLA-DPA1*01:03-B1*03:01L HLA-DRB1*11:01L HLA-DQA1*05:05-B1*03:19L HLA-DQA1*05:01-B1*02:01L HLA-DPA1*01:03-B1*04:02L HLA-DPA1*02:01-B1*13:01L
  REGION 1..12: note = CONT. FROM ABOVE: HLA-DQA1*05:05-B1*03:01L
  source 1..12: note = Severe acute respiratory syndrome coronavirus 2
TFTRLQSLENVA

SEQ ID NO: 12450 - protein, 14 aa, Severe acute respiratory syndrome-related coronavirus
  REGION 1..14: note = Table B: HLA-DRB1*04:01L
  source 1..14: note = Severe acute respiratory syndrome coronavirus 2
LQSLENVAFNVVNK

SEQ ID NO: 12451 - protein, 14 aa, Severe acute respiratory syndrome-related coronavirus
  REGION 1..14: note = Table B: HLA-DRB1*04:01L HLA-DRB1*14:02L HLA-DRB1*10:01L HLA-DRB1*08:03L
  source 1..14: note = Severe acute respiratory syndrome coronavirus 2
QSLENVAFNVVNKG

SEQ ID NO: 12452 - protein, 10 aa, Severe acute respiratory syndrome-related coronavirus
  REGION 1..10: note = Table B: HLA-DRB1*04:01L HLA-DRB1*13:02L HLA-DRB1*13:03L HLA-DRB1*04:02L HLA-DRB1*01:01L HLA-DRB4*03:01NL HLA-DRB3*02:01L HLA-DRB1*14:01L HLA-DRB1*11:04L HLA-DRB1*08:01L HLA-DRB5*01:01L HLA-DPA1*01:03-B1*04:02L HLA-DRB1*12:01L HLA-DRB1*12:02L
  REGION 1..10: note = CONT. FROM ABOVE: HLA-DQA1*03:01-B1*03:02L HLA-DQA1*05:05-B1*03: 01L HLA-DRB1*14:17L HLA-DRB1*16:01L HLA-DQA1*02:01-B1*03:03L
  source 1..10: note = Severe acute respiratory syndrome coronavirus 2
SIINNTVYTK

SEQ ID NO: 12453 - protein, 12 aa, Severe acute respiratory syndrome-related coronavirus
  REGION 1..12: note = Table B: HLA-DRB1*04:01L HLA-DRB1*01:01L HLA-DRB1*11:01L HLA-DRB4*01:01L HLA-DPA1*01:03-B1*04:02L HLA-DRB3*01:01L HLA-DPA1*01:03-B1*104:01L HLA-DRB1*08:02L
  source 1..12: note = Severe acute respiratory syndrome coronavirus 2
TVYTKVDGVDVE

SEQ ID NO: 12454 - protein, 16 aa, Severe acute respiratory syndrome-related coronavirus
  REGION 1..16: note = Table B: HLA-DRB1*04:01L HLA-DRB1*13:03L HLA-DRB1*08:04L HLA-DRB1*08:77L HLA-DRB1*03:01L HLA-DRB1*11:02L HLA-DRB1*14:02L HLA-DRB1*13:01L HLA-DPA1*01:03-B1*04:01L HLA-DRB1*09:01L HLA-DPA1*01:03-B1*04:02L HLA-DRB1*14:54L HLA-DRB1*10:01L
  REGION 1..16: note = CONT. FROM ABOVE: HLA-DRB1*08:03L
  source 1..16: note = Severe acute respiratory syndrome coronavirus 2
AKRNIKPVPEVKILNN

SEQ ID NO: 12455 - protein, 17 aa, Severe acute respiratory syndrome-related coronavirus
  REGION 1..17: note = Table B: HLA-DRB1*04:01L HLA-DRB1*01:01L HLA-DRB1*11:02L HLA-DRB1*11:01L HLA-DRB4*01:01L HLA-DPA1*01:03-B1*04:02L HLA-DRB1*08:02L
  source 1..17: note = Severe acute respiratory syndrome coronavirus 2
KPVPEVKILNNLGVDIA

SEQ ID NO: 12456 - protein, 14 aa, Severe acute respiratory syndrome-related coronavirus
  REGION 1..14: note = Table B: HLA-DRB1*04:01L HLA-DPA1*01:03-B1*03:01L HLA-DPA1*03:01-B1*04:02L HLA-DRB1*03:01L HLA-DRB1*11:02L HLA-DRB1*13:01L HLA-DPA1*01:03-B1*04:02L HLA-DPA1*01:03-B1*02:01L HLA-DRB1*07:01L
  REGION 1..14: note = CONT. FROM ABOVE: HLA-DQA1*01:03-B1*06:01L
  source 1..14: note = Severe acute respiratory syndrome coronavirus 2
NTVIWDYKRDAPAH

SEQ ID NO: 12457 - protein, 16 aa, Severe acute respiratory syndrome-related coronavirus
  REGION 1..16: note = Table B: HLA-DRB1*04:01L HLA-DRB1*01:01L HLA-DRB1*08:77L HLA-DRB1*11:02L HLA-DRB1*11:03L HLA-DRB1*11:04L HLA-DRB1*11:01L HLA-DRB1*13:01L HLA-DPA1*01:03-B1*04:01L HLA-DQA1*05:05-B1*03:116L HLA-DRB1*09:01L
  REGION 1..16: note = CONT. FROM ABOVE: HLA-DPA1*01:03-B1*02:01L HLA-DPA1*01:03-B1*104 :01L HLA-DRB1*07:01L HLA-DRB1*10:01L HLA-DRB1*08:02L
  source 1..16: note = Severe acute respiratory syndrome coronavirus 2
APLTVFFDGRVDGQVD

SEQ ID NO: 12458 - protein, 16 aa, Severe acute respiratory syndrome-related coronavirus
  REGION 1..16: note = Table B: HLA-DRB1*04:01L HLA-DRB1*01:01L HLA-DRB1*11:02L HLA-DRB1*11:03L HLA-DRB1*11:01L HLA-DQA1*05:05-B1*03:19L HLA-DPA1*01:03-B1*04:01L HLA-DRB1*09:01L HLA-DPA1*01:03-B1*04:02L HLA-DPA1*01:03-B1*104:01L
  REGION 1..16: note = CONT. FROM ABOVE: HLA-DQA1*05:05-B1*03:01L
  source 1..16: note = Severe acute respiratory syndrome coronavirus 2
VDGQVDLFRNARNGVL

SEQ ID NO: 12459 - protein, 13 aa, Severe acute respiratory syndrome-related coronavirus
  REGION 1..13: note = Table B: HLA-DRB1*04:01L HLA-DRB1*01:01L HLA-DRB1*08:04L HLA-DRB1*08:77L HLA-DPA1*01:03-B1*03:01L HLA-DRB1*11:01L HLA-DRB1*09:01L HLA-DQA1*05:05-B1*03:01L
  source 1..13: note = Severe acute respiratory syndrome coronavirus 2
GVLITEGSVKGLQ

SEQ ID NO: 12460 - protein, 13 aa, Severe acute respiratory syndrome-related coronavirus
  REGION 1..13: note = Table B: HLA-DRB1*04:01L HLA-DRB1*04:04L HLA-DRB1*08:03L
  source 1..13: note = Severe acute respiratory syndrome coronavirus 2
LITEGSVKGLQPS

SEQ ID NO: 12461 - protein, 13 aa, Severe acute respiratory syndrome-related coronavirus
  REGION 1..13: note = Table B: HLA-DRB1*04:01L HLA-DRB1*13:03L HLA-DRB1*01:03L HLA-DRB1*04:04L HLA-DRB1*01:01L HLA-DRB4*03:01NL HLA-DRB1*11:04L HLA-DPA1*03:01-B1*105:01L HLA-DRB1*14:54L HLA-DRB1*10:01L HLA-DRB1*16:01L HLA-DQA1*01:03-B1*06:01L HLA-DRB1*04:08L
  REGION 1..13: note = CONT. FROM ABOVE: HLA-DRB1*08:03L HLA-DRB1*15:03L
  source 1..13: note = Severe acute respiratory syndrome coronavirus 2
GSVKGLQPSVGPK

SEQ ID NO: 12462 - protein, 14 aa, Severe acute respiratory syndrome-related coronavirus
  REGION 1..14: note = Table B: HLA-DRB1*04:01L HLA-DRB1*11:02L HLA-DRB1*11:03L HLA-DRB1*11:04L HLA-DRB1*11:01L HLA-DRB1*09:01L HLA-DRB1*12:02L HLA-DRB1*08:03L
  source 1..14: note = Severe acute respiratory syndrome coronavirus 2
GVTLIGEAVKTQFN

SEQ ID NO: 12463 - protein, 15 aa, Severe acute respiratory syndrome-related coronavirus
  REGION 1..15: note = Table B: HLA-DRB1*04:01L HLA-DQA1*05:05-B1*03:19L HLA-DPA1*01:03-B1*104:01L HLA-DRB1*07:01L
  source 1..15: note = Severe acute respiratory syndrome coronavirus 2
NYYKKVDGVVQQLPE

SEQ ID NO: 12464 - protein, 16 aa, Severe acute respiratory syndrome-related coronavirus
  REGION 1..16: note = Table B: HLA-DRB1*04:01L HLA-DRB1*01:01L HLA-DRB1*11:03L HLA-DRB1*07:01L
  source 1..16: note = Severe acute respiratory syndrome coronavirus 2
ETYFTQSRNLQEFKPR

SEQ ID NO: 12465 - protein, 14 aa, Severe acute respiratory syndrome-related coronavirus
  REGION 1..14: note = Table B: HLA-DRB1*04:01L HLA-DRB1*01:01L HLA-DRB1*03:01L HLA-DRB1*11:02L HLA-DRB1*11:03L HLA-DRB1*11:01L HLA-DRB4*01:01L HLA-DRB1*08:02L
  source 1..14: note = Severe acute respiratory syndrome coronavirus 2
EHIVYGDFSHSQLG

SEQ ID NO: 12466 - protein, 14 aa, Severe acute respiratory syndrome-related coronavirus
  REGION 1..14: note = Table B: HLA-DRB1*04:01L HLA-DRB1*04:04L HLA-DRB4*03:01NL HLA-DRB1*14:17L HLA-DRB1*10:01L
  source 1..14: note = Severe acute respiratory syndrome coronavirus 2
ESPFELEDFIPMDS

SEQ ID NO: 12467 - protein, 14 aa, Severe acute respiratory syndrome-related coronavirus
  REGION 1..14: note = Table B: HLA-DRB1*04:01L HLA-DRB1*13:02L HLA-DRB1*04:04L HLA-DRB1*01:01L HLA-DRB3*02:01L HLA-DRB1*11:03L HLA-DRB1*14:02L HLA-DQA1*05:05-B1*03:19L HLA-DRB1*10:01L HLA-DRB1*08:03L
  source 1..14: note = Severe acute respiratory syndrome coronavirus 2
SPFELEDFIPMDST

SEQ ID NO: 12468 - protein, 13 aa, Severe acute respiratory syndrome-related coronavirus
  REGION 1..13: note = Table B: HLA-DRB1*04:01L HLA-DRB1*01:01L HLA-DRB1*11:01L HLA-DRB5*01:01L HLA-DRB4*01:01L HLA-DRB3*01:01L HLA-DPA1*01:03-B1*104:01L HLA-DRB1*15:01L
  source 1..13: note = Severe acute respiratory syndrome coronavirus 2
LEDFIPMDSTVKN

SEQ ID NO: 12469 - protein, 13 aa, Severe acute respiratory syndrome-related coronavirus
  REGION 1..13: note = Table B: HLA-DRB1*04:01L HLA-DRB1*01:01L HLA-DRB1*08:77L HLA-DRB1*11:02L HLA-DRB5*01:01L HLA-DRB4*01:01L
  source 1..13: note = Severe acute respiratory syndrome coronavirus 2
DDFVEIIKSQDLS

SEQ ID NO: 12470 - protein, 14 aa, Severe acute respiratory syndrome-related coronavirus
  REGION 1..14: note = Table B: HLA-DRB1*04:01L HLA-DRB3*02:01L HLA-DRB1*11:04L HLA-DQA1*01:01-B1*05:01L HLA-DQA1*05:05-B1*03:19L HLA-DRB4*01:01L HLA-DRB1*09:01L HLA-DRB3*01:01L HLA-DPA1*01:03-B1*104:01L HLA-DRB1*10:01L HLA-DRB1*08:03L
  source 1..14: note = Severe acute respiratory syndrome coronavirus 2
SKVVKVTIDYTEIS

SEQ ID NO: 12471 - protein, 14 aa, Severe acute respiratory syndrome-related coronavirus
  REGION 1..14: note = Table B: HLA-DRB1*04:01L HLA-DRB1*11:02L HLA-DRB1*11:03L HLA-DRB1*11:04L HLA-DRB1*08:01L HLA-DRB1*11:01L HLA-DPA1*01:03-B1*02:01L HLA-DRB1*08:02L HLA-DRB1*08:03L
  source 1..14: note = Severe acute respiratory syndrome coronavirus 2
VVKVTIDYTEISFM

SEQ ID NO: 12472 - protein, 15 aa, Severe acute respiratory syndrome-related coronavirus
  REGION 1..15: note = Table B: HLA-DRB1*04:01L HLA-DRB1*13:02L HLA-DRB1*04:04L HLA-DRB1*08:04L HLA-DRB1*08:77L HLA-DRB3*02:01L HLA-DRB1*11:02L HLA-DRB1*11:03L HLA-DRB1*11:04L HLA-DQA1*01-B1*05L HLA-DRB1*09:01L HLA-DRB1*12:02L HLA-DRB3*01:01L HLA-DRB1*14:17L
  REGION 1..15: note = CONT. FROM ABOVE: HLA-DPA1*01:02-B1*04:01L HLA-DRB1*07:01L HLA-D RB1*08:02L HLA-DRB1*08:03L
  source 1..15: note = Severe acute respiratory syndrome coronavirus 2
SQAWQPGVAMPNLYK

SEQ ID NO: 12473 - protein, 13 aa, Severe acute respiratory syndrome-related coronavirus
  REGION 1..13: note = Table B: HLA-DRB1*04:01L HLA-DRB1*08:04L HLA-DRB1*08:77L HLA-DRB3*02:01L HLA-DPA1*01:03-B1*03:01L HLA-DPA1*03:01-B1*04:02L HLA-DRB1*14:02L HLA-DQA1*05:05-B1*03:19L HLA-DRB1*09:01L
  REGION 1..13: note = CONT. FROM ABOVE: HLA-DPA1*02:01-B1*13:01L HLA-DPA1*01:02-B1*04: 01L
  source 1..13: note = Severe acute respiratory syndrome coronavirus 2
DLQNYGDSATLPK

SEQ ID NO: 12474 - protein, 13 aa, Severe acute respiratory syndrome-related coronavirus
  REGION 1..13: note = Table B: HLA-DRB1*04:01L HLA-DRB1*08:04L HLA-DRB3*02:01L HLA-DPA1*03:01-B1*04:02L HLA-DRB1*11:01L HLA-DRB1*09:01L HLA-DRB3*01:01L HLA-DPA1*01:03-B1*104:01L
  source 1..13: note = Severe acute respiratory syndrome coronavirus 2
LQNYGDSATLPKG

SEQ ID NO: 12475 - protein, 15 aa, Severe acute respiratory syndrome-related coronavirus
  REGION 1..15: note = Table B: HLA-DRB1*04:01L HLA-DRB1*01:01L HLA-DRB1*08:77L HLA-DRB1*03:01L HLA-DRB1*11:02L HLA-DRB1*13:01L HLA-DRB4*01:01L HLA-DRB1*10:01L HLA-DRB1*08:02L HLA-DRB1*15:01L
  source 1..15: note = Severe acute respiratory syndrome coronavirus 2
LPKGIMMNVAKYTQL

SEQ ID NO: 12476 - protein, 15 aa, Severe acute respiratory syndrome-related coronavirus
  REGION 1..15: note = Table B: HLA-DRB1*04:01L HLA-DRB1*13:02L HLA-DRB1*04:04L HLA-DRB1*01:01L HLA-DRB1*08:04L HLA-DPA1*01:03-B1*03:01L HLA-DRB1*14:01L HLA-DRB1*11:03L HLA-DRB1*11:04L HLA-DRB1*11:01L HLA-DRB5*01:01L HLA-DQA1*01-B1*05L HLA-DRB1*04:10L
  REGION 1..15: note = CONT. FROM ABOVE: HLA-DPA1*01:03-B1*04:02L HLA-DRB1*12:02L HLA-D PA1*02:01-B1*13:01L HLA-DPA1*03:01-B1*105:01L HLA-DPA1*01:03-B1* 104:01L HLA-DRB1*07:01L HLA-DRB1*10:01L HLA-DRB1*08:03L HLA-DRB1 *15:03L
  source 1..15: note = Severe acute respiratory syndrome coronavirus 2
VIHFGAGSDKGVAPG

SEQ ID NO: 12477 - protein, 10 aa, Severe acute respiratory syndrome-related coronavirus
  REGION 1..10: note = Table B: HLA-DRB1*04:01L HLA-DRB1*13:02M HLA-DRB1*13:03M HLA-DRB1*01:03L HLA-DRB1*04:02L HLA-DRB1*04:04L HLA-DQA1*01:02-B1*06:02L HLA-DRB1*01:01M HLA-DRB4*03:01NM HLA-DRB3*02:01M HLA-DRB1*14:01L HLA-DRB1*11:04M HLA-DRB1*14:02L
  REGION 1..10: note = CONT. FROM ABOVE: HLA-DRB1*08:01M HLA-DRB1*11:01L HLA-DRB5*01:01 M HLA-DRB5*02:02L HLA-DRB1*13:01L HLA-DPA1*01:03-B1*04:01L HLA-D PA1*01:03-B1*04:02L HLA-DRB1*12:01M HLA-DRB1*12:02M HLA-DRB3*01: 01L HLA-DPA1*03:01-B1*105:01L HLA-DQA1*03:01-B1*03:02M
  REGION 1..10: note = CONT. FROM ABOVE: HLA-DRB1*14:54L HLA-DQA1*05:05-B1*03:01M HLA-D RB1*14:17L HLA-DRB1*16:01L HLA-DQA1*01:03-B1*06:01L HLA-DRB1*08: 02L HLA-DRB1*08:03L HLA-DQA1*02:01-B1*03:03L HLA-DRB1*15:01L
  source 1..10: note = Severe acute respiratory syndrome coronavirus 2
GVAPGTAVLR

SEQ ID NO: 12478 - protein, 14 aa, Severe acute respiratory syndrome-related coronavirus
  REGION 1..14: note = Table B: HLA-DRB1*04:01L HLA-DRB1*04:04L HLA-DRB1*01:01L HLA-DRB1*03:01L HLA-DRB1*11:02L HLA-DQA1*01:01-B1*05:01L HLA-DRB1*11:01L HLA-DRB4*01:01L HLA-DRB1*04:10L HLA-DRB3*01:01L HLA-DPA1*01:03-B1*02:01L HLA-DRB1*10:01L HLA-DRB1*08:03L
  REGION 1..14: note = CONT. FROM ABOVE: HLA-DRB1*15:01L
  source 1..14: note = Severe acute respiratory syndrome coronavirus 2
RQWLPTGTLLVDSD

SEQ ID NO: 12479 - protein, 15 aa, Severe acute respiratory syndrome-related coronavirus
  REGION 1..15: note = Table B: HLA-DRB1*04:01L HLA-DRB1*13:02L HLA-DRB1*04:04L HLA-DRB1*01:02L HLA-DRB1*08:04L HLA-DRB1*08:77L HLA-DRB3*02:01L HLA-DPA1*01:03-B1*03:01L HLA-DRB1*14:01L HLA-DRB1*11:03L HLA-DRB1*11:04L HLA-DRB1*08:01L HLA-DRB1*09:01L
  REGION 1..15: note = CONT. FROM ABOVE: HLA-DPA1*01:03-B1*04:02L HLA-DRB1*12:02L HLA-D RB3*01:01L HLA-DRB1*14:54L HLA-DPA1*01:03-B1*104:01L HLA-DPA1*01 :02-B1*04:01L HLA-DRB1*10:01L HLA-DRB1*08:03L
  source 1..15: note = Severe acute respiratory syndrome coronavirus 2
LPTGTLLVDSDLNDF

SEQ ID NO: 12480 - protein, 14 aa, Severe acute respiratory syndrome-related coronavirus
  REGION 1..14: note = Table B: HLA-DRB1*04:01L HLA-DRB1*01:03L HLA-DRB1*04:04L HLA-DRB1*01:02L HLA-DRB4*03:01NL HLA-DRB1*08:04L HLA-DRB1*08:03L
  source 1..14: note = Severe acute respiratory syndrome coronavirus 2
GTLLVDSDLNDFVS

SEQ ID NO: 12481 - protein, 12 aa, Severe acute respiratory syndrome-related coronavirus
  REGION 1..12: note = Table B: HLA-DRB1*04:01L HLA-DRB1*04:04L HLA-DRB1*01:02L HLA-DRB4*03:01NL HLA-DRB1*08:04L HLA-DRB3*02:01L HLA-DPA1*01:03-B1*03:01L HLA-DRB1*14:01L HLA-DRB1*11:03L HLA-DRB1*11:04L HLA-DRB1*14:02L HLA-DRB5*01:01L HLA-DRB4*01:01L
  REGION 1..12: note = CONT. FROM ABOVE: HLA-DPA1*01:03-B1*04:01L HLA-DRB1*04:10L HLA-D RB1*09:01L HLA-DRB1*12:02L HLA-DRB3*01:01L HLA-DPA1*02:01-B1*13: 01L HLA-DPA1*03:01-B1*105:01L HLA-DRB1*14:54L HLA-DRB1*07:01L HL A-DRB1*10:01L HLA-DRB1*04:08L HLA-DRB1*08:03L HLA-DRB1*15:03L
  source 1..12: note = Severe acute respiratory syndrome coronavirus 2
LNDFVSDADSTL

SEQ ID NO: 12482 - protein, 11 aa, Severe acute respiratory syndrome-related coronavirus
  REGION 1..11: note = Table B: HLA-DRB1*04:01L HLA-DRB1*04:03L HLA-DRB1*13:03L HLA-DRB1*01:03L HLA-DRB1*04:02L HLA-DRB1*04:04L HLA-DRB1*04:05L HLA-DRB4*03:01NL HLA-DRB1*08:77L HLA-DRB1*14:01L HLA-DRB1*11:03L HLA-DRB1*11:04L HLA-DRB1*14:02L HLA-DQA1*01-B1*05L
  REGION 1..11: note = CONT. FROM ABOVE: HLA-DQA1*05:01-B1*02:01L HLA-DRB1*04:10L HLA-D RB1*12:01L HLA-DQA1*03:01-B1*03:02L HLA-DRB1*14:54L HLA-DRB1*14: 17L HLA-DRB1*10:01L HLA-DRB1*16:01L HLA-DRB1*04:08L
  source 1..11: note = Severe acute respiratory syndrome coronavirus 2
FVSDADSTLIG

SEQ ID NO: 12483 - protein, 15 aa, Severe acute respiratory syndrome-related coronavirus
  REGION 1..15: note = Table B: HLA-DRB1*04:01L HLA-DRB1*13:02L HLA-DRB3*02:01L HLA-DRB1*11:04L HLA-DRB1*14:02L HLA-DRB1*08:01L HLA-DPA1*01:03-B1*04:02L HLA-DPA1*02:01-B1*13:01L HLA-DPA1*01:03-B1*104:01L HLA-DRB1*10:01L
  source 1..15: note = Severe acute respiratory syndrome coronavirus 2
DSTLIGDCATVHTAN

SEQ ID NO: 12484 - protein, 13 aa, Severe acute respiratory syndrome-related coronavirus
  REGION 1..13: note = Table B: HLA-DRB1*04:01L HLA-DRB1*08:04L HLA-DRB1*14:01L HLA-DRB1*11:04L HLA-DRB1*08:01L HLA-DRB1*10:01L HLA-DRB1*08:03L
  source 1..13: note = Severe acute respiratory syndrome coronavirus 2
DLIISDMYDPKTK

SEQ ID NO: 12485 - protein, 14 aa, Severe acute respiratory syndrome-related coronavirus
  REGION 1..14: note = Table B: HLA-DRB1*04:01L HLA-DRB1*01:01L HLA-DRB1*08:77L HLA-DRB1*03:01L HLA-DRB1*13:01L HLA-DRB4*01:01L HLA-DQA1*05:05-B1*03:116L HLA-DRB1*09:01L HLA-DPA1*01:03-B1*104:01L HLA-DRB1*07:01L
  source 1..14: note = Severe acute respiratory syndrome coronavirus 2
GGSVAIKITEHSWN

SEQ ID NO: 12486 - protein, 14 aa, Severe acute respiratory syndrome-related coronavirus
  REGION 1..14: note = Table B: HLA-DRB1*04:01L HLA-DRB1*04:02L HLA-DRB1*04:04L HLA-DRB1*01:01L HLA-DRB1*08:04L HLA-DRB1*11:02L HLA-DRB1*11:03L HLA-DRB1*11:04L HLA-DRB1*14:02L HLA-DRB1*11:01L HLA-DRB4*01:01L HLA-DQA1*05:05-B1*03:116L HLA-DRB3*01:01L
  REGION 1..14: note = CONT. FROM ABOVE: HLA-DPA1*01:03-B1*02:01L HLA-DRB1*10:01L HLA-D RB1*08:02L HLA-DRB1*08:03L
  source 1..14: note = Severe acute respiratory syndrome coronavirus 2
GHFAWWTAFVTNVN

SEQ ID NO: 12487 - protein, 14 aa, Severe acute respiratory syndrome-related coronavirus
  REGION 1..14: note = Table B: HLA-DRB1*04:01L HLA-DRB1*01:01L
  source 1..14: note = Severe acute respiratory syndrome coronavirus 2
NYIFWRNTNPIQLS

SEQ ID NO: 12488 - protein, 14 aa, Severe acute respiratory syndrome-related coronavirus
  REGION 1..14: note = Table B: HLA-DRB1*04:01L HLA-DPA1*01:03-B1*02:01L HLA-DRB1*08:02L
  source 1..14: note = Severe acute respiratory syndrome coronavirus 2
YIFWRNTNPIQLSS

SEQ ID NO: 12489 - protein, 14 aa, Severe acute respiratory syndrome-related coronavirus
  REGION 1..14: note = Table B: HLA-DRB1*04:01L HLA-DRB1*04:04L HLA-DRB1*01:01L HLA-DRB1*11:02L HLA-DRB1*13:01L HLA-DPA1*02:01-B1*13:01L HLA-DRB1*07:01L HLA-DRB1*10:01L HLA-DQA1*01:03-B1*06:01L HLA-DRB1*08:02L HLA-DRB1*08:03L HLA-DRB1*15:01L
  source 1..14: note = Severe acute respiratory syndrome coronavirus 2
GRLIIRENNRVVIS

SEQ ID NO: 12490 - protein, 17 aa, Severe acute respiratory syndrome-related coronavirus
  REGION 1..17: note = Table B: HLA-DRB1*04:01L HLA-DRB1*01:01L HLA-DRB1*13:01L HLA-DPA1*01:03-B1*02:01L HLA-DRB1*15:01L
  source 1..17: note = Severe acute respiratory syndrome coronavirus 2
LPPAYTNSFTRGVYYPD

SEQ ID NO: 12491 - protein, 14 aa, Severe acute respiratory syndrome-related coronavirus
  REGION 1..14: note = Table B: HLA-DRB1*04:01L HLA-DRB1*04:04L HLA-DRB1*01:01L HLA-DRB1*11:04L
  source 1..14: note = Severe acute respiratory syndrome coronavirus 2
VTWFHAIHVSGTNG

SEQ ID NO: 12492 - protein, 13 aa, Severe acute respiratory syndrome-related coronavirus
  REGION 1..13: note = Table B: HLA-DRB1*04:01L HLA-DRB1*13:02L HLA-DRB1*08:04L HLA-DRB1*11:03L HLA-DQA1*05:05-B1*03:19L HLA-DRB1*12:02L HLA-DPA1*03:01-B1*105:01L HLA-DQA1*05:05-B1*03:01L HLA-DQA1*01:03-B1*06:01L
  source 1..13: note = Severe acute respiratory syndrome coronavirus 2
FHAIHVSGTNGTK

SEQ ID NO: 12493 - protein, 13 aa, Severe acute respiratory syndrome-related coronavirus
  REGION 1..13: note = Table B: HLA-DRB1*04:01L HLA-DRB1*11:01L HLA-DRB3*01:01L
  source 1..13: note = Severe acute respiratory syndrome coronavirus 2
HAIHVSGTNGTKR

SEQ ID NO: 12494 - protein, 13 aa, Severe acute respiratory syndrome-related coronavirus
  REGION 1..13: note = Table B: HLA-DRB1*04:01L HLA-DRB1*11:01L HLA-DRB4*01:01L
  source 1..13: note = Severe acute respiratory syndrome coronavirus 2
NDGVYFASTEKSN

SEQ ID NO: 12495 - protein, 14 aa, Severe acute respiratory syndrome-related coronavirus
  REGION 1..14: note = Table B: HLA-DRB1*04:01L HLA-DRB1*11:02L HLA-DRB1*11:01L HLA-DRB4*01:01L HLA-DRB3*01:01L HLA-DPA1*01:03-B1*02:01L HLA-DRB1*08:02L
  source 1..14: note = Severe acute respiratory syndrome coronavirus 2
DGVYFASTEKSNII

SEQ ID NO: 12496 - protein, 14 aa, Severe acute respiratory syndrome-related coronavirus
  REGION 1..14: note = Table B: HLA-DRB1*04:01L HLA-DRB1*04:04L HLA-DRB1*08:04L HLA-DPA1*01:03-B1*03:01L HLA-DPA1*03:01-B1*04:02L HLA-DQA1*01:01-B1*05:01L HLA-DPA1*01:03-B1*04:02L HLA-DPA1*02:01-B1*13:01L HLA-DPA1*01:02-B1*04:01L
  REGION 1..14: note = CONT. FROM ABOVE: HLA-DRB1*10:01L HLA-DRB1*15:03L
  source 1..14: note = Severe acute respiratory syndrome coronavirus 2
IRGWIFGTTLDSKT

SEQ ID NO: 12497 - protein, 12 aa, Severe acute respiratory syndrome-related coronavirus
  REGION 1..12: note = Table B: HLA-DRB1*04:01L HLA-DRB1*08:04L HLA-DRB3*02:01L HLA-DRB1*08:01L HLA-DRB1*11:01L HLA-DRB4*01:01L HLA-DRB1*09:01L HLA-DPA1*01:03-B1*04:02L HLA-DRB3*01:01L HLA-DPA1*02:01-B1*13:01L HLA-DPA1*01:03-B1*104:01L
  REGION 1..12: note = CONT. FROM ABOVE: HLA-DRB1*07:01L HLA-DRB1*08:03L
  source 1..12: note = Severe acute respiratory syndrome coronavirus 2
WIFGTTLDSKTQ

SEQ ID NO: 12498 - protein, 14 aa, Severe acute respiratory syndrome-related coronavirus
  REGION 1..14: note = Table B: HLA-DRB1*04:01L HLA-DRB1*01:01L HLA-DRB1*03:01L HLA-DRB1*11:02L HLA-DQA1*01:01-B1*05:01L HLA-DRB1*08:01L HLA-DRB1*11:01L HLA-DRB5*01:01L HLA-DPA1*01:03-B1*04:02L HLA-DRB3*01:01L HLA-DPA1*02:01-B1*13:01L
  REGION 1..14: note = CONT. FROM ABOVE: HLA-DPA1*01:03-B1*02:01L HLA-DPA1*01:03-B1*104 :01L HLA-DRB1*08:02L HLA-DRB1*15:01L
  source 1..14: note = Severe acute respiratory syndrome coronavirus 2
TQSLLIVNNATNVV

SEQ ID NO: 12499 - protein, 14 aa, Severe acute respiratory syndrome-related coronavirus
  REGION 1..14: note = Table B: HLA-DRB1*04:01L
  source 1..14: note = Severe acute respiratory syndrome coronavirus 2
QSLLIVNNATNVVI

SEQ ID NO: 12500 - protein, 14 aa, Severe acute respiratory syndrome-related coronavirus
  REGION 1..14: note = Table B: HLA-DRB1*04:01L HLA-DRB1*11:03L HLA-DPA1*01:03-B1*104:01L HLA-DQA1*05:05-B1*03:01L HLA-DRB1*07:01L HLA-DRB1*10:01L HLA-DRB1*08:03L
  source 1..14: note = Severe acute respiratory syndrome coronavirus 2
DPFLGVYYHKNNKS

SEQ ID NO: 12501 - protein, 18 aa, Severe acute respiratory syndrome-related coronavirus
  REGION 1..18: note = Table B: HLA-DRB1*04:01L
  source 1..18: note = Severe acute respiratory syndrome coronavirus 2
NNKSWMESEFRVYSSANN

SEQ ID NO: 12502 - protein, 14 aa, Severe acute respiratory syndrome-related coronavirus
  REGION 1..14: note = Table B: HLA-DRB1*04:01L HLA-DRB1*11:02L HLA-DPA1*01:03-B1*02:01L
  source 1..14: note = Severe acute respiratory syndrome coronavirus 2
ESEFRVYSSANNCT

SEQ ID NO: 12503 - protein, 15 aa, Severe acute respiratory syndrome-related coronavirus
  REGION 1..15: note = Table B: HLA-DRB1*04:01L HLA-DRB1*01:01L HLA-DRB1*11:03L HLA-DRB4*01:01L HLA-DQA1*05:05-B1*03:116L HLA-DRB1*04:10L HLA-DRB1*07:01L HLA-DRB1*08:02L
  source 1..15: note = Severe acute respiratory syndrome coronavirus 2
TFEYVSQPFLMDLEG

SEQ ID NO: 12504 - protein, 13 aa, Severe acute respiratory syndrome-related coronavirus
  REGION 1..13: note = Table B: HLA-DRB1*04:01L HLA-DRB1*04:04L HLA-DQA1*01:02-B1*06:02L HLA-DRB3*02:01L HLA-DRB1*11:03L HLA-DRB1*11:01L HLA-DRB5*01:01L HLA-DRB4*01:01L HLA-DRB1*09:01L HLA-DPA1*02:01-B1*13:01L HLA-DRB1*15:03L
  source 1..13: note = Severe acute respiratory syndrome coronavirus 2
SQPFLMDLEGKQG

SEQ ID NO: 12505 - protein, 15 aa, Severe acute respiratory syndrome-related coronavirus
  REGION 1..15: note = Table B: HLA-DRB1*04:01L HLA-DRB1*01:01L HLA-DRB1*11:01L HLA-DQA1*05:05-B1*03:01L HLA-DQA1*01:03-B1*06:01L
  source 1..15: note = Severe acute respiratory syndrome coronavirus 2
QPFLMDLEGKQGNFK

SEQ ID NO: 12506 - protein, 14 aa, Severe acute respiratory syndrome-related coronavirus
  REGION 1..14: note = Table B: HLA-DRB1*04:01L HLA-DRB1*04:04L HLA-DRB1*01:01L HLA-DRB1*11:03L HLA-DRB1*13:01L HLA-DPA1*01:03-B1*02:01L HLA-DRB1*07:01L HLA-DRB1*08:03L
  source 1..14: note = Severe acute respiratory syndrome coronavirus 2
LREFVFKNIDGYFK

SEQ ID NO: 12507 - protein, 15 aa, Severe acute respiratory syndrome-related coronavirus
  REGION 1..15: note = Table B: HLA-DRB1*04:01L HLA-DRB1*03:01L HLA-DQA1*01:01-B1*05:01L HLA-DQA1*01-B1*05L HLA-DQA1*05:01-B1*02:01L HLA-DRB1*13:01L HLA-DPA1*01:03-B1*04:01L HLA-DRB1*04:10L HLA-DRB1*09:01L
  source 1..15: note = Severe acute respiratory syndrome coronavirus 2
IDGYFKIYSKHTPIN

SEQ ID NO: 12508 - protein, 16 aa, Severe acute respiratory syndrome-related coronavirus
  REGION 1..16: note = Table B: HLA-DRB1*04:01L HLA-DRB1*01:01L HLA-DRB1*11:01L HLA-DRB1*08:02L
  source 1..16: note = Severe acute respiratory syndrome coronavirus 2
LPQGFSALEPLVDLPI

SEQ ID NO: 12509 - protein, 13 aa, Severe acute respiratory syndrome-related coronavirus
  REGION 1..13: note = Table B: HLA-DRB1*04:01L HLA-DRB1*01:01L HLA-DRB1*03:01L HLA-DRB1*11:02L HLA-DRB1*11:01L HLA-DRB5*01:01L HLA-DPA1*01:03-B1*04:01L HLA-DPA1*01:03-B1*04:02L HLA-DPA1*01:03-B1*104:01L HLA-DPA1*01:02-B1*04:01L
  source 1..13: note = Severe acute respiratory syndrome coronavirus 2
FSALEPLVDLPIG

SEQ ID NO: 12510 - protein, 13 aa, Severe acute respiratory syndrome-related coronavirus
  REGION 1..13: note = Table B: HLA-DRB1*04:01L HLA-DRB1*13:02L HLA-DRB1*04:04L HLA-DRB1*08:04L HLA-DQA1*01:01-B1*05:01L HLA-DRB4*01:01L HLA-DRB1*09:01L HLA-DRB3*01:01L HLA-DRB1*14:54L HLA-DQA1*05:05-B1*03:01L HLA-DRB1*07:01L
  source 1..13: note = Severe acute respiratory syndrome coronavirus 2
LPIGINITRFQTL

SEQ ID NO: 12511 - protein, 14 aa, Severe acute respiratory syndrome-related coronavirus
  REGION 1..14: note = Table B: HLA-DRB1*04:01L HLA-DRB1*01:01L HLA-DRB1*03:01L HLA-DRB1*11:02L HLA-DRB1*11:01L HLA-DRB3*01:01L HLA-DPA1*01:03-B1*02:01L HLA-DRB1*08:02L HLA-DRB1*08:03L
  source 1..14: note = Severe acute respiratory syndrome coronavirus 2
LKYNENGTITDAVD

SEQ ID NO: 12512 - protein, 15 aa, Severe acute respiratory syndrome-related coronavirus
  REGION 1..15: note = Table B: HLA-DRB1*04:01L HLA-DRB1*10:01L
  source 1..15: note = Severe acute respiratory syndrome coronavirus 2
TDAVDCALDPLSETK

SEQ ID NO: 12513 - protein, 13 aa, Severe acute respiratory syndrome-related coronavirus
  REGION 1..13: note = Table B: HLA-DRB1*04:01L HLA-DRB1*01:01L HLA-DRB1*11:03L HLA-DRB1*11:01L HLA-DPA1*01:03-B1*04:02L HLA-DRB3*01:01L HLA-DRB1*07:01L
  source 1..13: note = Severe acute respiratory syndrome coronavirus 2
LKSFTVEKGIYQT

SEQ ID NO: 12514 - protein, 12 aa, Severe acute respiratory syndrome-related coronavirus
  REGION 1..12: note = Table B: HLA-DRB1*04:01L HLA-DRB1*13:02L HLA-DRB1*04:04L HLA-DRB1*04:05L HLA-DRB1*01:01L HLA-DRB1*08:04L HLA-DRB1*08:77L HLA-DRB3*02:01L HLA-DPA1*01:03-B1*03:01L HLA-DRB1*03:01L HLA-DRB1*11:03L HLA-DRB1*11:04L HLA-DRB1*08:01L HLA-DRB1*11:01L
  REGION 1..12: note = CONT. FROM ABOVE: HLA-DQA1*05:05-B1*03:19L HLA-DRB1*04:10L HLA-D RB1*09:01L HLA-DRB1*12:02L HLA-DRB3*01:01L HLA-DPA1*02:01-B1*13: 01L HLA-DRB1*14:54L HLA-DPA1*01:03-B1*02:01L HLA-DPA1*01:03-B1*1 04:01L HLA-DQA1*05:05-B1*03:01L HLA-DRB1*07:01L HLA-DRB1*10:01L
  REGION 1..12: note = CONT. FROM ABOVE: HLA-DRB1*08:03L HLA-DRB1*15:01L
  source 1..12: note = Severe acute respiratory syndrome coronavirus 2
IYQTSNFRVQPT

SEQ ID NO: 12515 - protein, 12 aa, Severe acute respiratory syndrome-related coronavirus
  REGION 1..12: note = Table B: HLA-DRB1*04:01L HLA-DRB1*04:03L HLA-DRB1*04:02L HLA-DRB1*04:04L HLA-DRB1*01:01L HLA-DRB1*11:03L HLA-DRB1*09:01L HLA-DRB3*01:01L HLA-DPA1*01:03-B1*02:01L HLA-DRB1*07:01L HLA-DRB1*08:02L HLA-DRB1*08:03L
  source 1..12: note = Severe acute respiratory syndrome coronavirus 2
EVFNATRFASVY

SEQ ID NO: 12516 - protein, 14 aa, Severe acute respiratory syndrome-related coronavirus
  REGION 1..14: note = Table B: HLA-DRB1*04:01L HLA-DRB1*11:03L HLA-DQA1*05:05-B1*03:01L HLA-DRB1*14:17L HLA-DRB1*10:01L HLA-DRB1*15:01L
  source 1..14: note = Severe acute respiratory syndrome coronavirus 2
ATRFASVYAWNRKR

SEQ ID NO: 12517 - protein, 12 aa, Severe acute respiratory syndrome-related coronavirus
  REGION 1..12: note = Table B: HLA-DRB1*04:01L HLA-DRB1*01:03L HLA-DRB1*01:02L HLA-DQA1*01-B1*05L HLA-DQA1*05:05-B1*03:19L HLA-DRB1*12:01L HLA-DPA1*03:01-B1*105:01L HLA-DQA1*03:01-B1*03:02L HLA-DRB1*14:54L HLA-DQA1*05:05-B1*03:01L HLA-DRB1*10:01L
  REGION 1..12: note = CONT. FROM ABOVE: HLA-DRB1*15:03L
  source 1..12: note = Severe acute respiratory syndrome coronavirus 2
DYSVLYNSASFS

SEQ ID NO: 12518 - protein, 12 aa, Severe acute respiratory syndrome-related coronavirus
  REGION 1..12: note = Table B: HLA-DRB1*04:01L HLA-DRB1*04:04L HLA-DRB1*08:04L HLA-DRB1*11:02L HLA-DRB1*11:04L HLA-DRB1*09:01L HLA-DRB1*12:02L HLA-DRB3*01:01L HLA-DRB1*14:54L HLA-DRB1*07:01L HLA-DRB1*08:03L
  source 1..12: note = Severe acute respiratory syndrome coronavirus 2
VLYNSASFSTFK

SEQ ID NO: 12519 - protein, 10 aa, Severe acute respiratory syndrome-related coronavirus
  REGION 1..10: note = Table B: HLA-DRB1*04:01L HLA-DRB1*13:02M HLA-DRB1*13:03M HLA-DRB1*04:02L HLA-DRB1*01:01L HLA-DRB4*03:01NL HLA-DRB3*02:01L HLA-DRB1*14:01L HLA-DRB1*11:04L HLA-DRB1*14:02L HLA-DRB1*08:01M HLA-DRB5*01:01L HLA-DPA1*01:03-B1*04:02L HLA-DRB1*12:01M
  REGION 1..10: note = CONT. FROM ABOVE: HLA-DRB1*12:02L HLA-DRB3*01:01L HLA-DPA1*03:01 -B1*105:01L HLA-DQA1*03:01-B1*03:02M HLA-DQA1*05:05-B1*03:01M HL A-DRB1*14:17L HLA-DRB1*16:01L HLA-DQA1*01:03-B1*06:01L HLA-DRB1* 08:02L HLA-DRB1*08:03L HLA-DQA1*02:01-B1*03:03L HLA-DRB1*15:01L
  source 1..10: note = Severe acute respiratory syndrome coronavirus 2
NVYADSFVIR

SEQ ID NO: 12520 - protein, 16 aa, Severe acute respiratory syndrome-related coronavirus
  REGION 1..16: note = Table B: HLA-DRB1*04:01L HLA-DRB1*03:01L HLA-DRB1*11:02L HLA-DRB4*01:01L HLA-DPA1*01:03-B1*02:01L HLA-DRB1*08:02L
  source 1..16: note = Severe acute respiratory syndrome coronavirus 2
VRQIAPGQTGKIADYN

SEQ ID NO: 12521 - protein, 13 aa, Severe acute respiratory syndrome-related coronavirus
  REGION 1..13: note = Table B: HLA-DRB1*04:01L HLA-DRB1*04:04L HLA-DRB1*01:01L HLA-DRB1*08:01L HLA-DRB1*11:01L HLA-DRB5*01:01L HLA-DRB1*13:01L HLA-DRB1*04:10L HLA-DRB1*09:01L HLA-DRB1*07:01L HLA-DRB1*08:03L
  source 1..13: note = Severe acute respiratory syndrome coronavirus 2
KPFERDISTEIYQ

SEQ ID NO: 12522 - protein, 13 aa, Severe acute respiratory syndrome-related coronavirus
  REGION 1..13: note = Table B: HLA-DRB1*04:01L HLA-DRB1*08:04L HLA-DRB1*11:04L HLA-DRB1*11:01L HLA-DQA1*01-B1*05L HLA-DRB1*04:10L HLA-DRB1*09:01L HLA-DRB1*07:01L HLA-DRB1*08:03L
  source 1..13: note = Severe acute respiratory syndrome coronavirus 2
TEIYQAGSTPCNG

SEQ ID NO: 12523 - protein, 15 aa, Severe acute respiratory syndrome-related coronavirus
  REGION 1..15: note = Table B: HLA-DRB1*04:01L HLA-DRB1*01:01L HLA-DRB1*03:01L HLA-DRB1*11:02L HLA-DQA1*01:01-B1*05:01L HLA-DRB1*11:01L HLA-DRB5*01:01L HLA-DRB4*01:01L HLA-DPA1*01:03-B1*04:01L HLA-DQA1*05:05-B1*03:116L HLA-DRB3*01:01L
  REGION 1..15: note = CONT. FROM ABOVE: HLA-DPA1*01:03-B1*104:01L HLA-DRB1*07:01L HLA- DRB1*08:02L
  source 1..15: note = Severe acute respiratory syndrome coronavirus 2
FPLQSYGFQPTNGVG

SEQ ID NO: 12524 - protein, 14 aa, Severe acute respiratory syndrome-related coronavirus
  REGION 1..14: note = Table B: HLA-DRB1*04:01L HLA-DRB1*04:04L HLA-DRB1*04:05L HLA-DRB1*01:01L HLA-DPA1*01:03-B1*03:01L HLA-DRB1*14:01L HLA-DRB1*11:04L HLA-DRB1*08:01L HLA-DRB3*01:01L
  source 1..14: note = Severe acute respiratory syndrome coronavirus 2
FELLHAPATVCGPK

SEQ ID NO: 12525 - protein, 15 aa, Severe acute respiratory syndrome-related coronavirus
  REGION 1..15: note = Table B: HLA-DRB1*04:01L HLA-DRB1*03:01L HLA-DRB4*01:01L HLA-DPA1*01:03-B1*104:01L HLA-DRB1*10:01L
  source 1..15: note = Severe acute respiratory syndrome coronavirus 2
GRDIADTTDAVRDPQ

SEQ ID NO: 12526 - protein, 16 aa, Severe acute respiratory syndrome-related coronavirus
  REGION 1..16: note = Table B: HLA-DRB1*04:01L HLA-DRB1*01:01L HLA-DRB1*11:02L HLA-DRB1*11:01L HLA-DRB1*08:02L
  source 1..16: note = Severe acute respiratory syndrome coronavirus 2
DPQTLEILDITPCSFG

SEQ ID NO: 12527 - protein, 14 aa, Severe acute respiratory syndrome-related coronavirus
  REGION 1..14: note = Table B: HLA-DRB1*04:01L HLA-DRB1*04:04L HLA-DRB1*08:77L HLA-DRB3*02:01L HLA-DRB1*03:01L HLA-DRB1*11:03L HLA-DQA1*01:01-B1*05:01L HLA-DRB1*08:01L HLA-DRB1*11:01L HLA-DRB4*01:01L HLA-DPA1*01:03-B1*04:01L HLA-DRB1*09:01L
  REGION 1..14: note = CONT. FROM ABOVE: HLA-DRB1*12:02L HLA-DPA1*01:03-B1*02:01L HLA-D PA1*01:03-B1*104:01L HLA-DPA1*01:02-B1*04:01L HLA-DRB1*08:03L
  source 1..14: note = Severe acute respiratory syndrome coronavirus 2
VNNSYECDIPIGAG

SEQ ID NO: 12528 - protein, 13 aa, Severe acute respiratory syndrome-related coronavirus
  REGION 1..13: note = Table B: HLA-DRB1*04:01L HLA-DRB1*13:02L HLA-DRB1*13:03L HLA-DRB1*08:04L HLA-DPA1*03:01-B1*04:02L HLA-DRB1*11:03L HLA-DRB1*11:04L HLA-DRB4*01:01L HLA-DRB1*09:01L HLA-DRB1*12:02L HLA-DPA1*01:03-B1*104:01L HLA-DRB1*08:03L
  source 1..13: note = Severe acute respiratory syndrome coronavirus 2
SIIAYTMSLGAEN

SEQ ID NO: 12529 - protein, 14 aa, Severe acute respiratory syndrome-related coronavirus
  REGION 1..14: note = Table B: HLA-DRB1*04:01L HLA-DRB1*13:02L HLA-DRB1*01:03L HLA-DRB1*04:04L HLA-DRB1*01:01L HLA-DRB1*08:77L HLA-DPA1*01:03-B1*03:01L HLA-DRB1*11:03L HLA-DRB1*14:02L HLA-DQA1*01-B1*05L HLA-DRB1*09:01L HLA-DPA1*01:03-B1*04:02L
  REGION 1..14: note = CONT. FROM ABOVE: HLA-DPA1*02:01-B1*13:01L HLA-DPA1*01:03-B1*104 :01L HLA-DRB1*07:01L HLA-DQA1*01:03-B1*06:01L HLA-DRB1*04:08L
  source 1..14: note = Severe acute respiratory syndrome coronavirus 2
IAYTMSLGAENSVA

SEQ ID NO: 12530 - protein, 14 aa, Severe acute respiratory syndrome-related coronavirus
  REGION 1..14: note = Table B: HLA-DRB1*04:01L HLA-DRB1*01:01L HLA-DPA1*03:01-B1*04:02L HLA-DRB1*03:01L HLA-DRB1*11:02L HLA-DRB4*01:01L HLA-DRB3*01:01L HLA-DPA1*01:02-B1*04:01L HLA-DRB1*08:03L
  source 1..14: note = Severe acute respiratory syndrome coronavirus 2
SVAYSNNSIAIPTN

SEQ ID NO: 12531 - protein, 13 aa, Severe acute respiratory syndrome-related coronavirus
  REGION 1..13: note = Table B: HLA-DRB1*04:01L HLA-DRB1*08:77L HLA-DRB1*14:01L HLA-DRB1*11:01L HLA-DRB3*01:01L HLA-DPA1*01:03-B1*104:01L
  source 1..13: note = Severe acute respiratory syndrome coronavirus 2
NRALTGIAVEQDK

SEQ ID NO: 12532 - protein, 13 aa, Severe acute respiratory syndrome-related coronavirus
  REGION 1..13: note = Table B: HLA-DRB1*04:01L
  source 1..13: note = Severe acute respiratory syndrome coronavirus 2
TGIAVEQDKNTQE

SEQ ID NO: 12533 - protein, 11 aa, Severe acute respiratory syndrome-related coronavirus
  REGION 1..11: note = Table B: HLA-DRB1*04:01L HLA-DRB1*04:03L HLA-DRB1*04:02L HLA-DRB1*04:05L HLA-DPA1*02:01-B1*13:01L HLA-DRB1*14:54L
  source 1..11: note = Severe acute respiratory syndrome coronavirus 2
VEQDKNTQEVF

SEQ ID NO: 12534 - protein, 16 aa, Severe acute respiratory syndrome-related coronavirus
  REGION 1..16: note = Table B: HLA-DRB1*04:01L HLA-DRB3*02:01L HLA-DRB1*13:01L HLA-DPA1*01:03-B1*02:01L
  source 1..16: note = Severe acute respiratory syndrome coronavirus 2
TQEVFAQVKQIYKTPP

SEQ ID NO: 12535 - protein, 14 aa, Severe acute respiratory syndrome-related coronavirus
  REGION 1..14: note = Table B: HLA-DRB1*04:01L HLA-DRB1*13:02L HLA-DRB1*04:04L HLA-DRB1*01:01L HLA-DRB1*08:77L HLA-DRB3*02:01L HLA-DRB1*14:01L HLA-DRB1*11:03L HLA-DRB1*11:04L HLA-DRB1*11:01L HLA-DRB1*09:01L HLA-DRB1*12:02L HLA-DRB3*01:01L HLA-DRB1*14:54L
  REGION 1..14: note = CONT. FROM ABOVE: HLA-DPA1*01:03-B1*104:01L HLA-DRB1*07:01L HLA- DRB1*08:02L
  source 1..14: note = Severe acute respiratory syndrome coronavirus 2
FGGFNFSQILPDPS

SEQ ID NO: 12536 - protein, 14 aa, Severe acute respiratory syndrome-related coronavirus
  REGION 1..14: note = Table B: HLA-DRB1*04:01L HLA-DRB1*01:01L HLA-DRB1*08:77L HLA-DRB3*02:01L HLA-DRB1*14:01L HLA-DRB1*11:03L HLA-DRB4*01:01L HLA-DQA1*05:05-B1*03:116L HLA-DRB1*09:01L HLA-DRB3*01:01L HLA-DRB1*14:54L HLA-DRB1*07:01L HLA-DRB1*08:02L HLA-DRB1*08:03L
  source 1..14: note = Severe acute respiratory syndrome coronavirus 2
GFNFSQILPDPSKP

SEQ ID NO: 12537 - protein, 11 aa, Severe acute respiratory syndrome-related coronavirus
  REGION 1..11: note = Table B: HLA-DRB1*04:01L HLA-DRB1*04:04L HLA-DRB1*01:01L HLA-DRB1*08:04L HLA-DRB3*02:01L HLA-DPA1*01:03-B1*03:01L HLA-DPA1*03:01-B1*04:02L HLA-DRB1*03:01L HLA-DRB1*14:02L HLA-DRB1*08:01L HLA-DRB1*11:01L HLA-DRB5*01:01L
  REGION 1..11: note = CONT. FROM ABOVE: HLA-DQA1*05:05-B1*03:19L HLA-DRB1*13:01L HLA-D RB4*01:01L HLA-DRB1*09:01L HLA-DRB3*01:01L HLA-DPA1*03:01-B1*105 :01L HLA-DQA1*05:05-B1*03:01L HLA-DPA1*01:02-B1*04:01L HLA-DRB1* 07:01L HLA-DRB1*08:03L
  source 1..11: note = Severe acute respiratory syndrome coronavirus 2
SQILPDPSKPS

SEQ ID NO: 12538 - protein, 13 aa, Severe acute respiratory syndrome-related coronavirus
  REGION 1..13: note = Table B: HLA-DRB1*04:01L HLA-DRB1*04:04L HLA-DRB3*02:01L HLA-DRB1*03:01L HLA-DRB1*11:03L
  source 1..13: note = Severe acute respiratory syndrome coronavirus 2
RSFIEDLLFNKVT

SEQ ID NO: 12539 - protein, 14 aa, Severe acute respiratory syndrome-related coronavirus
  REGION 1..14: note = Table B: HLA-DRB1*04:01L HLA-DRB1*11:01L
  source 1..14: note = Severe acute respiratory syndrome coronavirus 2
FNKVTLADAGFIKQ

SEQ ID NO: 12540 - protein, 14 aa, Severe acute respiratory syndrome-related coronavirus
  REGION 1..14: note = Table B: HLA-DRB1*04:01L HLA-DRB1*01:03L HLA-DRB1*04:04L HLA-DRB1*01:01L HLA-DRB1*08:01L HLA-DRB1*11:01L HLA-DRB1*10:01L
  source 1..14: note = Severe acute respiratory syndrome coronavirus 2
IKQYGDCLGDIAAR

SEQ ID NO: 12541 - protein, 14 aa, Severe acute respiratory syndrome-related coronavirus
  REGION 1..14: note = Table B: HLA-DRB1*04:01L HLA-DRB1*13:02L HLA-DRB1*13:03L HLA-DRB1*04:04L HLA-DRB1*04:05L HLA-DRB1*01:01L HLA-DRB1*08:04L HLA-DRB1*08:77L HLA-DRB1*14:01L HLA-DRB1*11:02L HLA-DRB1*11:03L HLA-DRB1*11:04L HLA-DQA1*01:01-B1*05:01L HLA-DRB1*08:01L
  REGION 1..14: note = CONT. FROM ABOVE: HLA-DRB1*11:01L HLA-DRB4*01:01L HLA-DQA1*05:05 -B1*03:116L HLA-DRB1*04:10L HLA-DRB1*09:01L HLA-DPA1*01:03-B1*02 :01L HLA-DRB1*07:01L HLA-DRB1*10:01L HLA-DRB1*08:02L HLA-DRB1*08 :03L
  source 1..14: note = Severe acute respiratory syndrome coronavirus 2
IAQYTSALLAGTIT

SEQ ID NO: 12542 - protein, 14 aa, Severe acute respiratory syndrome-related coronavirus
  REGION 1..14: note = Table B: HLA-DRB1*04:01L HLA-DRB1*13:02L HLA-DRB1*04:04L HLA-DRB1*01:01L HLA-DPA1*03:01-B1*04:02L HLA-DRB1*11:04L HLA-DRB1*14:02L HLA-DRB1*11:01L HLA-DPA1*01:03-B1*02:01L HLA-DRB1*08:02L HLA-DRB1*08:03L
  source 1..14: note = Severe acute respiratory syndrome coronavirus 2
AYRFNGIGVTQNVL

SEQ ID NO: 12543 - protein, 16 aa, Severe acute respiratory syndrome-related coronavirus
  REGION 1..16: note = Table B: HLA-DRB1*04:01L HLA-DPA1*01:03-B1*04:01L
  source 1..16: note = Severe acute respiratory syndrome coronavirus 2
VTQNVLYENQKLIANQ

SEQ ID NO: 12544 - protein, 15 aa, Severe acute respiratory syndrome-related coronavirus
  REGION 1..15: note = Table B: HLA-DRB1*04:01L HLA-DRB1*01:01L HLA-DRB1*09:01L
  source 1..15: note = Severe acute respiratory syndrome coronavirus 2
NVLYENQKLIANQFN

SEQ ID NO: 12545 - protein, 13 aa, Severe acute respiratory syndrome-related coronavirus
  REGION 1..13: note = Table B: HLA-DRB1*04:01L HLA-DRB4*03:01NL HLA-DRB3*02:01L HLA-DRB1*11:03L HLA-DRB3*01:01L HLA-DPA1*01:03-B1*104:01L HLA-DRB1*08:03L
  source 1..13: note = Severe acute respiratory syndrome coronavirus 2
QKLIANQFNSAIG

SEQ ID NO: 12546 - protein, 14 aa, Severe acute respiratory syndrome-related coronavirus
  REGION 1..14: note = Table B: HLA-DRB1*04:01L HLA-DRB5*01:01L HLA-DQA1*05:05-B1*03:116L HLA-DRB3*01:01L HLA-DPA1*01:03-B1*02:01L HLA-DRB1*08:02L
  source 1..14: note = Severe acute respiratory syndrome coronavirus 2
ANQFNSAIGKIQDS

SEQ ID NO: 12547 - protein, 13 aa, Severe acute respiratory syndrome-related coronavirus
  REGION 1..13: note = Table B: HLA-DRB1*04:01L HLA-DRB1*11:03L HLA-DRB4*01:01L
  source 1..13: note = Severe acute respiratory syndrome coronavirus 2
SAIGKIQDSLSST

SEQ ID NO: 12548 - protein, 14 aa, Severe acute respiratory syndrome-related coronavirus
  REGION 1..14: note = Table B: HLA-DRB1*04:01L HLA-DRB1*08:04L HLA-DRB1*11:03L HLA-DRB1*08:01L HLA-DPA1*01:03-B1*04:02L HLA-DPA1*02:01-B1*13:01L HLA-DPA1*01:03-B1*104:01L HLA-DRB1*07:01L HLA-DRB1*08:03L
  source 1..14: note = Severe acute respiratory syndrome coronavirus 2
IQDSLSSTASALGK

SEQ ID NO: 12549 - protein, 14 aa, Severe acute respiratory syndrome-related coronavirus
  REGION 1..14: note = Table B: HLA-DRB1*04:01L HLA-DRB1*01:01L HLA-DRB3*02:01L HLA-DPA1*03:01-B1*04:02L HLA-DRB1*11:03L HLA-DRB1*14:02L HLA-DRB1*08:01L HLA-DRB1*11:01L HLA-DRB4*02:01NL HLA-DRB4*01:01L HLA-DRB1*09:01L HLA-DPA1*02:01-B1*13:01L
  REGION 1..14: note = CONT. FROM ABOVE: HLA-DPA1*01:03-B1*02:01L HLA-DPA1*01:03-B1*104 :01L HLA-DPA1*01:02-B1*04:01L HLA-DRB1*07:01L HLA-DRB1*08:02L HL A-DRB1*08:03L
  source 1..14: note = Severe acute respiratory syndrome coronavirus 2
DSLSSTASALGKLQ

SEQ ID NO: 12550 - protein, 14 aa, Severe acute respiratory syndrome-related coronavirus
  REGION 1..14: note = Table B: HLA-DRB1*04:01L HLA-DRB1*08:04L HLA-DRB1*14:01L HLA-DRB1*11:04L HLA-DPA1*02:01-B1*13:01L HLA-DRB1*08:03L
  source 1..14: note = Severe acute respiratory syndrome coronavirus 2
ASALGKLQDVVNQN

SEQ ID NO: 12551 - protein, 14 aa, Severe acute respiratory syndrome-related coronavirus
  REGION 1..14: note = Table B: HLA-DRB1*04:01L HLA-DRB1*04:04L HLA-DRB1*01:01L HLA-DRB1*11:01L HLA-DRB4*01:01L HLA-DRB3*01:01L HLA-DRB1*08:03L
  source 1..14: note = Severe acute respiratory syndrome coronavirus 2
LQDVVNQNAQALNT

SEQ ID NO: 12552 - protein, 14 aa, Severe acute respiratory syndrome-related coronavirus
  REGION 1..14: note = Table B: HLA-DRB1*04:01L HLA-DRB1*01:01L HLA-DRB3*02:01L HLA-DRB1*11:03L HLA-DRB1*14:02L HLA-DRB1*11:01L HLA-DRB4*01:01L HLA-DRB1*09:01L HLA-DPA1*01:03-B1*04:02L HLA-DRB3*01:01L HLA-DPA1*01:03-B1*104:01L HLA-DRB1*07:01L HLA-DRB1*08:03L
  source 1..14: note = Severe acute respiratory syndrome coronavirus 2
TLVKQLSSNFGAIS

SEQ ID NO: 12553 - protein, 15 aa, Severe acute respiratory syndrome-related coronavirus
  REGION 1..15: note = Table B: HLA-DRB1*04:01L HLA-DRB4*01:01L HLA-DRB1*09:01L
  source 1..15: note = Severe acute respiratory syndrome coronavirus 2
SSNFGAISSVLNDIL

SEQ ID NO: 12554 - protein, 13 aa, Severe acute respiratory syndrome-related coronavirus
  REGION 1..13: note = Table B: HLA-DRB1*04:01L HLA-DRB1*04:04L HLA-DRB1*08:04L HLA-DRB1*08:77L HLA-DPA1*01:03-B1*03:01L HLA-DPA1*03:01-B1*04:02L HLA-DRB1*14:01L HLA-DRB1*11:04L HLA-DRB1*04:10L HLA-DRB1*12:02L HLA-DPA1*02:01-B1*13:01L
  REGION 1..13: note = CONT. FROM ABOVE: HLA-DRB1*14:54L HLA-DRB1*10:01L HLA-DRB1*08:03 L
  source 1..13: note = Severe acute respiratory syndrome coronavirus 2
GAISSVLNDILSR

SEQ ID NO: 12555 - protein, 15 aa, Severe acute respiratory syndrome-related coronavirus
  REGION 1..15: note = Table B: HLA-DRB1*04:01L HLA-DRB4*03:01NL HLA-DPA1*01:03-B1*03:01L HLA-DPA1*03:01-B1*04:02L HLA-DRB1*03:01L HLA-DRB1*13:01L HLA-DPA1*01:03-B1*02:01L HLA-DPA1*01:03-B1*104:01L HLA-DPA1*01:02-B1*04:01L
  REGION 1..15: note = CONT. FROM ABOVE: HLA-DRB1*07:01L HLA-DRB1*10:01L
  source 1..15: note = Severe acute respiratory syndrome coronavirus 2
NDILSRLDKVEAEVQ

SEQ ID NO: 12556 - protein, 15 aa, Severe acute respiratory syndrome-related coronavirus
  REGION 1..15: note = Table B: HLA-DRB1*04:01L
  source 1..15: note = Severe acute respiratory syndrome coronavirus 2
LSRLDKVEAEVQIDR

SEQ ID NO: 12557 - protein, 10 aa, Severe acute respiratory syndrome-related coronavirus
  REGION 1..10: note = Table B: HLA-DRB1*04:01L HLA-DRB1*13:02M HLA-DRB1*13:03M HLA-DRB1*01:03L HLA-DRB1*04:02L HLA-DRB1*04:04L HLA-DRB1*01:01L HLA-DRB4*03:01NL HLA-DRB3*02:01L HLA-DRB1*14:01L HLA-DRB1*11:04L HLA-DRB1*08:01L HLA-DRB1*11:01L HLA-DRB5*01:01L HLA-DRB1*13:01L
  REGION 1..10: note = CONT. FROM ABOVE: HLA-DPA1*01:03-B1*04:02L HLA-DRB1*12:01L HLA-D RB1*12:02L HLA-DRB3*01:01L HLA-DQA1*03:01-B1*03:02M HLA-DQA1*05: 05-B1*03:01L HLA-DRB1*14:17L HLA-DRB1*16:01L HLA-DRB1*08:02L HLA -DQA1*02:01-B1*03:03L HLA-DRB1*15:01L
  source 1..10: note = Severe acute respiratory syndrome coronavirus 2
VQIDRLITGR

SEQ ID NO: 12558 - protein, 12 aa, Severe acute respiratory syndrome-related coronavirus
  REGION 1..12: note = Table B: HLA-DRB1*04:01L HLA-DRB1*13:02L HLA-DRB1*08:04L HLA-DRB1*11:04L HLA-DRB1*08:01L HLA-DRB1*11:01L HLA-DPA1*01:03-B1*04:01L HLA-DRB1*04:10L HLA-DPA1*01:03-B1*02:01L HLA-DRB1*10:01L
  source 1..12: note = Severe acute respiratory syndrome coronavirus 2
TYVTQQLIRAAE

SEQ ID NO: 12559 - protein, 13 aa, Severe acute respiratory syndrome-related coronavirus
  REGION 1..13: note = Table B: HLA-DRB1*04:01L HLA-DRB1*13:03L HLA-DRB4*03:01NL HLA-DRB1*08:04L HLA-DRB1*11:04L HLA-DRB1*14:02L HLA-DRB1*04:10L HLA-DRB3*01:01L HLA-DPA1*02:01-B1*13:01L
  source 1..13: note = Severe acute respiratory syndrome coronavirus 2
QLIRAAEIRASAN

SEQ ID NO: 12560 - protein, 13 aa, Severe acute respiratory syndrome-related coronavirus
  REGION 1..13: note = Table B: HLA-DRB1*04:01L HLA-DRB1*13:02L HLA-DRB1*08:04L HLA-DRB1*08:77L HLA-DPA1*01:03-B1*03:01L HLA-DRB1*11:03L HLA-DRB1*08:01L HLA-DRB1*11:01L HLA-DQA1*01-B1*05L HLA-DQA1*05:01-B1*02:01L HLA-DRB1*09:01L
  REGION 1..13: note = CONT. FROM ABOVE: HLA-DPA1*03:01-B1*105:01L HLA-DRB1*15:03L
  source 1..13: note = Severe acute respiratory syndrome coronavirus 2
AAEIRASANLAAT

SEQ ID NO: 12561 - protein, 11 aa, Severe acute respiratory syndrome-related coronavirus
  REGION 1..11: note = Table B: HLA-DRB1*04:01L HLA-DRB1*13:02L HLA-DRB1*01:01L HLA-DRB1*01:02L HLA-DPA1*01:03-B1*03:01L HLA-DRB1*03:01L HLA-DRB1*11:03L HLA-DRB1*11:04L HLA-DQA1*01:01-B1*05:01L HLA-DRB1*08:01L HLA-DRB1*11:01L HLA-DRB5*01:01L HLA-DRB4*01:01L
  REGION 1..11: note = CONT. FROM ABOVE: HLA-DPA1*01:03-B1*04:01L HLA-DRB1*09:01L HLA-D PA1*01:03-B1*04:02L HLA-DRB1*12:01L HLA-DQA1*05:05-B1*03:01L HLA -DRB1*07:01L HLA-DRB1*10:01L HLA-DRB1*08:02L HLA-DRB1*08:03L
  source 1..11: note = Severe acute respiratory syndrome coronavirus 2
FPQSAPHGVVF

SEQ ID NO: 12562 - protein, 17 aa, Severe acute respiratory syndrome-related coronavirus
  REGION 1..17: note = Table B: HLA-DRB1*04:01L HLA-DRB4*01:01L
  source 1..17: note = Severe acute respiratory syndrome coronavirus 2
APHGVVFLHVTYVPAQE

SEQ ID NO: 12563 - protein, 16 aa, Severe acute respiratory syndrome-related coronavirus
  REGION 1..16: note = Table B: HLA-DRB1*04:01L HLA-DRB1*01:01L HLA-DRB1*11:02L HLA-DRB1*11:03L HLA-DRB4*01:01L HLA-DQA1*05:05-B1*03:116L HLA-DRB1*09:01L HLA-DRB1*07:01L HLA-DRB1*08:02L
  source 1..16: note = Severe acute respiratory syndrome coronavirus 2
GVVFLHVTYVPAQEKN

SEQ ID NO: 12564 - protein, 14 aa, Severe acute respiratory syndrome-related coronavirus
  REGION 1..14: note = Table B: HLA-DRB1*04:01L HLA-DRB1*13:02L HLA-DRB1*13:03L HLA-DRB1*04:04L HLA-DRB1*01:01L HLA-DRB1*08:04L HLA-DRB1*14:01L HLA-DRB1*14:02L HLA-DRB1*11:01L HLA-DPA1*01:03-B1*104:01L HLA-DRB1*14:17L HLA-DPA1*01:02-B1*04:01L HLA-DRB1*07:01L
  REGION 1..14: note = CONT. FROM ABOVE: HLA-DRB1*10:01L HLA-DRB1*08:03L
  source 1..14: note = Severe acute respiratory syndrome coronavirus 2
EKNFTTAPAICHDG

SEQ ID NO: 12565 - protein, 18 aa, Severe acute respiratory syndrome-related coronavirus
  REGION 1..18: note = Table B: HLA-DRB1*04:01L
  source 1..18: note = Severe acute respiratory syndrome coronavirus 2
FPREGVFVSNGTHWFVTQ

SEQ ID NO: 12566 - protein, 14 aa, Severe acute respiratory syndrome-related coronavirus
  REGION 1..14: note = Table B: HLA-DRB1*04:01L HLA-DRB1*01:01L HLA-DRB3*02:01L HLA-DPA1*01:03-B1*03:01L HLA-DRB1*11:02L HLA-DRB1*11:03L HLA-DQA1*05:05-B1*03:116L HLA-DRB1*09:01L HLA-DRB1*12:02L HLA-DPA1*01:03-B1*02:01L HLA-DPA1*01:03-B1*104:01L
  REGION 1..14: note = CONT. FROM ABOVE: HLA-DQA1*05:05-B1*03:01L HLA-DRB1*07:01L
  source 1..14: note = Severe acute respiratory syndrome coronavirus 2
THWFVTQRNFYEPQ

SEQ ID NO: 12567 - protein, 15 aa, Severe acute respiratory syndrome-related coronavirus
  REGION 1..15: note = Table B: HLA-DRB1*04:01L HLA-DRB1*01:01L HLA-DRB1*11:02L HLA-DRB4*01:01L
  source 1..15: note = Severe acute respiratory syndrome coronavirus 2
TDNTFVSGNCDVVIG

SEQ ID NO: 12568 - protein, 13 aa, Severe acute respiratory syndrome-related coronavirus
  REGION 1..13: note = Table B: HLA-DRB1*04:01L HLA-DRB1*01:01L HLA-DRB1*08:77L HLA-DRB3*02:01L HLA-DPA1*03:01-B1*04:02L HLA-DRB1*03:01L HLA-DRB1*11:02L HLA-DRB1*11:03L HLA-DRB5*01:01L HLA-DRB4*01:01L HLA-DPA1*01:03-B1*04:01L HLA-DQA1*05:05-B1*03:116L
  REGION 1..13: note = CONT. FROM ABOVE: HLA-DRB1*09:01L HLA-DPA1*01:03-B1*04:02L HLA-D PA1*01:03-B1*02:01L HLA-DPA1*01:03-B1*104:01L HLA-DRB1*07:01L HL A-DRB1*10:01L HLA-DRB1*08:02L
  source 1..13: note = Severe acute respiratory syndrome coronavirus 2
DKYFKNHTSPDVD

SEQ ID NO: 12569 - protein, 14 aa, Severe acute respiratory syndrome-related coronavirus
  REGION 1..14: note = Table B: HLA-DRB1*04:01L HLA-DRB1*07:01L HLA-DRB1*10:01L
  source 1..14: note = Severe acute respiratory syndrome coronavirus 2
KYFKNHTSPDVDLG

SEQ ID NO: 12570 - protein, 16 aa, Severe acute respiratory syndrome-related coronavirus
  REGION 1..16: note = Table B: HLA-DRB1*04:01L HLA-DRB1*03:01L HLA-DRB1*11:04L HLA-DRB1*14:02L HLA-DRB1*08:01L HLA-DRB4*01:01L HLA-DPA1*01:03-B1*04:01L HLA-DRB3*01:01L HLA-DRB1*10:01L HLA-DRB1*08:03L
  source 1..16: note = Severe acute respiratory syndrome coronavirus 2
VAKNLNESLIDLQELG

SEQ ID NO: 12571 - protein, 14 aa, Severe acute respiratory syndrome-related coronavirus
  REGION 1..14: note = Table B: HLA-DRB1*04:01L HLA-DRB1*08:04L HLA-DRB1*11:04L HLA-DRB1*12:02L HLA-DRB3*01:01L HLA-DRB1*07:01L HLA-DRB1*08:03L
  source 1..14: note = Severe acute respiratory syndrome coronavirus 2
QGEIKDATPSDFVR

SEQ ID NO: 12572 - protein, 13 aa, Severe acute respiratory syndrome-related coronavirus
  REGION 1..13: note = Table B: HLA-DRB1*04:01L HLA-DRB1*04:04L HLA-DRB3*02:01L HLA-DPA1*01:03-B1*03:01L HLA-DPA1*03:01-B1*04:02L HLA-DRB1*11:03L HLA-DQA1*01:01-B1*05:01L HLA-DPA1*01:03-B1*04:01L HLA-DRB1*09:01L HLA-DRB1*10:01L
  source 1..13: note = Severe acute respiratory syndrome coronavirus 2
KKRWQLALSKGVH

SEQ ID NO: 12573 - protein, 15 aa, Severe acute respiratory syndrome-related coronavirus
  REGION 1..15: note = Table B: HLA-DRB1*04:01L HLA-DRB1*04:04L HLA-DRB1*01:01L HLA-DRB1*11:03L HLA-DRB1*08:03L
  source 1..15: note = Severe acute respiratory syndrome coronavirus 2
HSYFTSDYYQLYSTQ

SEQ ID NO: 12574 - protein, 14 aa, Severe acute respiratory syndrome-related coronavirus
  REGION 1..14: note = Table B: HLA-DRB1*04:01L HLA-DRB1*13:02L HLA-DRB1*04:04L HLA-DRB1*11:04L HLA-DRB1*11:01L HLA-DRB1*12:02L HLA-DRB3*01:01L HLA-DRB1*15:01L
  source 1..14: note = Severe acute respiratory syndrome coronavirus 2
TSDYYQLYSTQLST

SEQ ID NO: 12575 - protein, 14 aa, Severe acute respiratory syndrome-related coronavirus
  REGION 1..14: note = Table B: HLA-DRB1*04:01L HLA-DRB1*13:02L HLA-DRB3*02:01L HLA-DPA1*01:03-B1*03:01L HLA-DRB1*14:01L HLA-DRB1*11:04L HLA-DRB1*08:01L HLA-DRB1*11:01L HLA-DRB1*09:01L HLA-DRB3*01:01L HLA-DPA1*01:03-B1*104:01L HLA-DRB1*07:01L HLA-DRB1*08:03L
  source 1..14: note = Severe acute respiratory syndrome coronavirus 2
SDYYQLYSTQLSTD

SEQ ID NO: 12576 - protein, 14 aa, Severe acute respiratory syndrome-related coronavirus
  REGION 1..14: note = Table B: HLA-DRB1*04:01L HLA-DRB1*13:02L HLA-DRB1*13:03L HLA-DRB1*08:77L HLA-DRB3*02:01L HLA-DPA1*01:03-B1*03:01L HLA-DRB1*11:04L HLA-DRB1*11:01L HLA-DRB1*09:01L HLA-DRB1*07:01L HLA-DRB1*08:03L
  source 1..14: note = Severe acute respiratory syndrome coronavirus 2
DYYQLYSTQLSTDT

SEQ ID NO: 12577 - protein, 14 aa, Severe acute respiratory syndrome-related coronavirus
  REGION 1..14: note = Table B: HLA-DRB1*04:01L HLA-DRB1*04:04L HLA-DRB1*01:01L HLA-DRB3*02:01L HLA-DPA1*03:01-B1*04:02L HLA-DRB1*08:01L HLA-DRB1*11:01L HLA-DRB4*02:01NL HLA-DRB1*13:01L HLA-DRB4*01:01L HLA-DPA1*01:03-B1*04:01L HLA-DRB1*09:01L
  REGION 1..14: note = CONT. FROM ABOVE: HLA-DPA1*01:03-B1*04:02L HLA-DPA1*02:01-B1*13: 01L HLA-DPA1*01:02-B1*04:01L HLA-DRB1*07:01L HLA-DRB1*08:03L
  source 1..14: note = Severe acute respiratory syndrome coronavirus 2
STQLSTDTGVEHVT

SEQ ID NO: 12578 - protein, 15 aa, Severe acute respiratory syndrome-related coronavirus
  REGION 1..15: note = Table B: HLA-DRB1*04:01L HLA-DRB1*01:01L HLA-DRB1*03:01L HLA-DRB4*01:01L
  source 1..15: note = Severe acute respiratory syndrome coronavirus 2
HVTFFIYNKIVDEPE

SEQ ID NO: 12579 - protein, 14 aa, Severe acute respiratory syndrome-related coronavirus
  REGION 1..14: note = Table B: HLA-DRB1*04:01L HLA-DRB1*01:01L HLA-DRB1*08:04L HLA-DRB1*11:03L HLA-DRB1*11:04L HLA-DRB1*08:01L HLA-DRB1*11:01L HLA-DRB5*01:01L HLA-DQA1*05:05-B1*03:116L HLA-DPA1*01:03-B1*04:02L HLA-DRB1*12:02L HLA-DRB1*07:01L
  source 1..14: note = Severe acute respiratory syndrome coronavirus 2
IHTIDGSSGVVNPV

SEQ ID NO: 12580 - protein, 14 aa, Severe acute respiratory syndrome-related coronavirus
  REGION 1..14: note = Table B: HLA-DRB1*04:01L HLA-DRB1*13:02L HLA-DQA1*01:02-B1*06:02L HLA-DRB1*08:04L HLA-DRB1*08:77L HLA-DPA1*03:01-B1*04:02L HLA-DRB1*14:01L HLA-DRB1*11:03L HLA-DRB1*14:02L HLA-DRB1*09:01L HLA-DPA1*02:01-B1*13:01L
  REGION 1..14: note = CONT. FROM ABOVE: HLA-DPA1*03:01-B1*105:01L HLA-DQA1*05:05-B1*03 :01L
  source 1..14: note = Severe acute respiratory syndrome coronavirus 2
NPVMEPIYDEPTTT

SEQ ID NO: 12581 - protein, 15 aa, Severe acute respiratory syndrome-related coronavirus
  REGION 1..15: note = Table B: HLA-DRB1*04:01L HLA-DRB1*01:01L HLA-DRB1*08:04L HLA-DRB3*02:01L HLA-DPA1*03:01-B1*04:02L HLA-DRB1*14:01L HLA-DRB1*11:03L HLA-DRB1*11:04L HLA-DRB1*14:02L HLA-DRB1*08:01L HLA-DRB1*11:01L HLA-DRB5*01:01L HLA-DRB4*01:01L
  REGION 1..15: note = CONT. FROM ABOVE: HLA-DPA1*01:03-B1*04:01L HLA-DQA1*05:05-B1*03: 116L HLA-DRB1*09:01L HLA-DPA1*01:03-B1*04:02L HLA-DRB1*12:02L HL A-DRB3*01:01L HLA-DPA1*01:03-B1*104:01L HLA-DRB1*07:01L HLA-DRB1 *08:03L
  source 1..15: note = Severe acute respiratory syndrome coronavirus 2
EPIYDEPTTTTSVPL

SEQ ID NO: 12582 - protein, 14 aa, Severe acute respiratory syndrome-related coronavirus
  REGION 1..14: note = Table B: HLA-DRB1*04:01L HLA-DRB1*04:04L HLA-DRB1*08:04L HLA-DRB1*11:04L HLA-DRB1*11:01L HLA-DRB4*01:01L HLA-DRB1*04:10L HLA-DRB1*12:02L HLA-DRB3*01:01L HLA-DPA1*01:03-B1*104:01L HLA-DRB1*08:03L
  source 1..14: note = Severe acute respiratory syndrome coronavirus 2
YSFVSEETGTLIVN

SEQ ID NO: 12583 - protein, 17 aa, Severe acute respiratory syndrome-related coronavirus
  REGION 1..17: note = Table B: HLA-DRB1*04:01L HLA-DQA1*05:01-B1*02:01L HLA-DRB1*09:01L
  source 1..17: note = Severe acute respiratory syndrome coronavirus 2
VKPSFYVYSRVKNLNSS

SEQ ID NO: 12584 - protein, 14 aa, Severe acute respiratory syndrome-related coronavirus
  REGION 1..14: note = Table B: HLA-DRB1*04:01L HLA-DRB1*01:01L HLA-DPA1*02:01-B1*13:01L
  source 1..14: note = Severe acute respiratory syndrome coronavirus 2
FYVYSRVKNLNSSR

SEQ ID NO: 12585 - protein, 13 aa, Severe acute respiratory syndrome-related coronavirus
  REGION 1..13: note = Table B: HLA-DRB1*04:01L HLA-DRB1*13:02L HLA-DQA1*01:02-B1*06:02L HLA-DRB1*01:01L HLA-DRB1*11:03L HLA-DRB1*11:04L HLA-DRB1*08:01L HLA-DRB1*11:01L HLA-DQA1*01-B1*05L HLA-DRB3*01:01L HLA-DPA1*02:01-B1*13:01L
  REGION 1..13: note = CONT. FROM ABOVE: HLA-DPA1*03:01-B1*105:01L HLA-DQA1*05:05-B1*03 :01L HLA-DPA1*01:02-B1*04:01L HLA-DRB1*07:01L HLA-DRB1*10:01L HL A-DQA1*01:03-B1*06:01L HLA-DRB1*08:03L HLA-DRB1*15:01L
  source 1..13: note = Severe acute respiratory syndrome coronavirus 2
SRVKNLNSSRVPD

SEQ ID NO: 12586 - protein, 13 aa, Severe acute respiratory syndrome-related coronavirus
  REGION 1..13: note = Table B: HLA-DRB1*04:01L HLA-DRB1*13:03L HLA-DRB1*04:04L HLA-DRB4*03:01NL HLA-DRB1*08:77L HLA-DRB3*02:01L HLA-DRB1*03:01L HLA-DRB1*11:02L HLA-DRB1*11:03L HLA-DRB1*11:04L HLA-DRB1*14:02L HLA-DRB1*11:01L HLA-DRB4*01:01L HLA-DPA1*01:03-B1*04:01L
  REGION 1..13: note = CONT. FROM ABOVE: HLA-DRB1*04:10L HLA-DRB1*09:01L HLA-DRB1*12:02 L HLA-DRB3*01:01L HLA-DRB1*14:54L HLA-DPA1*01:03-B1*02:01L HLA-D PA1*01:03-B1*104:01L HLA-DRB1*10:01L HLA-DRB1*08:02L HLA-DRB1*08 :03L
  source 1..13: note = Severe acute respiratory syndrome coronavirus 2
AVYRINWITGGIA

SEQ ID NO: 12587 - protein, 14 aa, Severe acute respiratory syndrome-related coronavirus
  REGION 1..14: note = Table B: HLA-DRB1*04:01L HLA-DRB1*04:04L HLA-DRB1*11:03L HLA-DRB1*14:02L HLA-DRB1*11:01L HLA-DRB4*01:01L HLA-DRB1*09:01L HLA-DPA1*01:03-B1*104:01L
  source 1..14: note = Severe acute respiratory syndrome coronavirus 2
VYRINWITGGIAIA

SEQ ID NO: 12588 - protein, 17 aa, Severe acute respiratory syndrome-related coronavirus
  REGION 1..17: note = Table B: HLA-DRB1*04:01L HLA-DQA1*05:05-B1*03:116L HLA-DRB1*08:02L HLA-DRB1*08:03L
  source 1..17: note = Severe acute respiratory syndrome coronavirus 2
NPETNILLNVPLHGTIL

SEQ ID NO: 12589 - protein, 12 aa, Severe acute respiratory syndrome-related coronavirus
  REGION 1..12: note = Table B: HLA-DRB1*04:01L HLA-DRB3*02:01L HLA-DPA1*01:03-B1*03:01L HLA-DQA1*01-B1*05L HLA-DQA1*05:01-B1*02:01L HLA-DRB1*09:01L HLA-DRB3*01:01L
  source 1..12: note = Severe acute respiratory syndrome coronavirus 2
YYKLGASQRVAG

SEQ ID NO: 12590 - protein, 12 aa, Severe acute respiratory syndrome-related coronavirus
  REGION 1..12: note = Table B: HLA-DRB1*04:01L HLA-DRB1*13:02L HLA-DRB1*04:04L HLA-DRB1*01:02L HLA-DRB1*08:04L HLA-DRB1*08:77L HLA-DRB1*14:01L HLA-DRB1*11:03L HLA-DRB1*11:04L HLA-DRB1*14:02L HLA-DRB1*08:01L HLA-DRB1*11:01L HLA-DRB1*04:10L HLA-DRB1*12:01L HLA-DRB1*12:02L
  REGION 1..12: note = CONT. FROM ABOVE: HLA-DRB3*01:01L HLA-DQA1*03:01-B1*03:02L HLA-D RB1*10:01L HLA-DRB1*04:08L HLA-DRB1*08:03L HLA-DQA1*02:01-B1*03: 03L HLA-DRB1*15:03L
  source 1..12: note = Severe acute respiratory syndrome coronavirus 2
GNYKLNTDHSSS

SEQ ID NO: 12591 - protein, 11 aa, Severe acute respiratory syndrome-related coronavirus
  REGION 1..11: note = Table B: HLA-DRB1*04:01L HLA-DRB1*13:03L HLA-DRB1*04:04L HLA-DRB1*04:05L HLA-DRB1*14:01L HLA-DRB1*11:04L HLA-DRB1*04:10L HLA-DRB1*12:01L HLA-DRB1*04:08L
  source 1..11: note = Severe acute respiratory syndrome coronavirus 2
YKLNTDHSSSS

SEQ ID NO: 12592 - protein, 13 aa, Severe acute respiratory syndrome-related coronavirus
  REGION 1..13: note = Table B: HLA-DRB1*04:01L HLA-DRB1*01:01L HLA-DRB1*03:01L HLA-DRB1*11:02L HLA-DRB1*04:10L HLA-DRB1*10:01L HLA-DRB1*08:02L
  source 1..13: note = Severe acute respiratory syndrome coronavirus 2
DYIINLIIKNLSK

SEQ ID NO: 12593 - protein, 16 aa, Severe acute respiratory syndrome-related coronavirus
  REGION 1..16: note = Table B: HLA-DRB1*04:01L
  source 1..16: note = Severe acute respiratory syndrome coronavirus 2
INLIIKNLSKSLTENK

SEQ ID NO: 12594 - protein, 14 aa, Severe acute respiratory syndrome-related coronavirus
  REGION 1..14: note = Table B: HLA-DRB1*04:01L HLA-DRB1*04:04L HLA-DRB1*11:03L HLA-DRB1*11:04L HLA-DRB1*14:02L HLA-DRB1*11:01L HLA-DRB3*01:01L HLA-DRB1*14:54L HLA-DRB1*08:03L
  source 1..14: note = Severe acute respiratory syndrome coronavirus 2
STQFAFACPDGVKH

SEQ ID NO: 12595 - protein, 14 aa, Severe acute respiratory syndrome-related coronavirus
  REGION 1..14: note = Table B: HLA-DRB1*04:01L HLA-DRB1*10:01L
  source 1..14: note = Severe acute respiratory syndrome coronavirus 2
KHVYQLRARSVSPK

SEQ ID NO: 12596 - protein, 17 aa, Severe acute respiratory syndrome-related coronavirus
  REGION 1..17: note = Table B: HLA-DRB1*04:01L HLA-DRB1*04:04L HLA-DRB1*01:01L HLA-DRB1*11:04L HLA-DRB1*11:01L HLA-DRB3*01:01L HLA-DRB1*07:01L
  source 1..17: note = Severe acute respiratory syndrome coronavirus 2
SPKLFIRQEEVQELYSP

SEQ ID NO: 12597 - protein, 15 aa, Severe acute respiratory syndrome-related coronavirus
  REGION 1..15: note = Table B: HLA-DRB1*04:01L HLA-DRB1*01:01L HLA-DRB3*01:01L HLA-DPA1*01:03-B1*02:01L
  source 1..15: note = Severe acute respiratory syndrome coronavirus 2
LFIRQEEVQELYSPI

SEQ ID NO: 12598 - protein, 14 aa, Severe acute respiratory syndrome-related coronavirus
  REGION 1..14: note = Table B: HLA-DRB1*04:01L HLA-DRB1*04:04L HLA-DRB1*11:03L HLA-DRB1*13:01L HLA-DRB1*07:01L HLA-DRB1*10:01L
  source 1..14: note = Severe acute respiratory syndrome coronavirus 2
KWYIRVGARKSAPL

SEQ ID NO: 12599 - protein, 14 aa, Severe acute respiratory syndrome-related coronavirus
  REGION 1..14: note = Table B: HLA-DRB1*04:01L
  source 1..14: note = Severe acute respiratory syndrome coronavirus 2
SKSPIQYIDIGNYT

SEQ ID NO: 12600 - protein, 16 aa, Severe acute respiratory syndrome-related coronavirus
  REGION 1..16: note = Table B: HLA-DRB1*04:01L HLA-DRB1*04:04L HLA-DRB1*11:04L HLA-DRB1*14:02L HLA-DQA1*05:05-B1*03:116L HLA-DRB1*10:01L
  source 1..16: note = Severe acute respiratory syndrome coronavirus 2
APRITFGGPSDSTGSN

SEQ ID NO: 12601 - protein, 14 aa, Severe acute respiratory syndrome-related coronavirus
  REGION 1..14: note = Table B: HLA-DRB1*04:01L HLA-DRB1*04:03L HLA-DRB1*01:03L HLA-DRB1*04:02L HLA-DRB1*04:05L HLA-DQA1*01:02-B1*06:02M HLA-DRB1*01:02L HLA-DRB1*08:04L HLA-DRB1*08:77L HLA-DPA1*01:03-B1*03:01L HLA-DRB1*11:04L HLA-DRB1*14:02L
  REGION 1..14: note = CONT. FROM ABOVE: HLA-DQA1*01:01-B1*05:01L HLA-DRB1*11:01L HLA-D QA1*01-B1*05L HLA-DQA1*05:05-B1*03:19M HLA-DQA1*05:01-B1*02:01L HLA-DQA1*05:05-B1*03:116L HLA-DRB1*04:10L HLA-DPA1*01:03-B1*04:0 2L HLA-DRB3*01:01L HLA-DPA1*02:01-B1*13:01L
  REGION 1..14: note = CONT. FROM ABOVE: HLA-DPA1*03:01-B1*105:01L HLA-DRB1*14:54L HLA- DRB1*07:01L HLA-DRB1*16:01L HLA-DRB1*04:08L HLA-DRB1*15:03L
  source 1..14: note = Severe acute respiratory syndrome coronavirus 2
GPSDSTGSNQNGER

SEQ ID NO: 12602 - protein, 12 aa, Severe acute respiratory syndrome-related coronavirus
  REGION 1..12: note = Table B: HLA-DRB1*04:01L HLA-DRB1*13:02L HLA-DRB1*04:04L HLA-DRB1*01:01L HLA-DRB1*08:04L HLA-DPA1*01:03-B1*03:01L HLA-DRB1*11:04L HLA-DRB1*14:02L HLA-DRB1*11:01L HLA-DRB1*04:10L HLA-DPA1*01:03-B1*04:02L HLA-DPA1*02:01-B1*13:01L
  source 1..12: note = Severe acute respiratory syndrome coronavirus 2
SWFTALTQHGKE

SEQ ID NO: 12603 - protein, 12 aa, Severe acute respiratory syndrome-related coronavirus
  REGION 1..12: note = Table B: HLA-DRB1*04:01L HLA-DRB4*01:01L HLA-DPA1*01:03-B1*04:01L HLA-DQA1*05:05-B1*03:116L HLA-DRB1*09:01L HLA-DRB3*01:01L HLA-DPA1*01:03-B1*02:01L HLA-DPA1*01:03-B1*104:01L HLA-DRB1*08:02L
  source 1..12: note = Severe acute respiratory syndrome coronavirus 2
WFTALTQHGKED

SEQ ID NO: 12604 - protein, 14 aa, Severe acute respiratory syndrome-related coronavirus
  REGION 1..14: note = Table B: HLA-DRB1*04:01L HLA-DRB1*01:02L HLA-DRB1*08:04L HLA-DRB3*02:01L HLA-DPA1*03:01-B1*04:02L HLA-DRB1*03:01L HLA-DRB1*14:01L HLA-DRB1*14:02L HLA-DRB1*08:01L HLA-DRB1*11:01L HLA-DRB1*13:01L HLA-DRB4*01:01L HLA-DPA1*01:03-B1*04:01L
  REGION 1..14: note = CONT. FROM ABOVE: HLA-DRB1*09:01L HLA-DPA1*01:03-B1*04:02L HLA-D RB3*01:01L HLA-DPA1*02:01-B1*13:01L HLA-DPA1*03:01-B1*105:01L HL A-DPA1*01:03-B1*104:01L HLA-DPA1*01:02-B1*04:01L HLA-DRB1*15:03L
  source 1..14: note = Severe acute respiratory syndrome coronavirus 2
VPINTNSSPDDQIG

SEQ ID NO: 12605 - protein, 16 aa, Severe acute respiratory syndrome-related coronavirus
  REGION 1..16: note = Table B: HLA-DRB1*04:01L HLA-DRB1*01:01L HLA-DRB3*02:01L HLA-DRB1*14:01L HLA-DRB1*11:02L HLA-DRB1*11:03L HLA-DRB1*11:04L HLA-DRB1*14:02L HLA-DQA1*01:01-B1*05:01L HLA-DRB1*11:01L HLA-DRB4*01:01L HLA-DQA1*05:05-B1*03:116L HLA-DRB1*09:01L
  REGION 1..16: note = CONT. FROM ABOVE: HLA-DRB3*01:01L HLA-DRB1*07:01L HLA-DRB1*08:02 L
  source 1..16: note = Severe acute respiratory syndrome coronavirus 2
SPRWYFYYLGTGPEAG

SEQ ID NO: 12606 - protein, 13 aa, Severe acute respiratory syndrome-related coronavirus
  REGION 1..13: note = Table B: HLA-DRB1*04:01L HLA-DRB1*13:02L HLA-DRB1*13:03L HLA-DRB1*08:04L HLA-DRB1*08:77L HLA-DRB3*02:01L HLA-DPA1*03:01-B1*04:02L HLA-DRB1*11:03L HLA-DRB1*11:04L HLA-DRB1*14:02L HLA-DRB4*01:01L HLA-DRB1*09:01L
  REGION 1..13: note = CONT. FROM ABOVE: HLA-DPA1*02:01-B1*13:01L HLA-DPA1*01:03-B1*104 :01L HLA-DRB1*08:03L
  source 1..13: note = Severe acute respiratory syndrome coronavirus 2
DGIIWVATEGALN

SEQ ID NO: 12607 - protein, 13 aa, Severe acute respiratory syndrome-related coronavirus
  REGION 1..13: note = Table B: HLA-DRB1*04:01L HLA-DRB1*08:04L HLA-DRB1*14:01L HLA-DRB1*11:01L HLA-DRB5*01:01L HLA-DRB1*09:01L HLA-DRB3*01:01L HLA-DPA1*02:01-B1*13:01L HLA-DPA1*01:03-B1*104:01L HLA-DRB1*07:01L HLA-DRB1*08:03L
  source 1..13: note = Severe acute respiratory syndrome coronavirus 2
VATEGALNTPKDH

SEQ ID NO: 12608 - protein, 16 aa, Severe acute respiratory syndrome-related coronavirus
  REGION 1..16: note = Table B: HLA-DRB1*04:01L HLA-DRB1*11:01L HLA-DQA1*01-B1*05L HLA-DRB3*01:01L HLA-DPA1*02:01-B1*13:01L HLA-DPA1*01:03-B1*104:01L
  source 1..16: note = Severe acute respiratory syndrome coronavirus 2
NAAIVLQLPQGTTLPK

SEQ ID NO: 12609 - protein, 10 aa, Severe acute respiratory syndrome-related coronavirus
  REGION 1..10: note = Table B: HLA-DRB1*04:01L HLA-DRB1*13:02M HLA-DRB1*13:03M HLA-DRB1*01:03L HLA-DRB1*04:02L HLA-DRB1*04:04L HLA-DRB1*01:01L HLA-DRB4*03:01NL HLA-DRB3*02:01L HLA-DRB1*14:01L HLA-DRB1*11:04L HLA-DRB1*14:02L HLA-DRB1*08:01L HLA-DRB5*01:01L
  REGION 1..10: note = CONT. FROM ABOVE: HLA-DPA1*01:03-B1*04:02L HLA-DRB1*12:01L HLA-D RB1*12:02L HLA-DRB3*01:01L HLA-DQA1*03:01-B1*03:02M HLA-DQA1*05: 05-B1*03:01L HLA-DRB1*14:17L HLA-DRB1*16:01L HLA-DRB1*08:02L HLA -DQA1*02:01-B1*03:03L HLA-DRB1*15:01L
  source 1..10: note = Severe acute respiratory syndrome coronavirus 2
QQQQGQTVTK

SEQ ID NO: 12610 - protein, 16 aa, Severe acute respiratory syndrome-related coronavirus
  REGION 1..16: note = Table B: HLA-DRB1*04:01L HLA-DRB1*13:02L HLA-DRB1*01:01L HLA-DPA1*03:01-B1*105:01L HLA-DQA1*05:05-B1*03:01L HLA-DRB1*07:01L
  source 1..16: note = Severe acute respiratory syndrome coronavirus 2
GQTVTKKSAAEASKKP

SEQ ID NO: 12611 - protein, 18 aa, Severe acute respiratory syndrome-related coronavirus
  REGION 1..18: note = Table B: HLA-DRB1*04:01L HLA-DRB1*08:77L HLA-DRB1*03:01L HLA-DRB1*11:03L HLA-DRB1*11:04L HLA-DRB4*01:01L HLA-DRB1*09:01L HLA-DRB1*10:01L
  source 1..18: note = Severe acute respiratory syndrome coronavirus 2
GPEQTQGNFGDQELIRQG

SEQ ID NO: 12612 - protein, 16 aa, Severe acute respiratory syndrome-related coronavirus
  REGION 1..16: note = Table B: HLA-DRB1*04:01L HLA-DRB1*01:01L HLA-DRB3*02:01L HLA-DRB1*11:03L HLA-DRB1*14:02L HLA-DQA1*01:01-B1*05:01L HLA-DRB1*11:01L HLA-DRB1*13:01L HLA-DRB1*09:01L HLA-DPA1*01:03-B1*02:01L HLA-DRB1*07:01L HLA-DRB1*08:03L
  REGION 1..16: note = CONT. FROM ABOVE: HLA-DRB1*15:01L
  source 1..16: note = Severe acute respiratory syndrome coronavirus 2
DQELIRQGTDYKHWPQ

SEQ ID NO: 12613 - protein, 15 aa, Severe acute respiratory syndrome-related coronavirus
  REGION 1..15: note = Table B: HLA-DRB1*04:01L HLA-DRB1*01:01L HLA-DRB3*02:01L HLA-DRB1*03:01L HLA-DRB1*11:02L HLA-DRB1*11:03L HLA-DQA1*01:01-B1*05:01L HLA-DRB4*01:01L HLA-DPA1*01:03-B1*04:01L HLA-DRB1*09:01L HLA-DRB3*01:01L
  REGION 1..15: note = CONT. FROM ABOVE: HLA-DRB1*14:54L HLA-DPA1*01:03-B1*02:01L HLA-D RB1*08:02L
  source 1..15: note = Severe acute respiratory syndrome coronavirus 2
TDYKHWPQIAQFAPS

SEQ ID NO: 12614 - protein, 14 aa, Severe acute respiratory syndrome-related coronavirus
  REGION 1..14: note = Table B: HLA-DRB1*04:01L HLA-DRB1*13:02L HLA-DRB1*08:04L HLA-DRB1*11:04L HLA-DRB1*08:01L HLA-DRB3*01:01L HLA-DRB1*10:01L HLA-DRB1*08:03L
  source 1..14: note = Severe acute respiratory syndrome coronavirus 2
MSRIGMEVTPSGTW

SEQ ID NO: 12615 - protein, 15 aa, Severe acute respiratory syndrome-related coronavirus
  REGION 1..15: note = Table B: HLA-DRB1*04:01L HLA-DRB1*03:01L HLA-DRB1*11:02L HLA-DRB4*02:01NL
  source 1..15: note = Severe acute respiratory syndrome coronavirus 2
GTWLTYTGAIKLDDK

SEQ ID NO: 12616 - protein, 16 aa, Severe acute respiratory syndrome-related coronavirus
  REGION 1..16: note = Table B: HLA-DRB1*04:01L HLA-DRB1*03:01L HLA-DRB1*11:02L HLA-DRB1*13:01L HLA-DRB4*01:01L
  source 1..16: note = Severe acute respiratory syndrome coronavirus 2
WLTYTGAIKLDDKDPN

SEQ ID NO: 12617 - protein, 12 aa, Severe acute respiratory syndrome-related coronavirus
  REGION 1..12: note = Table B: HLA-DRB1*04:01L HLA-DRB1*04:04L HLA-DQA1*01:02-B1*06:02L HLA-DRB1*01:01L HLA-DRB1*08:77L HLA-DPA1*01:03-B1*03:01L HLA-DRB1*11:03L HLA-DRB1*14:02L HLA-DRB1*11:01L HLA-DRB5*01:01L HLA-DQA1*05:01-B1*02:01L
  REGION 1..12: note = CONT. FROM ABOVE: HLA-DRB1*13:01L HLA-DRB4*01:01L HLA-DPA1*03:01 -B1*105:01L HLA-DPA1*01:02-B1*04:01L HLA-DRB1*10:01L HLA-DRB1*08 :03L
  source 1..12: note = Severe acute respiratory syndrome coronavirus 2
AIKLDDKDPNFK

SEQ ID NO: 12618 - protein, 14 aa, Severe acute respiratory syndrome-related coronavirus
  REGION 1..14: note = Table B: HLA-DRB1*04:01L HLA-DRB1*13:02L HLA-DRB1*01:01L HLA-DRB1*03:01L HLA-DRB1*14:01L HLA-DRB1*11:03L HLA-DRB1*11:04L HLA-DRB1*14:02L HLA-DQA1*01:01-B1*05:01L HLA-DQA1*05:05-B1*03:19L HLA-DPA1*01:03-B1*04:01L
  REGION 1..14: note = CONT. FROM ABOVE: HLA-DRB3*01:01L HLA-DPA1*01:03-B1*104:01L HLA- DQA1*05:05-B1*03:01L HLA-DRB1*07:01L HLA-DRB1*10:01L HLA-DRB1*08 :03L
  source 1..14: note = Severe acute respiratory syndrome coronavirus 2
DPNFKDQVILLNKH

SEQ ID NO: 12619 - protein, 13 aa, Severe acute respiratory syndrome-related coronavirus
  REGION 1..13: note = Table B: HLA-DRB1*04:01L HLA-DRB1*04:04L HLA-DRB1*01:01L HLA-DRB1*08:04L HLA-DRB1*08:77L HLA-DPA1*01:03-B1*03:01L HLA-DRB1*14:01L HLA-DRB1*11:03L HLA-DRB1*11:04L HLA-DRB1*14:02L HLA-DRB1*11:01L HLA-DRB5*01:01L HLA-DQA1*05:05-B1*03:19L
  REGION 1..13: note = CONT. FROM ABOVE: HLA-DRB1*09:01L HLA-DRB3*01:01L HLA-DQA1*05:05 -B1*03:01L HLA-DPA1*01:02-B1*04:01L HLA-DRB1*07:01L
  source 1..13: note = Severe acute respiratory syndrome coronavirus 2
IDAYKTFPPTEPK

SEQ ID NO: 12620 - protein, 10 aa, Severe acute respiratory syndrome-related coronavirus
  REGION 1..10: note = Table B: HLA-DRB1*04:01L HLA-DRB1*13:02L HLA-DRB1*13:03L HLA-DRB1*01:03L HLA-DRB1*04:02L HLA-DRB1*04:04L HLA-DQA1*01:02-B1*06:02L HLA-DRB1*01:01L HLA-DRB4*03:01NL HLA-DRB3*02:01L HLA-DRB1*14:01L HLA-DRB1*11:04L HLA-DRB1*14:02L
  REGION 1..10: note = CONT. FROM ABOVE: HLA-DRB1*08:01L HLA-DRB1*11:01L HLA-DRB5*01:01 L HLA-DPA1*01:03-B1*04:02L HLA-DRB1*12:01L HLA-DRB1*12:02L HLA-D RB3*01:01L HLA-DQA1*03:01-B1*03:02M HLA-DQA1*05:05-B1*03:01L HLA -DRB1*14:17L HLA-DRB1*16:01L HLA-DRB1*08:02L
  REGION 1..10: note = CONT. FROM ABOVE: HLA-DQA1*02:01-B1*03:03L HLA-DRB1*15:01L
  source 1..10: note = Severe acute respiratory syndrome coronavirus 2
KTFPPTEPKK

SEQ ID NO: 12621 - protein, 14 aa, Severe acute respiratory syndrome-related coronavirus
  REGION 1..14: note = Table B: HLA-DRB1*04:01L HLA-DRB1*13:02L HLA-DRB1*08:04L HLA-DRB3*02:01L HLA-DRB1*14:01L HLA-DRB1*11:04L HLA-DRB1*14:02L HLA-DRB1*08:01L HLA-DRB1*09:01L HLA-DRB1*12:02L HLA-DPA1*01:03-B1*104:01L HLA-DRB1*10:01L
  source 1..14: note = Severe acute respiratory syndrome coronavirus 2
TVTLLPAADLDDFS

SEQ ID NO: 12622 - protein, 10 aa, Severe acute respiratory syndrome-related coronavirus
  REGION 1..10: note = Table B: HLA-DRB1*04:03L HLA-DQA1*03:01-B1*03:02L HLA-DQA1*01:03-B1*06:01L HLA-DQA1*02:01-B1*03:03L
  source 1..10: note = Severe acute respiratory syndrome coronavirus 2
LVPGFNEKTH

SEQ ID NO: 12623 - protein, 10 aa, Severe acute respiratory syndrome-related coronavirus
  REGION 1..10: note = Table B: HLA-DRB1*04:03L
  source 1..10: note = Severe acute respiratory syndrome coronavirus 2
HVQLSLPVLQ

SEQ ID NO: 12624 - protein, 10 aa, Severe acute respiratory syndrome-related coronavirus
  REGION 1..10: note = Table B: HLA-DRB1*04:03L HLA-DQA1*03:01-B1*03:02L HLA-DRB1*14:17L HLA-DQA1*01:03-B1*06:01L HLA-DQA1*02:01-B1*03:03L
  source 1..10: note = Severe acute respiratory syndrome coronavirus 2
LSLPVLQVRD

SEQ ID NO: 12625 - protein, 12 aa, Severe acute respiratory syndrome-related coronavirus
  REGION 1..12: note = Table B: HLA-DRB1*04:03L HLA-DRB1*01:03L HLA-DRB1*04:02L HLA-DRB1*04:05L HLA-DRB1*01:02L HLA-DRB1*08:01L HLA-DRB1*12:01L HLA-DRB1*14:17L HLA-DRB1*16:01L HLA-DRB1*04:08L HLA-DRB1*15:03L
  source 1..12: note = Severe acute respiratory syndrome coronavirus 2
LPVLQVRDVLVR

SEQ ID NO: 12626 - protein, 12 aa, Severe acute respiratory syndrome-related coronavirus
  REGION 1..12: note = Table B: HLA-DRB1*04:03L HLA-DRB1*01:03L HLA-DRB1*04:05L HLA-DRB1*01:02L HLA-DRB1*14:01L HLA-DRB1*12:01L HLA-DRB1*16:01L HLA-DRB1*04:08L HLA-DQA1*02:01-B1*03:03L HLA-DRB1*15:03L
  source 1..12: note = Severe acute respiratory syndrome coronavirus 2
PVLQVRDVLVRG

SEQ ID NO: 12627 - protein, 11 aa, Severe acute respiratory syndrome-related coronavirus
  REGION 1..11: note = Table B: HLA-DRB1*04:03L HLA-DRB1*04:02L HLA-DQA1*05:01-B1*02:01L HLA-DQA1*03:01-B1*03:02L HLA-DRB1*16:01L HLA-DRB1*15:03L
  source 1..11: note = Severe acute respiratory syndrome coronavirus 2
VLVRGFGDSVE

SEQ ID NO: 12628 - protein, 10 aa, Severe acute respiratory syndrome-related coronavirus
  REGION 1..10: note = Table B: HLA-DRB1*04:03L HLA-DRB1*04:02L HLA-DRB1*04:05L HLA-DQA1*01-B1*05M HLA-DQA1*05:01-B1*02:01L HLA-DRB1*04:10L HLA-DQA1*03:01-B1*03:02L HLA-DRB1*16:01L
  source 1..10: note = Severe acute respiratory syndrome coronavirus 2
VRGFGDSVEE

SEQ ID NO: 12629 - protein, 11 aa, Severe acute respiratory syndrome-related coronavirus
  REGION 1..11: note = Table B: HLA-DRB1*04:03L HLA-DRB1*04:02L HLA-DRB1*14:17L HLA-DQA1*01:03-B1*06:01L HLA-DQA1*02:01-B1*03:03L
  source 1..11: note = Severe acute respiratory syndrome coronavirus 2
VEEVLSEARQH

SEQ ID NO: 12630 - protein, 12 aa, Severe acute respiratory syndrome-related coronavirus
  REGION 1..12: note = Table B: HLA-DRB1*04:03L HLA-DRB1*04:02L HLA-DRB1*11:04L HLA-DRB1*11:01L HLA-DRB3*01:01L HLA-DRB1*14:17L HLA-DRB1*04:08L
  source 1..12: note = Severe acute respiratory syndrome coronavirus 2
EVLSEARQHLKD

SEQ ID NO: 12631 - protein, 11 aa, Severe acute respiratory syndrome-related coronavirus
  REGION 1..11: note = Table B: HLA-DRB1*04:03L HLA-DRB1*04:05L HLA-DRB1*14:02L HLA-DRB1*12:01L
  source 1..11: note = Severe acute respiratory syndrome coronavirus 2
VLPQLEQPYVF

SEQ ID NO: 12632 - protein, 12 aa, Severe acute respiratory syndrome-related coronavirus
  REGION 1..12: note = Table B: HLA-DRB1*04:03L HLA-DRB1*04:05L HLA-DQA1*01:02-B1*06:02L HLA-DRB1*01:02L HLA-DRB1*08:01L HLA-DRB1*12:01L HLA-DRB1*04:08L HLA-DRB1*15:03L
  source 1..12: note = Severe acute respiratory syndrome coronavirus 2
FIKRSDARTAPH

SEQ ID NO: 12633 - protein, 13 aa, Severe acute respiratory syndrome-related coronavirus
  REGION 1..13: note = Table B: HLA-DRB1*04:03L HLA-DRB1*04:05L HLA-DQA1*01:02-B1*06:02L HLA-DRB1*04:10L HLA-DRB1*12:01L HLA-DPA1*03:01-B1*105:01L HLA-DRB1*14:17L HLA-DRB1*15:03L
  source 1..13: note = Severe acute respiratory syndrome coronavirus 2
GHVMVELVAELEG

SEQ ID NO: 12634 - protein, 11 aa, Severe acute respiratory syndrome-related coronavirus
  REGION 1..11: note = Table B: HLA-DRB1*04:03L HLA-DRB1*14:17L
  source 1..11: note = Severe acute respiratory syndrome coronavirus 2
LVAELEGIQYG

SEQ ID NO: 12635 - protein, 12 aa, Severe acute respiratory syndrome-related coronavirus
  REGION 1..12: note = Table B: HLA-DRB1*04:03L HLA-DQA1*01:02-B1*06:02L HLA-DPA1*03:01-B1*105:01L HLA-DPA1*01:02-B1*04:01L
  source 1..12: note = Severe acute respiratory syndrome coronavirus 2
AELEGIQYGRSG

SEQ ID NO: 12636 - protein, 12 aa, Severe acute respiratory syndrome-related coronavirus
  REGION 1..12: note = Table B: HLA-DRB1*04:03L HLA-DRB1*04:02L HLA-DRB1*04:05L HLA-DPA1*01:03-B1*03:01L HLA-DQA1*01:01-B1*05:01L HLA-DQA1*01-B1*05L HLA-DRB1*04:10L HLA-DRB1*16:01L HLA-DRB1*04:08L
  source 1..12: note = Severe acute respiratory syndrome coronavirus 2
GETLGVLVPHVG

SEQ ID NO: 12637 - protein, 13 aa, Severe acute respiratory syndrome-related coronavirus
  REGION 1..13: note = Table B: HLA-DRB1*04:03L
  source 1..13: note = Severe acute respiratory syndrome coronavirus 2
GAGGHSYGADLKS

SEQ ID NO: 12638 - protein, 10 aa, Severe acute respiratory syndrome-related coronavirus
  REGION 1..10: note = Table B: HLA-DRB1*04:03L HLA-DRB1*04:02L HLA-DQA1*01-B1*05L HLA-DQA1*03:01-B1*03:02L HLA-DRB1*14:17L
  source 1..10: note = Severe acute respiratory syndrome coronavirus 2
DLKSFDLGDE

SEQ ID NO: 12639 - protein, 13 aa, Severe acute respiratory syndrome-related coronavirus
  REGION 1..13: note = Table B: HLA-DRB1*04:03L HLA-DRB1*01:03L HLA-DRB1*04:05L HLA-DRB1*01:02L HLA-DRB1*08:04L HLA-DRB3*02:01L HLA-DPA1*01:03-B1*03:01L HLA-DRB1*14:02L HLA-DQA1*01:01-B1*05:01L HLA-DRB1*08:01L
  source 1..13: note = Severe acute respiratory syndrome coronavirus 2
GDELGTDPYEDFQ

SEQ ID NO: 12640 - protein, 12 aa, Severe acute respiratory syndrome-related coronavirus
  REGION 1..12: note = Table B: HLA-DRB1*04:03L HLA-DRB1*04:02L HLA-DQA1*01-B1*05L HLA-DRB1*14:17L HLA-DRB1*16:01L HLA-DQA1*02:01-B1*03:03L
  source 1..12: note = Severe acute respiratory syndrome coronavirus 2
EDFQENWNTKHS

SEQ ID NO: 12641 - protein, 12 aa, Severe acute respiratory syndrome-related coronavirus
  REGION 1..12: note = Table B: HLA-DRB1*04:03L HLA-DRB1*13:03L HLA-DRB1*01:03L HLA-DRB1*04:02L HLA-DQA1*01:02-B1*06:02L HLA-DRB1*08:01L HLA-DQA1*03:01-B1*03:02L HLA-DRB1*14:17L HLA-DQA1*02:01-B1*03:03L
  source 1..12: note = Severe acute respiratory syndrome coronavirus 2
FQENWNTKHSSG

SEQ ID NO: 12642 - protein, 12 aa, Severe acute respiratory syndrome-related coronavirus
  REGION 1..12: note = Table B: HLA-DRB1*04:03L HLA-DRB1*04:05L HLA-DRB1*01:02L
  source 1..12: note = Severe acute respiratory syndrome coronavirus 2
NTKHSSGVTREL

SEQ ID NO: 12643 - protein, 10 aa, Severe acute respiratory syndrome-related coronavirus
  REGION 1..10: note = Table B: HLA-DRB1*04:03L
  source 1..10: note = Severe acute respiratory syndrome coronavirus 2
MRELNGGAYT

SEQ ID NO: 12644 - protein, 10 aa, Severe acute respiratory syndrome-related coronavirus
  REGION 1..10: note = Table B: HLA-DRB1*04:03L HLA-DRB1*01:03L HLA-DRB1*04:05L HLA-DQA1*01:02-B1*06:02L HLA-DRB1*01:01L HLA-DRB1*01:02L HLA-DQA1*01:01-B1*05:01L HLA-DPA1*02:01-B1*13:01M HLA-DRB1*16:01L HLA-DQA1*01:03-B1*06:01M
  REGION 1..10: note = CONT. FROM ABOVE: HLA-DQA1*02:01-B1*03:03L HLA-DRB1*15:03L
  source 1..10: note = Severe acute respiratory syndrome coronavirus 2
AYTRYVDNNF

SEQ ID NO: 12645 - protein, 13 aa, Severe acute respiratory syndrome-related coronavirus
  REGION 1..13: note = Table B: HLA-DRB1*04:03L HLA-DRB1*04:05L HLA-DQA1*01:02-B1*06:02L HLA-DRB1*08:01L HLA-DQA1*03:01-B1*03:02L HLA-DRB1*04:08L HLA-DQA1*02:01-B1*03:03L
  source 1..13: note = Severe acute respiratory syndrome coronavirus 2
TRYVDNNFCGPDG

SEQ ID NO: 12646 - protein, 11 aa, Severe acute respiratory syndrome-related coronavirus
  REGION 1..11: note = Table B: HLA-DRB1*04:03L HLA-DRB1*04:08L
  source 1..11: note = Severe acute respiratory syndrome coronavirus 2
PLECIKDLLAR

SEQ ID NO: 12647 - protein, 12 aa, Severe acute respiratory syndrome-related coronavirus
  REGION 1..12: note = Table B: HLA-DRB1*04:03L HLA-DRB1*04:08L
  source 1..12: note = Severe acute respiratory syndrome coronavirus 2
LECIKDLLARAG

SEQ ID NO: 12648 - protein, 10 aa, Severe acute respiratory syndrome-related coronavirus
  REGION 1..10: note = Table B: HLA-DRB1*04:03L HLA-DRB1*01:03L HLA-DQA1*03:01-B1*03:02L HLA-DRB1*14:17L HLA-DQA1*02:01-B1*03:03L
  source 1..10: note = Severe acute respiratory syndrome coronavirus 2
DLLARAGKAS

SEQ ID NO: 12649 - protein, 12 aa, Severe acute respiratory syndrome-related coronavirus
  REGION 1..12: note = Table B: HLA-DRB1*04:03L HLA-DQA1*01:02-B1*06:02L HLA-DQA1*05:01-B1*02:01L HLA-DPA1*03:01-B1*105:01L HLA-DQA1*01:03-B1*06:01L HLA-DQA1*02:01-B1*03:03L
  source 1..12: note = Severe acute respiratory syndrome coronavirus 2
TLSEQLDFIDTK

SEQ ID NO: 12650 - protein, 10 aa, Severe acute respiratory syndrome-related coronavirus
  REGION 1..10: note = Table B: HLA-DRB1*04:03L HLA-DQA1*01-B1*05L HLA-DQA1*03:01-B1*03:02L HLA-DRB1*14:17L
  source 1..10: note = Severe acute respiratory syndrome coronavirus 2
QLDFIDTKRG

SEQ ID NO: 12651 - protein, 10 aa, Severe acute respiratory syndrome-related coronavirus
  REGION 1..10: note = Table B: HLA-DRB1*04:03L HLA-DRB1*04:02L HLA-DQA1*01-B1*05L HLA-DQA1*03:01-B1*03:02L HLA-DRB1*14:17L
  source 1..10: note = Severe acute respiratory syndrome coronavirus 2
IAWYTERSEK

SEQ ID NO: 12652 - protein, 10 aa, Severe acute respiratory syndrome-related coronavirus
  REGION 1..10: note = Table B: HLA-DRB1*04:03L HLA-DRB1*13:03L HLA-DRB1*01:03L HLA-DRB1*04:02L HLA-DQA1*01-B1*05L HLA-DQA1*05:01-B1*02:01L HLA-DQA1*03:01-B1*03:02L HLA-DRB1*14:17L HLA-DPA1*01:02-B1*04:01L HLA-DRB1*16:01L
  REGION 1..10: note = CONT. FROM ABOVE: HLA-DQA1*02:01-B1*03:03L
  source 1..10: note = Severe acute respiratory syndrome coronavirus 2
YTERSEKSYE

SEQ ID NO: 12653 - protein, 11 aa, Severe acute respiratory syndrome-related coronavirus
  REGION 1..11: note = Table B: HLA-DRB1*04:03L HLA-DQA1*05:01-B1*02:01L
  source 1..11: note = Severe acute respiratory syndrome coronavirus 2
EKSYELQTPFE

SEQ ID NO: 12654 - protein, 13 aa, Severe acute respiratory syndrome-related coronavirus
  REGION 1..13: note = Table B: HLA-DRB1*04:03L HLA-DRB1*04:02L HLA-DRB1*08:04L HLA-DRB1*11:03L HLA-DRB1*11:04L HLA-DRB1*11:01L HLA-DRB3*01:01L HLA-DRB1*14:54L HLA-DRB1*14:17L HLA-DRB1*08:03L
  source 1..13: note = Severe acute respiratory syndrome coronavirus 2
TPFEIKLAKKFDT

SEQ ID NO: 12655 - protein, 13 aa, Severe acute respiratory syndrome-related coronavirus
  REGION 1..13: note = Table B: HLA-DRB1*04:03L HLA-DRB1*04:05L HLA-DQA1*01-B1*05L HLA-DQA1*03:01-B1*03:02L HLA-DRB1*16:01L HLA-DQA1*02:01-B1*03:03L
  source 1..13: note = Severe acute respiratory syndrome coronavirus 2
AKKFDTFNGECPN

SEQ ID NO: 12656 - protein, 13 aa, Severe acute respiratory syndrome-related coronavirus
  REGION 1..13: note = Table B: HLA-DRB1*04:03L HLA-DRB1*01:03L HLA-DRB1*08:04L HLA-DRB1*11:04L HLA-DRB1*04:08L
  source 1..13: note = Severe acute respiratory syndrome coronavirus 2
FPLNSIIKTIQPR

SEQ ID NO: 12657 - protein, 12 aa, Severe acute respiratory syndrome-related coronavirus
  REGION 1..12: note = Table B: HLA-DRB1*04:03L HLA-DRB1*01:03L HLA-DRB1*04:02L HLA-DRB1*04:05L HLA-DQA1*01:02-B1*06:02L HLA-DRB1*01:02L HLA-DRB1*14:01L HLA-DRB1*12:01L HLA-DQA1*03:01-B1*03:02L HLA-DRB1*14:17L HLA-DRB1*16:01L HLA-DRB1*04:08L
  REGION 1..12: note = CONT. FROM ABOVE: HLA-DQA1*02:01-B1*03:03L HLA-DRB1*15:03L
  source 1..12: note = Severe acute respiratory syndrome coronavirus 2
GRIRSVYPVASP

SEQ ID NO: 12658 - protein, 15 aa, Severe acute respiratory syndrome-related coronavirus
  REGION 1..15: note = Table B: HLA-DRB1*04:03L HLA-DRB1*01:03L HLA-DPA1*01:03-B1*03:01L HLA-DPA1*03:01-B1*04:02L HLA-DRB1*14:01L HLA-DRB1*14:02L HLA-DRB1*12:01L HLA-DRB1*16:01L
  source 1..15: note = Severe acute respiratory syndrome coronavirus 2
TGDFVKATCEFCGTE

SEQ ID NO: 12659 - protein, 11 aa, Severe acute respiratory syndrome-related coronavirus
  REGION 1..11: note = Table B: HLA-DRB1*04:03L HLA-DRB1*13:03L HLA-DRB1*04:02L HLA-DRB4*03:01NL HLA-DQA1*01-B1*05L HLA-DQA1*05:01-B1*02:01L HLA-DQA1*03:01-B1*03:02L HLA-DRB1*14:17L HLA-DRB1*16:01L HLA-DQA1*02:01-B1*03:03L
  source 1..11: note = Severe acute respiratory syndrome coronavirus 2
TENLTKEGATT

SEQ ID NO: 12660 - protein, 11 aa, Severe acute respiratory syndrome-related coronavirus
  REGION 1..11: note = Table B: HLA-DRB1*04:03L HLA-DRB1*13:02L HLA-DRB4*03:01NL HLA-DRB1*11:02L HLA-DRB1*11:01L HLA-DRB4*01:01L HLA-DPA1*01:03-B1*04:02L HLA-DRB1*12:01L HLA-DQA1*05:05-B1*03:01L HLA-DRB1*08:02L
  source 1..11: note = Severe acute respiratory syndrome coronavirus 2
YLPQNAVVKIY

SEQ ID NO: 12661 - protein, 13 aa, Severe acute respiratory syndrome-related coronavirus
  REGION 1..13: note = Table B: HLA-DRB1*04:03L HLA-DRB1*01:03L HLA-DQA1*01:02-B1*06:02L HLA-DRB1*16:01L HLA-DRB1*04:08L
  source 1..13: note = Severe acute respiratory syndrome coronavirus 2
NAVVKIYCPACHN

SEQ ID NO: 12662 - protein, 11 aa, Severe acute respiratory syndrome-related coronavirus
  REGION 1..11: note = Table B: HLA-DRB1*04:03L
  source 1..11: note = Severe acute respiratory syndrome coronavirus 2
SEVGPEHSLAE

SEQ ID NO: 12663 - protein, 11 aa, Severe acute respiratory syndrome-related coronavirus
  REGION 1..11: note = Table B: HLA-DRB1*04:03L HLA-DRB1*04:02L HLA-DQA1*01-B1*05L
  source 1..11: note = Severe acute respiratory syndrome coronavirus 2
HSLAEYHNESG

SEQ ID NO: 12664 - protein, 11 aa, Severe acute respiratory syndrome-related coronavirus
  REGION 1..11: note = Table B: HLA-DRB1*04:03L HLA-DRB1*04:02L HLA-DRB1*14:17L
  source 1..11: note = Severe acute respiratory syndrome coronavirus 2
LAEYHNESGLK

SEQ ID NO: 12665 - protein, 12 aa, Severe acute respiratory syndrome-related coronavirus
  REGION 1..12: note = Table B: HLA-DRB1*04:03L HLA-DRB1*01:03L HLA-DRB1*04:02L HLA-DRB1*04:05L HLA-DRB1*01:02L HLA-DPA1*01:03-B1*03:01L HLA-DRB1*08:01L HLA-DRB1*11:01L HLA-DRB4*02:01NL HLA-DQA1*05:01-B1*02:01L HLA-DPA1*01:03-B1*04:02L
  REGION 1..12: note = CONT. FROM ABOVE: HLA-DRB1*12:01L HLA-DRB1*16:01L HLA-DRB1*04:08 L
  source 1..12: note = Severe acute respiratory syndrome coronavirus 2
NHTGVVGEGSEG

SEQ ID NO: 12666 - protein, 13 aa, Severe acute respiratory syndrome-related coronavirus
  REGION 1..13: note = Table B: HLA-DRB1*04:03L HLA-DRB1*13:02L HLA-DRB1*04:02L HLA-DRB1*01:02L HLA-DRB4*03:01NL HLA-DRB1*08:77L HLA-DRB3*02:01L HLA-DPA1*01:03-B1*03:01L HLA-DPA1*03:01-B1*04:02L HLA-DQA1*01-B1*05L HLA-DRB1*12:01L HLA-DRB1*14:17L
  REGION 1..13: note = CONT. FROM ABOVE: HLA-DRB1*07:01L HLA-DRB1*16:01L HLA-DRB1*15:03 L
  source 1..13: note = Severe acute respiratory syndrome coronavirus 2
HTGVVGEGSEGLN

SEQ ID NO: 12667 - protein, 11 aa, Severe acute respiratory syndrome-related coronavirus
  REGION 1..11: note = Table B: HLA-DRB1*04:03L HLA-DRB1*13:03L HLA-DRB1*04:02L HLA-DRB1*08:04L HLA-DRB1*08:01L HLA-DRB1*14:54L HLA-DRB1*16:01L
  source 1..11: note = Severe acute respiratory syndrome coronavirus 2
EILQKEKVNIN

SEQ ID NO: 12668 - protein, 10 aa, Severe acute respiratory syndrome-related coronavirus
  REGION 1..10: note = Table B: HLA-DRB1*04:03L HLA-DRB1*04:02L HLA-DRB1*01:02L HLA-DQA1*01-B1*05L HLA-DQA1*05:01-B1*02:01L HLA-DRB1*12:01L HLA-DRB1*14:17L HLA-DRB1*16:01L HLA-DRB1*15:03L
  source 1..10: note = Severe acute respiratory syndrome coronavirus 2
INIVGDFKLN

SEQ ID NO: 12669 - protein, 12 aa, Severe acute respiratory syndrome-related coronavirus
  REGION 1..12: note = Table B: HLA-DRB1*04:03L
  source 1..12: note = Severe acute respiratory syndrome coronavirus 2
NEEIAIILASFS

SEQ ID NO: 12670 - protein, 12 aa, Severe acute respiratory syndrome-related coronavirus
  REGION 1..12: note = Table B: HLA-DRB1*04:03L HLA-DRB1*14:17L
  source 1..12: note = Severe acute respiratory syndrome coronavirus 2
EEIAIILASFSA

SEQ ID NO: 12671 - protein, 12 aa, Severe acute respiratory syndrome-related coronavirus
  REGION 1..12: note = Table B: HLA-DRB1*04:03L
  source 1..12: note = Severe acute respiratory syndrome coronavirus 2
EIAIILASFSAS

SEQ ID NO: 12672 - protein, 12 aa, Severe acute respiratory syndrome-related coronavirus
  REGION 1..12: note = Table B: HLA-DRB1*04:03L HLA-DRB1*14:17L
  source 1..12: note = Severe acute respiratory syndrome coronavirus 2
IAIILASFSAST

SEQ ID NO: 12673 - protein, 11 aa, Severe acute respiratory syndrome-related coronavirus
  REGION 1..11: note = Table B: HLA-DRB1*04:03L HLA-DRB1*14:17L
  source 1..11: note = Severe acute respiratory syndrome coronavirus 2
IILASFSASTS

SEQ ID NO: 12674 - protein, 12 aa, Severe acute respiratory syndrome-related coronavirus
  REGION 1..12: note = Table B: HLA-DRB1*04:03L HLA-DRB1*13:02L HLA-DRB1*04:02L HLA-DRB1*04:05L HLA-DRB1*01:02L HLA-DRB4*03:01NL HLA-DRB3*02:01L HLA-DRB1*11:03L HLA-DRB1*09:01L HLA-DRB1*12:01L HLA-DRB1*12:02L HLA-DQA1*03:01-B1*03:02L HLA-DQA1*05:05-B1*03:01L
  REGION 1..12: note = CONT. FROM ABOVE: HLA-DRB1*14:17L HLA-DRB1*07:01L HLA-DRB1*16:01 L
  source 1..12: note = Severe acute respiratory syndrome coronavirus 2
ASFSASTSAFVE

SEQ ID NO: 12675 - protein, 11 aa, Severe acute respiratory syndrome-related coronavirus
  REGION 1..11: note = Table B: HLA-DRB1*04:03L
  source 1..11: note = Severe acute respiratory syndrome coronavirus 2
FSASTSAFVET

SEQ ID NO: 12676 - protein, 11 aa, Severe acute respiratory syndrome-related coronavirus
  REGION 1..11: note = Table B: HLA-DRB1*04:03L HLA-DRB1*04:02L HLA-DQA1*01:01-B1*05:01L
  source 1..11: note = Severe acute respiratory syndrome coronavirus 2
ASTSAFVETVK

SEQ ID NO: 12677 - protein, 12 aa, Severe acute respiratory syndrome-related coronavirus
  REGION 1..12: note = Table B: HLA-DRB1*04:03L HLA-DQA1*01:02-B1*06:02L
  source 1..12: note = Severe acute respiratory syndrome coronavirus 2
WNIGEQKSILSP

SEQ ID NO: 12678 - protein, 11 aa, Severe acute respiratory syndrome-related coronavirus
  REGION 1..11: note = Table B: HLA-DRB1*04:03L HLA-DRB1*04:02L HLA-DRB1*14:01L HLA-DQA1*01-B1*05L HLA-DQA1*05:01-B1*02:01L HLA-DRB1*14:17L HLA-DPA1*01:02-B1*04:01L HLA-DRB1*16:01L
  source 1..11: note = Severe acute respiratory syndrome coronavirus 2
IGEQKSILSPL

SEQ ID NO: 12679 - protein, 12 aa, Severe acute respiratory syndrome-related coronavirus
  REGION 1..12: note = Table B: HLA-DRB1*04:03L HLA-DRB1*04:05L HLA-DRB1*01:02L
  source 1..12: note = Severe acute respiratory syndrome coronavirus 2
GEQKSILSPLYA

SEQ ID NO: 12680 - protein, 12 aa, Severe acute respiratory syndrome-related coronavirus
  REGION 1..12: note = Table B: HLA-DRB1*04:03L HLA-DQA1*01:02-B1*06:02L HLA-DRB1*14:17L
  source 1..12: note = Severe acute respiratory syndrome coronavirus 2
SILSPLYAFASE

SEQ ID NO: 12681 - protein, 13 aa, Severe acute respiratory syndrome-related coronavirus
  REGION 1..13: note = Table B: HLA-DRB1*04:03L HLA-DRB1*14:17L
  source 1..13: note = Severe acute respiratory syndrome coronavirus 2
ILSPLYAFASEAA

SEQ ID NO: 12682 - protein, 13 aa, Severe acute respiratory syndrome-related coronavirus
  REGION 1..13: note = Table B: HLA-DRB1*04:03L HLA-DRB1*04:05L HLA-DRB1*08:01L
  source 1..13: note = Severe acute respiratory syndrome coronavirus 2
ARVVRSIFSRTLE

SEQ ID NO: 12683 - protein, 11 aa, Severe acute respiratory syndrome-related coronavirus
  REGION 1..11: note = Table B: HLA-DRB1*04:03L HLA-DRB1*04:02L HLA-DQA1*01:02-B1*06:02L HLA-DPA1*03:01-B1*105:01L HLA-DQA1*03:01-B1*03:02L HLA-DRB1*14:17L HLA-DPA1*01:02-B1*04:01L HLA-DQA1*01:03-B1*06:01L
  REGION 1..11: note = CONT. FROM ABOVE: HLA-DQA1*02:01-B1*03:03L
  source 1..11: note = Severe acute respiratory syndrome coronavirus 2
IFSRTLETAQN

SEQ ID NO: 12684 - protein, 12 aa, Severe acute respiratory syndrome-related coronavirus
  REGION 1..12: note = Table B: HLA-DRB1*04:03L HLA-DRB1*04:05L HLA-DPA1*01:03-B1*03:01L
  source 1..12: note = Severe acute respiratory syndrome coronavirus 2
FSRTLETAQNSV

SEQ ID NO: 12685 - protein, 10 aa, Severe acute respiratory syndrome-related coronavirus
  REGION 1..10: note = Table B: HLA-DRB1*04:03L HLA-DQA1*03:01-B1*03:02L HLA-DQA1*01:03-B1*06:01L HLA-DQA1*02:01-B1*03:03L
  source 1..10: note = Severe acute respiratory syndrome coronavirus 2
TAQNSVRVLQ

SEQ ID NO: 12686 - protein, 11 aa, Severe acute respiratory syndrome-related coronavirus
  REGION 1..11: note = Table B: HLA-DRB1*04:03L HLA-DRB1*13:02L HLA-DRB1*13:03L HLA-DRB1*01:03L HLA-DRB1*04:02L HLA-DRB1*04:05L HLA-DRB1*14:01L HLA-DRB1*12:01L HLA-DQA1*03:01-B1*03:02L HLA-DPA1*01:02-B1*04:01L HLA-DRB1*16:01L
  REGION 1..11: note = CONT. FROM ABOVE: HLA-DQA1*02:01-B1*03:03L
  source 1..11: note = Severe acute respiratory syndrome coronavirus 2
SVRVLQKAAIT

SEQ ID NO: 12687 - protein, 10 aa, Severe acute respiratory syndrome-related coronavirus
  REGION 1..10: note = Table B: HLA-DRB1*04:03L HLA-DRB1*14:17L
  source 1..10: note = Severe acute respiratory syndrome coronavirus 2
AITILDGISQ

SEQ ID NO: 12688 - protein, 11 aa, Severe acute respiratory syndrome-related coronavirus
  REGION 1..11: note = Table B: HLA-DRB1*04:03L HLA-DRB1*13:02L HLA-DRB1*01:03L HLA-DRB1*04:02L HLA-DRB1*01:02L HLA-DRB4*03:01NL HLA-DPA1*01:03-B1*03:01L HLA-DRB1*12:01L HLA-DQA1*05:05-B1*03:01L HLA-DRB1*14:17L HLA-DRB1*04:08L
  source 1..11: note = Severe acute respiratory syndrome coronavirus 2
ILDGISQYSLR

SEQ ID NO: 12689 - protein, 11 aa, Severe acute respiratory syndrome-related coronavirus
  REGION 1..11: note = Table B: HLA-DRB1*04:03L HLA-DRB1*13:03L HLA-DRB1*04:02L HLA-DQA1*01:02-B1*06:02L HLA-DRB1*14:01L HLA-DRB1*14:17L HLA-DPA1*01:02-B1*04:01L HLA-DRB1*16:01L HLA-DQA1*01:03-B1*06:01L
  source 1..11: note = Severe acute respiratory syndrome coronavirus 2
ISQYSLRLIDA

SEQ ID NO: 12690 - protein, 11 aa, Severe acute respiratory syndrome-related coronavirus
  REGION 1..11: note = Table B: HLA-DRB1*04:03L HLA-DRB1*14:17L
  source 1..11: note = Severe acute respiratory syndrome coronavirus 2
MMFTSDLATNN

SEQ ID NO: 12691 - protein, 11 aa, Severe acute respiratory syndrome-related coronavirus
  REGION 1..11: note = Table B: HLA-DRB1*04:03L HLA-DQA1*01-B1*05L HLA-DQA1*05:05-B1*03:19L HLA-DRB1*16:01L
  source 1..11: note = Severe acute respiratory syndrome coronavirus 2
SDLATNNLVVM

SEQ ID NO: 12692 - protein, 12 aa, Severe acute respiratory syndrome-related coronavirus
  REGION 1..12: note = Table B: HLA-DRB1*04:03L HLA-DQA1*01:02-B1*06:02L HLA-DRB1*14:17L HLA-DQA1*01:03-B1*06:01L
  source 1..12: note = Severe acute respiratory syndrome coronavirus 2
TNNLVVMAYITG

SEQ ID NO: 12693 - protein, 12 aa, Severe acute respiratory syndrome-related coronavirus
  REGION 1..12: note = Table B: HLA-DRB1*04:03L
  source 1..12: note = Severe acute respiratory syndrome coronavirus 2
LVVMAYITGGVV

SEQ ID NO: 12694 - protein, 12 aa, Severe acute respiratory syndrome-related coronavirus
  REGION 1..12: note = Table B: HLA-DRB1*04:03L HLA-DRB1*01:03L HLA-DRB1*04:02L HLA-DRB1*01:02L HLA-DRB1*08:01L HLA-DPA1*01:03-B1*04:02L
  source 1..12: note = Severe acute respiratory syndrome coronavirus 2
YITGGVVQLTSQ

SEQ ID NO: 12695 - protein, 13 aa, Severe acute respiratory syndrome-related coronavirus
  REGION 1..13: note = Table B: HLA-DRB1*04:03L HLA-DRB1*13:02L HLA-DRB1*01:02L HLA-DRB1*08:77L HLA-DRB3*02:01L HLA-DPA1*01:03-B1*03:01L HLA-DPA1*03:01-B1*04:02L HLA-DRB1*14:01L HLA-DRB1*12:02L HLA-DRB1*16:01L
  source 1..13: note = Severe acute respiratory syndrome coronavirus 2
ITGGVVQLTSQWL

SEQ ID NO: 12696 - protein, 12 aa, Severe acute respiratory syndrome-related coronavirus
  REGION 1..12: note = Table B: HLA-DRB1*04:03L HLA-DRB1*01:02L HLA-DRB1*15:03L
  source 1..12: note = Severe acute respiratory syndrome coronavirus 2
GGVVQLTSQWLT

SEQ ID NO: 12697 - protein, 13 aa, Severe acute respiratory syndrome-related coronavirus
  REGION 1..13: note = Table B: HLA-DRB1*04:03L HLA-DRB1*01:02L HLA-DPA1*01:03-B1*02:01L HLA-DRB1*04:08L
  source 1..13: note = Severe acute respiratory syndrome coronavirus 2
SQWLTNIFGTVYE

SEQ ID NO: 12698 - protein, 10 aa, Severe acute respiratory syndrome-related coronavirus
  REGION 1..10: note = Table B: HLA-DRB1*04:03L HLA-DRB1*13:03L HLA-DRB1*04:02L HLA-DRB4*03:01NL HLA-DRB1*12:01L HLA-DQA1*03:01-B1*03:02L HLA-DQA1*05:05-B1*03:01L HLA-DRB1*14:17L HLA-DQA1*02:01-B1*03:03L
  source 1..10: note = Severe acute respiratory syndrome coronavirus 2
TNIFGTVYEK

SEQ ID NO: 12699 - protein, 11 aa, Severe acute respiratory syndrome-related coronavirus
  REGION 1..11: note = Table B: HLA-DRB1*04:03L HLA-DRB1*04:05L HLA-DRB1*08:04L HLA-DRB1*04:10L HLA-DRB1*14:17L HLA-DRB1*04:08L
  source 1..11: note = Severe acute respiratory syndrome coronavirus 2
TVYEKLKPVLD

SEQ ID NO: 12700 - protein, 11 aa, Severe acute respiratory syndrome-related coronavirus
  REGION 1..11: note = Table B: HLA-DRB1*04:03L HLA-DRB1*01:03L HLA-DRB1*04:05L HLA-DRB1*12:01L HLA-DPA1*02:01-B1*13:01L
  source 1..11: note = Severe acute respiratory syndrome coronavirus 2
VYEKLKPVLDW

SEQ ID NO: 12701 - protein, 12 aa, Severe acute respiratory syndrome-related coronavirus
  REGION 1..12: note = Table B: HLA-DRB1*04:03L
  source 1..12: note = Severe acute respiratory syndrome coronavirus 2
YEKLKPVLDWLE

SEQ ID NO: 12702 - protein, 12 aa, Severe acute respiratory syndrome-related coronavirus
  REGION 1..12: note = Table B: HLA-DRB1*04:03L HLA-DRB1*04:05L HLA-DQA1*01-B1*05L
  source 1..12: note = Severe acute respiratory syndrome coronavirus 2
EKLKPVLDWLEE

SEQ ID NO: 12703 - protein, 14 aa, Severe acute respiratory syndrome-related coronavirus
  REGION 1..14: note = Table B: HLA-DRB1*04:03L HLA-DRB1*13:02L HLA-DRB1*01:03L HLA-DRB1*04:02L HLA-DRB1*04:04L HLA-DRB1*14:01L HLA-DRB1*08:01L HLA-DRB3*01:01L
  source 1..14: note = Severe acute respiratory syndrome coronavirus 2
KPVLDWLEEKFKEG

SEQ ID NO: 12704 - protein, 14 aa, Severe acute respiratory syndrome-related coronavirus
  REGION 1..14: note = Table B: HLA-DRB1*04:03L HLA-DRB1*13:03L HLA-DRB3*01:01L HLA-DPA1*03:01-B1*105:01L HLA-DQA1*01:03-B1*06:01L
  source 1..14: note = Severe acute respiratory syndrome coronavirus 2
EEKFKEGVEFLRDG

SEQ ID NO: 12705 - protein, 13 aa, Severe acute respiratory syndrome-related coronavirus
  REGION 1..13: note = Table B: HLA-DRB1*04:03L HLA-DRB1*04:05L HLA-DRB1*01:02L HLA-DRB1*08:04L HLA-DPA1*01:03-B1*03:01L HLA-DPA1*02:01-B1*13:01L HLA-DRB1*04:08L
  source 1..13: note = Severe acute respiratory syndrome coronavirus 2
EGVEFLRDGWEIV

SEQ ID NO: 12706 - protein, 13 aa, Severe acute respiratory syndrome-related coronavirus
  REGION 1..13: note = Table B: HLA-DRB1*04:03L HLA-DRB1*04:02L HLA-DQA1*05:01-B1*02:01L HLA-DPA1*01:02-B1*04:01L HLA-DRB1*16:01L
  source 1..13: note = Severe acute respiratory syndrome coronavirus 2
EIVGGQIVTCAKE

SEQ ID NO: 12707 - protein, 14 aa, Severe acute respiratory syndrome-related coronavirus
  REGION 1..14: note = Table B: HLA-DRB1*04:03L HLA-DRB1*13:02L HLA-DPA1*03:01-B1*04:02L HLA-DQA1*01:01-B1*05:01L HLA-DPA1*02:01-B1*13:01L
  source 1..14: note = Severe acute respiratory syndrome coronavirus 2
IVGGQIVTCAKEIK

SEQ ID NO: 12708 - protein, 12 aa, Severe acute respiratory syndrome-related coronavirus
  REGION 1..12: note = Table B: HLA-DRB1*04:03L HLA-DRB1*13:02L HLA-DRB1*13:03L HLA-DRB1*01:03L HLA-DRB1*04:02L HLA-DRB1*04:05L HLA-DQA1*01:02-B1*06:02L HLA-DRB1*01:02L HLA-DRB1*08:04L HLA-DRB1*11:03L HLA-DRB1*11:04L HLA-DRB1*11:01L HLA-DRB1*12:01L
  REGION 1..12: note = CONT. FROM ABOVE: HLA-DRB3*01:01L HLA-DRB1*14:54L HLA-DRB1*16:01 L HLA-DRB1*04:08L HLA-DRB1*15:03L
  source 1..12: note = Severe acute respiratory syndrome coronavirus 2
GQIVTCAKEIKE

SEQ ID NO: 12709 - protein, 13 aa, Severe acute respiratory syndrome-related coronavirus
  REGION 1..13: note = Table B: HLA-DRB1*04:03L HLA-DRB1*08:01L HLA-DRB3*01:01L HLA-DRB1*07:01L HLA-DRB1*04:08L
  source 1..13: note = Severe acute respiratory syndrome coronavirus 2
AKEIKESVQTFFK

SEQ ID NO: 12710 - protein, 14 aa, Severe acute respiratory syndrome-related coronavirus
  REGION 1..14: note = Table B: HLA-DRB1*04:03L HLA-DRB1*01:01L HLA-DRB1*11:02L HLA-DRB1*11:03L HLA-DRB3*01:01L HLA-DPA1*01:03-B1*02:01L HLA-DPA1*01:03-B1*104:01L HLA-DQA1*05:05-B1*03:01L HLA-DRB1*07:01L HLA-DRB1*10:01L HLA-DRB1*08:02L
  source 1..14: note = Severe acute respiratory syndrome coronavirus 2
VQTFFKLVNKFLAL

SEQ ID NO: 12711 - protein, 11 aa, Severe acute respiratory syndrome-related coronavirus
  REGION 1..11: note = Table B: HLA-DRB1*04:03L HLA-DRB1*13:02L HLA-DRB1*01:03L HLA-DRB1*04:02L HLA-DQA1*05:05-B1*03:01L HLA-DRB1*16:01L
  source 1..11: note = Severe acute respiratory syndrome coronavirus 2
DSIIIGGAKLK

SEQ ID NO: 12712 - protein, 11 aa, Severe acute respiratory syndrome-related coronavirus
  REGION 1..11: note = Table B: HLA-DRB1*04:03L HLA-DRB1*04:02L HLA-DQA1*03:01-B1*03:02L HLA-DRB1*14:17L HLA-DQA1*02:01-B1*03:03L
  source 1..11: note = Severe acute respiratory syndrome coronavirus 2
AKLKALNLGET

SEQ ID NO: 12713 - protein, 13 aa, Severe acute respiratory syndrome-related coronavirus
  REGION 1..13: note = Table B: HLA-DRB1*04:03L HLA-DRB1*01:02L HLA-DPA1*03:01-B1*105:01L
  source 1..13: note = Severe acute respiratory syndrome coronavirus 2
ALNLGETFVTHSK

SEQ ID NO: 12714 - protein, 11 aa, Severe acute respiratory syndrome-related coronavirus
  REGION 1..11: note = Table B: HLA-DRB1*04:03L HLA-DQA1*01:03-B1*06:01L
  source 1..11: note = Severe acute respiratory syndrome coronavirus 2
LGETFVTHSKG

SEQ ID NO: 12715 - protein, 11 aa, Severe acute respiratory syndrome-related coronavirus
  REGION 1..11: note = Table B: HLA-DRB1*04:03L HLA-DRB1*13:02L HLA-DRB4*03:01NL HLA-DRB1*11:01L HLA-DRB1*10:01L HLA-DRB1*08:02L
  source 1..11: note = Severe acute respiratory syndrome coronavirus 2
ETFVTHSKGLY

SEQ ID NO: 12716 - protein, 10 aa, Severe acute respiratory syndrome-related coronavirus
  REGION 1..10: note = Table B: HLA-DRB1*04:03L HLA-DRB1*04:02L HLA-DQA1*03:01-B1*03:02L HLA-DRB1*14:17L HLA-DQA1*02:01-B1*03:03L
  source 1..10: note = Severe acute respiratory syndrome coronavirus 2
LLMPLKAPKE

SEQ ID NO: 12717 - protein, 11 aa, Severe acute respiratory syndrome-related coronavirus
  REGION 1..11: note = Table B: HLA-DRB1*04:03L HLA-DRB1*01:02L HLA-DRB1*12:01L HLA-DRB1*14:17L HLA-DRB1*16:01L HLA-DRB1*15:03L
  source 1..11: note = Severe acute respiratory syndrome coronavirus 2
IIFLEGETLPT

SEQ ID NO: 12718 - protein, 13 aa, Severe acute respiratory syndrome-related coronavirus
  REGION 1..13: note = Table B: HLA-DRB1*04:03L HLA-DQA1*01-B1*05L HLA-DQA1*05:01-B1*02:01L HLA-DQA1*01:03-B1*06:01L HLA-DQA1*02:01-B1*03:03L
  source 1..13: note = Severe acute respiratory syndrome coronavirus 2
EGETLPTEVLTEE

SEQ ID NO: 12719 - protein, 14 aa, Severe acute respiratory syndrome-related coronavirus
  REGION 1..14: note = Table B: HLA-DRB1*04:03L HLA-DQA1*02:01-B1*03:03L
  source 1..14: note = Severe acute respiratory syndrome coronavirus 2
GETLPTEVLTEEVV

SEQ ID NO: 12720 - protein, 12 aa, Severe acute respiratory syndrome-related coronavirus
  REGION 1..12: note = Table B: HLA-DRB1*04:03L HLA-DQA1*01-B1*05L HLA-DQA1*05:01-B1*02:01L
  source 1..12: note = Severe acute respiratory syndrome coronavirus 2
PTEVLTEEVVLK

SEQ ID NO: 12721 - protein, 11 aa, Severe acute respiratory syndrome-related coronavirus
  REGION 1..11: note = Table B: HLA-DRB1*04:03L HLA-DPA1*03:01-B1*105:01L HLA-DPA1*01:02-B1*04:01L HLA-DQA1*01:03-B1*06:01L HLA-DQA1*02:01-B1*03:03L
  source 1..11: note = Severe acute respiratory syndrome coronavirus 2
VLTEEVVLKTG

SEQ ID NO: 12722 - protein, 12 aa, Severe acute respiratory syndrome-related coronavirus
  REGION 1..12: note = Table B: HLA-DRB1*04:03L HLA-DQA1*01-B1*05L HLA-DQA1*05:01-B1*02:01L HLA-DQA1*02:01-B1*03:03L
  source 1..12: note = Severe acute respiratory syndrome coronavirus 2
EEVVLKTGDLQP

SEQ ID NO: 12723 - protein, 12 aa, Severe acute respiratory syndrome-related coronavirus
  REGION 1..12: note = Table B: HLA-DRB1*04:03L HLA-DRB1*01:03L HLA-DRB1*04:02L HLA-DRB1*04:05L HLA-DRB1*01:02L HLA-DPA1*01:03-B1*03:01L HLA-DPA1*03:01-B1*04:02L HLA-DRB1*14:02L HLA-DQA1*01:01-B1*05:01L HLA-DQA1*01-B1*05L HLA-DRB4*02:01NL
  REGION 1..12: note = CONT. FROM ABOVE: HLA-DPA1*01:03-B1*04:02L HLA-DRB1*12:01L HLA-D RB1*14:17L HLA-DPA1*01:02-B1*04:01L HLA-DRB1*04:08L HLA-DRB1*15: 03L
  source 1..12: note = Severe acute respiratory syndrome coronavirus 2
VVLKTGDLQPLE

SEQ ID NO: 12724 - protein, 14 aa, Severe acute respiratory syndrome-related coronavirus
  REGION 1..14: note = Table B: HLA-DRB1*04:03L HLA-DRB1*01:03L HLA-DRB1*04:02L HLA-DRB1*01:02L HLA-DQA1*01:01-B1*05:01L HLA-DRB1*08:01L HLA-DRB4*02:01NL HLA-DPA1*01:03-B1*04:02L HLA-DRB1*12:01L HLA-DRB1*04:08L
  source 1..14: note = Severe acute respiratory syndrome coronavirus 2
VLKTGDLQPLEQPT

SEQ ID NO: 12725 - protein, 11 aa, Severe acute respiratory syndrome-related coronavirus
  REGION 1..11: note = Table B: HLA-DRB1*04:03L HLA-DRB1*04:02L HLA-DRB1*04:05L HLA-DRB4*03:01NL HLA-DQA1*01-B1*05L HLA-DQA1*05:01-B1*02:01L HLA-DRB1*04:10L HLA-DQA1*03:01-B1*03:02L HLA-DRB1*14:17L HLA-DRB1*16:01L
  source 1..11: note = Severe acute respiratory syndrome coronavirus 2
GDLQPLEQPTS

SEQ ID NO: 12726 - protein, 11 aa, Severe acute respiratory syndrome-related coronavirus
  REGION 1..11: note = Table B: HLA-DRB1*04:03L HLA-DQA1*03:01-B1*03:02L HLA-DRB1*14:17L
  source 1..11: note = Severe acute respiratory syndrome coronavirus 2
DLQPLEQPTSE

SEQ ID NO: 12727 - protein, 13 aa, Severe acute respiratory syndrome-related coronavirus
  REGION 1..13: note = Table B: HLA-DRB1*04:03L HLA-DRB1*04:02L HLA-DQA1*01:01-B1*05:01L HLA-DRB1*04:10L HLA-DRB1*14:17L HLA-DRB1*16:01L HLA-DQA1*01:03-B1*06:01L
  source 1..13: note = Severe acute respiratory syndrome coronavirus 2
LQPLEQPTSEAVE

SEQ ID NO: 12728 - protein, 14 aa, Severe acute respiratory syndrome-related coronavirus
  REGION 1..14: note = Table B: HLA-DRB1*04:03L HLA-DRB1*01:03L HLA-DRB1*04:02L HLA-DRB1*04:05L HLA-DRB1*12:01L HLA-DPA1*03:01-B1*105:01L HLA-DRB1*04:08L
  source 1..14: note = Severe acute respiratory syndrome coronavirus 2
EQPTSEAVEAPLVG

SEQ ID NO: 12729 - protein, 12 aa, Severe acute respiratory syndrome-related coronavirus
  REGION 1..12: note = Table B: HLA-DRB1*04:03L
  source 1..12: note = Severe acute respiratory syndrome coronavirus 2
EAVEAPLVGTPV

SEQ ID NO: 12730 - protein, 13 aa, Severe acute respiratory syndrome-related coronavirus
  REGION 1..13: note = Table B: HLA-DRB1*04:03L HLA-DRB1*13:02L HLA-DRB1*04:05L HLA-DRB3*02:01L HLA-DRB1*14:01L HLA-DRB1*14:02L HLA-DQA1*01-B1*05L HLA-DPA1*01:03-B1*04:01L HLA-DRB1*09:01L HLA-DRB1*07:01L HLA-DRB1*04:08L
  source 1..13: note = Severe acute respiratory syndrome coronavirus 2
DTEKYCALAPNMM

SEQ ID NO: 12731 - protein, 10 aa, Severe acute respiratory syndrome-related coronavirus
  REGION 1..10: note = Table B: HLA-DRB1*04:03L HLA-DRB1*04:02L HLA-DQA1*03:01-B1*03:02L HLA-DRB1*14:17L HLA-DQA1*02:01-B1*03:03L
  source 1..10: note = Severe acute respiratory syndrome coronavirus 2
ALAPNMMVTN

SEQ ID NO: 12732 - protein, 10 aa, Severe acute respiratory syndrome-related coronavirus
  REGION 1..10: note = Table B: HLA-DRB1*04:03L HLA-DRB1*13:02L HLA-DRB1*13:03L HLA-DRB1*04:02L HLA-DRB4*03:01NL HLA-DRB3*02:01L HLA-DRB1*14:01L HLA-DRB1*12:01L HLA-DRB1*12:02L HLA-DQA1*03:01-B1*03:02L HLA-DQA1*05:05-B1*03:01L HLA-DRB1*14:17L HLA-DRB1*16:01L
  REGION 1..10: note = CONT. FROM ABOVE: HLA-DQA1*01:03-B1*06:01L HLA-DQA1*02:01-B1*03: 03L
  source 1..10: note = Severe acute respiratory syndrome coronavirus 2
MVTNNTFTLK

SEQ ID NO: 12733 - protein, 11 aa, Severe acute respiratory syndrome-related coronavirus
  REGION 1..11: note = Table B: HLA-DRB1*04:03L HLA-DRB1*13:03L HLA-DRB1*01:03L HLA-DRB1*04:02L HLA-DRB1*04:05L HLA-DRB4*03:01NL HLA-DRB1*08:01L HLA-DQA1*03:01-B1*03:02L HLA-DRB1*14:54L HLA-DRB1*14:17L HLA-DRB1*16:01L HLA-DQA1*02:01-B1*03:03L
  source 1..11: note = Severe acute respiratory syndrome coronavirus 2
NTFTLKGGAPT

SEQ ID NO: 12734 - protein, 13 aa, Severe acute respiratory syndrome-related coronavirus
  REGION 1..13: note = Table B: HLA-DRB1*04:03L HLA-DRB1*13:03L HLA-DRB1*04:05L HLA-DPA1*01:03-B1*03:01L HLA-DRB1*14:02L HLA-DPA1*03:01-B1*105:01L HLA-DRB1*16:01L
  source 1..13: note = Severe acute respiratory syndrome coronavirus 2
KVTFGDDTVIEVQ

SEQ ID NO: 12735 - protein, 13 aa, Severe acute respiratory syndrome-related coronavirus
  REGION 1..13: note = Table B: HLA-DRB1*04:03L HLA-DRB1*04:05L HLA-DPA1*03:01-B1*105:01L HLA-DRB1*16:01L HLA-DQA1*02:01-B1*03:03L
  source 1..13: note = Severe acute respiratory syndrome coronavirus 2
VTFGDDTVIEVQG

SEQ ID NO: 12736 - protein, 10 aa, Severe acute respiratory syndrome-related coronavirus
  REGION 1..10: note = Table B: HLA-DRB1*04:03L HLA-DRB1*04:02L HLA-DRB4*03:01NL HLA-DQA1*03:01-B1*03:02L HLA-DRB1*14:17L HLA-DQA1*01:03-B1*06:01L HLA-DQA1*02:01-B1*03:03L
  source 1..10: note = Severe acute respiratory syndrome coronavirus 2
TVIEVQGYKS

SEQ ID NO: 12737 - protein, 10 aa, Severe acute respiratory syndrome-related coronavirus
  REGION 1..10: note = Table B: HLA-DRB1*04:03L HLA-DRB1*04:02L HLA-DQA1*01-B1*05L HLA-DQA1*03:01-B1*03:02L HLA-DRB1*16:01L HLA-DQA1*01:03-B1*06:01L HLA-DQA1*02:01-B1*03:03L HLA-DRB1*15:03L
  source 1..10: note = Severe acute respiratory syndrome coronavirus 2
VQGYKSVNIT

SEQ ID NO: 12738 - protein, 12 aa, Severe acute respiratory syndrome-related coronavirus
  REGION 1..12: note = Table B: HLA-DRB1*04:03L HLA-DRB1*01:03L HLA-DRB1*08:04L HLA-DPA1*01:03-B1*03:01L HLA-DQA1*01-B1*05L HLA-DRB1*12:01L HLA-DRB3*01:01L HLA-DRB1*04:08L
  source 1..12: note = Severe acute respiratory syndrome coronavirus 2
FELDERIDKVLN

SEQ ID NO: 12739 - protein, 13 aa, Severe acute respiratory syndrome-related coronavirus
  REGION 1..13: note = Table B: HLA-DRB1*04:03L HLA-DRB1*04:05L HLA-DRB1*01:02L HLA-DRB1*04:08L HLA-DRB1*15:03L
  source 1..13: note = Severe acute respiratory syndrome coronavirus 2
DERIDKVLNEKCS

SEQ ID NO: 12740 - protein, 11 aa, Severe acute respiratory syndrome-related coronavirus
  REGION 1..11: note = Table B: HLA-DRB1*04:03L HLA-DRB1*14:17L
  source 1..11: note = Severe acute respiratory syndrome coronavirus 2
YTVELGTEVNE

SEQ ID NO: 12741 - protein, 11 aa, Severe acute respiratory syndrome-related coronavirus
  REGION 1..11: note = Table B: HLA-DRB1*04:03L HLA-DPA1*03:01-B1*105:01L HLA-DQA1*01:03-B1*06:01L
  source 1..11: note = Severe acute respiratory syndrome coronavirus 2
VELGTEVNEFA

SEQ ID NO: 12742 - protein, 11 aa, Severe acute respiratory syndrome-related coronavirus
  REGION 1..11: note = Table B: HLA-DRB1*04:03L HLA-DQA1*01:02-B1*06:02L HLA-DQA1*01:03-B1*06:01L HLA-DQA1*02:01-B1*03:03L
  source 1..11: note = Severe acute respiratory syndrome coronavirus 2
FACVVADAVIK

SEQ ID NO: 12743 - protein, 10 aa, Severe acute respiratory syndrome-related coronavirus
  REGION 1..10: note = Table B: HLA-DRB1*04:03L HLA-DRB1*04:02L HLA-DQA1*03:01-B1*03:02L HLA-DRB1*14:17L HLA-DQA1*02:01-B1*03:03L
  source 1..10: note = Severe acute respiratory syndrome coronavirus 2
AVIKTLQPVS

SEQ ID NO: 12744 - protein, 13 aa, Severe acute respiratory syndrome-related coronavirus
  REGION 1..13: note = Table B: HLA-DRB1*04:03L HLA-DQA1*05:01-B1*02:01L HLA-DRB1*12:01L HLA-DRB1*16:01L HLA-DRB1*15:03L
  source 1..13: note = Severe acute respiratory syndrome coronavirus 2
IKTLQPVSELLTP

SEQ ID NO: 12745 - protein, 11 aa, Severe acute respiratory syndrome-related coronavirus
  REGION 1..11: note = Table B: HLA-DRB1*04:03L HLA-DQA1*01-B1*05L HLA-DQA1*05:01-B1*02:01L HLA-DQA1*03:01-B1*03:02L HLA-DQA1*01:03-B1*06:01L HLA-DQA1*02:01-B1*03:03L
  source 1..11: note = Severe acute respiratory syndrome coronavirus 2
QPVSELLTPLG

SEQ ID NO: 12746 - protein, 12 aa, Severe acute respiratory syndrome-related coronavirus
  REGION 1..12: note = Table B: HLA-DRB1*04:03L
  source 1..12: note = Severe acute respiratory syndrome coronavirus 2
PVSELLTPLGID

SEQ ID NO: 12747 - protein, 12 aa, Severe acute respiratory syndrome-related coronavirus
  REGION 1..12: note = Table B: HLA-DRB1*04:03L HLA-DRB1*04:05L HLA-DQA1*05:01-B1*02:01L HLA-DRB1*04:10L HLA-DQA1*03:01-B1*03:02L HLA-DRB1*14:17L
  source 1..12: note = Severe acute respiratory syndrome coronavirus 2
ELLTPLGIDLDE

SEQ ID NO: 12748 - protein, 12 aa, Severe acute respiratory syndrome-related coronavirus
  REGION 1..12: note = Table B: HLA-DRB1*04:03L HLA-DQA1*03:01-B1*03:02L
  source 1..12: note = Severe acute respiratory syndrome coronavirus 2
LTPLGIDLDEWS

SEQ ID NO: 12749 - protein, 13 aa, Severe acute respiratory syndrome-related coronavirus
  REGION 1..13: note = Table B: HLA-DRB1*04:03L
  source 1..13: note = Severe acute respiratory syndrome coronavirus 2
TPLGIDLDEWSMA

SEQ ID NO: 12750 - protein, 12 aa, Severe acute respiratory syndrome-related coronavirus
  REGION 1..12: note = Table B: HLA-DRB1*04:03L HLA-DQA1*05:05-B1*03:01L
  source 1..12: note = Severe acute respiratory syndrome coronavirus 2
ESGEFKLASHMY

SEQ ID NO: 12751 - protein, 12 aa, Severe acute respiratory syndrome-related coronavirus
  REGION 1..12: note = Table B: HLA-DRB1*04:03L HLA-DRB1*04:02L HLA-DRB1*04:05L HLA-DRB1*01:02L HLA-DRB3*02:01L HLA-DRB1*11:03L HLA-DRB1*09:01L HLA-DRB1*12:02L HLA-DRB1*14:54L HLA-DRB1*14:17L
  source 1..12: note = Severe acute respiratory syndrome coronavirus 2
EEFEPSTQYEYG

SEQ ID NO: 12752 - protein, 15 aa, Severe acute respiratory syndrome-related coronavirus
  REGION 1..15: note = Table B: HLA-DRB1*04:03L HLA-DRB1*04:05L HLA-DQA1*01:02-B1*06:02L HLA-DQA1*01:01-B1*05:01L HLA-DRB1*12:01L HLA-DPA1*02:01-B1*13:01L HLA-DPA1*03:01-B1*105:01L HLA-DRB1*04:08L HLA-DRB1*15:03L
  source 1..15: note = Severe acute respiratory syndrome coronavirus 2
EPSTQYEYGTEDDYQ

SEQ ID NO: 12753 - protein, 13 aa, Severe acute respiratory syndrome-related coronavirus
  REGION 1..13: note = Table B: HLA-DRB1*04:03L HLA-DRB1*04:05L HLA-DRB1*04:10L HLA-DQA1*03:01-B1*03:02L
  source 1..13: note = Severe acute respiratory syndrome coronavirus 2
TQYEYGTEDDYQG

SEQ ID NO: 12754 - protein, 12 aa, Severe acute respiratory syndrome-related coronavirus
  REGION 1..12: note = Table B: HLA-DRB1*04:03L HLA-DRB1*04:05L HLA-DRB1*04:10L
  source 1..12: note = Severe acute respiratory syndrome coronavirus 2
YEYGTEDDYQGK

SEQ ID NO: 12755 - protein, 13 aa, Severe acute respiratory syndrome-related coronavirus
  REGION 1..13: note = Table B: HLA-DRB1*04:03L HLA-DRB1*04:02L HLA-DRB1*08:04L HLA-DRB1*08:01L HLA-DPA1*01:03-B1*02:01L HLA-DRB1*04:08L
  source 1..13: note = Severe acute respiratory syndrome coronavirus 2
DDYQGKPLEFGAT

SEQ ID NO: 12756 - protein, 12 aa, Severe acute respiratory syndrome-related coronavirus
  REGION 1..12: note = Table B: HLA-DRB1*04:03L HLA-DQA1*01:02-B1*06:02L HLA-DPA1*03:01-B1*105:01L HLA-DPA1*01:02-B1*04:01L HLA-DQA1*02:01-B1*03:03L
  source 1..12: note = Severe acute respiratory syndrome coronavirus 2
YQGKPLEFGATS

SEQ ID NO: 12757 - protein, 13 aa, Severe acute respiratory syndrome-related coronavirus
  REGION 1..13: note = Table B: HLA-DRB1*04:03L
  source 1..13: note = Severe acute respiratory syndrome coronavirus 2
GKPLEFGATSAAL

SEQ ID NO: 12758 - protein, 13 aa, Severe acute respiratory syndrome-related coronavirus
  REGION 1..13: note = Table B: HLA-DRB1*04:03L HLA-DRB1*14:17L
  source 1..13: note = Severe acute respiratory syndrome coronavirus 2
LEFGATSAALQPE

SEQ ID NO: 12759 - protein, 13 aa, Severe acute respiratory syndrome-related coronavirus
  REGION 1..13: note = Table B: HLA-DRB1*04:03L HLA-DPA1*03:01-B1*105:01L HLA-DRB1*04:08L
  source 1..13: note = Severe acute respiratory syndrome coronavirus 2
EFGATSAALQPEE

SEQ ID NO: 12760 - protein, 12 aa, Severe acute respiratory syndrome-related coronavirus
  REGION 1..12: note = Table B: HLA-DRB1*04:03L HLA-DRB1*01:03L HLA-DPA1*03:01-B1*105:01L HLA-DRB1*16:01L HLA-DRB1*04:08L
  source 1..12: note = Severe acute respiratory syndrome coronavirus 2
GATSAALQPEEE

SEQ ID NO: 12761 - protein, 12 aa, Severe acute respiratory syndrome-related coronavirus
  REGION 1..12: note = Table B: HLA-DRB1*04:03L HLA-DRB1*01:03L HLA-DPA1*03:01-B1*105:01L HLA-DRB1*16:01L HLA-DRB1*04:08L
  source 1..12: note = Severe acute respiratory syndrome coronavirus 2
ATSAALQPEEEQ

SEQ ID NO: 12762 - protein, 11 aa, Severe acute respiratory syndrome-related coronavirus
  REGION 1..11: note = Table B: HLA-DRB1*04:03L HLA-DQA1*01-B1*05L HLA-DQA1*02:01-B1*03:03L
  source 1..11: note = Severe acute respiratory syndrome coronavirus 2
AALQPEEEQEE

SEQ ID NO: 12763 - protein, 11 aa, Severe acute respiratory syndrome-related coronavirus
  REGION 1..11: note = Table B: HLA-DRB1*04:03L HLA-DQA1*05:01-B1*02:01L
  source 1..11: note = Severe acute respiratory syndrome coronavirus 2
WLDDDSQQTVG

SEQ ID NO: 12764 - protein, 12 aa, Severe acute respiratory syndrome-related coronavirus
  REGION 1..12: note = Table B: HLA-DRB1*04:03L HLA-DRB1*01:03L HLA-DRB1*04:02L HLA-DRB1*04:05L HLA-DRB1*01:02L HLA-DQA1*01:01-B1*05:01L HLA-DRB1*08:01L HLA-DRB4*02:01NL HLA-DPA1*01:03-B1*04:02L HLA-DRB1*12:01L HLA-DRB1*14:17L HLA-DRB1*16:01L HLA-DRB1*04:08L
  source 1..12: note = Severe acute respiratory syndrome coronavirus 2
DNQTTTIQTIVE

SEQ ID NO: 12765 - protein, 11 aa, Severe acute respiratory syndrome-related coronavirus
  REGION 1..11: note = Table B: HLA-DRB1*04:03L HLA-DRB1*14:17L HLA-DQA1*02:01-B1*03:03L
  source 1..11: note = Severe acute respiratory syndrome coronavirus 2
TIQTIVEVQPQ

SEQ ID NO: 12766 - protein, 13 aa, Severe acute respiratory syndrome-related coronavirus
  REGION 1..13: note = Table B: HLA-DRB1*04:03L HLA-DRB1*14:17L
  source 1..13: note = Severe acute respiratory syndrome coronavirus 2
VQPQLEMELTPVV

SEQ ID NO: 12767 - protein, 12 aa, Severe acute respiratory syndrome-related coronavirus
  REGION 1..12: note = Table B: HLA-DRB1*04:03L HLA-DQA1*05:01-B1*02:01L HLA-DQA1*03:01-B1*03:02L HLA-DRB1*14:17L
  source 1..12: note = Severe acute respiratory syndrome coronavirus 2
PQLEMELTPVVQ

SEQ ID NO: 12768 - protein, 11 aa, Severe acute respiratory syndrome-related coronavirus
  REGION 1..11: note = Table B: HLA-DRB1*04:03L HLA-DRB1*14:17L
  source 1..11: note = Severe acute respiratory syndrome coronavirus 2
LEMELTPVVQT

SEQ ID NO: 12769 - protein, 11 aa, Severe acute respiratory syndrome-related coronavirus
  REGION 1..11: note = Table B: HLA-DRB1*04:03L HLA-DRB1*14:17L
  source 1..11: note = Severe acute respiratory syndrome coronavirus 2
MELTPVVQTIE

SEQ ID NO: 12770 - protein, 12 aa, Severe acute respiratory syndrome-related coronavirus
  REGION 1..12: note = Table B: HLA-DRB1*04:03L
  source 1..12: note = Severe acute respiratory syndrome coronavirus 2
LTPVVQTIEVNS

SEQ ID NO: 12771 - protein, 12 aa, Severe acute respiratory syndrome-related coronavirus
  REGION 1..12: note = Table B: HLA-DRB1*04:03L HLA-DRB1*13:02L HLA-DRB1*13:03L HLA-DRB1*04:02L HLA-DRB1*04:05L HLA-DRB1*01:02L HLA-DRB1*14:01L HLA-DRB1*11:01L HLA-DQA1*01-B1*05L HLA-DRB1*12:01L HLA-DPA1*02:01-B1*13:01L HLA-DPA1*01:03-B1*02:01L
  REGION 1..12: note = CONT. FROM ABOVE: HLA-DRB1*08:03L HLA-DRB1*15:03L
  source 1..12: note = Severe acute respiratory syndrome coronavirus 2
NSFSGYLKLTDN

SEQ ID NO: 12772 - protein, 11 aa, Severe acute respiratory syndrome-related coronavirus
  REGION 1..11: note = Table B: HLA-DRB1*04:03L HLA-DRB1*14:17L
  source 1..11: note = Severe acute respiratory syndrome coronavirus 2
LKLTDNVYIKN

SEQ ID NO: 12773 - protein, 11 aa, Severe acute respiratory syndrome-related coronavirus
  REGION 1..11: note = Table B: HLA-DRB1*04:03L HLA-DQA1*03:01-B1*03:02L HLA-DQA1*02:01-B1*03:03L
  source 1..11: note = Severe acute respiratory syndrome coronavirus 2
LTDNVYIKNAD

SEQ ID NO: 12774 - protein, 10 aa, Severe acute respiratory syndrome-related coronavirus
  REGION 1..10: note = Table B: HLA-DRB1*04:03L HLA-DRB1*01:03L HLA-DRB1*04:02L HLA-DRB1*04:05L HLA-DRB1*01:02L HLA-DQA1*01-B1*05L HLA-DQA1*05:01-B1*02:01L HLA-DRB1*12:01L HLA-DPA1*02:01-B1*13:01L HLA-DPA1*03:01-B1*105:01L
  REGION 1..10: note = CONT. FROM ABOVE: HLA-DQA1*03:01-B1*03:02L HLA-DRB1*14:17L HLA-D PA1*01:02-B1*04:01L HLA-DRB1*16:01L HLA-DQA1*01:03-B1*06:01L HLA -DQA1*02:01-B1*03:03L HLA-DRB1*15:03L
  source 1..10: note = Severe acute respiratory syndrome coronavirus 2
VYIKNADIVE

SEQ ID NO: 12775 - protein, 10 aa, Severe acute respiratory syndrome-related coronavirus
  REGION 1..10: note = Table B: HLA-DRB1*04:03L HLA-DRB1*04:02L HLA-DRB1*14:17L
  source 1..10: note = Severe acute respiratory syndrome coronavirus 2
YIKNADIVEE

SEQ ID NO: 12776 - protein, 13 aa, Severe acute respiratory syndrome-related coronavirus
  REGION 1..13: note = Table B: HLA-DRB1*04:03L
  source 1..13: note = Severe acute respiratory syndrome coronavirus 2
AKKVKPTVVVNAA

SEQ ID NO: 12777 - protein, 10 aa, Severe acute respiratory syndrome-related coronavirus
  REGION 1..10: note = Table B: HLA-DRB1*04:03L HLA-DRB1*13:02L HLA-DRB1*13:03L HLA-DRB1*04:02L HLA-DRB4*03:01NL HLA-DRB1*12:01L HLA-DQA1*03:01-B1*03:02L HLA-DQA1*05:05-B1*03:01L HLA-DRB1*14:17L HLA-DQA1*02:01-B1*03:03L
  source 1..10: note = Severe acute respiratory syndrome coronavirus 2
VVNAANVYLK

SEQ ID NO: 12778 - protein, 12 aa, Severe acute respiratory syndrome-related coronavirus
  REGION 1..12: note = Table B: HLA-DRB1*04:03L HLA-DQA1*01:02-B1*06:02L
  source 1..12: note = Severe acute respiratory syndrome coronavirus 2
AANVYLKHGGGV

SEQ ID NO: 12779 - protein, 11 aa, Severe acute respiratory syndrome-related coronavirus
  REGION 1..11: note = Table B: HLA-DRB1*04:03L HLA-DRB1*04:02L HLA-DRB4*03:01NL HLA-DRB1*14:17L HLA-DRB1*16:01L
  source 1..11: note = Severe acute respiratory syndrome coronavirus 2
NVYLKHGGGVA

SEQ ID NO: 12780 - protein, 12 aa, Severe acute respiratory syndrome-related coronavirus
  REGION 1..12: note = Table B: HLA-DRB1*04:03L HLA-DRB1*04:02L HLA-DRB1*01:02L HLA-DPA1*01:03-B1*03:01L HLA-DQA1*01:01-B1*05:01L HLA-DRB1*08:01L HLA-DRB1*11:01L HLA-DQA1*05:05-B1*03:116L HLA-DPA1*01:03-B1*04:02L HLA-DPA1*03:01-B1*105:01L
  REGION 1..12: note = CONT. FROM ABOVE: HLA-DRB1*04:08L
  source 1..12: note = Severe acute respiratory syndrome coronavirus 2
LKHGGGVAGALN

SEQ ID NO: 12781 - protein, 11 aa, Severe acute respiratory syndrome-related coronavirus
  REGION 1..11: note = Table B: HLA-DRB1*04:03L HLA-DRB1*04:02L HLA-DQA1*01:01-B1*05:01L HLA-DRB1*08:01L HLA-DRB1*12:01L HLA-DRB1*04:08L
  source 1..11: note = Severe acute respiratory syndrome coronavirus 2
HGGGVAGALNK

SEQ ID NO: 12782 - protein, 10 aa, Severe acute respiratory syndrome-related coronavirus
  REGION 1..10: note = Table B: HLA-DRB1*04:03L HLA-DRB1*14:17L
  source 1..10: note = Severe acute respiratory syndrome coronavirus 2
LNKATNNAMQ

SEQ ID NO: 12783 - protein, 13 aa, Severe acute respiratory syndrome-related coronavirus
  REGION 1..13: note = Table B: HLA-DRB1*04:03L HLA-DRB1*04:02L HLA-DRB1*04:05L HLA-DRB1*04:10L HLA-DRB1*12:01L HLA-DRB1*14:17L
  source 1..13: note = Severe acute respiratory syndrome coronavirus 2
NNAMQVESDDYIA

SEQ ID NO: 12784 - protein, 12 aa, Severe acute respiratory syndrome-related coronavirus
  REGION 1..12: note = Table B: HLA-DRB1*04:03L HLA-DQA1*05:01-B1*02:01L
  source 1..12: note = Severe acute respiratory syndrome coronavirus 2
AMQVESDDYIAT

SEQ ID NO: 12785 - protein, 10 aa, Severe acute respiratory syndrome-related coronavirus
  REGION 1..10: note = Table B: HLA-DRB1*04:03L HLA-DRB1*04:02L HLA-DQA1*03:01-B1*03:02L HLA-DRB1*14:17L HLA-DQA1*02:01-B1*03:03L
  source 1..10: note = Severe acute respiratory syndrome coronavirus 2
ATNGPLKVGG

SEQ ID NO: 12786 - protein, 15 aa, Severe acute respiratory syndrome-related coronavirus
  REGION 1..15: note = Table B: HLA-DRB1*04:03L HLA-DRB1*13:02L HLA-DRB1*04:02L HLA-DRB1*04:04L HLA-DPA1*03:01-B1*04:02L HLA-DQA1*01:01-B1*05:01L HLA-DRB1*08:01L HLA-DRB1*11:01L HLA-DQA1*05:01-B1*02:01L HLA-DPA1*01:03-B1*04:02L
  REGION 1..15: note = CONT. FROM ABOVE: HLA-DPA1*01:02-B1*04:01L HLA-DRB1*07:01L HLA-D RB1*16:01L HLA-DRB1*15:03L
  source 1..15: note = Severe acute respiratory syndrome coronavirus 2
GPLKVGGSCVLSGHN

SEQ ID NO: 12787 - protein, 11 aa, Severe acute respiratory syndrome-related coronavirus
  REGION 1..11: note = Table B: HLA-DRB1*04:03L
  source 1..11: note = Severe acute respiratory syndrome coronavirus 2
LHVVGPNVNKG

SEQ ID NO: 12788 - protein, 10 aa, Severe acute respiratory syndrome-related coronavirus
  REGION 1..10: note = Table B: HLA-DRB1*04:03L HLA-DRB1*14:17L
  source 1..10: note = Severe acute respiratory syndrome coronavirus 2
DIQLLKSAYE

SEQ ID NO: 12789 - protein, 10 aa, Severe acute respiratory syndrome-related coronavirus
  REGION 1..10: note = Table B: HLA-DRB1*04:03L HLA-DRB1*04:02L HLA-DRB1*04:05L HLA-DRB4*03:01NL HLA-DQA1*01-B1*05L HLA-DRB1*04:10L HLA-DQA1*03:01-B1*03:02L HLA-DRB1*14:17L HLA-DQA1*02:01-B1*03:03L
  source 1..10: note = Severe acute respiratory syndrome coronavirus 2
IQLLKSAYEN

SEQ ID NO: 12790 - protein, 11 aa, Severe acute respiratory syndrome-related coronavirus
  REGION 1..11: note = Table B: HLA-DRB1*04:03L HLA-DQA1*01-B1*05L
  source 1..11: note = Severe acute respiratory syndrome coronavirus 2
FNQHEVLLAPL

SEQ ID NO: 12791 - protein, 10 aa, Severe acute respiratory syndrome-related coronavirus
  REGION 1..10: note = Table B: HLA-DRB1*04:03L HLA-DRB1*04:02L HLA-DRB1*14:17L
  source 1..10: note = Severe acute respiratory syndrome coronavirus 2
VLLAPLLSAG

SEQ ID NO: 12792 - protein, 14 aa, Severe acute respiratory syndrome-related coronavirus
  REGION 1..14: note = Table B: HLA-DRB1*04:03L HLA-DRB1*01:02L HLA-DPA1*01:03-B1*03:01L HLA-DPA1*01:03-B1*04:02L HLA-DRB1*15:03L
  source 1..14: note = Severe acute respiratory syndrome coronavirus 2
LAPLLSAGIFGADP

SEQ ID NO: 12793 - protein, 14 aa, Severe acute respiratory syndrome-related coronavirus
  REGION 1..14: note = Table B: HLA-DRB1*04:03L HLA-DPA1*01:03-B1*04:02L
  source 1..14: note = Severe acute respiratory syndrome coronavirus 2
APLLSAGIFGADPI

SEQ ID NO: 12794 - protein, 13 aa, Severe acute respiratory syndrome-related coronavirus
  REGION 1..13: note = Table B: HLA-DRB1*04:03L HLA-DRB1*04:05L HLA-DRB1*04:08L
  source 1..13: note = Severe acute respiratory syndrome coronavirus 2
ADPIHSLRVCVDT

SEQ ID NO: 12795 - protein, 16 aa, Severe acute respiratory syndrome-related coronavirus
  REGION 1..16: note = Table B: HLA-DRB1*04:03L HLA-DRB1*13:02L HLA-DRB1*04:04L HLA-DRB1*08:04L HLA-DPA1*01:03-B1*03:01L HLA-DRB1*14:01L HLA-DRB3*01:01L HLA-DPA1*03:01-B1*105:01L HLA-DPA1*01:03-B1*104:01L HLA-DQA1*01:03-B1*06:01L
  source 1..16: note = Severe acute respiratory syndrome coronavirus 2
DPIHSLRVCVDTVRTN

SEQ ID NO: 12796 - protein, 15 aa, Severe acute respiratory syndrome-related coronavirus
  REGION 1..15: note = Table B: HLA-DRB1*04:03L HLA-DRB1*13:03L HLA-DRB1*04:02L HLA-DRB1*04:04L HLA-DRB1*08:04L HLA-DRB1*11:03L HLA-DRB1*11:04L HLA-DRB1*11:01L HLA-DPA1*01:03-B1*04:01L HLA-DRB3*01:01L HLA-DRB1*07:01L HLA-DRB1*08:03L
  source 1..15: note = Severe acute respiratory syndrome coronavirus 2
VDTVRTNVYLAVFDK

SEQ ID NO: 12797 - protein, 11 aa, Severe acute respiratory syndrome-related coronavirus
  REGION 1..11: note = Table B: HLA-DRB1*04:03L HLA-DRB1*04:02L HLA-DQA1*01:02-B1*06:02L HLA-DQA1*05:01-B1*02:01L HLA-DPA1*01:02-B1*04:01L
  source 1..11: note = Severe acute respiratory syndrome coronavirus 2
TNVYLAVFDKN

SEQ ID NO: 12798 - protein, 10 aa, Severe acute respiratory syndrome-related coronavirus
  REGION 1..10: note = Table B: HLA-DRB1*04:03L HLA-DRB1*14:01L HLA-DQA1*01-B1*05L
  source 1..10: note = Severe acute respiratory syndrome coronavirus 2
LAVFDKNLYD

SEQ ID NO: 12799 - protein, 10 aa, Severe acute respiratory syndrome-related coronavirus
  REGION 1..10: note = Table B: HLA-DRB1*04:03L HLA-DRB1*13:03L HLA-DRB1*01:03L HLA-DRB1*04:02L HLA-DRB1*04:05L HLA-DRB4*03:01NL HLA-DRB1*08:01L HLA-DQA1*01-B1*05L HLA-DRB1*04:10L HLA-DQA1*03:01-B1*03:02L HLA-DRB1*14:54L HLA-DRB1*14:17L HLA-DRB1*16:01L HLA-DRB1*04:08L
  REGION 1..10: note = CONT. FROM ABOVE: HLA-DQA1*02:01-B1*03:03L
  source 1..10: note = Severe acute respiratory syndrome coronavirus 2
SFLEMKSEKQ

SEQ ID NO: 12800 - protein, 11 aa, Severe acute respiratory syndrome-related coronavirus
  REGION 1..11: note = Table B: HLA-DRB1*04:03L HLA-DRB1*04:02L HLA-DQA1*03:01-B1*03:02L HLA-DRB1*14:17L
  source 1..11: note = Severe acute respiratory syndrome coronavirus 2
LEMKSEKQVEQ

SEQ ID NO: 12801 - protein, 11 aa, Severe acute respiratory syndrome-related coronavirus
  REGION 1..11: note = Table B: HLA-DRB1*04:03L HLA-DQA1*02:01-B1*03:03L
  source 1..11: note = Severe acute respiratory syndrome coronavirus 2
VEQKIAEIPKE

SEQ ID NO: 12802 - protein, 11 aa, Severe acute respiratory syndrome-related coronavirus
  REGION 1..11: note = Table B: HLA-DRB1*04:03L HLA-DRB1*13:03L HLA-DRB1*01:03L HLA-DRB1*04:02L HLA-DRB4*03:01NL HLA-DRB1*14:01L HLA-DQA1*03:01-B1*03:02L HLA-DRB1*14:54L HLA-DRB1*14:17L HLA-DPA1*01:02-B1*04:01L HLA-DRB1*16:01L
  REGION 1..11: note = CONT. FROM ABOVE: HLA-DQA1*02:01-B1*03:03L
  source 1..11: note = Severe acute respiratory syndrome coronavirus 2
IAEIPKEEVKP

SEQ ID NO: 12803 - protein, 11 aa, Severe acute respiratory syndrome-related coronavirus
  REGION 1..11: note = Table B: HLA-DRB1*04:03L HLA-DRB1*13:03L HLA-DRB1*04:02L HLA-DQA1*01-B1*05L HLA-DQA1*03:01-B1*03:02L HLA-DRB1*14:17L HLA-DRB1*16:01L HLA-DQA1*02:01-B1*03:03L
  source 1..11: note = Severe acute respiratory syndrome coronavirus 2
VKPFITESKPS

SEQ ID NO: 12804 - protein, 11 aa, Severe acute respiratory syndrome-related coronavirus
  REGION 1..11: note = Table B: HLA-DRB1*04:03L HLA-DQA1*03:01-B1*03:02L HLA-DQA1*02:01-B1*03:03L
  source 1..11: note = Severe acute respiratory syndrome coronavirus 2
PFITESKPSVE

SEQ ID NO: 12805 - protein, 13 aa, Severe acute respiratory syndrome-related coronavirus
  REGION 1..13: note = Table B: HLA-DRB1*04:03L HLA-DRB1*04:05L HLA-DRB1*01:02L HLA-DRB1*12:01L HLA-DRB1*16:01L HLA-DQA1*01:03-B1*06:01L HLA-DQA1*02:01-B1*03:03L HLA-DRB1*15:03L
  source 1..13: note = Severe acute respiratory syndrome coronavirus 2
DKKIKACVEEVTT

SEQ ID NO: 12806 - protein, 14 aa, Severe acute respiratory syndrome-related coronavirus
  REGION 1..14: note = Table B: HLA-DRB1*04:03L
  source 1..14: note = Severe acute respiratory syndrome coronavirus 2
IKACVEEVTTTLEE

SEQ ID NO: 12807 - protein, 14 aa, Severe acute respiratory syndrome-related coronavirus
  REGION 1..14: note = Table B: HLA-DRB1*04:03L
  source 1..14: note = Severe acute respiratory syndrome coronavirus 2
KACVEEVTTTLEET

SEQ ID NO: 12808 - protein, 12 aa, Severe acute respiratory syndrome-related coronavirus
  REGION 1..12: note = Table B: HLA-DRB1*04:03L HLA-DRB1*04:04L HLA-DRB1*04:05L HLA-DRB1*01:02L HLA-DRB1*08:77L HLA-DPA1*01:03-B1*03:01L HLA-DQA1*01-B1*05L HLA-DQA1*05:05-B1*03:19L HLA-DRB1*04:10L HLA-DPA1*02:01-B1*13:01L HLA-DRB1*14:54L HLA-DRB1*07:01L
  REGION 1..12: note = CONT. FROM ABOVE: HLA-DRB1*04:08L HLA-DRB1*15:03L
  source 1..12: note = Severe acute respiratory syndrome coronavirus 2
VEEVTTTLEETK

SEQ ID NO: 12809 - protein, 11 aa, Severe acute respiratory syndrome-related coronavirus
  REGION 1..11: note = Table B: HLA-DRB1*04:03L HLA-DRB1*01:03L HLA-DRB1*01:02L HLA-DRB1*14:01L HLA-DRB1*08:01L HLA-DQA1*01-B1*05L HLA-DQA1*05:01-B1*02:01L HLA-DPA1*01:03-B1*04:02L HLA-DRB1*12:01L HLA-DPA1*01:03-B1*02:01L HLA-DRB1*16:01L
  REGION 1..11: note = CONT. FROM ABOVE: HLA-DQA1*01:03-B1*06:01L HLA-DRB1*04:08L HLA-D QA1*02:01-B1*03:03L HLA-DRB1*15:03L
  source 1..11: note = Severe acute respiratory syndrome coronavirus 2
TTLEETKFLTE

SEQ ID NO: 12810 - protein, 13 aa, Severe acute respiratory syndrome-related coronavirus
  REGION 1..13: note = Table B: HLA-DRB1*04:03L
  source 1..13: note = Severe acute respiratory syndrome coronavirus 2
TENLLLYIDINGN

SEQ ID NO: 12811 - protein, 14 aa, Severe acute respiratory syndrome-related coronavirus
  REGION 1..14: note = Table B: HLA-DRB1*04:03L HLA-DRB1*16:01L
  source 1..14: note = Severe acute respiratory syndrome coronavirus 2
ENLLLYIDINGNLH

SEQ ID NO: 12812 - protein, 10 aa, Severe acute respiratory syndrome-related coronavirus
  REGION 1..10: note = Table B: HLA-DRB1*04:03L HLA-DRB1*14:17L
  source 1..10: note = Severe acute respiratory syndrome coronavirus 2
YIDINGNLHP

SEQ ID NO: 12813 - protein, 10 aa, Severe acute respiratory syndrome-related coronavirus
  REGION 1..10: note = Table B: HLA-DRB1*04:03L HLA-DQA1*03:01-B1*03:02L HLA-DQA1*02:01-B1*03:03L
  source 1..10: note = Severe acute respiratory syndrome coronavirus 2
DINGNLHPDS

SEQ ID NO: 12814 - protein, 11 aa, Severe acute respiratory syndrome-related coronavirus
  REGION 1..11: note = Table B: HLA-DRB1*04:03L HLA-DRB1*13:02L HLA-DRB1*12:01L
  source 1..11: note = Severe acute respiratory syndrome coronavirus 2
GNLHPDSATLV

SEQ ID NO: 12815 - protein, 11 aa, Severe acute respiratory syndrome-related coronavirus
  REGION 1..11: note = Table B: HLA-DRB1*04:03L HLA-DRB1*13:03L HLA-DRB1*14:01L HLA-DQA1*05:01-B1*02:01L HLA-DRB1*14:17L HLA-DRB1*16:01L
  source 1..11: note = Severe acute respiratory syndrome coronavirus 2
LHPDSATLVSD

SEQ ID NO: 12816 - protein, 12 aa, Severe acute respiratory syndrome-related coronavirus
  REGION 1..12: note = Table B: HLA-DRB1*04:03L
  source 1..12: note = Severe acute respiratory syndrome coronavirus 2
SATLVSDIDITF

SEQ ID NO: 12817 - protein, 13 aa, Severe acute respiratory syndrome-related coronavirus
  REGION 1..13: note = Table B: HLA-DRB1*04:03L HLA-DRB1*03:01L
  source 1..13: note = Severe acute respiratory syndrome coronavirus 2
ATLVSDIDITFLK

SEQ ID NO: 12818 - protein, 11 aa, Severe acute respiratory syndrome-related coronavirus
  REGION 1..11: note = Table B: HLA-DRB1*04:03L HLA-DRB1*13:02L HLA-DRB1*13:03L HLA-DRB1*01:03L HLA-DRB1*04:02L HLA-DRB1*01:02L HLA-DRB1*14:01L HLA-DQA1*05:01-B1*02:01L HLA-DRB1*12:01L HLA-DRB3*01:01L HLA-DQA1*03:01-B1*03:02L HLA-DRB1*14:54L HLA-DRB1*14:17L
  REGION 1..11: note = CONT. FROM ABOVE: HLA-DRB1*16:01L HLA-DRB1*15:03L
  source 1..11: note = Severe acute respiratory syndrome coronavirus 2
FLKKDAPYIVG

SEQ ID NO: 12819 - protein, 10 aa, Severe acute respiratory syndrome-related coronavirus
  REGION 1..10: note = Table B: HLA-DRB1*04:03L HLA-DRB1*14:17L
  source 1..10: note = Severe acute respiratory syndrome coronavirus 2
YIVGDVVQEG

SEQ ID NO: 12820 - protein, 12 aa, Severe acute respiratory syndrome-related coronavirus
  REGION 1..12: note = Table B: HLA-DRB1*04:03L HLA-DRB1*14:17L
  source 1..12: note = Severe acute respiratory syndrome coronavirus 2
VGDVVQEGVLTA

SEQ ID NO: 12821 - protein, 11 aa, Severe acute respiratory syndrome-related coronavirus
  REGION 1..11: note = Table B: HLA-DRB1*04:03L HLA-DRB1*14:17L
  source 1..11: note = Severe acute respiratory syndrome coronavirus 2
VVQEGVLTAVV

SEQ ID NO: 12822 - protein, 10 aa, Severe acute respiratory syndrome-related coronavirus
  REGION 1..10: note = Table B: HLA-DRB1*04:03L HLA-DRB1*04:02L HLA-DRB1*14:17L
  source 1..10: note = Severe acute respiratory syndrome coronavirus 2
VVIPTKKAGG

SEQ ID NO: 12823 - protein, 11 aa, Severe acute respiratory syndrome-related coronavirus
  REGION 1..11: note = Table B: HLA-DRB1*04:03L HLA-DRB1*13:03L HLA-DRB1*01:03L HLA-DRB1*04:02L HLA-DRB4*03:01NL HLA-DRB1*14:01L HLA-DRB1*11:04L HLA-DQA1*03:01-B1*03:02L HLA-DRB1*14:54L HLA-DRB1*14:17L HLA-DRB1*04:08L
  source 1..11: note = Severe acute respiratory syndrome coronavirus 2
VIPTKKAGGTT

SEQ ID NO: 12824 - protein, 10 aa, Severe acute respiratory syndrome-related coronavirus
  REGION 1..10: note = Table B: HLA-DRB1*04:03L HLA-DRB1*13:02L HLA-DRB1*13:03L HLA-DRB1*01:03L HLA-DRB1*04:02L HLA-DRB1*01:02L HLA-DRB4*03:01NL HLA-DRB1*14:01L HLA-DRB1*14:02L HLA-DQA1*01-B1*05L HLA-DRB1*12:01L HLA-DQA1*03:01-B1*03:02L HLA-DRB1*14:17L
  REGION 1..10: note = CONT. FROM ABOVE: HLA-DRB1*16:01L HLA-DQA1*02:01-B1*03:03L HLA-D RB1*15:03L
  source 1..10: note = Severe acute respiratory syndrome coronavirus 2
TTYPGQGLNG

SEQ ID NO: 12825 - protein, 10 aa, Severe acute respiratory syndrome-related coronavirus
  REGION 1..10: note = Table B: HLA-DRB1*04:03L HLA-DQA1*01-B1*05L HLA-DQA1*03:01-B1*03:02L HLA-DQA1*02:01-B1*03:03L
  source 1..10: note = Severe acute respiratory syndrome coronavirus 2
LNGYTVEEAK

SEQ ID NO: 12826 - protein, 11 aa, Severe acute respiratory syndrome-related coronavirus
  REGION 1..11: note = Table B: HLA-DRB1*04:03L HLA-DRB1*04:05L HLA-DQA1*01-B1*05L HLA-DRB1*14:17L
  source 1..11: note = Severe acute respiratory syndrome coronavirus 2
SAFYILPSIIS

SEQ ID NO: 12827 - protein, 10 aa, Severe acute respiratory syndrome-related coronavirus
  REGION 1..10: note = Table B: HLA-DRB1*04:03L HLA-DRB1*04:02L HLA-DQA1*03:01-B1*03:02L HLA-DRB1*14:17L HLA-DQA1*02:01-B1*03:03L
  source 1..10: note = Severe acute respiratory syndrome coronavirus 2
YILPSIISNE

SEQ ID NO: 12828 - protein, 10 aa, Severe acute respiratory syndrome-related coronavirus
  REGION 1..10: note = Table B: HLA-DRB1*04:03L HLA-DRB1*04:02L HLA-DQA1*03:01-B1*03:02L HLA-DQA1*05:05-B1*03:01L HLA-DRB1*14:17L HLA-DQA1*01:03-B1*06:01L HLA-DQA1*02:01-B1*03:03L
  source 1..10: note = Severe acute respiratory syndrome coronavirus 2
ILPSIISNEK

SEQ ID NO: 12829 - protein, 13 aa, Severe acute respiratory syndrome-related coronavirus
  REGION 1..13: note = Table B: HLA-DRB1*04:03L
  source 1..13: note = Severe acute respiratory syndrome coronavirus 2
NEKQEILGTVSWN

SEQ ID NO: 12830 - protein, 13 aa, Severe acute respiratory syndrome-related coronavirus
  REGION 1..13: note = Table B: HLA-DRB1*04:03L HLA-DRB1*13:03L HLA-DRB1*04:05L HLA-DRB1*01:02L HLA-DRB4*03:01NL HLA-DPA1*01:03-B1*03:01L HLA-DRB1*14:01L HLA-DRB1*11:03L HLA-DQA1*01-B1*05L HLA-DRB1*12:02L HLA-DPA1*02:01-B1*13:01L
  REGION 1..13: note = CONT. FROM ABOVE: HLA-DQA1*05:05-B1*03:01L HLA-DPA1*01:02-B1*04: 01L HLA-DQA1*01:03-B1*06:01L HLA-DRB1*04:08L
  source 1..13: note = Severe acute respiratory syndrome coronavirus 2
EKQEILGTVSWNL

SEQ ID NO: 12831 - protein, 12 aa, Severe acute respiratory syndrome-related coronavirus
  REGION 1..12: note = Table B: HLA-DRB1*04:03L HLA-DRB1*01:03L HLA-DRB1*04:02L HLA-DRB1*04:05L HLA-DQA1*01:02-B1*06:02L HLA-DRB1*01:02L HLA-DRB1*14:01L HLA-DRB3*01:01L HLA-DRB1*04:08L HLA-DRB1*15:03L
  source 1..12: note = Severe acute respiratory syndrome coronavirus 2
REMLAHAEETRK

SEQ ID NO: 12832 - protein, 11 aa, Severe acute respiratory syndrome-related coronavirus
  REGION 1..11: note = Table B: HLA-DRB1*04:03L HLA-DQA1*01:02-B1*06:02L HLA-DQA1*05:05-B1*03:01L
  source 1..11: note = Severe acute respiratory syndrome coronavirus 2
VETKAIVSTIQ

SEQ ID NO: 12833 - protein, 13 aa, Severe acute respiratory syndrome-related coronavirus
  REGION 1..13: note = Table B: HLA-DRB1*04:03L HLA-DPA1*03:01-B1*04:02L
  source 1..13: note = Severe acute respiratory syndrome coronavirus 2
GARFYFYTSKTTV

SEQ ID NO: 12834 - protein, 10 aa, Severe acute respiratory syndrome-related coronavirus
  REGION 1..10: note = Table B: HLA-DRB1*04:03L HLA-DQA1*01-B1*05L HLA-DPA1*01:02-B1*04:01L HLA-DRB1*16:01L
  source 1..10: note = Severe acute respiratory syndrome coronavirus 2
YFYTSKTTVA

SEQ ID NO: 12835 - protein, 12 aa, Severe acute respiratory syndrome-related coronavirus
  REGION 1..12: note = Table B: HLA-DRB1*04:03L HLA-DRB1*04:04L HLA-DRB1*04:05L HLA-DRB4*03:01NL HLA-DRB1*08:04L HLA-DQA1*01:01-B1*05:01L HLA-DRB1*04:10L HLA-DRB1*12:01L HLA-DPA1*02:01-B1*13:01L HLA-DRB1*14:54L HLA-DQA1*05:05-B1*03:01L HLA-DRB1*14:17L
  REGION 1..12: note = CONT. FROM ABOVE: HLA-DRB1*04:08L HLA-DRB1*08:03L
  source 1..12: note = Severe acute respiratory syndrome coronavirus 2
YTSKTTVASLIN

SEQ ID NO: 12836 - protein, 12 aa, Severe acute respiratory syndrome-related coronavirus
  REGION 1..12: note = Table B: HLA-DRB1*04:03L
  source 1..12: note = Severe acute respiratory syndrome coronavirus 2
TSKTTVASLINT

SEQ ID NO: 12837 - protein, 12 aa, Severe acute respiratory syndrome-related coronavirus
  REGION 1..12: note = Table B: HLA-DRB1*04:03L HLA-DQA1*05:05-B1*03:01L
  source 1..12: note = Severe acute respiratory syndrome coronavirus 2
KTTVASLINTLN

SEQ ID NO: 12838 - protein, 12 aa, Severe acute respiratory syndrome-related coronavirus
  REGION 1..12: note = Table B: HLA-DRB1*04:03L HLA-DRB1*04:02L HLA-DQA1*05:05-B1*03:01L HLA-DRB1*14:17L
  source 1..12: note = Severe acute respiratory syndrome coronavirus 2
TTVASLINTLND

SEQ ID NO: 12839 - protein, 10 aa, Severe acute respiratory syndrome-related coronavirus
  REGION 1..10: note = Table B: HLA-DRB1*04:03L HLA-DQA1*01-B1*05L HLA-DRB1*14:17L
  source 1..10: note = Severe acute respiratory syndrome coronavirus 2
LINTLNDLNE

SEQ ID NO: 12840 - protein, 10 aa, Severe acute respiratory syndrome-related coronavirus
  REGION 1..10: note = Table B: HLA-DRB1*04:03L HLA-DRB1*04:02L HLA-DRB1*04:05L HLA-DRB4*03:01NL HLA-DQA1*01-B1*05L HLA-DQA1*05:01-B1*02:01L HLA-DRB1*04:10L HLA-DQA1*03:01-B1*03:02L HLA-DRB1*14:54L HLA-DRB1*14:17L HLA-DRB1*16:01L
  source 1..10: note = Severe acute respiratory syndrome coronavirus 2
INTLNDLNET

SEQ ID NO: 12841 - protein, 12 aa, Severe acute respiratory syndrome-related coronavirus
  REGION 1..12: note = Table B: HLA-DRB1*04:03L HLA-DPA1*01:02-B1*04:01L HLA-DQA1*01:03-B1*06:01L
  source 1..12: note = Severe acute respiratory syndrome coronavirus 2
ETLVTMPLGYVT

SEQ ID NO: 12842 - protein, 10 aa, Severe acute respiratory syndrome-related coronavirus
  REGION 1..10: note = Table B: HLA-DRB1*04:03L HLA-DRB1*13:03L HLA-DRB1*04:02L HLA-DRB4*03:01NL HLA-DRB1*12:01L HLA-DQA1*03:01-B1*03:02L HLA-DQA1*05:05-B1*03:01L HLA-DRB1*14:17L HLA-DQA1*02:01-B1*03:03L
  source 1..10: note = Severe acute respiratory syndrome coronavirus 2
VTMPLGYVTH

SEQ ID NO: 12843 - protein, 11 aa, Severe acute respiratory syndrome-related coronavirus
  REGION 1..11: note = Table B: HLA-DRB1*04:03L HLA-DRB1*04:02L
  source 1..11: note = Severe acute respiratory syndrome coronavirus 2
MPLGYVTHGLN

SEQ ID NO: 12844 - protein, 10 aa, Severe acute respiratory syndrome-related coronavirus
  REGION 1..10: note = Table B: HLA-DRB1*04:03L HLA-DRB1*04:02L HLA-DRB4*03:01NL HLA-DQA1*03:01-B1*03:02L HLA-DRB1*14:17L HLA-DQA1*02:01-B1*03:03L
  source 1..10: note = Severe acute respiratory syndrome coronavirus 2
YVTHGLNLEE

SEQ ID NO: 12845 - protein, 11 aa, Severe acute respiratory syndrome-related coronavirus
  REGION 1..11: note = Table B: HLA-DRB1*04:03L
  source 1..11: note = Severe acute respiratory syndrome coronavirus 2
MRSLKVPATVS

SEQ ID NO: 12846 - protein, 13 aa, Severe acute respiratory syndrome-related coronavirus
  REGION 1..13: note = Table B: HLA-DRB1*04:03L
  source 1..13: note = Severe acute respiratory syndrome coronavirus 2
TVSVSSPDAVTAY

SEQ ID NO: 12847 - protein, 14 aa, Severe acute respiratory syndrome-related coronavirus
  REGION 1..14: note = Table B: HLA-DRB1*04:03L
  source 1..14: note = Severe acute respiratory syndrome coronavirus 2
VSVSSPDAVTAYNG

SEQ ID NO: 12848 - protein, 12 aa, Severe acute respiratory syndrome-related coronavirus
  REGION 1..12: note = Table B: HLA-DRB1*04:03L HLA-DRB1*04:02L HLA-DRB1*16:01L HLA-DQA1*01:03-B1*06:01L HLA-DRB1*15:01L HLA-DRB1*15:03L
  source 1..12: note = Severe acute respiratory syndrome coronavirus 2
AVTAYNGYLTSS

SEQ ID NO: 12849 - protein, 10 aa, Severe acute respiratory syndrome-related coronavirus
  REGION 1..10: note = Table B: HLA-DRB1*04:03L HLA-DRB1*04:02L HLA-DQA1*03:01-B1*03:02L HLA-DRB1*14:17L
  source 1..10: note = Severe acute respiratory syndrome coronavirus 2
YNGYLTSSSK

SEQ ID NO: 12850 - protein, 10 aa, Severe acute respiratory syndrome-related coronavirus
  REGION 1..10: note = Table B: HLA-DRB1*04:03L HLA-DRB1*13:03L HLA-DRB1*04:02L HLA-DRB4*03:01NL HLA-DQA1*03:01-B1*03:02L HLA-DRB1*14:17L HLA-DRB1*16:01L HLA-DQA1*02:01-B1*03:03L
  source 1..10: note = Severe acute respiratory syndrome coronavirus 2
LTSSSKTPEE

SEQ ID NO: 12851 - protein, 13 aa, Severe acute respiratory syndrome-related coronavirus
  REGION 1..13: note = Table B: HLA-DRB1*04:03L
  source 1..13: note = Severe acute respiratory syndrome coronavirus 2
TPEEHFIETISLA

SEQ ID NO: 12852 - protein, 11 aa, Severe acute respiratory syndrome-related coronavirus
  REGION 1..11: note = Table B: HLA-DRB1*04:03L HLA-DRB1*14:17L
  source 1..11: note = Severe acute respiratory syndrome coronavirus 2
EHFIETISLAG

SEQ ID NO: 12853 - protein, 11 aa, Severe acute respiratory syndrome-related coronavirus
  REGION 1..11: note = Table B: HLA-DRB1*04:03L HLA-DRB1*04:02L HLA-DQA1*05:01-B1*02:01L
  source 1..11: note = Severe acute respiratory syndrome coronavirus 2
ETISLAGSYKD

SEQ ID NO: 12854 - protein, 11 aa, Severe acute respiratory syndrome-related coronavirus
  REGION 1..11: note = Table B: HLA-DRB1*04:03L HLA-DRB1*04:02L HLA-DQA1*01-B1*05L HLA-DQA1*05:01-B1*02:01L HLA-DPA1*03:01-B1*105:01L HLA-DQA1*03:01-B1*03:02L HLA-DRB1*14:17L
  source 1..11: note = Severe acute respiratory syndrome coronavirus 2
ISLAGSYKDWS

SEQ ID NO: 12855 - protein, 12 aa, Severe acute respiratory syndrome-related coronavirus
  REGION 1..12: note = Table B: HLA-DRB1*04:03L HLA-DRB1*04:02L HLA-DQA1*05:01-B1*02:01L HLA-DQA1*03:01-B1*03:02L HLA-DRB1*16:01L HLA-DRB1*15:03L
  source 1..12: note = Severe acute respiratory syndrome coronavirus 2
AGSYKDWSYSGQ

SEQ ID NO: 12856 - protein, 12 aa, Severe acute respiratory syndrome-related coronavirus
  REGION 1..12: note = Table B: HLA-DRB1*04:03L HLA-DQA1*05:01-B1*02:01L HLA-DQA1*03:01-B1*03:02L
  source 1..12: note = Severe acute respiratory syndrome coronavirus 2
GSYKDWSYSGQS

SEQ ID NO: 12857 - protein, 11 aa, Severe acute respiratory syndrome-related coronavirus
  REGION 1..11: note = Table B: HLA-DRB1*04:03L
  source 1..11: note = Severe acute respiratory syndrome coronavirus 2
WSYSGQSTQLG

SEQ ID NO: 12858 - protein, 11 aa, Severe acute respiratory syndrome-related coronavirus
  REGION 1..11: note = Table B: HLA-DRB1*04:03L HLA-DRB1*01:03L HLA-DRB1*04:02L HLA-DRB1*04:05L HLA-DQA1*01:02-B1*06:02L HLA-DRB4*03:01NL HLA-DQA1*05:05-B1*03:19L HLA-DRB1*04:10L HLA-DQA1*03:01-B1*03:02L HLA-DRB1*14:54L
  REGION 1..11: note = CONT. FROM ABOVE: HLA-DQA1*05:05-B1*03:01L HLA-DRB1*14:17L HLA-D RB1*16:01L HLA-DRB1*04:08L HLA-DQA1*02:01-B1*03:03L
  source 1..11: note = Severe acute respiratory syndrome coronavirus 2
YSGQSTQLGIE

SEQ ID NO: 12859 - protein, 11 aa, Severe acute respiratory syndrome-related coronavirus
  REGION 1..11: note = Table B: HLA-DRB1*04:03L HLA-DQA1*01-B1*05L
  source 1..11: note = Severe acute respiratory syndrome coronavirus 2
KSVYYTSNPTT

SEQ ID NO: 12860 - protein, 12 aa, Severe acute respiratory syndrome-related coronavirus
  REGION 1..12: note = Table B: HLA-DRB1*04:03L HLA-DRB1*13:02L HLA-DRB1*04:02L HLA-DRB1*04:05L HLA-DRB4*03:01NL HLA-DRB1*08:04L HLA-DPA1*01:03-B1*03:01L HLA-DQA1*01-B1*05L HLA-DRB1*04:10L HLA-DRB1*14:54L HLA-DQA1*05:05-B1*03:01L HLA-DRB1*14:17L
  REGION 1..12: note = CONT. FROM ABOVE: HLA-DRB1*04:08L
  source 1..12: note = Severe acute respiratory syndrome coronavirus 2
YTSNPTTFHLDG

SEQ ID NO: 12861 - protein, 11 aa, Severe acute respiratory syndrome-related coronavirus
  REGION 1..11: note = Table B: HLA-DRB1*04:03L HLA-DQA1*01-B1*05L HLA-DQA1*03:01-B1*03:02L HLA-DQA1*02:01-B1*03:03L
  source 1..11: note = Severe acute respiratory syndrome coronavirus 2
DGEVITFDNLK

SEQ ID NO: 12862 - protein, 10 aa, Severe acute respiratory syndrome-related coronavirus
  REGION 1..10: note = Table B: HLA-DRB1*04:03L HLA-DRB1*04:02L HLA-DQA1*01-B1*05L HLA-DPA1*03:01-B1*105:01L HLA-DQA1*03:01-B1*03:02L HLA-DRB1*14:17L HLA-DQA1*01:03-B1*06:01L HLA-DQA1*02:01-B1*03:03L
  source 1..10: note = Severe acute respiratory syndrome coronavirus 2
EVITFDNLKT

SEQ ID NO: 12863 - protein, 11 aa, Severe acute respiratory syndrome-related coronavirus
  REGION 1..11: note = Table B: HLA-DRB1*04:03L HLA-DRB1*14:17L
  source 1..11: note = Severe acute respiratory syndrome coronavirus 2
ITFDNLKTLLS

SEQ ID NO: 12864 - protein, 11 aa, Severe acute respiratory syndrome-related coronavirus
  REGION 1..11: note = Table B: HLA-DRB1*04:03L HLA-DRB1*01:03L HLA-DRB1*04:02L HLA-DRB1*14:17L HLA-DRB1*04:08L
  source 1..11: note = Severe acute respiratory syndrome coronavirus 2
FDNLKTLLSLR

SEQ ID NO: 12865 - protein, 11 aa, Severe acute respiratory syndrome-related coronavirus
  REGION 1..11: note = Table B: HLA-DRB1*04:03L HLA-DRB1*04:02L HLA-DRB1*04:05L HLA-DRB1*12:01L HLA-DQA1*03:01-B1*03:02L HLA-DRB1*14:17L
  source 1..11: note = Severe acute respiratory syndrome coronavirus 2
DNLKTLLSLRE

SEQ ID NO: 12866 - protein, 14 aa, Severe acute respiratory syndrome-related coronavirus
  REGION 1..14: note = Table B: HLA-DRB1*04:03L HLA-DRB1*04:04L HLA-DRB1*04:05L HLA-DRB1*14:01L
  source 1..14: note = Severe acute respiratory syndrome coronavirus 2
LLSLREVRTIKVFT

SEQ ID NO: 12867 - protein, 12 aa, Severe acute respiratory syndrome-related coronavirus
  REGION 1..12: note = Table B: HLA-DRB1*04:03L HLA-DRB1*01:03L HLA-DRB1*01:02L HLA-DRB1*14:01L HLA-DRB1*12:01L HLA-DRB1*14:17L HLA-DRB1*16:01L HLA-DRB1*04:08L HLA-DRB1*15:03L
  source 1..12: note = Severe acute respiratory syndrome coronavirus 2
LREVRTIKVFTT

SEQ ID NO: 12868 - protein, 10 aa, Severe acute respiratory syndrome-related coronavirus
  REGION 1..10: note = Table B: HLA-DRB1*04:03L HLA-DQA1*03:01-B1*03:02L HLA-DQA1*01:03-B1*06:01L HLA-DQA1*02:01-B1*03:03L
  source 1..10: note = Severe acute respiratory syndrome coronavirus 2
TIKVFTTVDN

SEQ ID NO: 12869 - protein, 10 aa, Severe acute respiratory syndrome-related coronavirus
  REGION 1..10: note = Table B: HLA-DRB1*04:03L HLA-DQA1*03:01-B1*03:02L HLA-DQA1*01:03-B1*06:01L HLA-DQA1*02:01-B1*03:03L
  source 1..10: note = Severe acute respiratory syndrome coronavirus 2
TTVDNINLHT

SEQ ID NO: 12870 - protein, 10 aa, Severe acute respiratory syndrome-related coronavirus
  REGION 1..10: note = Table B: HLA-DRB1*04:03L HLA-DRB1*04:02L HLA-DQA1*01-B1*05L HLA-DQA1*05:01-B1*02:01L HLA-DQA1*03:01-B1*03:02L HLA-DRB1*14:17L HLA-DQA1*02:01-B1*03:03L
  source 1..10: note = Severe acute respiratory syndrome coronavirus 2
NLHTQVVDMS

SEQ ID NO: 12871 - protein, 13 aa, Severe acute respiratory syndrome-related coronavirus
  REGION 1..13: note = Table B: HLA-DRB1*04:03L HLA-DRB1*04:02L HLA-DRB1*04:05L HLA-DRB4*03:01NL HLA-DRB1*04:10L HLA-DQA1*03:01-B1*03:02L HLA-DRB1*14:54L HLA-DRB1*14:17L HLA-DQA1*02:01-B1*03:03L
  source 1..13: note = Severe acute respiratory syndrome coronavirus 2
TQVVDMSMTYGQQ

SEQ ID NO: 12872 - protein, 12 aa, Severe acute respiratory syndrome-related coronavirus
  REGION 1..12: note = Table B: HLA-DRB1*04:03L
  source 1..12: note = Severe acute respiratory syndrome coronavirus 2
YLDGADVTKIKP

SEQ ID NO: 12873 - protein, 11 aa, Severe acute respiratory syndrome-related coronavirus
  REGION 1..11: note = Table B: HLA-DRB1*04:03L HLA-DRB1*01:03L HLA-DQA1*03:01-B1*03:02L HLA-DRB1*14:17L
  source 1..11: note = Severe acute respiratory syndrome coronavirus 2
IKPHNSHEGKT

SEQ ID NO: 12874 - protein, 11 aa, Severe acute respiratory syndrome-related coronavirus
  REGION 1..11: note = Table B: HLA-DRB1*04:03L HLA-DRB1*04:02L HLA-DRB1*04:05L HLA-DRB1*04:10L HLA-DRB1*14:17L HLA-DRB1*16:01L HLA-DQA1*02:01-B1*03:03L
  source 1..11: note = Severe acute respiratory syndrome coronavirus 2
KTFYVLPNDDT

SEQ ID NO: 12875 - protein, 10 aa, Severe acute respiratory syndrome-related coronavirus
  REGION 1..10: note = Table B: HLA-DRB1*04:03L HLA-DRB1*13:02L HLA-DRB1*13:03L HLA-DRB1*01:03L HLA-DRB1*04:02L HLA-DRB4*03:01NL HLA-DRB3*02:01L HLA-DRB1*14:01L HLA-DRB1*08:01L HLA-DRB5*01:01L HLA-DQA1*01-B1*05L HLA-DRB1*12:01L HLA-DPA1*03:01-B1*105:01L
  REGION 1..10: note = CONT. FROM ABOVE: HLA-DQA1*03:01-B1*03:02L HLA-DRB1*14:54L HLA-D QA1*05:05-B1*03:01L HLA-DRB1*14:17L HLA-DRB1*16:01L HLA-DQA1*01: 03-B1*06:01L HLA-DQA1*02:01-B1*03:03L
  source 1..10: note = Severe acute respiratory syndrome coronavirus 2
YVLPNDDTLR

SEQ ID NO: 12876 - protein, 11 aa, Severe acute respiratory syndrome-related coronavirus
  REGION 1..11: note = Table B: HLA-DRB1*04:03L HLA-DRB1*13:03L HLA-DRB1*04:02L HLA-DQA1*01-B1*05L HLA-DQA1*05:01-B1*02:01L HLA-DRB1*14:17L
  source 1..11: note = Severe acute respiratory syndrome coronavirus 2
VLPNDDTLRVE

SEQ ID NO: 12877 - protein, 13 aa, Severe acute respiratory syndrome-related coronavirus
  REGION 1..13: note = Table B: HLA-DRB1*04:03L HLA-DRB1*13:02L HLA-DRB1*04:04L HLA-DRB1*04:05L
  source 1..13: note = Severe acute respiratory syndrome coronavirus 2
DDTLRVEAFEYYH

SEQ ID NO: 12878 - protein, 11 aa, Severe acute respiratory syndrome-related coronavirus
  REGION 1..11: note = Table B: HLA-DRB1*04:03L HLA-DQA1*03:01-B1*03:02L HLA-DPA1*01:02-B1*04:01L
  source 1..11: note = Severe acute respiratory syndrome coronavirus 2
AFEYYHTTDPS

SEQ ID NO: 12879 - protein, 12 aa, Severe acute respiratory syndrome-related coronavirus
  REGION 1..12: note = Table B: HLA-DRB1*04:03L HLA-DRB1*04:05L HLA-DRB1*01:02L HLA-DRB1*14:17L HLA-DRB1*04:08L HLA-DQA1*02:01-B1*03:03L
  source 1..12: note = Severe acute respiratory syndrome coronavirus 2
LGRYMSALNHTK

SEQ ID NO: 12880 - protein, 11 aa, Severe acute respiratory syndrome-related coronavirus
  REGION 1..11: note = Table B: HLA-DRB1*04:03L HLA-DRB1*04:02L HLA-DRB4*03:01NL HLA-DRB1*12:01L HLA-DQA1*03:01-B1*03:02L HLA-DQA1*05:05-B1*03:01L HLA-DRB1*14:17L HLA-DQA1*02:01-B1*03:03L
  source 1..11: note = Severe acute respiratory syndrome coronavirus 2
YPQVNGLTSIK

SEQ ID NO: 12881 - protein, 14 aa, Severe acute respiratory syndrome-related coronavirus
  REGION 1..14: note = Table B: HLA-DRB1*04:03L HLA-DRB1*13:02L HLA-DRB1*01:03L HLA-DRB1*04:05L HLA-DRB1*01:02L HLA-DPA1*01:03-B1*03:01L HLA-DRB1*14:01L HLA-DRB1*12:01L HLA-DPA1*02:01-B1*13:01L HLA-DPA1*03:01-B1*105:01L HLA-DPA1*01:03-B1*104:01L
  REGION 1..14: note = CONT. FROM ABOVE: HLA-DRB1*16:01L HLA-DRB1*04:08L
  source 1..14: note = Severe acute respiratory syndrome coronavirus 2
TSIKWADNNCYLAT

SEQ ID NO: 12882 - protein, 11 aa, Severe acute respiratory syndrome-related coronavirus
  REGION 1..11: note = Table B: HLA-DRB1*04:03L HLA-DQA1*01:02-B1*06:02L HLA-DRB1*01:02L HLA-DQA1*05:01-B1*02:01L HLA-DRB1*12:01L HLA-DPA1*03:01-B1*105:01L HLA-DPA1*01:02-B1*04:01L HLA-DRB1*16:01L HLA-DQA1*01:03-B1*06:01L
  source 1..11: note = Severe acute respiratory syndrome coronavirus 2
ALLTLQQIELK

SEQ ID NO: 12883 - protein, 12 aa, Severe acute respiratory syndrome-related coronavirus
  REGION 1..12: note = Table B: HLA-DRB1*04:03L HLA-DRB1*13:03L HLA-DRB1*04:02L HLA-DRB1*04:05L HLA-DQA1*01:02-B1*06:02L HLA-DRB4*03:01NL HLA-DRB1*08:04L HLA-DRB1*14:01L HLA-DRB1*08:01L HLA-DRB1*04:10L HLA-DRB1*12:01L HLA-DQA1*03:01-B1*03:02L HLA-DRB1*14:54L
  REGION 1..12: note = CONT. FROM ABOVE: HLA-DRB1*14:17L HLA-DRB1*16:01L HLA-DRB1*04:08 L HLA-DQA1*02:01-B1*03:03L
  source 1..12: note = Severe acute respiratory syndrome coronavirus 2
LQQIELKFNPPA

SEQ ID NO: 12884 - protein, 11 aa, Severe acute respiratory syndrome-related coronavirus
  REGION 1..11: note = Table B: HLA-DRB1*04:03L HLA-DRB1*04:02L HLA-DRB1*14:01L HLA-DRB1*14:17L
  source 1..11: note = Severe acute respiratory syndrome coronavirus 2
IELKFNPPALQ

SEQ ID NO: 12885 - protein, 11 aa, Severe acute respiratory syndrome-related coronavirus
  REGION 1..11: note = Table B: HLA-DRB1*04:03L
  source 1..11: note = Severe acute respiratory syndrome coronavirus 2
LKFNPPALQDA

SEQ ID NO: 12886 - protein, 10 aa, Severe acute respiratory syndrome-related coronavirus
  REGION 1..10: note = Table B: HLA-DRB1*04:03L HLA-DRB1*01:03L HLA-DQA1*03:01-B1*03:02L HLA-DRB1*16:01L HLA-DQA1*02:01-B1*03:03L
  source 1..10: note = Severe acute respiratory syndrome coronavirus 2
YRARAGEAAN

SEQ ID NO: 12887 - protein, 13 aa, Severe acute respiratory syndrome-related coronavirus
  REGION 1..13: note = Table B: HLA-DRB1*04:03L HLA-DRB1*13:02L HLA-DRB1*04:05L HLA-DQA1*02:01-B1*03:03L
  source 1..13: note = Severe acute respiratory syndrome coronavirus 2
GDVRETMSYLFQH

SEQ ID NO: 12888 - protein, 12 aa, Severe acute respiratory syndrome-related coronavirus
  REGION 1..12: note = Table B: HLA-DRB1*04:03L HLA-DRB1*04:05L HLA-DQA1*01:02-B1*06:02L HLA-DPA1*03:01-B1*04:02L HLA-DPA1*03:01-B1*105:01L HLA-DPA1*01:02-B1*04:01L HLA-DRB1*15:03L
  source 1..12: note = Severe acute respiratory syndrome coronavirus 2
TMSYLFQHANLD

SEQ ID NO: 12889 - protein, 11 aa, Severe acute respiratory syndrome-related coronavirus
  REGION 1..11: note = Table B: HLA-DRB1*04:03L HLA-DQA1*03:01-B1*03:02L
  source 1..11: note = Severe acute respiratory syndrome coronavirus 2
GQQQTTLKGVE

SEQ ID NO: 12890 - protein, 12 aa, Severe acute respiratory syndrome-related coronavirus
  REGION 1..12: note = Table B: HLA-DRB1*04:03L HLA-DPA1*03:01-B1*04:02L
  source 1..12: note = Severe acute respiratory syndrome coronavirus 2
VEAVMYMGTLSY

SEQ ID NO: 12891 - protein, 11 aa, Severe acute respiratory syndrome-related coronavirus
  REGION 1..11: note = Table B: HLA-DRB1*04:03L
  source 1..11: note = Severe acute respiratory syndrome coronavirus 2
AVMYMGTLSYE

SEQ ID NO: 12892 - protein, 11 aa, Severe acute respiratory syndrome-related coronavirus
  REGION 1..11: note = Table B: HLA-DRB1*04:03L HLA-DRB1*14:17L
  source 1..11: note = Severe acute respiratory syndrome coronavirus 2
VMYMGTLSYEQ

SEQ ID NO: 12893 - protein, 11 aa, Severe acute respiratory syndrome-related coronavirus
  REGION 1..11: note = Table B: HLA-DRB1*04:03L HLA-DRB1*04:05L
  source 1..11: note = Severe acute respiratory syndrome coronavirus 2
MYMGTLSYEQF

SEQ ID NO: 12894 - protein, 11 aa, Severe acute respiratory syndrome-related coronavirus
  REGION 1..11: note = Table B: HLA-DRB1*04:03L HLA-DRB1*13:03L HLA-DRB1*04:02L HLA-DRB1*04:05L HLA-DRB4*03:01NL HLA-DRB1*04:10L HLA-DRB1*14:54L HLA-DRB1*14:17L HLA-DRB1*16:01L HLA-DRB1*04:08L
  source 1..11: note = Severe acute respiratory syndrome coronavirus 2
SPFVMMSAPPA

SEQ ID NO: 12895 - protein, 10 aa, Severe acute respiratory syndrome-related coronavirus
  REGION 1..10: note = Table B: HLA-DRB1*04:03L HLA-DRB1*01:03L HLA-DRB1*04:02L HLA-DRB1*04:04L HLA-DRB1*04:05L HLA-DRB1*01:02L HLA-DRB4*03:01NL HLA-DRB1*04:10L HLA-DRB1*12:01L HLA-DRB1*14:54L HLA-DRB1*14:17L HLA-DRB1*10:01L HLA-DRB1*16:01L HLA-DRB1*04:08L HLA-DRB1*15:03L
  source 1..10: note = Severe acute respiratory syndrome coronavirus 2
FVMMSAPPAQ

SEQ ID NO: 12896 - protein, 14 aa, Severe acute respiratory syndrome-related coronavirus
  REGION 1..14: note = Table B: HLA-DRB1*04:03L HLA-DRB1*13:02L HLA-DRB1*01:03L HLA-DRB1*04:05L HLA-DRB1*01:02L HLA-DRB1*08:04L HLA-DRB1*14:01L HLA-DRB1*11:04L HLA-DRB1*08:01L HLA-DRB1*11:01L HLA-DRB3*01:01L HLA-DPA1*01:03-B1*02:01L HLA-DPA1*01:02-B1*04:01L
  REGION 1..14: note = CONT. FROM ABOVE: HLA-DRB1*04:08L HLA-DQA1*02:01-B1*03:03L
  source 1..14: note = Severe acute respiratory syndrome coronavirus 2
ASEYTGNYQCGHYK

SEQ ID NO: 12897 - protein, 12 aa, Severe acute respiratory syndrome-related coronavirus
  REGION 1..12: note = Table B: HLA-DRB1*04:03L HLA-DRB1*01:03L HLA-DRB1*04:02L HLA-DQA1*01:02-B1*06:02L HLA-DRB1*01:02L HLA-DPA1*03:01-B1*105:01L HLA-DQA1*03:01-B1*03:02L HLA-DRB1*14:17L HLA-DPA1*01:02-B1*04:01L HLA-DRB1*16:01L
  REGION 1..12: note = CONT. FROM ABOVE: HLA-DQA1*01:03-B1*06:01L HLA-DRB1*04:08L HLA-D QA1*02:01-B1*03:03L
  source 1..12: note = Severe acute respiratory syndrome coronavirus 2
ITSKETLYCIDG

SEQ ID NO: 12898 - protein, 13 aa, Severe acute respiratory syndrome-related coronavirus
  REGION 1..13: note = Table B: HLA-DRB1*04:03L HLA-DRB1*01:02L HLA-DRB1*12:01L HLA-DRB1*15:03L
  source 1..13: note = Severe acute respiratory syndrome coronavirus 2
KETLYCIDGALLT

SEQ ID NO: 12899 - protein, 11 aa, Severe acute respiratory syndrome-related coronavirus
  REGION 1..11: note = Table B: HLA-DRB1*04:03L HLA-DRB1*01:03L HLA-DRB1*04:02L HLA-DQA1*01:01-B1*05:01L HLA-DQA1*05:01-B1*02:01L HLA-DPA1*01:03-B1*04:02L HLA-DPA1*03:01-B1*105:01L HLA-DRB1*04:08L
  source 1..11: note = Severe acute respiratory syndrome coronavirus 2
IDGALLTKSSE

SEQ ID NO: 12900 - protein, 14 aa, Severe acute respiratory syndrome-related coronavirus
  REGION 1..14: note = Table B: HLA-DRB1*04:03L HLA-DRB1*04:02L HLA-DRB1*04:05L HLA-DRB1*01:02L HLA-DRB1*12:01L HLA-DRB1*16:01L HLA-DRB1*15:03L
  source 1..14: note = Severe acute respiratory syndrome coronavirus 2
DGALLTKSSEYKGP

SEQ ID NO: 12901 - protein, 14 aa, Severe acute respiratory syndrome-related coronavirus
  REGION 1..14: note = Table B: HLA-DRB1*04:03L HLA-DRB1*04:02L HLA-DRB1*01:02L
  source 1..14: note = Severe acute respiratory syndrome coronavirus 2
GALLTKSSEYKGPI

SEQ ID NO: 12902 - protein, 13 aa, Severe acute respiratory syndrome-related coronavirus
  REGION 1..13: note = Table B: HLA-DRB1*04:03L HLA-DRB1*04:02L HLA-DRB1*16:01L HLA-DRB1*15:03L
  source 1..13: note = Severe acute respiratory syndrome coronavirus 2
LTKSSEYKGPITD

SEQ ID NO: 12903 - protein, 12 aa, Severe acute respiratory syndrome-related coronavirus
  REGION 1..12: note = Table B: HLA-DRB1*04:03L HLA-DRB1*04:02L HLA-DQA1*03:01-B1*03:02L HLA-DRB1*14:17L
  source 1..12: note = Severe acute respiratory syndrome coronavirus 2
TDVFYKENSYTT

SEQ ID NO: 12904 - protein, 11 aa, Severe acute respiratory syndrome-related coronavirus
  REGION 1..11: note = Table B: HLA-DRB1*04:03L
  source 1..11: note = Severe acute respiratory syndrome coronavirus 2
VFYKENSYTTT

SEQ ID NO: 12905 - protein, 12 aa, Severe acute respiratory syndrome-related coronavirus
  REGION 1..12: note = Table B: HLA-DRB1*04:03L
  source 1..12: note = Severe acute respiratory syndrome coronavirus 2
YKENSYTTTIKP

SEQ ID NO: 12906 - protein, 10 aa, Severe acute respiratory syndrome-related coronavirus
  REGION 1..10: note = Table B: HLA-DRB1*04:03L HLA-DRB1*01:03L HLA-DRB1*04:05L HLA-DQA1*01:02-B1*06:02L HLA-DRB1*01:01L HLA-DQA1*01:01-B1*05:01L HLA-DPA1*02:01-B1*13:01M HLA-DRB1*16:01L HLA-DQA1*01:03-B1*06:01M
  REGION 1..10: note = CONT. FROM ABOVE: HLA-DQA1*02:01-B1*03:03L HLA-DRB1*15:03L
  source 1..10: note = Severe acute respiratory syndrome coronavirus 2
NYYKKDNSYF

SEQ ID NO: 12907 - protein, 14 aa, Severe acute respiratory syndrome-related coronavirus
  REGION 1..14: note = Table B: HLA-DRB1*04:03L HLA-DRB1*04:02L HLA-DRB1*04:05L HLA-DRB1*01:02L HLA-DQA1*01:01-B1*05:01L HLA-DRB1*12:01L HLA-DPA1*03:01-B1*105:01L HLA-DRB1*04:08L
  source 1..14: note = Severe acute respiratory syndrome coronavirus 2
YKKDNSYFTEQPID

SEQ ID NO: 12908 - protein, 12 aa, Severe acute respiratory syndrome-related coronavirus
  REGION 1..12: note = Table B: HLA-DRB1*04:03L HLA-DRB1*13:03L HLA-DRB1*04:02L HLA-DQA1*01:02-B1*06:02L HLA-DRB4*03:01NL HLA-DRB3*02:01L HLA-DPA1*03:01-B1*04:02L HLA-DPA1*01:03-B1*04:01L HLA-DRB1*09:01L HLA-DRB1*12:01L HLA-DPA1*03:01-B1*105:01L
  REGION 1..12: note = CONT. FROM ABOVE: HLA-DPA1*01:02-B1*04:01L
  source 1..12: note = Severe acute respiratory syndrome coronavirus 2
DNSYFTEQPIDL

SEQ ID NO: 12909 - protein, 10 aa, Severe acute respiratory syndrome-related coronavirus
  REGION 1..10: note = Table B: HLA-DRB1*04:03L
  source 1..10: note = Severe acute respiratory syndrome coronavirus 2
TEQPIDLVPN

SEQ ID NO: 12910 - protein, 11 aa, Severe acute respiratory syndrome-related coronavirus
  REGION 1..11: note = Table B: HLA-DRB1*04:03L
  source 1..11: note = Severe acute respiratory syndrome coronavirus 2
PIDLVPNQPYP

SEQ ID NO: 12911 - protein, 10 aa, Severe acute respiratory syndrome-related coronavirus
  REGION 1..10: note = Table B: HLA-DRB1*04:03L HLA-DRB1*13:03L HLA-DRB1*04:02L HLA-DQA1*03:01-B1*03:02L HLA-DRB1*14:17L
  source 1..10: note = Severe acute respiratory syndrome coronavirus 2
VPNQPYPNAS

SEQ ID NO: 12912 - protein, 10 aa, Severe acute respiratory syndrome-related coronavirus
  REGION 1..10: note = Table B: HLA-DRB1*04:03L HLA-DQA1*01-B1*05L HLA-DQA1*03:01-B1*03:02L HLA-DQA1*02:01-B1*03:03L
  source 1..10: note = Severe acute respiratory syndrome coronavirus 2
QPYPNASFDN

SEQ ID NO: 12913 - protein, 10 aa, Severe acute respiratory syndrome-related coronavirus
  REGION 1..10: note = Table B: HLA-DRB1*04:03L HLA-DRB1*01:03L HLA-DRB1*04:05M HLA-DQA1*01:02-B1*06:02L HLA-DRB1*01:01L HLA-DRB1*01:02L HLA-DQA1*01:01-B1*05:01L HLA-DPA1*02:01-B1*13:01M HLA-DPA1*03:01-B1*105:01L HLA-DRB1*16:01L
  REGION 1..10: note = CONT. FROM ABOVE: HLA-DQA1*01:03-B1*06:01M HLA-DRB1*15:03L
  source 1..10: note = Severe acute respiratory syndrome coronavirus 2
PYPNASFDNF

SEQ ID NO: 12914 - protein, 10 aa, Severe acute respiratory syndrome-related coronavirus
  REGION 1..10: note = Table B: HLA-DRB1*04:03L HLA-DQA1*01-B1*05L
  source 1..10: note = Severe acute respiratory syndrome coronavirus 2
NIKFADDLNQ

SEQ ID NO: 12915 - protein, 12 aa, Severe acute respiratory syndrome-related coronavirus
  REGION 1..12: note = Table B: HLA-DRB1*04:03L HLA-DRB1*01:03L HLA-DRB1*04:02L HLA-DRB1*01:02L HLA-DRB1*14:01L HLA-DRB1*12:01L HLA-DRB1*14:17L HLA-DRB1*16:01L HLA-DRB1*04:08L HLA-DQA1*02:01-B1*03:03L HLA-DRB1*15:03L
  source 1..12: note = Severe acute respiratory syndrome coronavirus 2
DLNQLTGYKKPA

SEQ ID NO: 12916 - protein, 11 aa, Severe acute respiratory syndrome-related coronavirus
  REGION 1..11: note = Table B: HLA-DRB1*04:03L HLA-DRB1*13:03L HLA-DRB1*04:02L HLA-DRB1*14:01L HLA-DQA1*03:01-B1*03:02L HLA-DRB1*14:17L HLA-DRB1*16:01L HLA-DQA1*02:01-B1*03:03L
  source 1..11: note = Severe acute respiratory syndrome coronavirus 2
NQLTGYKKPAS

SEQ ID NO: 12917 - protein, 11 aa, Severe acute respiratory syndrome-related coronavirus
  REGION 1..11: note = Table B: HLA-DRB1*04:03L
  source 1..11: note = Severe acute respiratory syndrome coronavirus 2
LKVTFFPDLNG

SEQ ID NO: 12918 - protein, 11 aa, Severe acute respiratory syndrome-related coronavirus
  REGION 1..11: note = Table B: HLA-DRB1*04:03L HLA-DRB1*13:03L HLA-DRB1*01:03L HLA-DRB1*04:02L HLA-DRB1*04:05L HLA-DRB4*03:01NL HLA-DRB1*14:54L HLA-DRB1*14:17L HLA-DRB1*16:01L
  source 1..11: note = Severe acute respiratory syndrome coronavirus 2
FFPDLNGDVVA

SEQ ID NO: 12919 - protein, 12 aa, Severe acute respiratory syndrome-related coronavirus
  REGION 1..12: note = Table B: HLA-DRB1*04:03L HLA-DRB1*04:02L HLA-DRB1*14:54L HLA-DRB1*14:17L
  source 1..12: note = Severe acute respiratory syndrome coronavirus 2
GDVVAIDYKHYT

SEQ ID NO: 12920 - protein, 12 aa, Severe acute respiratory syndrome-related coronavirus
  REGION 1..12: note = Table B: HLA-DRB1*04:03L HLA-DRB1*04:02L HLA-DRB1*01:02L HLA-DRB1*08:04L HLA-DRB3*01:01L HLA-DRB1*14:54L HLA-DRB1*14:17L
  source 1..12: note = Severe acute respiratory syndrome coronavirus 2
DVVAIDYKHYTP

SEQ ID NO: 12921 - protein, 11 aa, Severe acute respiratory syndrome-related coronavirus
  REGION 1..11: note = Table B: HLA-DRB1*04:03L HLA-DRB1*13:02L HLA-DRB1*13:03L HLA-DRB1*01:03L HLA-DRB1*04:02L HLA-DRB4*03:01NL HLA-DRB1*14:01L HLA-DRB1*12:01L HLA-DQA1*03:01-B1*03:02L HLA-DRB1*14:54L HLA-DRB1*14:17L HLA-DPA1*01:02-B1*04:01L HLA-DRB1*16:01L
  REGION 1..11: note = CONT. FROM ABOVE: HLA-DRB1*04:08L
  source 1..11: note = Severe acute respiratory syndrome coronavirus 2
VAIDYKHYTPS

SEQ ID NO: 12922 - protein, 11 aa, Severe acute respiratory syndrome-related coronavirus
  REGION 1..11: note = Table B: HLA-DRB1*04:03L HLA-DRB1*04:02L HLA-DQA1*03:01-B1*03:02L HLA-DRB1*14:17L
  source 1..11: note = Severe acute respiratory syndrome coronavirus 2
PIVWHVNNATN

SEQ ID NO: 12923 - protein, 10 aa, Severe acute respiratory syndrome-related coronavirus
  REGION 1..10: note = Table B: HLA-DRB1*04:03L HLA-DRB1*01:03L HLA-DRB1*04:02L HLA-DQA1*03:01-B1*03:02L HLA-DRB1*14:17L HLA-DRB1*16:01L HLA-DQA1*02:01-B1*03:03L
  source 1..10: note = Severe acute respiratory syndrome coronavirus 2
TNKATYKPNT

SEQ ID NO: 12924 - protein, 10 aa, Severe acute respiratory syndrome-related coronavirus
  REGION 1..10: note = Table B: HLA-DRB1*04:03L HLA-DQA1*03:01-B1*03:02L
  source 1..10: note = Severe acute respiratory syndrome coronavirus 2
KPVETSNSFD

SEQ ID NO: 12925 - protein, 10 aa, Severe acute respiratory syndrome-related coronavirus
  REGION 1..10: note = Table B: HLA-DRB1*04:03L HLA-DQA1*03:01-B1*03:02L HLA-DRB1*14:17L
  source 1..10: note = Severe acute respiratory syndrome coronavirus 2
SFDVLKSEDA

SEQ ID NO: 12926 - protein, 10 aa, Severe acute respiratory syndrome-related coronavirus
  REGION 1..10: note = Table B: HLA-DRB1*04:03L HLA-DRB1*14:17L
  source 1..10: note = Severe acute respiratory syndrome coronavirus 2
FDVLKSEDAQ

SEQ ID NO: 12927 - protein, 10 aa, Severe acute respiratory syndrome-related coronavirus
  REGION 1..10: note = Table B: HLA-DRB1*04:03L HLA-DRB1*04:02L HLA-DQA1*01-B1*05L HLA-DQA1*03:01-B1*03:02L HLA-DRB1*14:17L HLA-DQA1*02:01-B1*03:03L
  source 1..10: note = Severe acute respiratory syndrome coronavirus 2
DVLKSEDAQG

SEQ ID NO: 12928 - protein, 11 aa, Severe acute respiratory syndrome-related coronavirus
  REGION 1..11: note = Table B: HLA-DRB1*04:03L HLA-DRB1*04:02L HLA-DRB1*04:05L HLA-DRB4*03:01NL HLA-DQA1*01-B1*05L HLA-DQA1*05:01-B1*02:01L HLA-DQA1*03:01-B1*03:02L HLA-DRB1*14:17L HLA-DRB1*16:01L HLA-DQA1*01:03-B1*06:01L HLA-DQA1*02:01-B1*03:03L
  source 1..11: note = Severe acute respiratory syndrome coronavirus 2
VLKSEDAQGMD

SEQ ID NO: 12929 - protein, 10 aa, Severe acute respiratory syndrome-related coronavirus
  REGION 1..10: note = Table B: HLA-DRB1*04:03L HLA-DQA1*01-B1*05L HLA-DQA1*05:01-B1*02:01L HLA-DQA1*03:01-B1*03:02L HLA-DQA1*02:01-B1*03:03L
  source 1..10: note = Severe acute respiratory syndrome coronavirus 2
LKPVSEEVVE

SEQ ID NO: 12930 - protein, 12 aa, Severe acute respiratory syndrome-related coronavirus
  REGION 1..12: note = Table B: HLA-DRB1*04:03L HLA-DRB1*04:05L HLA-DRB1*08:04L HLA-DRB1*11:03L HLA-DRB1*04:10L HLA-DPA1*01:02-B1*04:01L HLA-DRB1*07:01L HLA-DRB1*10:01L HLA-DRB1*04:08L
  source 1..12: note = Severe acute respiratory syndrome coronavirus 2
SEEVVENPTIQK

SEQ ID NO: 12931 - protein, 12 aa, Severe acute respiratory syndrome-related coronavirus
  REGION 1..12: note = Table B: HLA-DRB1*04:03L HLA-DQA1*01:01-B1*05:01L HLA-DRB1*12:01L
  source 1..12: note = Severe acute respiratory syndrome coronavirus 2
VENPTIQKDVLE

SEQ ID NO: 12932 - protein, 14 aa, Severe acute respiratory syndrome-related coronavirus
  REGION 1..14: note = Table B: HLA-DRB1*04:03L HLA-DRB1*13:02L HLA-DRB1*01:03L HLA-DRB1*04:05L HLA-DQA1*01:02-B1*06:02L HLA-DRB1*01:02L HLA-DRB1*03:01L HLA-DRB1*14:01L HLA-DRB1*14:02L HLA-DRB1*08:01L HLA-DRB1*12:01L HLA-DRB3*01:01L HLA-DPA1*02:01-B1*13:01L
  REGION 1..14: note = CONT. FROM ABOVE: HLA-DPA1*03:01-B1*105:01L HLA-DPA1*01:02-B1*04 :01L HLA-DRB1*16:01L HLA-DQA1*01:03-B1*06:01L HLA-DRB1*04:08L HL A-DRB1*15:03L
  source 1..14: note = Severe acute respiratory syndrome coronavirus 2
NPTIQKDVLECNVK

SEQ ID NO: 12933 - protein, 12 aa, Severe acute respiratory syndrome-related coronavirus
  REGION 1..12: note = Table B: HLA-DRB1*04:03L
  source 1..12: note = Severe acute respiratory syndrome coronavirus 2
TTEVVGDIILKP

SEQ ID NO: 12934 - protein, 12 aa, Severe acute respiratory syndrome-related coronavirus
  REGION 1..12: note = Table B: HLA-DRB1*04:03L HLA-DRB1*04:02L
  source 1..12: note = Severe acute respiratory syndrome coronavirus 2
TEVVGDIILKPA

SEQ ID NO: 12935 - protein, 10 aa, Severe acute respiratory syndrome-related coronavirus
  REGION 1..10: note = Table B: HLA-DRB1*04:03L HLA-DRB1*04:02L HLA-DQA1*03:01-B1*03:02L HLA-DRB1*14:17L HLA-DQA1*02:01-B1*03:03L
  source 1..10: note = Severe acute respiratory syndrome coronavirus 2
DIILKPANNS

SEQ ID NO: 12936 - protein, 10 aa, Severe acute respiratory syndrome-related coronavirus
  REGION 1..10: note = Table B: HLA-DRB1*04:03L HLA-DRB1*04:02L HLA-DQA1*03:01-B1*03:02L HLA-DRB1*14:17L
  source 1..10: note = Severe acute respiratory syndrome coronavirus 2
ILKPANNSLK

SEQ ID NO: 12937 - protein, 12 aa, Severe acute respiratory syndrome-related coronavirus
  REGION 1..12: note = Table B: HLA-DRB1*04:03L HLA-DQA1*01:02-B1*06:02L HLA-DRB1*15:03L
  source 1..12: note = Severe acute respiratory syndrome coronavirus 2
NSLKITEEVGHT

SEQ ID NO: 12938 - protein, 10 aa, Severe acute respiratory syndrome-related coronavirus
  REGION 1..10: note = Table B: HLA-DRB1*04:03L HLA-DRB1*04:02L HLA-DQA1*03:01-B1*03:02L HLA-DRB1*14:17L HLA-DRB1*16:01L HLA-DQA1*01:03-B1*06:01L HLA-DQA1*02:01-B1*03:03L
  source 1..10: note = Severe acute respiratory syndrome coronavirus 2
KITEEVGHTD

SEQ ID NO: 12939 - protein, 11 aa, Severe acute respiratory syndrome-related coronavirus
  REGION 1..11: note = Table B: HLA-DRB1*04:03L HLA-DQA1*05:01-B1*02:01L HLA-DQA1*03:01-B1*03:02L HLA-DQA1*01:03-B1*06:01L
  source 1..11: note = Severe acute respiratory syndrome coronavirus 2
DLMAAYVDNSS

SEQ ID NO: 12940 - protein, 10 aa, Severe acute respiratory syndrome-related coronavirus
  REGION 1..10: note = Table B: HLA-DRB1*04:03L HLA-DQA1*01-B1*05L
  source 1..10: note = Severe acute respiratory syndrome coronavirus 2
AAYVDNSSLT

SEQ ID NO: 12941 - protein, 10 aa, Severe acute respiratory syndrome-related coronavirus
  REGION 1..10: note = Table B: HLA-DRB1*04:03L HLA-DRB1*04:02L HLA-DRB4*03:01NL HLA-DQA1*03:01-B1*03:02L HLA-DRB1*14:17L HLA-DQA1*01:03-B1*06:01L HLA-DQA1*02:01-B1*03:03L
  source 1..10: note = Severe acute respiratory syndrome coronavirus 2
NSSLTIKKPN

SEQ ID NO: 12942 - protein, 10 aa, Severe acute respiratory syndrome-related coronavirus
  REGION 1..10: note = Table B: HLA-DRB1*04:03L HLA-DRB1*04:02L HLA-DQA1*03:01-B1*03:02L HLA-DRB1*14:17L HLA-DQA1*01:03-B1*06:01L HLA-DQA1*02:01-B1*03:03L
  source 1..10: note = Severe acute respiratory syndrome coronavirus 2
SSLTIKKPNE

SEQ ID NO: 12943 - protein, 10 aa, Severe acute respiratory syndrome-related coronavirus
  REGION 1..10: note = Table B: HLA-DRB1*04:03L HLA-DRB1*04:02L HLA-DRB1*14:17L
  source 1..10: note = Severe acute respiratory syndrome coronavirus 2
VLGLKTLATH

SEQ ID NO: 12944 - protein, 11 aa, Severe acute respiratory syndrome-related coronavirus
  REGION 1..11: note = Table B: HLA-DRB1*04:03L HLA-DRB1*01:02L HLA-DRB1*15:03L
  source 1..11: note = Severe acute respiratory syndrome coronavirus 2
GLKTLATHGLA

SEQ ID NO: 12945 - protein, 11 aa, Severe acute respiratory syndrome-related coronavirus
  REGION 1..11: note = Table B: HLA-DRB1*04:03L HLA-DRB1*01:02L HLA-DRB1*14:17L
  source 1..11: note = Severe acute respiratory syndrome coronavirus 2
LKTLATHGLAA

SEQ ID NO: 12946 - protein, 12 aa, Severe acute respiratory syndrome-related coronavirus
  REGION 1..12: note = Table B: HLA-DRB1*04:03L
  source 1..12: note = Severe acute respiratory syndrome coronavirus 2
TLATHGLAAVNS

SEQ ID NO: 12947 - protein, 11 aa, Severe acute respiratory syndrome-related coronavirus
  REGION 1..11: note = Table B: HLA-DRB1*04:03L HLA-DQA1*05:01-B1*02:01L HLA-DRB1*12:01L HLA-DQA1*03:01-B1*03:02L
  source 1..11: note = Severe acute respiratory syndrome coronavirus 2
GLAAVNSVPWD

SEQ ID NO: 12948 - protein, 11 aa, Severe acute respiratory syndrome-related coronavirus
  REGION 1..11: note = Table B: HLA-DRB1*04:03L HLA-DQA1*02:01-B1*03:03L
  source 1..11: note = Severe acute respiratory syndrome coronavirus 2
LAAVNSVPWDT

SEQ ID NO: 12949 - protein, 10 aa, Severe acute respiratory syndrome-related coronavirus
  REGION 1..10: note = Table B: HLA-DRB1*04:03L HLA-DRB1*04:02L HLA-DQA1*01-B1*05L HLA-DQA1*03:01-B1*03:02L HLA-DQA1*02:01-B1*03:03L
  source 1..10: note = Severe acute respiratory syndrome coronavirus 2
IANYAKPFLN

SEQ ID NO: 12950 - protein, 10 aa, Severe acute respiratory syndrome-related coronavirus
  REGION 1..10: note = Table B: HLA-DRB1*04:03L HLA-DQA1*03:01-B1*03:02L HLA-DRB1*14:17L HLA-DQA1*02:01-B1*03:03L
  source 1..10: note = Severe acute respiratory syndrome coronavirus 2
LNKVVSTTTN

SEQ ID NO: 12951 - protein, 11 aa, Severe acute respiratory syndrome-related coronavirus
  REGION 1..11: note = Table B: HLA-DRB1*04:03L HLA-DRB1*12:01L HLA-DRB1*16:01L
  source 1..11: note = Severe acute respiratory syndrome coronavirus 2
NKVVSTTTNIV

SEQ ID NO: 12952 - protein, 13 aa, Severe acute respiratory syndrome-related coronavirus
  REGION 1..13: note = Table B: HLA-DRB1*04:03L HLA-DQA1*01:02-B1*06:02L HLA-DRB4*03:01NL HLA-DRB1*08:77L HLA-DPA1*01:03-B1*03:01L HLA-DPA1*03:01-B1*04:02L HLA-DRB1*09:01L HLA-DRB1*12:02L HLA-DPA1*03:01-B1*105:01L
  source 1..13: note = Severe acute respiratory syndrome coronavirus 2
NSRIKASMPTTIA

SEQ ID NO: 12953 - protein, 10 aa, Severe acute respiratory syndrome-related coronavirus
  REGION 1..10: note = Table B: HLA-DRB1*04:03L HLA-DRB1*04:02L HLA-DQA1*03:01-B1*03:02L HLA-DRB1*14:17L
  source 1..10: note = Severe acute respiratory syndrome coronavirus 2
SMPTTIAKNT

SEQ ID NO: 12954 - protein, 10 aa, Severe acute respiratory syndrome-related coronavirus
  REGION 1..10: note = Table B: HLA-DRB1*04:03L HLA-DRB1*13:03L HLA-DRB1*01:03L HLA-DQA1*03:01-B1*03:02L HLA-DRB1*14:17L HLA-DRB1*16:01L HLA-DQA1*02:01-B1*03:03L
  source 1..10: note = Severe acute respiratory syndrome coronavirus 2
NYLKSPNFSK

SEQ ID NO: 12955 - protein, 12 aa, Severe acute respiratory syndrome-related coronavirus
  REGION 1..12: note = Table B: HLA-DRB1*04:03L HLA-DRB1*13:02L HLA-DRB1*01:02L HLA-DRB3*02:01L HLA-DPA1*01:03-B1*03:01L HLA-DPA1*03:01-B1*04:02L HLA-DRB1*14:01L HLA-DRB1*12:01L HLA-DQA1*05:05-B1*03:01L HLA-DRB1*16:01L HLA-DRB1*15:03L
  source 1..12: note = Severe acute respiratory syndrome coronavirus 2
SPNFSKLINIII

SEQ ID NO: 12956 - protein, 11 aa, Severe acute respiratory syndrome-related coronavirus
  REGION 1..11: note = Table B: HLA-DRB1*04:03L HLA-DRB1*14:17L
  source 1..11: note = Severe acute respiratory syndrome coronavirus 2
GSLIYSTAALG

SEQ ID NO: 12957 - protein, 11 aa, Severe acute respiratory syndrome-related coronavirus
  REGION 1..11: note = Table B: HLA-DRB1*04:03L HLA-DQA1*01:02-B1*06:02L HLA-DQA1*05:05-B1*03:01L HLA-DRB1*14:17L HLA-DQA1*01:03-B1*06:01L
  source 1..11: note = Severe acute respiratory syndrome coronavirus 2
AALGVLMSNLG

SEQ ID NO: 12958 - protein, 10 aa, Severe acute respiratory syndrome-related coronavirus
  REGION 1..10: note = Table B: HLA-DRB1*04:03L HLA-DRB1*14:17L
  source 1..10: note = Severe acute respiratory syndrome coronavirus 2
VLMSNLGMPS

SEQ ID NO: 12959 - protein, 10 aa, Severe acute respiratory syndrome-related coronavirus
  REGION 1..10: note = Table B: HLA-DRB1*04:03L HLA-DRB1*14:17L
  source 1..10: note = Severe acute respiratory syndrome coronavirus 2
YLNSTNVTIA

SEQ ID NO: 12960 - protein, 13 aa, Severe acute respiratory syndrome-related coronavirus
  REGION 1..13: note = Table B: HLA-DRB1*04:03L HLA-DQA1*01:02-B1*06:02L HLA-DRB1*01:02L HLA-DQA1*05:05-B1*03:19L HLA-DQA1*05:01-B1*02:01L HLA-DRB1*12:01L HLA-DPA1*03:01-B1*105:01L HLA-DQA1*05:05-B1*03:01L
  REGION 1..13: note = CONT. FROM ABOVE: HLA-DRB1*14:17L HLA-DQA1*01:03-B1*06:01L HLA-D QA1*02:01-B1*03:03L HLA-DRB1*15:03L
  source 1..13: note = Severe acute respiratory syndrome coronavirus 2
NVTIATYCTGSIP

SEQ ID NO: 12961 - protein, 12 aa, Severe acute respiratory syndrome-related coronavirus
  REGION 1..12: note = Table B: HLA-DRB1*04:03L HLA-DRB1*04:02L HLA-DRB1*04:05L HLA-DRB4*03:01NL HLA-DQA1*01-B1*05L HLA-DQA1*05:01-B1*02:01L HLA-DRB1*04:10L HLA-DQA1*03:01-B1*03:02L HLA-DRB1*14:54L HLA-DRB1*14:17L HLA-DRB1*16:01L HLA-DQA1*02:01-B1*03:03L
  source 1..12: note = Severe acute respiratory syndrome coronavirus 2
LSGLDSLDTYPS

SEQ ID NO: 12962 - protein, 12 aa, Severe acute respiratory syndrome-related coronavirus
  REGION 1..12: note = Table B: HLA-DRB1*04:03L HLA-DRB1*14:17L
  source 1..12: note = Severe acute respiratory syndrome coronavirus 2
SGLDSLDTYPSL

SEQ ID NO: 12963 - protein, 11 aa, Severe acute respiratory syndrome-related coronavirus
  REGION 1..11: note = Table B: HLA-DRB1*04:03L HLA-DRB1*04:02L HLA-DRB1*04:05L HLA-DQA1*01-B1*05L HLA-DQA1*05:01-B1*02:01L HLA-DRB1*04:10L HLA-DQA1*03:01-B1*03:02L HLA-DRB1*14:17L HLA-DRB1*16:01L
  source 1..11: note = Severe acute respiratory syndrome coronavirus 2
LDSLDTYPSLE

SEQ ID NO: 12964 - protein, 11 aa, Severe acute respiratory syndrome-related coronavirus
  REGION 1..11: note = Table B: HLA-DRB1*04:03L HLA-DRB1*04:02L HLA-DQA1*01-B1*05L HLA-DRB1*14:17L
  source 1..11: note = Severe acute respiratory syndrome coronavirus 2
DSLDTYPSLET

SEQ ID NO: 12965 - protein, 11 aa, Severe acute respiratory syndrome-related coronavirus
  REGION 1..11: note = Table B: HLA-DRB1*04:03L HLA-DRB1*04:02L HLA-DQA1*02:01-B1*03:03L
  source 1..11: note = Severe acute respiratory syndrome coronavirus 2
LDTYPSLETIQ

SEQ ID NO: 12966 - protein, 13 aa, Severe acute respiratory syndrome-related coronavirus
  REGION 1..13: note = Table B: HLA-DRB1*04:03L HLA-DQA1*01:02-B1*06:02L HLA-DQA1*01:03-B1*06:01L
  source 1..13: note = Severe acute respiratory syndrome coronavirus 2
YPSLETIQITISS

SEQ ID NO: 12967 - protein, 12 aa, Severe acute respiratory syndrome-related coronavirus
  REGION 1..12: note = Table B: HLA-DRB1*04:03L
  source 1..12: note = Severe acute respiratory syndrome coronavirus 2
LETIQITISSFK

SEQ ID NO: 12968 - protein, 11 aa, Severe acute respiratory syndrome-related coronavirus
  REGION 1..11: note = Table B: HLA-DRB1*04:03L HLA-DRB1*04:05L HLA-DQA1*01-B1*05L HLA-DRB1*14:17L
  source 1..11: note = Severe acute respiratory syndrome coronavirus 2
SSFKWDLTAFG

SEQ ID NO: 12969 - protein, 10 aa, Severe acute respiratory syndrome-related coronavirus
  REGION 1..10: note = Table B: HLA-DRB1*04:03L HLA-DRB1*01:03L HLA-DRB1*04:05L HLA-DQA1*01:02-B1*06:02L HLA-DRB1*01:01L HLA-DPA1*03:01-B1*04:02L HLA-DRB1*14:02L HLA-DQA1*05:05-B1*03:19L HLA-DQA1*05:01-B1*02:01L
  REGION 1..10: note = CONT. FROM ABOVE: HLA-DRB4*01:01L HLA-DPA1*01:03-B1*04:01L HLA-D PA1*02:01-B1*13:01M HLA-DPA1*01:03-B1*104:01L HLA-DRB1*16:01L HL A-DQA1*01:03-B1*06:01M HLA-DQA1*02:01-B1*03:03L HLA-DRB1*15:03L
  source 1..10: note = Severe acute respiratory syndrome coronavirus 2
AYILFTRFFY

SEQ ID NO: 12970 - protein, 10 aa, Severe acute respiratory syndrome-related coronavirus
  REGION 1..10: note = Table B: HLA-DRB1*04:03L HLA-DRB1*04:05L HLA-DQA1*01:02-B1*06:02L HLA-DPA1*02:01-B1*13:01M HLA-DQA1*01:03-B1*06:01L HLA-DRB1*15:03L
  source 1..10: note = Severe acute respiratory syndrome coronavirus 2
LFFSYFAVHF

SEQ ID NO: 12971 - protein, 10 aa, Severe acute respiratory syndrome-related coronavirus
  REGION 1..10: note = Table B: HLA-DRB1*04:03L HLA-DRB1*01:03L HLA-DRB1*04:05M HLA-DQA1*01:02-B1*06:02L HLA-DRB1*01:01L HLA-DQA1*01:01-B1*05:01L HLA-DQA1*05:05-B1*03:19L HLA-DRB4*01:01L HLA-DPA1*01:03-B1*04:01L
  REGION 1..10: note = CONT. FROM ABOVE: HLA-DPA1*02:01-B1*13:01M HLA-DPA1*03:01-B1*105 :01L HLA-DRB1*16:01L HLA-DQA1*01:03-B1*06:01M HLA-DQA1*02:01-B1* 03:03L HLA-DRB1*15:03L
  source 1..10: note = Severe acute respiratory syndrome coronavirus 2
HFISNSWLMW

SEQ ID NO: 12972 - protein, 11 aa, Severe acute respiratory syndrome-related coronavirus
  REGION 1..11: note = Table B: HLA-DRB1*04:03L HLA-DRB1*14:17L
  source 1..11: note = Severe acute respiratory syndrome coronavirus 2
INLVQMAPISA

SEQ ID NO: 12973 - protein, 14 aa, Severe acute respiratory syndrome-related coronavirus
  REGION 1..14: note = Table B: HLA-DRB1*04:03L HLA-DRB1*01:01L HLA-DRB1*11:02L HLA-DRB1*11:03L HLA-DRB1*14:02L HLA-DQA1*05:05-B1*03:01L HLA-DRB1*07:01L HLA-DRB1*08:02L HLA-DRB1*08:03L
  source 1..14: note = Severe acute respiratory syndrome coronavirus 2
SFYYVWKSYVHVVD

SEQ ID NO: 12974 - protein, 11 aa, Severe acute respiratory syndrome-related coronavirus
  REGION 1..11: note = Table B: HLA-DRB1*04:03L
  source 1..11: note = Severe acute respiratory syndrome coronavirus 2
VHVVDGCNSST

SEQ ID NO: 12975 - protein, 11 aa, Severe acute respiratory syndrome-related coronavirus
  REGION 1..11: note = Table B: HLA-DRB1*04:03L
  source 1..11: note = Severe acute respiratory syndrome coronavirus 2
GSTFISDEVAR

SEQ ID NO: 12976 - protein, 11 aa, Severe acute respiratory syndrome-related coronavirus
  REGION 1..11: note = Table B: HLA-DRB1*04:03L HLA-DRB1*04:05L HLA-DRB3*02:01L HLA-DRB1*09:01L HLA-DPA1*01:03-B1*104:01L HLA-DRB1*08:02L
  source 1..11: note = Severe acute respiratory syndrome coronavirus 2
DEVARDLSLQF

SEQ ID NO: 12977 - protein, 11 aa, Severe acute respiratory syndrome-related coronavirus
  REGION 1..11: note = Table B: HLA-DRB1*04:03L HLA-DRB3*01:01L
  source 1..11: note = Severe acute respiratory syndrome coronavirus 2
EVARDLSLQFK

SEQ ID NO: 12978 - protein, 10 aa, Severe acute respiratory syndrome-related coronavirus
  REGION 1..10: note = Table B: HLA-DRB1*04:03L HLA-DRB1*13:03L HLA-DRB1*04:02L HLA-DRB1*04:05L HLA-DRB1*08:01L HLA-DQA1*03:01-B1*03:02L HLA-DQA1*02:01-B1*03:03L
  source 1..10: note = Severe acute respiratory syndrome coronavirus 2
FKRPINPTDQ

SEQ ID NO: 12979 - protein, 11 aa, Severe acute respiratory syndrome-related coronavirus
  REGION 1..11: note = Table B: HLA-DRB1*04:03L HLA-DRB1*13:02L HLA-DRB1*01:03L HLA-DRB1*04:02L HLA-DRB4*03:01NL HLA-DRB1*14:01L HLA-DQA1*01-B1*05L HLA-DQA1*05:01-B1*02:01L HLA-DRB1*12:01L HLA-DRB1*14:54L HLA-DQA1*05:05-B1*03:01L HLA-DRB1*14:17L
  REGION 1..11: note = CONT. FROM ABOVE: HLA-DRB1*16:01L
  source 1..11: note = Severe acute respiratory syndrome coronavirus 2
SSYIVDSVTVK

SEQ ID NO: 12980 - protein, 10 aa, Severe acute respiratory syndrome-related coronavirus
  REGION 1..10: note = Table B: HLA-DRB1*04:03L HLA-DRB1*13:02L HLA-DRB1*13:03L HLA-DRB1*01:03L HLA-DRB1*04:02L HLA-DRB1*04:05L HLA-DRB1*01:02L HLA-DRB4*03:01NL HLA-DRB1*08:77L HLA-DRB1*14:01L HLA-DRB1*14:02L HLA-DQA1*05:01-B1*02:01L HLA-DRB1*12:01L
  REGION 1..10: note = CONT. FROM ABOVE: HLA-DQA1*03:01-B1*03:02L HLA-DRB1*14:54L HLA-D RB1*14:17L HLA-DRB1*16:01L HLA-DRB1*04:08L HLA-DQA1*02:01-B1*03: 03L
  source 1..10: note = Severe acute respiratory syndrome coronavirus 2
YIVDSVTVKN

SEQ ID NO: 12981 - protein, 11 aa, Severe acute respiratory syndrome-related coronavirus
  REGION 1..11: note = Table B: HLA-DRB1*04:03L HLA-DRB1*04:02L HLA-DQA1*01-B1*05L HLA-DRB1*14:17L
  source 1..11: note = Severe acute respiratory syndrome coronavirus 2
GSIHLYFDKAG

SEQ ID NO: 12982 - protein, 11 aa, Severe acute respiratory syndrome-related coronavirus
  REGION 1..11: note = Table B: HLA-DRB1*04:03L HLA-DRB1*01:03L HLA-DRB1*04:02L HLA-DRB1*01:02L HLA-DRB1*14:17L HLA-DRB1*16:01L HLA-DRB1*04:08L HLA-DRB1*15:03L
  source 1..11: note = Severe acute respiratory syndrome coronavirus 2
IHLYFDKAGQK

SEQ ID NO: 12983 - protein, 10 aa, Severe acute respiratory syndrome-related coronavirus
  REGION 1..10: note = Table B: HLA-DRB1*04:03L HLA-DRB1*13:03L HLA-DRB1*01:03L HLA-DRB1*04:02L HLA-DRB1*04:05L HLA-DRB1*01:02L HLA-DRB4*03:01NL HLA-DQA1*01-B1*05L HLA-DRB1*12:01L HLA-DQA1*03:01-B1*03:02L HLA-DRB1*14:17L HLA-DPA1*01:02-B1*04:01L HLA-DRB1*16:01L
  REGION 1..10: note = CONT. FROM ABOVE: HLA-DRB1*04:08L HLA-DQA1*02:01-B1*03:03L
  source 1..10: note = Severe acute respiratory syndrome coronavirus 2
LYFDKAGQKT

SEQ ID NO: 12984 - protein, 11 aa, Severe acute respiratory syndrome-related coronavirus
  REGION 1..11: note = Table B: HLA-DRB1*04:03L HLA-DRB1*13:03L HLA-DRB1*01:03L HLA-DRB1*04:02L HLA-DRB1*04:05L HLA-DRB4*03:01NL HLA-DRB1*04:10L HLA-DRB1*14:54L HLA-DRB1*14:17L HLA-DRB1*16:01L HLA-DRB1*04:08L
  source 1..11: note = Severe acute respiratory syndrome coronavirus 2
SHFVNLDNLRA

SEQ ID NO: 12985 - protein, 10 aa, Severe acute respiratory syndrome-related coronavirus
  REGION 1..10: note = Table B: HLA-DRB1*04:03L HLA-DRB1*04:02L HLA-DRB4*03:01NL HLA-DQA1*03:01-B1*03:02L HLA-DRB1*14:17L
  source 1..10: note = Severe acute respiratory syndrome coronavirus 2
VNLDNLRANN

SEQ ID NO: 12986 - protein, 12 aa, Severe acute respiratory syndrome-related coronavirus
  REGION 1..12: note = Table B: HLA-DRB1*04:03L HLA-DRB1*14:17L
  source 1..12: note = Severe acute respiratory syndrome coronavirus 2
LDNLRANNTKGS

SEQ ID NO: 12987 - protein, 13 aa, Severe acute respiratory syndrome-related coronavirus
  REGION 1..13: note = Table B: HLA-DRB1*04:03L HLA-DRB1*14:01L
  source 1..13: note = Severe acute respiratory syndrome coronavirus 2
DNLRANNTKGSLP

SEQ ID NO: 12988 - protein, 12 aa, Severe acute respiratory syndrome-related coronavirus
  REGION 1..12: note = Table B: HLA-DRB1*04:03L HLA-DQA1*03:01-B1*03:02L
  source 1..12: note = Severe acute respiratory syndrome coronavirus 2
GSLPINVIVFDG

SEQ ID NO: 12989 - protein, 12 aa, Severe acute respiratory syndrome-related coronavirus
  REGION 1..12: note = Table B: HLA-DRB1*04:03L
  source 1..12: note = Severe acute respiratory syndrome coronavirus 2
SLPINVIVFDGK

SEQ ID NO: 12990 - protein, 10 aa, Severe acute respiratory syndrome-related coronavirus
  REGION 1..10: note = Table B: HLA-DRB1*04:03L HLA-DRB1*04:02L HLA-DQA1*03:01-B1*03:02L HLA-DRB1*14:17L HLA-DQA1*02:01-B1*03:03L
  source 1..10: note = Severe acute respiratory syndrome coronavirus 2
NVIVFDGKSK

SEQ ID NO: 12991 - protein, 12 aa, Severe acute respiratory syndrome-related coronavirus
  REGION 1..12: note = Table B: HLA-DRB1*04:03L HLA-DRB1*13:02L HLA-DRB1*13:03L HLA-DRB1*04:02L HLA-DRB1*04:05L HLA-DQA1*01:02-B1*06:02L HLA-DRB1*01:02L HLA-DRB1*08:04L HLA-DRB1*08:77L HLA-DPA1*01:03-B1*03:01L HLA-DPA1*03:01-B1*04:02L
  REGION 1..12: note = CONT. FROM ABOVE: HLA-DRB1*11:03L HLA-DRB1*11:04L HLA-DRB1*14:02 L HLA-DRB1*08:01L HLA-DRB1*11:01L HLA-DQA1*05:01-B1*02:01L HLA-D RB1*12:01L HLA-DPA1*03:01-B1*105:01L HLA-DRB1*14:54L HLA-DRB1*04 :08L HLA-DRB1*15:03L
  source 1..12: note = Severe acute respiratory syndrome coronavirus 2
VIVFDGKSKCEE

SEQ ID NO: 12992 - protein, 15 aa, Severe acute respiratory syndrome-related coronavirus
  REGION 1..15: note = Table B: HLA-DRB1*04:03L HLA-DRB1*01:03L HLA-DPA1*01:03-B1*03:01L HLA-DRB1*16:01L HLA-DRB1*04:08L HLA-DRB1*15:03L
  source 1..15: note = Severe acute respiratory syndrome coronavirus 2
DGKSKCEESSAKSAS

SEQ ID NO: 12993 - protein, 12 aa, Severe acute respiratory syndrome-related coronavirus
  REGION 1..12: note = Table B: HLA-DRB1*04:03L HLA-DPA1*01:03-B1*03:01L
  source 1..12: note = Severe acute respiratory syndrome coronavirus 2
SAKSASVYYSQL

SEQ ID NO: 12994 - protein, 12 aa, Severe acute respiratory syndrome-related coronavirus
  REGION 1..12: note = Table B: HLA-DRB1*04:03L HLA-DRB1*13:02L HLA-DRB1*04:02L HLA-DRB1*14:01L HLA-DQA1*05:01-B1*02:01L HLA-DRB1*12:01L HLA-DRB1*12:02L HLA-DRB1*14:54L HLA-DRB1*14:17L HLA-DRB1*16:01L HLA-DRB1*15:03L
  source 1..12: note = Severe acute respiratory syndrome coronavirus 2
QPILLLDQALVS

SEQ ID NO: 12995 - protein, 12 aa, Severe acute respiratory syndrome-related coronavirus
  REGION 1..12: note = Table B: HLA-DRB1*04:03L HLA-DRB1*15:03L
  source 1..12: note = Severe acute respiratory syndrome coronavirus 2
PILLLDQALVSD

SEQ ID NO: 12996 - protein, 12 aa, Severe acute respiratory syndrome-related coronavirus
  REGION 1..12: note = Table B: HLA-DRB1*04:03L HLA-DRB1*04:02L HLA-DQA1*01:02-B1*06:02L HLA-DQA1*01-B1*05L HLA-DQA1*05:01-B1*02:01L HLA-DPA1*03:01-B1*105:01L HLA-DQA1*03:01-B1*03:02L HLA-DRB1*14:17L HLA-DRB1*16:01L
  REGION 1..12: note = CONT. FROM ABOVE: HLA-DQA1*02:01-B1*03:03L
  source 1..12: note = Severe acute respiratory syndrome coronavirus 2
LLLDQALVSDVG

SEQ ID NO: 12997 - protein, 12 aa, Severe acute respiratory syndrome-related coronavirus
  REGION 1..12: note = Table B: HLA-DRB1*04:03L HLA-DQA1*01-B1*05L HLA-DQA1*05:01-B1*02:01L
  source 1..12: note = Severe acute respiratory syndrome coronavirus 2
DQALVSDVGDSA

SEQ ID NO: 12998 - protein, 11 aa, Severe acute respiratory syndrome-related coronavirus
  REGION 1..11: note = Table B: HLA-DRB1*04:03L HLA-DQA1*01-B1*05L HLA-DQA1*05:01-B1*02:01L
  source 1..11: note = Severe acute respiratory syndrome coronavirus 2
ALVSDVGDSAE

SEQ ID NO: 12999 - protein, 12 aa, Severe acute respiratory syndrome-related coronavirus
  REGION 1..12: note = Table B: HLA-DRB1*04:03L
  source 1..12: note = Severe acute respiratory syndrome coronavirus 2
SAEVAVKMFDAY

SEQ ID NO: 13000 - protein, 11 aa, Severe acute respiratory syndrome-related coronavirus
  REGION 1..11: note = Table B: HLA-DRB1*04:03L HLA-DRB1*04:02L HLA-DQA1*01:02-B1*06:02L HLA-DQA1*01-B1*05L HLA-DQA1*05:01-B1*02:01L HLA-DQA1*03:01-B1*03:02L HLA-DRB1*14:17L HLA-DQA1*01:03-B1*06:01L
  REGION 1..11: note = CONT. FROM ABOVE: HLA-DQA1*02:01-B1*03:03L
  source 1..11: note = Severe acute respiratory syndrome coronavirus 2
VAVKMFDAYVN

SEQ ID NO: 13001 - protein, 10 aa, Severe acute respiratory syndrome-related coronavirus
  REGION 1..10: note = Table B: HLA-DRB1*04:03L HLA-DQA1*01-B1*05L
  source 1..10: note = Severe acute respiratory syndrome coronavirus 2
VKMFDAYVNT

SEQ ID NO: 13002 - protein, 11 aa, Severe acute respiratory syndrome-related coronavirus
  REGION 1..11: note = Table B: HLA-DRB1*04:03L HLA-DQA1*01-B1*05L HLA-DRB1*14:17L
  source 1..11: note = Severe acute respiratory syndrome coronavirus 2
FDAYVNTFSST

SEQ ID NO: 13003 - protein, 10 aa, Severe acute respiratory syndrome-related coronavirus
  REGION 1..10: note = Table B: HLA-DRB1*04:03L HLA-DRB1*01:03L HLA-DRB1*04:05M HLA-DQA1*01:02-B1*06:02L HLA-DRB1*01:01L HLA-DRB1*01:02L HLA-DRB1*08:77L HLA-DRB1*11:03L HLA-DRB1*14:02L HLA-DQA1*01:01-B1*05:01L HLA-DRB1*11:01L HLA-DRB4*01:01L
  REGION 1..10: note = CONT. FROM ABOVE: HLA-DPA1*02:01-B1*13:01M HLA-DPA1*03:01-B1*105 :01L HLA-DRB1*16:01L HLA-DQA1*01:03-B1*06:01M HLA-DQA1*02:01-B1* 03:03L HLA-DRB1*15:03L
  source 1..10: note = Severe acute respiratory syndrome coronavirus 2
AYVNTFSSTF

SEQ ID NO: 13004 - protein, 13 aa, Severe acute respiratory syndrome-related coronavirus
  REGION 1..13: note = Table B: HLA-DRB1*04:03L HLA-DRB1*04:02L HLA-DRB1*12:01L HLA-DRB1*14:17L
  source 1..13: note = Severe acute respiratory syndrome coronavirus 2
NVPMEKLKTLVAT

SEQ ID NO: 13005 - protein, 13 aa, Severe acute respiratory syndrome-related coronavirus
  REGION 1..13: note = Table B: HLA-DRB1*04:03L HLA-DRB1*14:17L
  source 1..13: note = Severe acute respiratory syndrome coronavirus 2
VPMEKLKTLVATA

SEQ ID NO: 13006 - protein, 12 aa, Severe acute respiratory syndrome-related coronavirus
  REGION 1..12: note = Table B: HLA-DRB1*04:03L
  source 1..12: note = Severe acute respiratory syndrome coronavirus 2
EKLKTLVATAEA

SEQ ID NO: 13007 - protein, 11 aa, Severe acute respiratory syndrome-related coronavirus
  REGION 1..11: note = Table B: HLA-DRB1*04:03L HLA-DQA1*03:01-B1*03:02L
  source 1..11: note = Severe acute respiratory syndrome coronavirus 2
LKTLVATAEAE

SEQ ID NO: 13008 - protein, 12 aa, Severe acute respiratory syndrome-related coronavirus
  REGION 1..12: note = Table B: HLA-DRB1*04:03L HLA-DRB1*16:01L HLA-DQA1*01:03-B1*06:01L HLA-DRB1*15:03L
  source 1..12: note = Severe acute respiratory syndrome coronavirus 2
KTLVATAEAELA

SEQ ID NO: 13009 - protein, 11 aa, Severe acute respiratory syndrome-related coronavirus
  REGION 1..11: note = Table B: HLA-DRB1*04:03L HLA-DQA1*01-B1*05L HLA-DRB1*14:17L
  source 1..11: note = Severe acute respiratory syndrome coronavirus 2
KNVSLDNVLST

SEQ ID NO: 13010 - protein, 10 aa, Severe acute respiratory syndrome-related coronavirus
  REGION 1..10: note = Table B: HLA-DRB1*04:03L HLA-DRB1*01:03L HLA-DRB1*04:05M HLA-DQA1*01:02-B1*06:02L HLA-DRB1*01:01L HLA-DRB1*01:02L HLA-DRB1*08:77L HLA-DRB1*11:03L HLA-DRB1*14:02L HLA-DQA1*01:01-B1*05:01L HLA-DRB1*11:01L
  REGION 1..10: note = CONT. FROM ABOVE: HLA-DQA1*05:05-B1*03:19L HLA-DRB4*01:01L HLA-D PA1*01:03-B1*04:01L HLA-DQA1*05:05-B1*03:116L HLA-DPA1*02:01-B1* 13:01M HLA-DPA1*03:01-B1*105:01L HLA-DRB1*16:01L HLA-DQA1*01:03- B1*06:01M HLA-DQA1*02:01-B1*03:03L HLA-DRB1*15:03L
  source 1..10: note = Severe acute respiratory syndrome coronavirus 2
TFISAARQGF

SEQ ID NO: 13011 - protein, 10 aa, Severe acute respiratory syndrome-related coronavirus
  REGION 1..10: note = Table B: HLA-DRB1*04:03L HLA-DRB1*13:02L HLA-DRB1*13:03L HLA-DRB1*04:02L HLA-DRB4*03:01NL HLA-DQA1*01-B1*05L HLA-DQA1*05:01-B1*02:01L HLA-DRB1*12:01L HLA-DQA1*03:01-B1*03:02L HLA-DQA1*05:05-B1*03:01L
  REGION 1..10: note = CONT. FROM ABOVE: HLA-DRB1*14:17L HLA-DRB1*16:01L HLA-DQA1*02:01 -B1*03:03L
  source 1..10: note = Severe acute respiratory syndrome coronavirus 2
GFVDSDVETK

SEQ ID NO: 13012 - protein, 13 aa, Severe acute respiratory syndrome-related coronavirus
  REGION 1..13: note = Table B: HLA-DRB1*04:03L
  source 1..13: note = Severe acute respiratory syndrome coronavirus 2
QSDIEVTGDSCNN

SEQ ID NO: 13013 - protein, 10 aa, Severe acute respiratory syndrome-related coronavirus
  REGION 1..10: note = Table B: HLA-DRB1*04:03L HLA-DRB1*04:02L HLA-DQA1*01-B1*05L HLA-DQA1*03:01-B1*03:02L HLA-DRB1*14:17L HLA-DPA1*01:02-B1*04:01L HLA-DQA1*02:01-B1*03:03L
  source 1..10: note = Severe acute respiratory syndrome coronavirus 2
YMLTYNKVEN

SEQ ID NO: 13014 - protein, 10 aa, Severe acute respiratory syndrome-related coronavirus
  REGION 1..10: note = Table B: HLA-DRB1*04:03L HLA-DRB1*13:03L HLA-DRB1*01:03L HLA-DRB1*04:02L HLA-DQA1*03:01-B1*03:02L HLA-DRB1*14:17L HLA-DQA1*02:01-B1*03:03L
  source 1..10: note = Severe acute respiratory syndrome coronavirus 2
YNKVENMTPR

SEQ ID NO: 13015 - protein, 10 aa, Severe acute respiratory syndrome-related coronavirus
  REGION 1..10: note = Table B: HLA-DRB1*04:03L HLA-DQA1*03:01-B1*03:02L HLA-DQA1*02:01-B1*03:03L
  source 1..10: note = Severe acute respiratory syndrome coronavirus 2
AQVAKSHNIA

SEQ ID NO: 13016 - protein, 10 aa, Severe acute respiratory syndrome-related coronavirus
  REGION 1..10: note = Table B: HLA-DRB1*04:03L HLA-DQA1*01:02-B1*06:02L
  source 1..10: note = Severe acute respiratory syndrome coronavirus 2
NIALIWNVKD

SEQ ID NO: 13017 - protein, 12 aa, Severe acute respiratory syndrome-related coronavirus
  REGION 1..12: note = Table B: HLA-DRB1*04:03L HLA-DRB1*04:02L HLA-DRB1*04:05L HLA-DQA1*01:02-B1*06:02L HLA-DRB1*01:02L HLA-DRB1*12:01L HLA-DRB1*16:01L HLA-DRB1*04:08L HLA-DRB1*15:03L
  source 1..12: note = Severe acute respiratory syndrome coronavirus 2
VKDFMSLSEQLR

SEQ ID NO: 13018 - protein, 13 aa, Severe acute respiratory syndrome-related coronavirus
  REGION 1..13: note = Table B: HLA-DRB1*04:03L HLA-DRB1*13:03L HLA-DRB1*04:02L HLA-DRB1*04:04L HLA-DRB1*04:05L HLA-DQA1*01:02-B1*06:02L HLA-DRB1*14:01L HLA-DRB1*12:01L HLA-DRB3*01:01L HLA-DRB1*15:03L
  source 1..13: note = Severe acute respiratory syndrome coronavirus 2
EQLRKQIRSAAKK

SEQ ID NO: 13019 - protein, 12 aa, Severe acute respiratory syndrome-related coronavirus
  REGION 1..12: note = Table B: HLA-DRB1*04:03L HLA-DQA1*03:01-B1*03:02L HLA-DRB1*14:17L HLA-DQA1*02:01-B1*03:03L
  source 1..12: note = Severe acute respiratory syndrome coronavirus 2
ATTRQVVNVVTT

SEQ ID NO: 13020 - protein, 12 aa, Severe acute respiratory syndrome-related coronavirus
  REGION 1..12: note = Table B: HLA-DRB1*04:03L
  source 1..12: note = Severe acute respiratory syndrome coronavirus 2
TTRQVVNVVTTK

SEQ ID NO: 13021 - protein, 12 aa, Severe acute respiratory syndrome-related coronavirus
  REGION 1..12: note = Table B: HLA-DRB1*04:03L
  source 1..12: note = Severe acute respiratory syndrome coronavirus 2
TRQVVNVVTTKI

SEQ ID NO: 13022 - protein, 10 aa, Severe acute respiratory syndrome-related coronavirus
  REGION 1..10: note = Table B: HLA-DRB1*04:03L HLA-DRB1*04:02L HLA-DQA1*03:01-B1*03:02L HLA-DRB1*14:17L HLA-DQA1*01:03-B1*06:01L HLA-DQA1*02:01-B1*03:03L
  source 1..10: note = Severe acute respiratory syndrome coronavirus 2
VVTTKIALKG

SEQ ID NO: 13023 - protein, 11 aa, Severe acute respiratory syndrome-related coronavirus
  REGION 1..11: note = Table B: HLA-DRB1*04:03L
  source 1..11: note = Severe acute respiratory syndrome coronavirus 2
AAIFYLITPVH

SEQ ID NO: 13024 - protein, 11 aa, Severe acute respiratory syndrome-related coronavirus
  REGION 1..11: note = Table B: HLA-DRB1*04:03L HLA-DQA1*03:01-B1*03:02L
  source 1..11: note = Severe acute respiratory syndrome coronavirus 2
VMSKHTDFSSE

SEQ ID NO: 13025 - protein, 11 aa, Severe acute respiratory syndrome-related coronavirus
  REGION 1..11: note = Table B: HLA-DRB1*04:03L HLA-DQA1*01:01-B1*05:01L
  source 1..11: note = Severe acute respiratory syndrome coronavirus 2
TDFSSEIIGYK

SEQ ID NO: 13026 - protein, 11 aa, Severe acute respiratory syndrome-related coronavirus
  REGION 1..11: note = Table B: HLA-DRB1*04:03L HLA-DRB1*04:02L HLA-DQA1*01-B1*05L
  source 1..11: note = Severe acute respiratory syndrome coronavirus 2
SSEIIGYKAID

SEQ ID NO: 13027 - protein, 10 aa, Severe acute respiratory syndrome-related coronavirus
  REGION 1..10: note = Table B: HLA-DRB1*04:03L HLA-DRB1*04:02L HLA-DQA1*01-B1*05L HLA-DQA1*03:01-B1*03:02L HLA-DRB1*14:17L HLA-DQA1*01:03-B1*06:01L HLA-DQA1*02:01-B1*03:03L
  source 1..10: note = Severe acute respiratory syndrome coronavirus 2
EIIGYKAIDG

SEQ ID NO: 13028 - protein, 10 aa, Severe acute respiratory syndrome-related coronavirus
  REGION 1..10: note = Table B: HLA-DRB1*04:03L HLA-DRB1*04:02L HLA-DQA1*01-B1*05L HLA-DRB1*14:17L HLA-DRB1*16:01L
  source 1..10: note = Severe acute respiratory syndrome coronavirus 2
IIGYKAIDGG

SEQ ID NO: 13029 - protein, 10 aa, Severe acute respiratory syndrome-related coronavirus
  REGION 1..10: note = Table B: HLA-DRB1*04:03L HLA-DRB1*13:02L HLA-DRB1*13:03L HLA-DRB1*01:03L HLA-DRB1*04:02L HLA-DRB1*01:01L HLA-DRB1*01:02L HLA-DRB4*03:01NL HLA-DRB1*14:01L HLA-DRB1*11:04L HLA-DRB1*08:01L HLA-DRB5*01:01L HLA-DRB1*12:01L HLA-DRB1*12:02L
  REGION 1..10: note = CONT. FROM ABOVE: HLA-DQA1*03:01-B1*03:02L HLA-DRB1*14:54L HLA-D QA1*05:05-B1*03:01L HLA-DRB1*14:17L HLA-DRB1*16:01L HLA-DRB1*04: 08L HLA-DQA1*02:01-B1*03:03L
  source 1..10: note = Severe acute respiratory syndrome coronavirus 2
YKAIDGGVTR

SEQ ID NO: 13030 - protein, 11 aa, Severe acute respiratory syndrome-related coronavirus
  REGION 1..11: note = Table B: HLA-DRB1*04:03L HLA-DRB1*13:03L HLA-DRB1*01:03L HLA-DRB1*04:02L HLA-DRB4*03:01NL HLA-DPA1*01:03-B1*03:01L HLA-DQA1*01:01-B1*05:01L HLA-DPA1*01:03-B1*04:02L HLA-DRB1*12:01L HLA-DRB1*14:17L
  source 1..11: note = Severe acute respiratory syndrome coronavirus 2
AIDGGVTRDIA

SEQ ID NO: 13031 - protein, 11 aa, Severe acute respiratory syndrome-related coronavirus
  REGION 1..11: note = Table B: HLA-DRB1*04:03L HLA-DRB1*04:02L HLA-DQA1*01:01-B1*05:01L
  source 1..11: note = Severe acute respiratory syndrome coronavirus 2
IDGGVTRDIAS

SEQ ID NO: 13032 - protein, 10 aa, Severe acute respiratory syndrome-related coronavirus
  REGION 1..10: note = Table B: HLA-DRB1*04:03L HLA-DRB1*04:02L HLA-DQA1*03:01-B1*03:02L HLA-DRB1*14:17L HLA-DQA1*02:01-B1*03:03L
  source 1..10: note = Severe acute respiratory syndrome coronavirus 2
GVTRDIASTD

SEQ ID NO: 13033 - protein, 10 aa, Severe acute respiratory syndrome-related coronavirus
  REGION 1..10: note = Table B: HLA-DRB1*04:03L HLA-DRB1*04:02L HLA-DQA1*01-B1*05L HLA-DQA1*03:01-B1*03:02L HLA-DRB1*14:17L HLA-DQA1*02:01-B1*03:03L
  source 1..10: note = Severe acute respiratory syndrome coronavirus 2
VTRDIASTDT

SEQ ID NO: 13034 - protein, 12 aa, Severe acute respiratory syndrome-related coronavirus
  REGION 1..12: note = Table B: HLA-DRB1*04:03L HLA-DQA1*01:02-B1*06:02L
  source 1..12: note = Severe acute respiratory syndrome coronavirus 2
RDIASTDTCFAN

SEQ ID NO: 13035 - protein, 12 aa, Severe acute respiratory syndrome-related coronavirus
  REGION 1..12: note = Table B: HLA-DRB1*04:03L HLA-DRB1*04:02L HLA-DQA1*03:01-B1*03:02L
  source 1..12: note = Severe acute respiratory syndrome coronavirus 2
ADFDTWFSQRGG

SEQ ID NO: 13036 - protein, 12 aa, Severe acute respiratory syndrome-related coronavirus
  REGION 1..12: note = Table B: HLA-DRB1*04:03L
  source 1..12: note = Severe acute respiratory syndrome coronavirus 2
DFDTWFSQRGGS

SEQ ID NO: 13037 - protein, 12 aa, Severe acute respiratory syndrome-related coronavirus
  REGION 1..12: note = Table B: HLA-DRB1*04:03L HLA-DRB1*13:02L HLA-DRB1*04:02L HLA-DRB1*04:05L HLA-DRB1*01:02L HLA-DRB3*02:01L HLA-DRB1*12:02L HLA-DRB1*14:54L
  source 1..12: note = Severe acute respiratory syndrome coronavirus 2
FDTWFSQRGGSY

SEQ ID NO: 13038 - protein, 12 aa, Severe acute respiratory syndrome-related coronavirus
  REGION 1..12: note = Table B: HLA-DRB1*04:03L HLA-DRB1*13:02L HLA-DRB1*04:02L HLA-DRB1*04:05L HLA-DRB1*01:02L HLA-DRB4*03:01NL HLA-DRB3*02:01L HLA-DRB1*11:03L HLA-DRB1*08:01L HLA-DRB1*09:01L HLA-DRB1*12:02L HLA-DRB1*14:54L HLA-DRB1*14:17L HLA-DRB1*07:01L HLA-DRB1*04:08L
  source 1..12: note = Severe acute respiratory syndrome coronavirus 2
DTWFSQRGGSYT

SEQ ID NO: 13039 - protein, 12 aa, Severe acute respiratory syndrome-related coronavirus
  REGION 1..12: note = Table B: HLA-DRB1*04:03L HLA-DRB1*13:02L HLA-DRB1*01:03L HLA-DQA1*01:02-B1*06:02L HLA-DRB1*01:02L HLA-DRB1*08:04L HLA-DPA1*01:03-B1*03:01L HLA-DPA1*03:01-B1*04:02L HLA-DRB1*03:01L HLA-DRB1*14:01L HLA-DRB1*14:02L
  REGION 1..12: note = CONT. FROM ABOVE: HLA-DQA1*01-B1*05L HLA-DQA1*05:01-B1*02:01L HL A-DPA1*01:03-B1*04:02L HLA-DRB1*12:01L HLA-DRB3*01:01L HLA-DPA1* 03:01-B1*105:01L HLA-DPA1*01:02-B1*04:01L HLA-DRB1*16:01L HLA-DR B1*04:08L
  source 1..12: note = Severe acute respiratory syndrome coronavirus 2
SYTNDKACPLIA

SEQ ID NO: 13040 - protein, 14 aa, Severe acute respiratory syndrome-related coronavirus
  REGION 1..14: note = Table B: HLA-DRB1*04:03L HLA-DRB1*13:02L HLA-DRB1*04:05L HLA-DRB1*15:03L
  source 1..14: note = Severe acute respiratory syndrome coronavirus 2
TNDKACPLIAAVIT

SEQ ID NO: 13041 - protein, 11 aa, Severe acute respiratory syndrome-related coronavirus
  REGION 1..11: note = Table B: HLA-DRB1*04:03L
  source 1..11: note = Severe acute respiratory syndrome coronavirus 2
ITREVGFVVPG

SEQ ID NO: 13042 - protein, 11 aa, Severe acute respiratory syndrome-related coronavirus
  REGION 1..11: note = Table B: HLA-DRB1*04:03L HLA-DRB1*13:02L HLA-DRB1*04:02L
  source 1..11: note = Severe acute respiratory syndrome coronavirus 2
FVVPGLPGTIL

SEQ ID NO: 13043 - protein, 10 aa, Severe acute respiratory syndrome-related coronavirus
  REGION 1..10: note = Table B: HLA-DRB1*04:03L HLA-DRB1*01:03L HLA-DRB1*04:05L HLA-DQA1*01:02-B1*06:02L HLA-DRB1*01:01L HLA-DRB1*01:02L HLA-DQA1*01:01-B1*05:01L HLA-DPA1*02:01-B1*13:01L HLA-DPA1*03:01-B1*105:01L HLA-DPA1*01:02-B1*04:01L
  REGION 1..10: note = CONT. FROM ABOVE: HLA-DRB1*16:01L HLA-DQA1*01:03-B1*06:01M HLA-D QA1*02:01-B1*03:03L HLA-DRB1*15:03L
  source 1..10: note = Severe acute respiratory syndrome coronavirus 2
DFLHFLPRVF

SEQ ID NO: 13044 - protein, 15 aa, Severe acute respiratory syndrome-related coronavirus
  REGION 1..15: note = Table B: HLA-DRB1*04:03L HLA-DRB1*01:03L HLA-DRB1*01:01L HLA-DRB1*12:01L HLA-DPA1*03:01-B1*105:01L
  source 1..15: note = Severe acute respiratory syndrome coronavirus 2
PRVFSAVGNICYTPS

SEQ ID NO: 13045 - protein, 13 aa, Severe acute respiratory syndrome-related coronavirus
  REGION 1..13: note = Table B: HLA-DRB1*04:03L HLA-DRB1*01:03L HLA-DRB1*04:02L HLA-DRB1*04:04L HLA-DRB1*04:05L HLA-DQA1*01:02-B1*06:02L HLA-DRB1*08:04L HLA-DRB1*03:01L HLA-DRB1*11:04L HLA-DRB1*14:02L HLA-DQA1*01:01-B1*05:01L HLA-DRB1*08:01L HLA-DRB1*11:01L
  REGION 1..13: note = CONT. FROM ABOVE: HLA-DRB5*01:01L HLA-DQA1*01-B1*05L HLA-DQA1*05 :05-B1*03:19L HLA-DRB5*02:02L HLA-DRB4*01:01L HLA-DRB1*04:10L HL A-DPA1*01:03-B1*04:02L HLA-DRB1*12:02L HLA-DRB3*01:01L HLA-DPA1* 02:01-B1*13:01L HLA-DRB1*14:54L HLA-DPA1*01:03-B1*104:01L
  REGION 1..13: note = CONT. FROM ABOVE: HLA-DRB1*14:17L HLA-DRB1*10:01L HLA-DRB1*08:03 L HLA-DRB1*15:01L
  source 1..13: note = Severe acute respiratory syndrome coronavirus 2
VGNICYTPSKLIE

SEQ ID NO: 13046 - protein, 13 aa, Severe acute respiratory syndrome-related coronavirus
  REGION 1..13: note = Table B: HLA-DRB1*04:03L HLA-DRB1*04:02L HLA-DRB1*04:05L HLA-DRB1*01:02L HLA-DPA1*03:01-B1*04:02L HLA-DRB1*04:10L HLA-DRB1*12:01L HLA-DPA1*02:01-B1*13:01L HLA-DPA1*03:01-B1*105:01L HLA-DRB1*14:54L HLA-DRB1*14:17L
  REGION 1..13: note = CONT. FROM ABOVE: HLA-DRB1*16:01L HLA-DRB1*04:08L HLA-DRB1*15:03 L
  source 1..13: note = Severe acute respiratory syndrome coronavirus 2
TPSKLIEYTDFAT

SEQ ID NO: 13047 - protein, 11 aa, Severe acute respiratory syndrome-related coronavirus
  REGION 1..11: note = Table B: HLA-DRB1*04:03L HLA-DRB1*01:03L HLA-DRB1*04:02L HLA-DRB1*01:02L HLA-DPA1*01:03-B1*03:01L HLA-DPA1*03:01-B1*04:02L HLA-DQA1*05:01-B1*02:01L HLA-DPA1*01:03-B1*04:01L HLA-DPA1*01:03-B1*04:02L
  REGION 1..11: note = CONT. FROM ABOVE: HLA-DRB1*12:01L HLA-DPA1*03:01-B1*105:01L HLA- DRB1*14:17L HLA-DPA1*01:02-B1*04:01L HLA-DRB1*16:01L HLA-DQA1*01 :03-B1*06:01L HLA-DRB1*04:08L HLA-DQA1*02:01-B1*03:03L HLA-DRB1* 15:03L
  source 1..11: note = Severe acute respiratory syndrome coronavirus 2
KLIEYTDFATS

SEQ ID NO: 13048 - protein, 11 aa, Severe acute respiratory syndrome-related coronavirus
  REGION 1..11: note = Table B: HLA-DRB1*04:03L HLA-DRB1*12:01L
  source 1..11: note = Severe acute respiratory syndrome coronavirus 2
LIEYTDFATSA

SEQ ID NO: 13049 - protein, 10 aa, Severe acute respiratory syndrome-related coronavirus
  REGION 1..10: note = Table B: HLA-DRB1*04:03L HLA-DRB1*04:02L HLA-DQA1*01-B1*05L HLA-DQA1*03:01-B1*03:02L HLA-DRB1*14:17L
  source 1..10: note = Severe acute respiratory syndrome coronavirus 2
TIFKDASGKP

SEQ ID NO: 13050 - protein, 10 aa, Severe acute respiratory syndrome-related coronavirus
  REGION 1..10: note = Table B: HLA-DRB1*04:03L HLA-DRB1*01:02L HLA-DQA1*03:01-B1*03:02L HLA-DRB1*16:01L HLA-DQA1*02:01-B1*03:03L HLA-DRB1*15:03L
  source 1..10: note = Severe acute respiratory syndrome coronavirus 2
FKDASGKPVP

SEQ ID NO: 13051 - protein, 13 aa, Severe acute respiratory syndrome-related coronavirus
  REGION 1..13: note = Table B: HLA-DRB1*04:03L HLA-DRB1*04:02L HLA-DRB1*04:05L HLA-DQA1*05:01-B1*02:01L HLA-DRB1*04:10L HLA-DPA1*02:01-B1*13:01L HLA-DQA1*03:01-B1*03:02L HLA-DRB1*14:17L HLA-DRB1*16:01L HLA-DRB1*04:08L HLA-DRB1*15:03L
  source 1..13: note = Severe acute respiratory syndrome coronavirus 2
KPVPYCYDTNVLE

SEQ ID NO: 13052 - protein, 12 aa, Severe acute respiratory syndrome-related coronavirus
  REGION 1..12: note = Table B: HLA-DRB1*04:03L HLA-DRB1*14:17L
  source 1..12: note = Severe acute respiratory syndrome coronavirus 2
TNVLEGSVAYES

SEQ ID NO: 13053 - protein, 12 aa, Severe acute respiratory syndrome-related coronavirus
  REGION 1..12: note = Table B: HLA-DRB1*04:03L HLA-DPA1*03:01-B1*105:01L
  source 1..12: note = Severe acute respiratory syndrome coronavirus 2
NVLEGSVAYESL

SEQ ID NO: 13054 - protein, 13 aa, Severe acute respiratory syndrome-related coronavirus
  REGION 1..13: note = Table B: HLA-DRB1*04:03L HLA-DRB1*04:02L HLA-DRB1*01:02L
  source 1..13: note = Severe acute respiratory syndrome coronavirus 2
VLEGSVAYESLRP

SEQ ID NO: 13055 - protein, 12 aa, Severe acute respiratory syndrome-related coronavirus
  REGION 1..12: note = Table B: HLA-DRB1*04:03L HLA-DRB1*04:02L HLA-DRB1*01:02L HLA-DRB1*08:04L HLA-DRB1*14:54L
  source 1..12: note = Severe acute respiratory syndrome coronavirus 2
YESLRPDTRYVL

SEQ ID NO: 13056 - protein, 13 aa, Severe acute respiratory syndrome-related coronavirus
  REGION 1..13: note = Table B: HLA-DRB1*04:03L HLA-DPA1*01:03-B1*03:01L HLA-DQA1*05:01-B1*02:01L HLA-DRB1*13:01L HLA-DRB1*04:08L
  source 1..13: note = Severe acute respiratory syndrome coronavirus 2
SLRPDTRYVLMDG

SEQ ID NO: 13057 - protein, 10 aa, Severe acute respiratory syndrome-related coronavirus
  REGION 1..10: note = Table B: HLA-DRB1*04:03L HLA-DRB1*13:02L HLA-DRB1*04:02L HLA-DRB1*01:02L HLA-DRB4*03:01NL HLA-DRB1*08:77L HLA-DRB1*14:01L HLA-DQA1*05:01-B1*02:01L HLA-DRB1*12:01L HLA-DRB1*14:17L HLA-DRB1*16:01L HLA-DQA1*02:01-B1*03:03L HLA-DRB1*15:03L
  source 1..10: note = Severe acute respiratory syndrome coronavirus 2
YVLMDGSIIQ

SEQ ID NO: 13058 - protein, 11 aa, Severe acute respiratory syndrome-related coronavirus
  REGION 1..11: note = Table B: HLA-DRB1*04:03L HLA-DRB1*12:01L HLA-DQA1*05:05-B1*03:01L HLA-DPA1*01:02-B1*04:01L
  source 1..11: note = Severe acute respiratory syndrome coronavirus 2
DGSIIQFPNTY

SEQ ID NO: 13059 - protein, 10 aa, Severe acute respiratory syndrome-related coronavirus
  REGION 1..10: note = Table B: HLA-DRB1*04:03L HLA-DRB1*04:02L HLA-DRB1*04:04L HLA-DQA1*01:02-B1*06:02L HLA-DRB1*01:02L HLA-DPA1*03:01-B1*04:02L HLA-DQA1*01-B1*05L HLA-DRB1*12:01L HLA-DRB1*14:17L HLA-DRB1*16:01L HLA-DRB1*04:08L
  REGION 1..10: note = CONT. FROM ABOVE: HLA-DQA1*02:01-B1*03:03L HLA-DRB1*15:01L HLA-D RB1*15:03L
  source 1..10: note = Severe acute respiratory syndrome coronavirus 2
IIQFPNTYLE

SEQ ID NO: 13060 - protein, 10 aa, Severe acute respiratory syndrome-related coronavirus
  REGION 1..10: note = Table B: HLA-DRB1*04:03L HLA-DRB1*14:17L
  source 1..10: note = Severe acute respiratory syndrome coronavirus 2
YLEGSVRVVT

SEQ ID NO: 13061 - protein, 11 aa, Severe acute respiratory syndrome-related coronavirus
  REGION 1..11: note = Table B: HLA-DRB1*04:03L HLA-DRB1*04:02L HLA-DRB1*14:17L
  source 1..11: note = Severe acute respiratory syndrome coronavirus 2
GSVRVVTTFDS

SEQ ID NO: 13062 - protein, 11 aa, Severe acute respiratory syndrome-related coronavirus
  REGION 1..11: note = Table B: HLA-DRB1*04:03L
  source 1..11: note = Severe acute respiratory syndrome coronavirus 2
SVRVVTTFDSE

SEQ ID NO: 13063 - protein, 12 aa, Severe acute respiratory syndrome-related coronavirus
  REGION 1..12: note = Table B: HLA-DRB1*04:03L HLA-DRB1*01:03L HLA-DRB1*01:02L HLA-DRB1*12:01L HLA-DRB1*16:01L HLA-DRB1*04:08L HLA-DRB1*15:03L
  source 1..12: note = Severe acute respiratory syndrome coronavirus 2
VVTTFDSEYCRH

SEQ ID NO: 13064 - protein, 12 aa, Severe acute respiratory syndrome-related coronavirus
  REGION 1..12: note = Table B: HLA-DRB1*04:03L HLA-DRB1*13:03L HLA-DRB1*01:03L HLA-DRB1*04:02L HLA-DRB1*04:05L HLA-DRB1*01:02L HLA-DRB1*14:01L HLA-DRB1*08:01L HLA-DRB1*12:01L HLA-DQA1*03:01-B1*03:02L HLA-DRB1*14:17L HLA-DRB1*04:08L
  source 1..12: note = Severe acute respiratory syndrome coronavirus 2
SGRWVLNNDYYR

SEQ ID NO: 13065 - protein, 13 aa, Severe acute respiratory syndrome-related coronavirus
  REGION 1..13: note = Table B: HLA-DRB1*04:03L HLA-DRB1*04:02L HLA-DRB1*04:10L HLA-DRB1*12:01L HLA-DRB1*14:17L HLA-DRB1*16:01L
  source 1..13: note = Severe acute respiratory syndrome coronavirus 2
VDAVNLLTNMFTP

SEQ ID NO: 13066 - protein, 11 aa, Severe acute respiratory syndrome-related coronavirus
  REGION 1..11: note = Table B: HLA-DRB1*04:03L HLA-DPA1*03:01-B1*04:02L HLA-DRB1*12:01L HLA-DPA1*01:02-B1*04:01L
  source 1..11: note = Severe acute respiratory syndrome coronavirus 2
VNLLTNMFTPL

SEQ ID NO: 13067 - protein, 14 aa, Severe acute respiratory syndrome-related coronavirus
  REGION 1..14: note = Table B: HLA-DRB1*04:03L HLA-DRB1*01:02L HLA-DQA1*01-B1*05L HLA-DQA1*05:01-B1*02:01L HLA-DPA1*01:03-B1*04:02L HLA-DRB1*12:01L HLA-DRB1*16:01L HLA-DRB1*04:08L HLA-DRB1*15:03L
  source 1..14: note = Severe acute respiratory syndrome coronavirus 2
NLLTNMFTPLIQPI

SEQ ID NO: 13068 - protein, 11 aa, Severe acute respiratory syndrome-related coronavirus
  REGION 1..11: note = Table B: HLA-DRB1*04:03L HLA-DRB1*13:03L HLA-DRB1*01:03L HLA-DRB1*04:02L HLA-DRB1*01:02L HLA-DRB4*03:01NL HLA-DRB1*08:04L HLA-DRB1*14:01L HLA-DRB1*08:01L HLA-DRB1*04:10L HLA-DPA1*01:03-B1*04:02L HLA-DRB1*12:01L
  REGION 1..11: note = CONT. FROM ABOVE: HLA-DPA1*02:01-B1*13:01L HLA-DRB1*14:54L HLA-D RB1*14:17L HLA-DRB1*16:01L HLA-DRB1*04:08L HLA-DRB1*08:03L HLA-D RB1*15:03L
  source 1..11: note = Severe acute respiratory syndrome coronavirus 2
NMFTPLIQPIG

SEQ ID NO: 13069 - protein, 10 aa, Severe acute respiratory syndrome-related coronavirus
  REGION 1..10: note = Table B: HLA-DRB1*04:03L HLA-DRB1*14:17L
  source 1..10: note = Severe acute respiratory syndrome coronavirus 2
IQPIGALDIS

SEQ ID NO: 13070 - protein, 14 aa, Severe acute respiratory syndrome-related coronavirus
  REGION 1..14: note = Table B: HLA-DRB1*04:03L HLA-DQA1*05:05-B1*03:01L HLA-DQA1*01:03-B1*06:01L
  source 1..14: note = Severe acute respiratory syndrome coronavirus 2
QPIGALDISASIVA

SEQ ID NO: 13071 - protein, 12 aa, Severe acute respiratory syndrome-related coronavirus
  REGION 1..12: note = Table B: HLA-DRB1*04:03L
  source 1..12: note = Severe acute respiratory syndrome coronavirus 2
GALDISASIVAG

SEQ ID NO: 13072 - protein, 14 aa, Severe acute respiratory syndrome-related coronavirus
  REGION 1..14: note = Table B: HLA-DRB1*04:03L HLA-DRB1*01:03L HLA-DPA1*01:03-B1*03:01L HLA-DRB1*12:01L
  source 1..14: note = Severe acute respiratory syndrome coronavirus 2
ASIVAGGIVAIVVT

SEQ ID NO: 13073 - protein, 10 aa, Severe acute respiratory syndrome-related coronavirus
  REGION 1..10: note = Table B: HLA-DRB1*04:03L HLA-DRB1*04:05L HLA-DQA1*01:02-B1*06:02L HLA-DRB1*01:01L HLA-DPA1*02:01-B1*13:01M HLA-DPA1*03:01-B1*105:01L HLA-DRB1*16:01L HLA-DQA1*01:03-B1*06:01L HLA-DRB1*15:03L
  source 1..10: note = Severe acute respiratory syndrome coronavirus 2
TFYLTNDVSF

SEQ ID NO: 13074 - protein, 10 aa, Severe acute respiratory syndrome-related coronavirus
  REGION 1..10: note = Table B: HLA-DRB1*04:03L HLA-DRB1*13:02L HLA-DRB1*13:03L HLA-DRB1*01:03L HLA-DRB1*04:02L HLA-DRB4*03:01NL HLA-DRB1*14:01L HLA-DQA1*05:01-B1*02:01L HLA-DRB1*12:01L HLA-DPA1*03:01-B1*105:01L HLA-DQA1*03:01-B1*03:02L
  REGION 1..10: note = CONT. FROM ABOVE: HLA-DRB1*14:54L HLA-DQA1*05:05-B1*03:01L HLA-D RB1*14:17L HLA-DRB1*16:01L HLA-DQA1*01:03-B1*06:01L HLA-DQA1*02: 01-B1*03:03L
  source 1..10: note = Severe acute respiratory syndrome coronavirus 2
LTNDVSFLAH

SEQ ID NO: 13075 - protein, 13 aa, Severe acute respiratory syndrome-related coronavirus
  REGION 1..13: note = Table B: HLA-DRB1*04:03L HLA-DRB1*13:02L HLA-DRB1*04:02L HLA-DRB1*04:04L HLA-DRB1*14:01L HLA-DRB1*08:01L HLA-DPA1*03:01-B1*105:01L HLA-DQA1*03:01-B1*03:02L HLA-DPA1*01:02-B1*04:01L HLA-DRB1*07:01L HLA-DRB1*15:01L
  source 1..13: note = Severe acute respiratory syndrome coronavirus 2
TKHFYWFFSNYLK

SEQ ID NO: 13076 - protein, 13 aa, Severe acute respiratory syndrome-related coronavirus
  REGION 1..13: note = Table B: HLA-DRB1*04:03L HLA-DRB1*13:02L HLA-DRB1*04:02L HLA-DRB1*04:04L HLA-DRB1*01:01L HLA-DRB1*14:01L HLA-DRB3*01:01L HLA-DQA1*03:01-B1*03:02L HLA-DRB1*07:01L
  source 1..13: note = Severe acute respiratory syndrome coronavirus 2
KHFYWFFSNYLKR

SEQ ID NO: 13077 - protein, 13 aa, Severe acute respiratory syndrome-related coronavirus
  REGION 1..13: note = Table B: HLA-DRB1*04:03L HLA-DRB1*04:05L HLA-DRB1*01:02L HLA-DRB1*12:01L HLA-DRB1*16:01L HLA-DRB1*04:08L
  source 1..13: note = Severe acute respiratory syndrome coronavirus 2
KRRVVFNGVSFST

SEQ ID NO: 13078 - protein, 10 aa, Severe acute respiratory syndrome-related coronavirus
  REGION 1..10: note = Table B: HLA-DRB1*04:03L HLA-DRB1*01:03L HLA-DRB1*04:05L HLA-DQA1*01:02-B1*06:02L HLA-DRB1*01:01L HLA-DRB1*08:77L HLA-DPA1*02:01-B1*13:01M HLA-DPA1*03:01-B1*105:01L HLA-DRB1*16:01L HLA-DQA1*01:03-B1*06:01M
  REGION 1..10: note = CONT. FROM ABOVE: HLA-DQA1*02:01-B1*03:03L HLA-DRB1*15:03L
  source 1..10: note = Severe acute respiratory syndrome coronavirus 2
VFNGVSFSTF

SEQ ID NO: 13079 - protein, 13 aa, Severe acute respiratory syndrome-related coronavirus
  REGION 1..13: note = Table B: HLA-DRB1*04:03L HLA-DRB1*08:04L HLA-DPA1*01:03-B1*02:01L HLA-DPA1*01:03-B1*104:01L
  source 1..13: note = Severe acute respiratory syndrome coronavirus 2
FNGVSFSTFEEAA

SEQ ID NO: 13080 - protein, 12 aa, Severe acute respiratory syndrome-related coronavirus
  REGION 1..12: note = Table B: HLA-DRB1*04:03L HLA-DRB1*01:03L HLA-DRB1*04:02L HLA-DRB1*04:05L HLA-DRB1*01:02L HLA-DRB1*14:01L HLA-DRB1*04:10L HLA-DRB1*14:54L HLA-DRB1*04:08L HLA-DQA1*02:01-B1*03:03L
  source 1..12: note = Severe acute respiratory syndrome coronavirus 2
SDVLLPLTQYNR

SEQ ID NO: 13081 - protein, 14 aa, Severe acute respiratory syndrome-related coronavirus
  REGION 1..14: note = Table B: HLA-DRB1*04:03L HLA-DRB1*04:02L HLA-DRB1*04:05L HLA-DRB1*11:03L HLA-DRB1*11:04L HLA-DRB3*01:01L HLA-DPA1*01:03-B1*02:01L HLA-DRB1*08:03L
  source 1..14: note = Severe acute respiratory syndrome coronavirus 2
LPLTQYNRYLALYN

SEQ ID NO: 13082 - protein, 11 aa, Severe acute respiratory syndrome-related coronavirus
  REGION 1..11: note = Table B: HLA-DRB1*04:03L HLA-DRB1*13:02L HLA-DRB1*04:05L HLA-DRB1*01:02L HLA-DRB1*11:01L
  source 1..11: note = Severe acute respiratory syndrome coronavirus 2
RYLALYNKYKY

SEQ ID NO: 13083 - protein, 13 aa, Severe acute respiratory syndrome-related coronavirus
  REGION 1..13: note = Table B: HLA-DRB1*04:03L HLA-DRB1*13:03L HLA-DRB1*08:03L
  source 1..13: note = Severe acute respiratory syndrome coronavirus 2
YLALYNKYKYFSG

SEQ ID NO: 13084 - protein, 12 aa, Severe acute respiratory syndrome-related coronavirus
  REGION 1..12: note = Table B: HLA-DRB1*04:03L HLA-DRB1*01:03L HLA-DRB1*04:02L HLA-DRB1*04:05L HLA-DRB1*01:02L HLA-DRB1*08:01L HLA-DRB1*12:01L HLA-DQA1*03:01-B1*03:02L HLA-DRB1*14:17L HLA-DRB1*16:01L HLA-DRB1*04:08L HLA-DRB1*15:03L
  source 1..12: note = Severe acute respiratory syndrome coronavirus 2
YNKYKYFSGAMD

SEQ ID NO: 13085 - protein, 12 aa, Severe acute respiratory syndrome-related coronavirus
  REGION 1..12: note = Table B: HLA-DRB1*04:03L HLA-DRB1*13:03L HLA-DRB1*01:03L HLA-DRB1*04:02L HLA-DRB1*04:05L HLA-DQA1*01:02-B1*06:02L HLA-DRB1*01:02L HLA-DRB4*03:01NL HLA-DRB1*08:01L HLA-DRB1*04:10L HLA-DRB1*12:01L HLA-DPA1*02:01-B1*13:01L
  REGION 1..12: note = CONT. FROM ABOVE: HLA-DQA1*03:01-B1*03:02L HLA-DRB1*14:17L HLA-D RB1*16:01L HLA-DRB1*04:08L HLA-DRB1*08:03L HLA-DQA1*02:01-B1*03: 03L HLA-DRB1*15:03L
  source 1..12: note = Severe acute respiratory syndrome coronavirus 2
NKYKYFSGAMDT

SEQ ID NO: 13086 - protein, 11 aa, Severe acute respiratory syndrome-related coronavirus
  REGION 1..11: note = Table B: HLA-DRB1*04:03L HLA-DQA1*05:01-B1*02:01L HLA-DQA1*03:01-B1*03:02L HLA-DQA1*02:01-B1*03:03L
  source 1..11: note = Severe acute respiratory syndrome coronavirus 2
YKYFSGAMDTT

SEQ ID NO: 13087 - protein, 10 aa, Severe acute respiratory syndrome-related coronavirus
  REGION 1..10: note = Table B: HLA-DRB1*04:03L HLA-DRB1*04:02L HLA-DQA1*03:01-B1*03:02L HLA-DRB1*14:17L HLA-DQA1*02:01-B1*03:03L
  source 1..10: note = Severe acute respiratory syndrome coronavirus 2
GAMDTTSYRE

SEQ ID NO: 13088 - protein, 11 aa, Severe acute respiratory syndrome-related coronavirus
  REGION 1..11: note = Table B: HLA-DRB1*04:03L HLA-DQA1*02:01-B1*03:03L
  source 1..11: note = Severe acute respiratory syndrome coronavirus 2
HLAKALNDFSN

SEQ ID NO: 13089 - protein, 11 aa, Severe acute respiratory syndrome-related coronavirus
  REGION 1..11: note = Table B: HLA-DRB1*04:03L HLA-DRB1*04:02L HLA-DQA1*01-B1*05L HLA-DRB1*14:17L
  source 1..11: note = Severe acute respiratory syndrome coronavirus 2
AKALNDFSNSG

SEQ ID NO: 13090 - protein, 12 aa, Severe acute respiratory syndrome-related coronavirus
  REGION 1..12: note = Table B: HLA-DRB1*04:03L HLA-DRB1*04:02L HLA-DRB1*04:05L HLA-DQA1*01-B1*05L HLA-DQA1*05:01-B1*02:01L HLA-DRB1*04:10L HLA-DQA1*03:01-B1*03:02L HLA-DRB1*14:17L HLA-DRB1*16:01L
  source 1..12: note = Severe acute respiratory syndrome coronavirus 2
KALNDFSNSGSD

SEQ ID NO: 13091 - protein, 12 aa, Severe acute respiratory syndrome-related coronavirus
  REGION 1..12: note = Table B: HLA-DRB1*04:03L HLA-DQA1*01-B1*05L HLA-DQA1*05:01-B1*02:01L HLA-DQA1*03:01-B1*03:02L
  source 1..12: note = Severe acute respiratory syndrome coronavirus 2
ALNDFSNSGSDV

SEQ ID NO: 13092 - protein, 12 aa, Severe acute respiratory syndrome-related coronavirus
  REGION 1..12: note = Table B: HLA-DRB1*04:03L HLA-DRB1*13:02L HLA-DRB1*13:03L HLA-DRB1*04:02L HLA-DRB1*04:05L HLA-DRB4*03:01NL HLA-DRB1*08:77L HLA-DRB3*02:01L HLA-DQA1*05:05-B1*03:19L HLA-DRB1*09:01L HLA-DRB1*12:01L HLA-DRB1*12:02L HLA-DRB1*07:01L HLA-DRB1*16:01L
  REGION 1..12: note = CONT. FROM ABOVE: HLA-DQA1*02:01-B1*03:03L HLA-DRB1*15:03L
  source 1..12: note = Severe acute respiratory syndrome coronavirus 2
LNDFSNSGSDVL

SEQ ID NO: 13093 - protein, 15 aa, Severe acute respiratory syndrome-related coronavirus
  REGION 1..15: note = Table B: HLA-DRB1*04:03L HLA-DQA1*01:01-B1*05:01L HLA-DRB1*04:08L
  source 1..15: note = Severe acute respiratory syndrome coronavirus 2
DFSNSGSDVLYQPPQ

SEQ ID NO: 13094 - protein, 11 aa, Severe acute respiratory syndrome-related coronavirus
  REGION 1..11: note = Table B: HLA-DRB1*04:03L HLA-DRB1*04:02L HLA-DRB4*03:01NL HLA-DQA1*01-B1*05L HLA-DRB1*14:17L
  source 1..11: note = Severe acute respiratory syndrome coronavirus 2
VLYQPPQTSIT

SEQ ID NO: 13095 - protein, 11 aa, Severe acute respiratory syndrome-related coronavirus
  REGION 1..11: note = Table B: HLA-DRB1*04:03L HLA-DQA1*01:02-B1*06:02L HLA-DQA1*03:01-B1*03:02L HLA-DQA1*02:01-B1*03:03L
  source 1..11: note = Severe acute respiratory syndrome coronavirus 2
TSITSAVLQSG

SEQ ID NO: 13096 - protein, 11 aa, Severe acute respiratory syndrome-related coronavirus
  REGION 1..11: note = Table B: HLA-DRB1*04:03L HLA-DRB1*01:03L HLA-DRB1*04:02L HLA-DRB1*04:05L HLA-DRB1*01:02L HLA-DRB4*03:01NL HLA-DPA1*01:03-B1*03:01L HLA-DQA1*01:01-B1*05:01L HLA-DRB1*08:01L HLA-DRB4*02:01NL HLA-DPA1*01:03-B1*04:02L
  REGION 1..11: note = CONT. FROM ABOVE: HLA-DRB1*14:17L HLA-DPA1*01:02-B1*04:01L HLA-D RB1*16:01L HLA-DRB1*04:08L
  source 1..11: note = Severe acute respiratory syndrome coronavirus 2
ITSAVLQSGFR

SEQ ID NO: 13097 - protein, 13 aa, Severe acute respiratory syndrome-related coronavirus
  REGION 1..13: note = Table B: HLA-DRB1*04:03L HLA-DRB1*13:03L HLA-DRB1*04:02L HLA-DRB1*04:05L HLA-DQA1*01:02-B1*06:02L HLA-DPA1*01:03-B1*03:01L HLA-DRB1*14:02L HLA-DRB1*08:01L HLA-DPA1*01:03-B1*04:02L HLA-DRB1*12:01L
  source 1..13: note = Severe acute respiratory syndrome coronavirus 2
NGLWLDDVVYCPR

SEQ ID NO: 13098 - protein, 12 aa, Severe acute respiratory syndrome-related coronavirus
  REGION 1..12: note = Table B: HLA-DRB1*04:03L
  source 1..12: note = Severe acute respiratory syndrome coronavirus 2
VICTSEDMLNPN

SEQ ID NO: 13099 - protein, 13 aa, Severe acute respiratory syndrome-related coronavirus
  REGION 1..13: note = Table B: HLA-DRB1*04:03L HLA-DRB1*04:02L HLA-DRB1*04:05L HLA-DRB1*01:02L HLA-DRB1*04:08L
  source 1..13: note = Severe acute respiratory syndrome coronavirus 2
DMLNPNYEDLLIR

SEQ ID NO: 13100 - protein, 12 aa, Severe acute respiratory syndrome-related coronavirus
  REGION 1..12: note = Table B: HLA-DRB1*04:03L HLA-DRB1*04:02L HLA-DRB1*04:05L HLA-DRB1*16:01L HLA-DRB1*04:08L
  source 1..12: note = Severe acute respiratory syndrome coronavirus 2
NPNYEDLLIRKS

SEQ ID NO: 13101 - protein, 14 aa, Severe acute respiratory syndrome-related coronavirus
  REGION 1..14: note = Table B: HLA-DRB1*04:03L HLA-DRB3*01:01L HLA-DPA1*02:01-B1*13:01L HLA-DPA1*03:01-B1*105:01L
  source 1..14: note = Severe acute respiratory syndrome coronavirus 2
DLLIRKSNHNFLVQ

SEQ ID NO: 13102 - protein, 12 aa, Severe acute respiratory syndrome-related coronavirus
  REGION 1..12: note = Table B: HLA-DRB1*04:03L
  source 1..12: note = Severe acute respiratory syndrome coronavirus 2
AGNVQLRVIGHS

SEQ ID NO: 13103 - protein, 12 aa, Severe acute respiratory syndrome-related coronavirus
  REGION 1..12: note = Table B: HLA-DRB1*04:03L HLA-DRB1*04:05L HLA-DQA1*01:02-B1*06:02L HLA-DRB1*01:02L HLA-DRB1*08:04L HLA-DRB1*12:01L HLA-DRB1*14:17L HLA-DRB1*16:01L HLA-DRB1*04:08L HLA-DRB1*15:03L
  source 1..12: note = Severe acute respiratory syndrome coronavirus 2
NVQLRVIGHSMQ

SEQ ID NO: 13104 - protein, 10 aa, Severe acute respiratory syndrome-related coronavirus
  REGION 1..10: note = Table B: HLA-DRB1*04:03L HLA-DRB1*13:03L HLA-DRB1*01:03L HLA-DRB1*04:02L HLA-DRB1*14:01L HLA-DQA1*03:01-B1*03:02L HLA-DRB1*14:17L HLA-DRB1*16:01L HLA-DQA1*02:01-B1*03:03L
  source 1..10: note = Severe acute respiratory syndrome coronavirus 2
LRVIGHSMQN

SEQ ID NO: 13105 - protein, 11 aa, Severe acute respiratory syndrome-related coronavirus
  REGION 1..11: note = Table B: HLA-DRB1*04:03L
  source 1..11: note = Severe acute respiratory syndrome coronavirus 2
LKLKVDTANPK

SEQ ID NO: 13106 - protein, 11 aa, Severe acute respiratory syndrome-related coronavirus
  REGION 1..11: note = Table B: HLA-DRB1*04:03L HLA-DRB1*14:01L HLA-DRB1*14:17L HLA-DRB1*16:01L
  source 1..11: note = Severe acute respiratory syndrome coronavirus 2
LKVDTANPKTP

SEQ ID NO: 13107 - protein, 12 aa, Severe acute respiratory syndrome-related coronavirus
  REGION 1..12: note = Table B: HLA-DRB1*04:03L
  source 1..12: note = Severe acute respiratory syndrome coronavirus 2
RIQPGQTFSVLA

SEQ ID NO: 13108 - protein, 12 aa, Severe acute respiratory syndrome-related coronavirus
  REGION 1..12: note = Table B: HLA-DRB1*04:03L
  source 1..12: note = Severe acute respiratory syndrome coronavirus 2
FSVLACYNGSPS

SEQ ID NO: 13109 - protein, 12 aa, Severe acute respiratory syndrome-related coronavirus
  REGION 1..12: note = Table B: HLA-DRB1*04:03L HLA-DQA1*01-B1*05L
  source 1..12: note = Severe acute respiratory syndrome coronavirus 2
SVLACYNGSPSG

SEQ ID NO: 13110 - protein, 10 aa, Severe acute respiratory syndrome-related coronavirus
  REGION 1..10: note = Table B: HLA-DRB1*04:03L HLA-DRB1*04:02L HLA-DQA1*03:01-B1*03:02L HLA-DRB1*14:17L
  source 1..10: note = Severe acute respiratory syndrome coronavirus 2
FTIKGSFLNG

SEQ ID NO: 13111 - protein, 13 aa, Severe acute respiratory syndrome-related coronavirus
  REGION 1..13: note = Table B: HLA-DRB1*04:03L HLA-DRB1*14:01L HLA-DQA1*01-B1*05L HLA-DPA1*03:01-B1*105:01L HLA-DRB1*15:03L
  source 1..13: note = Severe acute respiratory syndrome coronavirus 2
GSVGFNIDYDCVS

SEQ ID NO: 13112 - protein, 10 aa, Severe acute respiratory syndrome-related coronavirus
  REGION 1..10: note = Table B: HLA-DRB1*04:03L HLA-DRB1*13:03L HLA-DRB1*04:02L HLA-DQA1*01-B1*05L HLA-DQA1*03:01-B1*03:02L HLA-DRB1*14:17L HLA-DQA1*02:01-B1*03:03L
  source 1..10: note = Severe acute respiratory syndrome coronavirus 2
GPFVDRQTAQ

SEQ ID NO: 13113 - protein, 11 aa, Severe acute respiratory syndrome-related coronavirus
  REGION 1..11: note = Table B: HLA-DRB1*04:03L HLA-DRB1*14:17L
  source 1..11: note = Severe acute respiratory syndrome coronavirus 2
FVDRQTAQAAG

SEQ ID NO: 13114 - protein, 12 aa, Severe acute respiratory syndrome-related coronavirus
  REGION 1..12: note = Table B: HLA-DRB1*04:03L HLA-DRB1*13:02L HLA-DRB1*13:03L HLA-DRB1*01:03L HLA-DRB1*04:02L HLA-DRB1*04:05L HLA-DQA1*01:02-B1*06:02L HLA-DRB1*01:02L HLA-DRB4*03:01NL HLA-DPA1*01:03-B1*03:01L HLA-DQA1*01:01-B1*05:01L
  REGION 1..12: note = CONT. FROM ABOVE: HLA-DQA1*01-B1*05L HLA-DQA1*05:05-B1*03:19L HL A-DQA1*05:01-B1*02:01L HLA-DRB1*04:10L HLA-DRB1*12:01L HLA-DPA1* 02:01-B1*13:01L HLA-DPA1*03:01-B1*105:01L HLA-DRB1*14:54L HLA-DP A1*01:03-B1*104:01L HLA-DQA1*05:05-B1*03:01L HLA-DRB1*14:17L
  REGION 1..12: note = CONT. FROM ABOVE: HLA-DRB1*16:01L HLA-DQA1*01:03-B1*06:01L HLA-D RB1*04:08L
  source 1..12: note = Severe acute respiratory syndrome coronavirus 2
VDRQTAQAAGTD

SEQ ID NO: 13115 - protein, 13 aa, Severe acute respiratory syndrome-related coronavirus
  REGION 1..13: note = Table B: HLA-DRB1*04:03L
  source 1..13: note = Severe acute respiratory syndrome coronavirus 2
AAGTDTTITVNVL

SEQ ID NO: 13116 - protein, 14 aa, Severe acute respiratory syndrome-related coronavirus
  REGION 1..14: note = Table B: HLA-DRB1*04:03L HLA-DQA1*05:05-B1*03:19L HLA-DQA1*05:05-B1*03:01L
  source 1..14: note = Severe acute respiratory syndrome coronavirus 2
VNVLAWLYAAVING

SEQ ID NO: 13117 - protein, 13 aa, Severe acute respiratory syndrome-related coronavirus
  REGION 1..13: note = Table B: HLA-DRB1*04:03L HLA-DRB1*13:02L HLA-DRB1*04:02L HLA-DRB1*04:04L HLA-DRB1*04:05L HLA-DRB1*11:04L HLA-DRB1*08:01L HLA-DRB1*11:01L HLA-DRB3*01:01L HLA-DPA1*01:03-B1*02:01L
  source 1..13: note = Severe acute respiratory syndrome coronavirus 2
AAVINGDRWFLNR

SEQ ID NO: 13118 - protein, 15 aa, Severe acute respiratory syndrome-related coronavirus
  REGION 1..15: note = Table B: HLA-DRB1*04:03L HLA-DRB1*11:02L HLA-DQA1*05:05-B1*03:01L HLA-DRB1*10:01L
  source 1..15: note = Severe acute respiratory syndrome coronavirus 2
GDRWFLNRFTTTLND

SEQ ID NO: 13119 - protein, 10 aa, Severe acute respiratory syndrome-related coronavirus
  REGION 1..10: note = Table B: HLA-DRB1*04:03L HLA-DQA1*01:02-B1*06:02L HLA-DQA1*01-B1*05L HLA-DQA1*05:01-B1*02:01L HLA-DPA1*03:01-B1*105:01L HLA-DQA1*03:01-B1*03:02L HLA-DQA1*01:03-B1*06:01L HLA-DQA1*02:01-B1*03:03L
  source 1..10: note = Severe acute respiratory syndrome coronavirus 2
RFTTTLNDFN

SEQ ID NO: 13120 - protein, 12 aa, Severe acute respiratory syndrome-related coronavirus
  REGION 1..12: note = Table B: HLA-DRB1*04:03L HLA-DQA1*01:02-B1*06:02L HLA-DPA1*03:01-B1*105:01L HLA-DQA1*01:03-B1*06:01L HLA-DQA1*02:01-B1*03:03L
  source 1..12: note = Severe acute respiratory syndrome coronavirus 2
FTTTLNDFNLVA

SEQ ID NO: 13121 - protein, 11 aa, Severe acute respiratory syndrome-related coronavirus
  REGION 1..11: note = Table B: HLA-DRB1*04:03L HLA-DRB1*04:02L HLA-DRB1*12:01L HLA-DQA1*05:05-B1*03:01L HLA-DRB1*14:17L
  source 1..11: note = Severe acute respiratory syndrome coronavirus 2
TLNDFNLVAMK

SEQ ID NO: 13122 - protein, 13 aa, Severe acute respiratory syndrome-related coronavirus
  REGION 1..13: note = Table B: HLA-DRB1*04:03L HLA-DRB1*01:03L HLA-DRB1*04:02L HLA-DRB1*04:05L HLA-DRB1*08:04L HLA-DRB1*08:01L HLA-DPA1*01:03-B1*04:01L HLA-DPA1*01:03-B1*04:02L HLA-DQA1*03:01-B1*03:02L HLA-DRB1*16:01L
  REGION 1..13: note = CONT. FROM ABOVE: HLA-DQA1*01:03-B1*06:01L HLA-DRB1*04:08L HLA-D QA1*02:01-B1*03:03L
  source 1..13: note = Severe acute respiratory syndrome coronavirus 2
FNLVAMKYNYEPL

SEQ ID NO: 13123 - protein, 12 aa, Severe acute respiratory syndrome-related coronavirus
  REGION 1..12: note = Table B: HLA-DRB1*04:03L HLA-DRB1*04:02L HLA-DQA1*01:02-B1*06:02L HLA-DPA1*03:01-B1*04:02L HLA-DRB1*14:01L HLA-DQA1*05:01-B1*02:01L HLA-DRB1*12:01L HLA-DPA1*03:01-B1*105:01L HLA-DQA1*03:01-B1*03:02L
  REGION 1..12: note = CONT. FROM ABOVE: HLA-DPA1*01:02-B1*04:01L HLA-DRB1*16:01L HLA-D QA1*01:03-B1*06:01L HLA-DRB1*04:08L HLA-DQA1*02:01-B1*03:03L HLA -DRB1*15:03L
  source 1..12: note = Severe acute respiratory syndrome coronavirus 2
LVAMKYNYEPLT

SEQ ID NO: 13124 - protein, 12 aa, Severe acute respiratory syndrome-related coronavirus
  REGION 1..12: note = Table B: HLA-DRB1*04:03L HLA-DRB1*04:02L HLA-DQA1*03:01-B1*03:02L HLA-DQA1*02:01-B1*03:03L
  source 1..12: note = Severe acute respiratory syndrome coronavirus 2
VAMKYNYEPLTQ

SEQ ID NO: 13125 - protein, 13 aa, Severe acute respiratory syndrome-related coronavirus
  REGION 1..13: note = Table B: HLA-DRB1*04:03L
  source 1..13: note = Severe acute respiratory syndrome coronavirus 2
TQDHVDILGPLSA

SEQ ID NO: 13126 - protein, 12 aa, Severe acute respiratory syndrome-related coronavirus
  REGION 1..12: note = Table B: HLA-DRB1*04:03L HLA-DRB1*04:02L HLA-DRB1*01:02L HLA-DRB4*03:01NL HLA-DRB1*12:01L HLA-DRB1*14:54L HLA-DRB1*14:17L HLA-DRB1*16:01L HLA-DQA1*02:01-B1*03:03L
  source 1..12: note = Severe acute respiratory syndrome coronavirus 2
DHVDILGPLSAQ

SEQ ID NO: 13127 - protein, 11 aa, Severe acute respiratory syndrome-related coronavirus
  REGION 1..11: note = Table B: HLA-DRB1*04:03L
  source 1..11: note = Severe acute respiratory syndrome coronavirus 2
VDILGPLSAQT

SEQ ID NO: 13128 - protein, 10 aa, Severe acute respiratory syndrome-related coronavirus
  REGION 1..10: note = Table B: HLA-DRB1*04:03L HLA-DRB1*14:17L
  source 1..10: note = Severe acute respiratory syndrome coronavirus 2
ILGPLSAQTG

SEQ ID NO: 13129 - protein, 13 aa, Severe acute respiratory syndrome-related coronavirus
  REGION 1..13: note = Table B: HLA-DRB1*04:03L HLA-DRB1*01:02L HLA-DRB1*12:01L HLA-DRB1*14:17L HLA-DRB1*16:01L HLA-DRB1*15:03L
  source 1..13: note = Severe acute respiratory syndrome coronavirus 2
LGPLSAQTGIAVL

SEQ ID NO: 13130 - protein, 13 aa, Severe acute respiratory syndrome-related coronavirus
  REGION 1..13: note = Table B: HLA-DRB1*04:03L HLA-DRB1*13:02L HLA-DRB1*13:03L HLA-DRB1*01:03L HLA-DRB1*04:02L HLA-DRB1*04:04L HLA-DRB1*04:05L HLA-DQA1*01:02-B1*06:02L HLA-DRB1*01:01L HLA-DRB1*01:02M HLA-DRB4*03:01NL HLA-DRB1*08:77L HLA-DRB3*02:01L
  REGION 1..13: note = CONT. FROM ABOVE: HLA-DPA1*01:03-B1*03:01L HLA-DRB1*14:01L HLA-D RB1*11:03L HLA-DRB1*14:02L HLA-DQA1*01-B1*05L HLA-DRB1*09:01L HL A-DRB1*12:01L HLA-DRB1*12:02L HLA-DPA1*03:01-B1*105:01L HLA-DRB1 *14:54L HLA-DRB1*14:17L HLA-DRB1*07:01L HLA-DRB1*10:01L
  REGION 1..13: note = CONT. FROM ABOVE: HLA-DRB1*16:01L HLA-DQA1*01:03-B1*06:01L HLA-D RB1*04:08L HLA-DRB1*15:03L
  source 1..13: note = Severe acute respiratory syndrome coronavirus 2
GPLSAQTGIAVLD

SEQ ID NO: 13131 - protein, 11 aa, Severe acute respiratory syndrome-related coronavirus
  REGION 1..11: note = Table B: HLA-DRB1*04:03L HLA-DQA1*01:02-B1*06:02L
  source 1..11: note = Severe acute respiratory syndrome coronavirus 2
IAVLDMCASLK

SEQ ID NO: 13132 - protein, 12 aa, Severe acute respiratory syndrome-related coronavirus
  REGION 1..12: note = Table B: HLA-DRB1*04:03L HLA-DRB1*01:02L HLA-DRB1*14:01L HLA-DQA1*05:01-B1*02:01L HLA-DRB1*12:01L HLA-DQA1*01:03-B1*06:01L
  source 1..12: note = Severe acute respiratory syndrome coronavirus 2
ASLKELLQNGMN

SEQ ID NO: 13133 - protein, 13 aa, Severe acute respiratory syndrome-related coronavirus
  REGION 1..13: note = Table B: HLA-DRB1*04:03L HLA-DQA1*01:02-B1*06:02L HLA-DRB1*01:02L HLA-DRB1*14:01L HLA-DPA1*03:01-B1*105:01L HLA-DQA1*01:03-B1*06:01L HLA-DQA1*02:01-B1*03:03L
  source 1..13: note = Severe acute respiratory syndrome coronavirus 2
LKELLQNGMNGRT

SEQ ID NO: 13134 - protein, 12 aa, Severe acute respiratory syndrome-related coronavirus
  REGION 1..12: note = Table B: HLA-DRB1*04:03L HLA-DQA1*01:02-B1*06:02L HLA-DQA1*01:03-B1*06:01L HLA-DQA1*02:01-B1*03:03L
  source 1..12: note = Severe acute respiratory syndrome coronavirus 2
ELLQNGMNGRTI

SEQ ID NO: 13135 - protein, 11 aa, Severe acute respiratory syndrome-related coronavirus
  REGION 1..11: note = Table B: HLA-DRB1*04:03L HLA-DPA1*03:01-B1*04:02L HLA-DPA1*03:01-B1*105:01L HLA-DQA1*03:01-B1*03:02L HLA-DPA1*01:02-B1*04:01L HLA-DQA1*01:03-B1*06:01L
  source 1..11: note = Severe acute respiratory syndrome coronavirus 2
ALLEDEFTPFD

SEQ ID NO: 13136 - protein, 11 aa, Severe acute respiratory syndrome-related coronavirus
  REGION 1..11: note = Table B: HLA-DRB1*04:03L HLA-DPA1*03:01-B1*04:02L HLA-DQA1*01:01-B1*05:01L
  source 1..11: note = Severe acute respiratory syndrome coronavirus 2
EDEFTPFDVVR

SEQ ID NO: 13137 - protein, 12 aa, Severe acute respiratory syndrome-related coronavirus
  REGION 1..12: note = Table B: HLA-DRB1*04:03L HLA-DQA1*01:02-B1*06:02L HLA-DPA1*03:01-B1*105:01L HLA-DRB1*04:08L
  source 1..12: note = Severe acute respiratory syndrome coronavirus 2
FTPFDVVRQCSG

SEQ ID NO: 13138 - protein, 13 aa, Severe acute respiratory syndrome-related coronavirus
  REGION 1..13: note = Table B: HLA-DRB1*04:03L HLA-DPA1*03:01-B1*105:01L HLA-DQA1*05:05-B1*03:01L HLA-DQA1*01:03-B1*06:01L HLA-DRB1*04:08L HLA-DQA1*02:01-B1*03:03L
  source 1..13: note = Severe acute respiratory syndrome coronavirus 2
TPFDVVRQCSGVT

SEQ ID NO: 13139 - protein, 14 aa, Severe acute respiratory syndrome-related coronavirus
  REGION 1..14: note = Table B: HLA-DRB1*04:03L HLA-DRB1*01:01L HLA-DRB1*14:02L HLA-DPA1*02:01-B1*13:01L HLA-DRB1*07:01L
  source 1..14: note = Severe acute respiratory syndrome coronavirus 2
SGVTFQSAVKRTIK

SEQ ID NO: 13140 - protein, 14 aa, Severe acute respiratory syndrome-related coronavirus
  REGION 1..14: note = Table B: HLA-DRB1*04:03L HLA-DRB1*01:01L HLA-DRB1*11:02L HLA-DRB1*14:02L HLA-DQA1*05:05-B1*03:19L HLA-DQA1*05:05-B1*03:116L HLA-DPA1*01:03-B1*04:02L HLA-DPA1*02:01-B1*13:01L HLA-DQA1*05:05-B1*03:01L
  REGION 1..14: note = CONT. FROM ABOVE: HLA-DRB1*07:01L HLA-DRB1*08:02L
  source 1..14: note = Severe acute respiratory syndrome coronavirus 2
GVTFQSAVKRTIKG

SEQ ID NO: 13141 - protein, 13 aa, Severe acute respiratory syndrome-related coronavirus
  REGION 1..13: note = Table B: HLA-DRB1*04:03L HLA-DRB1*01:02L HLA-DRB1*14:01L
  source 1..13: note = Severe acute respiratory syndrome coronavirus 2
TSLLVLVQSTQWS

SEQ ID NO: 13142 - protein, 13 aa, Severe acute respiratory syndrome-related coronavirus
  REGION 1..13: note = Table B: HLA-DRB1*04:03L HLA-DRB1*01:02L HLA-DPA1*01:03-B1*03:01L HLA-DRB1*14:01L HLA-DQA1*05:01-B1*02:01L HLA-DPA1*01:03-B1*04:01L HLA-DPA1*01:03-B1*04:02L HLA-DRB1*12:01L
  REGION 1..13: note = CONT. FROM ABOVE: HLA-DPA1*01:02-B1*04:01L HLA-DRB1*16:01L
  source 1..13: note = Severe acute respiratory syndrome coronavirus 2
ENAFLPFAMGIIA

SEQ ID NO: 13143 - protein, 12 aa, Severe acute respiratory syndrome-related coronavirus
  REGION 1..12: note = Table B: HLA-DRB1*04:03L HLA-DQA1*05:05-B1*03:19L HLA-DQA1*05:05-B1*03:01L HLA-DQA1*01:03-B1*06:01L
  source 1..12: note = Severe acute respiratory syndrome coronavirus 2
LPFAMGIIAMSA

SEQ ID NO: 13144 - protein, 12 aa, Severe acute respiratory syndrome-related coronavirus
  REGION 1..12: note = Table B: HLA-DRB1*04:03L HLA-DRB1*14:01L
  source 1..12: note = Severe acute respiratory syndrome coronavirus 2
AMGIIAMSAFAM

SEQ ID NO: 13145 - protein, 10 aa, Severe acute respiratory syndrome-related coronavirus
  REGION 1..10: note = Table B: HLA-DRB1*04:03L HLA-DQA1*01:02-B1*06:02L HLA-DRB1*01:02L HLA-DPA1*03:01-B1*04:02L HLA-DRB1*14:01L HLA-DQA1*05:01-B1*02:01L HLA-DRB1*12:01L HLA-DPA1*03:01-B1*105:01L HLA-DPA1*01:02-B1*04:01L
  REGION 1..10: note = CONT. FROM ABOVE: HLA-DQA1*01:03-B1*06:01L HLA-DRB1*15:03L
  source 1..10: note = Severe acute respiratory syndrome coronavirus 2
IIAMSAFAMM

SEQ ID NO: 13146 - protein, 13 aa, Severe acute respiratory syndrome-related coronavirus
  REGION 1..13: note = Table B: HLA-DRB1*04:03L HLA-DRB1*13:03L HLA-DRB1*04:04L HLA-DRB1*01:01L HLA-DRB1*08:04L HLA-DRB1*11:03L HLA-DRB1*11:04L HLA-DPA1*02:01-B1*13:01L HLA-DRB1*07:01L
  source 1..13: note = Severe acute respiratory syndrome coronavirus 2
SAFAMMFVKHKHA

SEQ ID NO: 13147 - protein, 11 aa, Severe acute respiratory syndrome-related coronavirus
  REGION 1..11: note = Table B: HLA-DRB1*04:03L HLA-DRB1*14:17L
  source 1..11: note = Severe acute respiratory syndrome coronavirus 2
LFLLPSLATVA

SEQ ID NO: 13148 - protein, 13 aa, Severe acute respiratory syndrome-related coronavirus
  REGION 1..13: note = Table B: HLA-DRB1*04:03L
  source 1..13: note = Severe acute respiratory syndrome coronavirus 2
ATVAYFNMVYMPA

SEQ ID NO: 13149 - protein, 12 aa, Severe acute respiratory syndrome-related coronavirus
  REGION 1..12: note = Table B: HLA-DRB1*04:03L HLA-DPA1*03:01-B1*04:02L HLA-DQA1*01-B1*05L HLA-DPA1*03:01-B1*105:01L
  source 1..12: note = Severe acute respiratory syndrome coronavirus 2
VAYFNMVYMPAS

SEQ ID NO: 13150 - protein, 13 aa, Severe acute respiratory syndrome-related coronavirus
  REGION 1..13: note = Table B: HLA-DRB1*04:03L HLA-DRB1*04:02L HLA-DRB1*04:05L HLA-DQA1*01:02-B1*06:02L HLA-DRB1*12:01L HLA-DRB1*16:01L HLA-DRB1*04:08L
  source 1..13: note = Severe acute respiratory syndrome coronavirus 2
VMRIMTWLDMVDT

SEQ ID NO: 13151 - protein, 12 aa, Severe acute respiratory syndrome-related coronavirus
  REGION 1..12: note = Table B: HLA-DRB1*04:03L HLA-DRB1*04:05L HLA-DQA1*01:02-B1*06:02L HLA-DPA1*03:01-B1*04:02L HLA-DQA1*05:01-B1*02:01L HLA-DPA1*03:01-B1*105:01L HLA-DRB1*15:03L
  source 1..12: note = Severe acute respiratory syndrome coronavirus 2
RIMTWLDMVDTS

SEQ ID NO: 13152 - protein, 10 aa, Severe acute respiratory syndrome-related coronavirus
  REGION 1..10: note = Table B: HLA-DRB1*04:03L HLA-DRB1*14:17L
  source 1..10: note = Severe acute respiratory syndrome coronavirus 2
LDMVDTSLSG

SEQ ID NO: 13153 - protein, 10 aa, Severe acute respiratory syndrome-related coronavirus
  REGION 1..10: note = Table B: HLA-DRB1*04:03L HLA-DRB1*04:02L HLA-DQA1*01:02-B1*06:02L HLA-DQA1*03:01-B1*03:02L HLA-DQA1*01:03-B1*06:01L HLA-DQA1*02:01-B1*03:03L
  source 1..10: note = Severe acute respiratory syndrome coronavirus 2
MTARTVYDDG

SEQ ID NO: 13154 - protein, 11 aa, Severe acute respiratory syndrome-related coronavirus
  REGION 1..11: note = Table B: HLA-DRB1*04:03L HLA-DRB1*04:02L HLA-DQA1*01-B1*05L HLA-DRB1*16:01L HLA-DQA1*02:01-B1*03:03L
  source 1..11: note = Severe acute respiratory syndrome coronavirus 2
TARTVYDDGAR

SEQ ID NO: 13155 - protein, 15 aa, Severe acute respiratory syndrome-related coronavirus
  REGION 1..15: note = Table B: HLA-DRB1*04:03L HLA-DRB1*01:03L HLA-DPA1*03:01-B1*04:02L HLA-DRB1*08:01L HLA-DRB1*11:01L HLA-DPA1*01:03-B1*04:01L HLA-DPA1*01:03-B1*04:02L HLA-DRB3*01:01L HLA-DQA1*03:01-B1*03:02L
  REGION 1..15: note = CONT. FROM ABOVE: HLA-DQA1*05:05-B1*03:01L HLA-DQA1*01:03-B1*06: 01L HLA-DQA1*02:01-B1*03:03L
  source 1..15: note = Severe acute respiratory syndrome coronavirus 2
DDGARRVWTLMNVLT

SEQ ID NO: 13156 - protein, 11 aa, Severe acute respiratory syndrome-related coronavirus
  REGION 1..11: note = Table B: HLA-DRB1*04:03L HLA-DQA1*01:03-B1*06:01L
  source 1..11: note = Severe acute respiratory syndrome coronavirus 2
TLMNVLTLVYK

SEQ ID NO: 13157 - protein, 13 aa, Severe acute respiratory syndrome-related coronavirus
  REGION 1..13: note = Table B: HLA-DRB1*04:03L HLA-DRB1*01:03L HLA-DRB1*01:02L HLA-DRB1*08:04L HLA-DPA1*01:03-B1*03:01L HLA-DRB1*08:01L HLA-DPA1*01:03-B1*04:01L HLA-DPA1*01:03-B1*04:02L HLA-DRB1*16:01L HLA-DQA1*01:03-B1*06:01L HLA-DRB1*04:08L
  source 1..13: note = Severe acute respiratory syndrome coronavirus 2
VLTLVYKVYYGNA

SEQ ID NO: 13158 - protein, 11 aa, Severe acute respiratory syndrome-related coronavirus
  REGION 1..11: note = Table B: HLA-DRB1*04:03L HLA-DRB1*01:02L HLA-DRB1*12:01L
  source 1..11: note = Severe acute respiratory syndrome coronavirus 2
VYKVYYGNALD

SEQ ID NO: 13159 - protein, 10 aa, Severe acute respiratory syndrome-related coronavirus
  REGION 1..10: note = Table B: HLA-DRB1*04:03L HLA-DRB1*04:02L HLA-DQA1*01-B1*05L HLA-DQA1*03:01-B1*03:02L HLA-DRB1*14:17L HLA-DRB1*16:01L HLA-DQA1*02:01-B1*03:03L HLA-DRB1*15:03L
  source 1..10: note = Severe acute respiratory syndrome coronavirus 2
KVYYGNALDQ

SEQ ID NO: 13160 - protein, 11 aa, Severe acute respiratory syndrome-related coronavirus
  REGION 1..11: note = Table B: HLA-DRB1*04:03L HLA-DQA1*01-B1*05L HLA-DQA1*05:01-B1*02:01L HLA-DQA1*03:01-B1*03:02L HLA-DRB1*14:17L
  source 1..11: note = Severe acute respiratory syndrome coronavirus 2
YYGNALDQAIS

SEQ ID NO: 13161 - protein, 13 aa, Severe acute respiratory syndrome-related coronavirus
  REGION 1..13: note = Table B: HLA-DRB1*04:03L HLA-DQA1*01:02-B1*06:02L HLA-DPA1*03:01-B1*105:01L HLA-DQA1*05:05-B1*03:01L
  source 1..13: note = Severe acute respiratory syndrome coronavirus 2
ISMWALIISVTSN

SEQ ID NO: 13162 - protein, 11 aa, Severe acute respiratory syndrome-related coronavirus
  REGION 1..11: note = Table B: HLA-DRB1*04:03L HLA-DRB1*14:17L
  source 1..11: note = Severe acute respiratory syndrome coronavirus 2
ALIISVTSNYS

SEQ ID NO: 13163 - protein, 10 aa, Severe acute respiratory syndrome-related coronavirus
  REGION 1..10: note = Table B: HLA-DRB1*04:03M HLA-DRB1*13:03L HLA-DRB1*01:03L HLA-DRB1*04:02L HLA-DRB1*04:04L HLA-DRB1*04:05L HLA-DRB4*03:01NL HLA-DRB1*11:04L HLA-DQA1*05:01-B1*02:01L HLA-DRB1*04:10M HLA-DRB1*12:01L HLA-DQA1*03:01-B1*03:02L HLA-DRB1*14:54L
  REGION 1..10: note = CONT. FROM ABOVE: HLA-DRB1*14:17M HLA-DRB1*10:01L HLA-DRB1*16:01 L HLA-DRB1*04:08L HLA-DRB1*08:03L HLA-DQA1*02:01-B1*03:03L
  source 1..10: note = Severe acute respiratory syndrome coronavirus 2
IISVTSNYSG

SEQ ID NO: 13164 - protein, 11 aa, Severe acute respiratory syndrome-related coronavirus
  REGION 1..11: note = Table B: HLA-DRB1*04:03L
  source 1..11: note = Severe acute respiratory syndrome coronavirus 2
ISVTSNYSGVV

SEQ ID NO: 13165 - protein, 11 aa, Severe acute respiratory syndrome-related coronavirus
  REGION 1..11: note = Table B: HLA-DRB1*04:03L HLA-DRB1*13:02L HLA-DRB1*01:03L HLA-DRB1*04:02L HLA-DRB4*03:01NL HLA-DRB1*08:77L HLA-DRB3*02:01L HLA-DPA1*01:03-B1*03:01L HLA-DPA1*01:03-B1*04:01L HLA-DPA1*01:03-B1*04:02L HLA-DRB1*12:01L HLA-DRB1*07:01L
  REGION 1..11: note = CONT. FROM ABOVE: HLA-DRB1*04:08L
  source 1..11: note = Severe acute respiratory syndrome coronavirus 2
SNYSGVVTTVM

SEQ ID NO: 13166 - protein, 11 aa, Severe acute respiratory syndrome-related coronavirus
  REGION 1..11: note = Table B: HLA-DRB1*04:03L HLA-DRB1*04:05L HLA-DRB4*01:01L
  source 1..11: note = Severe acute respiratory syndrome coronavirus 2
NYSGVVTTVMF

SEQ ID NO: 13167 - protein, 11 aa, Severe acute respiratory syndrome-related coronavirus
  REGION 1..11: note = Table B: HLA-DRB1*04:03L HLA-DRB1*01:03L HLA-DRB1*01:01L HLA-DRB1*14:02L HLA-DPA1*01:03-B1*04:01L HLA-DPA1*03:01-B1*105:01L HLA-DRB1*16:01L HLA-DQA1*02:01-B1*03:03L
  source 1..11: note = Severe acute respiratory syndrome coronavirus 2
VYDYLVSTQEF

SEQ ID NO: 13168 - protein, 11 aa, Severe acute respiratory syndrome-related coronavirus
  REGION 1..11: note = Table B: HLA-DRB1*04:03L HLA-DRB1*04:02L HLA-DRB1*14:17L
  source 1..11: note = Severe acute respiratory syndrome coronavirus 2
YDYLVSTQEFR

SEQ ID NO: 13169 - protein, 11 aa, Severe acute respiratory syndrome-related coronavirus
  REGION 1..11: note = Table B: HLA-DRB1*04:03L HLA-DRB1*04:02L HLA-DQA1*01-B1*05L HLA-DQA1*03:01-B1*03:02L HLA-DRB1*14:17L
  source 1..11: note = Severe acute respiratory syndrome coronavirus 2
TQEFRYMNSQG

SEQ ID NO: 13170 - protein, 10 aa, Severe acute respiratory syndrome-related coronavirus
  REGION 1..10: note = Table B: HLA-DRB1*04:03L HLA-DRB1*13:03L HLA-DRB1*04:02L HLA-DRB4*03:01NL HLA-DQA1*03:01-B1*03:02L HLA-DRB1*14:17L HLA-DQA1*01:03-B1*06:01L HLA-DQA1*02:01-B1*03:03L
  source 1..10: note = Severe acute respiratory syndrome coronavirus 2
MNSQGLLPPK

SEQ ID NO: 13171 - protein, 10 aa, Severe acute respiratory syndrome-related coronavirus
  REGION 1..10: note = Table B: HLA-DRB1*04:03L HLA-DQA1*03:01-B1*03:02L
  source 1..10: note = Severe acute respiratory syndrome coronavirus 2
GLLPPKNSID

SEQ ID NO: 13172 - protein, 10 aa, Severe acute respiratory syndrome-related coronavirus
  REGION 1..10: note = Table B: HLA-DRB1*04:03L HLA-DQA1*03:01-B1*03:02L HLA-DRB1*14:17L
  source 1..10: note = Severe acute respiratory syndrome coronavirus 2
LLPPKNSIDA

SEQ ID NO: 13173 - protein, 10 aa, Severe acute respiratory syndrome-related coronavirus
  REGION 1..10: note = Table B: HLA-DRB1*04:03L
  source 1..10: note = Severe acute respiratory syndrome coronavirus 2
IKLLGVGGKP

SEQ ID NO: 13174 - protein, 10 aa, Severe acute respiratory syndrome-related coronavirus
  REGION 1..10: note = Table B: HLA-DRB1*04:03L HLA-DQA1*03:01-B1*03:02L HLA-DQA1*01:03-B1*06:01L HLA-DQA1*02:01-B1*03:03L
  source 1..10: note = Severe acute respiratory syndrome coronavirus 2
IKVATVQSKM

SEQ ID NO: 13175 - protein, 11 aa, Severe acute respiratory syndrome-related coronavirus
  REGION 1..11: note = Table B: HLA-DRB1*04:03L
  source 1..11: note = Severe acute respiratory syndrome coronavirus 2
TSVVLLSVLQQ

SEQ ID NO: 13176 - protein, 11 aa, Severe acute respiratory syndrome-related coronavirus
  REGION 1..11: note = Table B: HLA-DRB1*04:03L HLA-DRB1*04:02L HLA-DQA1*01:02-B1*06:02L HLA-DRB1*12:01L HLA-DPA1*03:01-B1*105:01L HLA-DRB1*14:17L HLA-DPA1*01:02-B1*04:01L
  source 1..11: note = Severe acute respiratory syndrome coronavirus 2
VVLLSVLQQLR

SEQ ID NO: 13177 - protein, 10 aa, Severe acute respiratory syndrome-related coronavirus
  REGION 1..10: note = Table B: HLA-DRB1*04:03L HLA-DRB1*14:17L
  source 1..10: note = Severe acute respiratory syndrome coronavirus 2
VLQQLRVESS

SEQ ID NO: 13178 - protein, 11 aa, Severe acute respiratory syndrome-related coronavirus
  REGION 1..11: note = Table B: HLA-DRB1*04:03L HLA-DRB1*14:17L
  source 1..11: note = Severe acute respiratory syndrome coronavirus 2
LQQLRVESSSK

SEQ ID NO: 13179 - protein, 13 aa, Severe acute respiratory syndrome-related coronavirus
  REGION 1..13: note = Table B: HLA-DRB1*04:03L HLA-DQA1*01:02-B1*06:02L HLA-DPA1*03:01-B1*105:01L HLA-DQA1*01:03-B1*06:01L HLA-DQA1*02:01-B1*03:03L
  source 1..13: note = Severe acute respiratory syndrome coronavirus 2
VQLHNDILLAKDT

SEQ ID NO: 13180 - protein, 10 aa, Severe acute respiratory syndrome-related coronavirus
  REGION 1..10: note = Table B: HLA-DRB1*04:03L HLA-DQA1*01-B1*05L HLA-DQA1*05:01-B1*02:01L
  source 1..10: note = Severe acute respiratory syndrome coronavirus 2
LAKDTTEAFE

SEQ ID NO: 13181 - protein, 11 aa, Severe acute respiratory syndrome-related coronavirus
  REGION 1..11: note = Table B: HLA-DRB1*04:03L HLA-DRB1*14:17L
  source 1..11: note = Severe acute respiratory syndrome coronavirus 2
EAFEKMVSLLS

SEQ ID NO: 13182 - protein, 11 aa, Severe acute respiratory syndrome-related coronavirus
  REGION 1..11: note = Table B: HLA-DRB1*04:03L HLA-DRB1*04:02L HLA-DRB1*04:05L HLA-DQA1*01:02-B1*06:02L HLA-DRB1*01:02L HLA-DPA1*01:03-B1*03:01L HLA-DPA1*03:01-B1*04:02L HLA-DRB1*14:01L HLA-DRB1*12:01L HLA-DPA1*03:01-B1*105:01L
  REGION 1..11: note = CONT. FROM ABOVE: HLA-DRB1*14:17L HLA-DRB1*04:08L HLA-DQA1*02:01 -B1*03:03L HLA-DRB1*15:03L
  source 1..11: note = Severe acute respiratory syndrome coronavirus 2
FEKMVSLLSVL

SEQ ID NO: 13183 - protein, 12 aa, Severe acute respiratory syndrome-related coronavirus
  REGION 1..12: note = Table B: HLA-DRB1*04:03L
  source 1..12: note = Severe acute respiratory syndrome coronavirus 2
VSLLSVLLSMQG

SEQ ID NO: 13184 - protein, 11 aa, Severe acute respiratory syndrome-related coronavirus
  REGION 1..11: note = Table B: HLA-DRB1*04:03L
  source 1..11: note = Severe acute respiratory syndrome coronavirus 2
SVLLSMQGAVD

SEQ ID NO: 13185 - protein, 12 aa, Severe acute respiratory syndrome-related coronavirus
  REGION 1..12: note = Table B: HLA-DRB1*04:03L
  source 1..12: note = Severe acute respiratory syndrome coronavirus 2
VLLSMQGAVDIN

SEQ ID NO: 13186 - protein, 14 aa, Severe acute respiratory syndrome-related coronavirus
  REGION 1..14: note = Table B: HLA-DRB1*04:03L HLA-DRB1*01:03L HLA-DRB1*04:04L HLA-DPA1*03:01-B1*04:02L HLA-DRB1*14:01L HLA-DQA1*01-B1*05L HLA-DPA1*01:02-B1*04:01L HLA-DRB1*07:01L HLA-DRB1*04:08L
  source 1..14: note = Severe acute respiratory syndrome coronavirus 2
VDINKLCEEMLDNR

SEQ ID NO: 13187 - protein, 12 aa, Severe acute respiratory syndrome-related coronavirus
  REGION 1..12: note = Table B: HLA-DRB1*04:03L HLA-DRB1*04:05L
  source 1..12: note = Severe acute respiratory syndrome coronavirus 2
KLCEEMLDNRAT

SEQ ID NO: 13188 - protein, 11 aa, Severe acute respiratory syndrome-related coronavirus
  REGION 1..11: note = Table B: HLA-DRB1*04:03L HLA-DRB1*14:17L
  source 1..11: note = Severe acute respiratory syndrome coronavirus 2
EEMLDNRATLQ

SEQ ID NO: 13189 - protein, 12 aa, Severe acute respiratory syndrome-related coronavirus
  REGION 1..12: note = Table B: HLA-DRB1*04:03L HLA-DRB1*04:02L HLA-DRB1*04:05L HLA-DRB1*04:10L HLA-DRB1*12:01L HLA-DRB1*14:54L HLA-DRB1*14:17L
  source 1..12: note = Severe acute respiratory syndrome coronavirus 2
RATLQAIASEFS

SEQ ID NO: 13190 - protein, 12 aa, Severe acute respiratory syndrome-related coronavirus
  REGION 1..12: note = Table B: HLA-DRB1*04:03L HLA-DRB1*04:02L HLA-DRB1*04:10L HLA-DRB1*14:17L
  source 1..12: note = Severe acute respiratory syndrome coronavirus 2
ATLQAIASEFSS

SEQ ID NO: 13191 - protein, 11 aa, Severe acute respiratory syndrome-related coronavirus
  REGION 1..11: note = Table B: HLA-DRB1*04:03L
  source 1..11: note = Severe acute respiratory syndrome coronavirus 2
PSYAAFATAQE

SEQ ID NO: 13192 - protein, 11 aa, Severe acute respiratory syndrome-related coronavirus
  REGION 1..11: note = Table B: HLA-DRB1*04:03L
  source 1..11: note = Severe acute respiratory syndrome coronavirus 2
AAFATAQEAYE

SEQ ID NO: 13193 - protein, 12 aa, Severe acute respiratory syndrome-related coronavirus
  REGION 1..12: note = Table B: HLA-DRB1*04:03L HLA-DQA1*01-B1*05L HLA-DQA1*05:01-B1*02:01L HLA-DQA1*03:01-B1*03:02L
  source 1..12: note = Severe acute respiratory syndrome coronavirus 2
QEAYEQAVANGD

SEQ ID NO: 13194 - protein, 10 aa, Severe acute respiratory syndrome-related coronavirus
  REGION 1..10: note = Table B: HLA-DRB1*04:03L HLA-DRB1*04:05L HLA-DQA1*03:01-B1*03:02L HLA-DRB1*14:17L
  source 1..10: note = Severe acute respiratory syndrome coronavirus 2
YEQAVANGDS

SEQ ID NO: 13195 - protein, 12 aa, Severe acute respiratory syndrome-related coronavirus
  REGION 1..12: note = Table B: HLA-DRB1*04:03L HLA-DQA1*01-B1*05L HLA-DQA1*05:01-B1*02:01L HLA-DQA1*03:01-B1*03:02L HLA-DQA1*02:01-B1*03:03L
  source 1..12: note = Severe acute respiratory syndrome coronavirus 2
EQAVANGDSEVV

SEQ ID NO: 13196 - protein, 18 aa, Severe acute respiratory syndrome-related coronavirus
  REGION 1..18: note = Table B: HLA-DRB1*04:03L HLA-DPA1*01:03-B1*03:01L HLA-DQA1*05:05-B1*03:116L HLA-DPA1*01:03-B1*104:01L
  source 1..18: note = Severe acute respiratory syndrome coronavirus 2
GDSEVVLKKLKKSLNVAK

SEQ ID NO: 13197 - protein, 11 aa, Severe acute respiratory syndrome-related coronavirus
  REGION 1..11: note = Table B: HLA-DRB1*04:03L
  source 1..11: note = Severe acute respiratory syndrome coronavirus 2
KSLNVAKSEFD

SEQ ID NO: 13198 - protein, 10 aa, Severe acute respiratory syndrome-related coronavirus
  REGION 1..10: note = Table B: HLA-DRB1*04:03L HLA-DRB1*04:05L HLA-DQA1*03:01-B1*03:02L HLA-DRB1*14:17L HLA-DQA1*02:01-B1*03:03L
  source 1..10: note = Severe acute respiratory syndrome coronavirus 2
LNVAKSEFDR

SEQ ID NO: 13199 - protein, 11 aa, Severe acute respiratory syndrome-related coronavirus
  REGION 1..11: note = Table B: HLA-DRB1*04:03L HLA-DQA1*01-B1*05L HLA-DQA1*03:01-B1*03:02L HLA-DQA1*02:01-B1*03:03L
  source 1..11: note = Severe acute respiratory syndrome coronavirus 2
VAKSEFDRDAA

SEQ ID NO: 13200 - protein, 10 aa, Severe acute respiratory syndrome-related coronavirus
  REGION 1..10: note = Table B: HLA-DRB1*04:03L HLA-DRB1*13:02L HLA-DRB1*13:03L HLA-DRB1*01:03L HLA-DRB1*01:02L HLA-DRB1*03:01L HLA-DRB1*14:01L HLA-DRB3*01:01L HLA-DQA1*03:01-B1*03:02L HLA-DPA1*01:02-B1*04:01L HLA-DRB1*16:01L
  source 1..10: note = Severe acute respiratory syndrome coronavirus 2
FDRDAAMQRK

SEQ ID NO: 13201 - protein, 10 aa, Severe acute respiratory syndrome-related coronavirus
  REGION 1..10: note = Table B: HLA-DRB1*04:03L HLA-DQA1*01-B1*05L
  source 1..10: note = Severe acute respiratory syndrome coronavirus 2
LEKMADQAMT

SEQ ID NO: 13202 - protein, 13 aa, Severe acute respiratory syndrome-related coronavirus
  REGION 1..13: note = Table B: HLA-DRB1*04:03L HLA-DRB1*13:03L HLA-DRB1*01:03L HLA-DRB1*04:05L HLA-DRB1*01:02L HLA-DRB1*08:04L HLA-DRB1*11:04L HLA-DRB1*12:01L HLA-DRB1*14:54L HLA-DRB1*14:17L HLA-DRB1*16:01L HLA-DRB1*04:08L
  source 1..13: note = Severe acute respiratory syndrome coronavirus 2
DQAMTQMYKQARS

SEQ ID NO: 13203 - protein, 12 aa, Severe acute respiratory syndrome-related coronavirus
  REGION 1..12: note = Table B: HLA-DRB1*04:03L HLA-DRB1*01:03L HLA-DRB1*04:02L HLA-DQA1*01:02-B1*06:02L HLA-DRB1*01:02L HLA-DRB1*14:01L HLA-DRB1*12:01L HLA-DQA1*03:01-B1*03:02L HLA-DPA1*01:02-B1*04:01L HLA-DRB1*16:01L
  REGION 1..12: note = CONT. FROM ABOVE: HLA-DQA1*01:03-B1*06:01L HLA-DQA1*02:01-B1*03: 03L HLA-DRB1*15:03L
  source 1..12: note = Severe acute respiratory syndrome coronavirus 2
MTQMYKQARSED

SEQ ID NO: 13204 - protein, 12 aa, Severe acute respiratory syndrome-related coronavirus
  REGION 1..12: note = Table B: HLA-DRB1*04:03L HLA-DRB1*04:02L HLA-DRB1*04:05L HLA-DRB1*01:02L HLA-DQA1*05:01-B1*02:01L HLA-DRB1*12:01L HLA-DPA1*02:01-B1*13:01L HLA-DQA1*03:01-B1*03:02L HLA-DRB1*16:01L HLA-DRB1*04:08L HLA-DRB1*15:03L
  source 1..12: note = Severe acute respiratory syndrome coronavirus 2
TMLRKLDNDALN

SEQ ID NO: 13205 - protein, 11 aa, Severe acute respiratory syndrome-related coronavirus
  REGION 1..11: note = Table B: HLA-DRB1*04:03L HLA-DRB1*04:02L HLA-DQA1*03:01-B1*03:02L HLA-DRB1*14:17L HLA-DRB1*16:01L
  source 1..11: note = Severe acute respiratory syndrome coronavirus 2
LRKLDNDALNN

SEQ ID NO: 13206 - protein, 12 aa, Severe acute respiratory syndrome-related coronavirus
  REGION 1..12: note = Table B: HLA-DRB1*04:03L HLA-DRB1*04:02L HLA-DPA1*01:03-B1*03:01L HLA-DQA1*01-B1*05L
  source 1..12: note = Severe acute respiratory syndrome coronavirus 2
KLDNDALNNIIN

SEQ ID NO: 13207 - protein, 12 aa, Severe acute respiratory syndrome-related coronavirus
  REGION 1..12: note = Table B: HLA-DRB1*04:03L HLA-DQA1*01:02-B1*06:02L
  source 1..12: note = Severe acute respiratory syndrome coronavirus 2
NDALNNIINNAR

SEQ ID NO: 13208 - protein, 10 aa, Severe acute respiratory syndrome-related coronavirus
  REGION 1..10: note = Table B: HLA-DRB1*04:03L HLA-DQA1*03:01-B1*03:02L HLA-DRB1*14:17L
  source 1..10: note = Severe acute respiratory syndrome coronavirus 2
LNNIINNARD

SEQ ID NO: 13209 - protein, 11 aa, Severe acute respiratory syndrome-related coronavirus
  REGION 1..11: note = Table B: HLA-DRB1*04:03L
  source 1..11: note = Severe acute respiratory syndrome coronavirus 2
IINNARDGCVP

SEQ ID NO: 13210 - protein, 10 aa, Severe acute respiratory syndrome-related coronavirus
  REGION 1..10: note = Table B: HLA-DRB1*04:03L HLA-DRB1*13:02L HLA-DRB1*13:03L HLA-DRB1*04:02L HLA-DRB1*01:01L HLA-DRB4*03:01NL HLA-DRB1*14:01L HLA-DRB1*11:04L HLA-DRB1*08:01L HLA-DRB1*12:01L HLA-DQA1*03:01-B1*03:02L HLA-DQA1*05:05-B1*03:01L
  REGION 1..10: note = CONT. FROM ABOVE: HLA-DRB1*14:17L HLA-DRB1*16:01L HLA-DQA1*02:01 -B1*03:03L
  source 1..10: note = Severe acute respiratory syndrome coronavirus 2
NIIPLTTAAK

SEQ ID NO: 13211 - protein, 10 aa, Severe acute respiratory syndrome-related coronavirus
  REGION 1..10: note = Table B: HLA-DRB1*04:03L HLA-DQA1*01:02-B1*06:02L HLA-DQA1*03:01-B1*03:02L
  source 1..10: note = Severe acute respiratory syndrome coronavirus 2
KLMVVIPDYN

SEQ ID NO: 13212 - protein, 10 aa, Severe acute respiratory syndrome-related coronavirus
  REGION 1..10: note = Table B: HLA-DRB1*04:03L HLA-DRB1*13:02L HLA-DRB1*13:03L HLA-DRB1*01:03L HLA-DRB1*04:02L HLA-DRB4*03:01NL HLA-DRB1*14:01L HLA-DQA1*01-B1*05L HLA-DRB1*12:01L HLA-DQA1*03:01-B1*03:02L HLA-DRB1*14:54L HLA-DQA1*05:05-B1*03:01L HLA-DRB1*14:17L
  REGION 1..10: note = CONT. FROM ABOVE: HLA-DRB1*16:01L HLA-DQA1*02:01-B1*03:03L
  source 1..10: note = Severe acute respiratory syndrome coronavirus 2
VVIPDYNTYK

SEQ ID NO: 13213 - protein, 11 aa, Severe acute respiratory syndrome-related coronavirus
  REGION 1..11: note = Table B: HLA-DRB1*04:03L HLA-DRB1*04:02L HLA-DRB1*14:17L
  source 1..11: note = Severe acute respiratory syndrome coronavirus 2
VIPDYNTYKNT

SEQ ID NO: 13214 - protein, 12 aa, Severe acute respiratory syndrome-related coronavirus
  REGION 1..12: note = Table B: HLA-DRB1*04:03L HLA-DRB1*04:02L HLA-DRB1*04:05L HLA-DQA1*01-B1*05L HLA-DQA1*03:01-B1*03:02L HLA-DRB1*16:01L HLA-DRB1*04:08L
  source 1..12: note = Severe acute respiratory syndrome coronavirus 2
YNTYKNTCDGTT

SEQ ID NO: 13215 - protein, 12 aa, Severe acute respiratory syndrome-related coronavirus
  REGION 1..12: note = Table B: HLA-DRB1*04:03L HLA-DQA1*01-B1*05L HLA-DQA1*05:01-B1*02:01L HLA-DRB1*12:01L HLA-DRB1*14:17L HLA-DRB1*15:03L
  source 1..12: note = Severe acute respiratory syndrome coronavirus 2
GTTFTYASALWE

SEQ ID NO: 13216 - protein, 13 aa, Severe acute respiratory syndrome-related coronavirus
  REGION 1..13: note = Table B: HLA-DRB1*04:03L HLA-DRB1*01:03L HLA-DRB1*01:02L HLA-DPA1*01:03-B1*03:01L HLA-DRB1*12:01L HLA-DPA1*02:01-B1*13:01L HLA-DQA1*03:01-B1*03:02L HLA-DPA1*01:03-B1*02:01L
  source 1..13: note = Severe acute respiratory syndrome coronavirus 2
TFTYASALWEIQQ

SEQ ID NO: 13217 - protein, 12 aa, Severe acute respiratory syndrome-related coronavirus
  REGION 1..12: note = Table B: HLA-DRB1*04:03L
  source 1..12: note = Severe acute respiratory syndrome coronavirus 2
SALWEIQQVVDA

SEQ ID NO: 13218 - protein, 11 aa, Severe acute respiratory syndrome-related coronavirus
  REGION 1..11: note = Table B: HLA-DRB1*04:03L HLA-DRB1*14:17L
  source 1..11: note = Severe acute respiratory syndrome coronavirus 2
WEIQQVVDADS

SEQ ID NO: 13219 - protein, 12 aa, Severe acute respiratory syndrome-related coronavirus
  REGION 1..12: note = Table B: HLA-DRB1*04:03L HLA-DRB1*04:05L HLA-DRB4*03:01NL HLA-DRB1*14:54L HLA-DQA1*05:05-B1*03:01L HLA-DRB1*14:17L HLA-DRB1*04:08L
  source 1..12: note = Severe acute respiratory syndrome coronavirus 2
VDADSKIVQLSE

SEQ ID NO: 13220 - protein, 11 aa, Severe acute respiratory syndrome-related coronavirus
  REGION 1..11: note = Table B: HLA-DRB1*04:03L HLA-DRB1*13:02L HLA-DRB1*04:02L HLA-DRB1*01:02L HLA-DRB1*14:54L HLA-DRB1*14:17L HLA-DPA1*01:02-B1*04:01L HLA-DRB1*07:01L
  source 1..11: note = Severe acute respiratory syndrome coronavirus 2
SKIVQLSEISM

SEQ ID NO: 13221 - protein, 10 aa, Severe acute respiratory syndrome-related coronavirus
  REGION 1..10: note = Table B: HLA-DRB1*04:03L HLA-DRB1*04:02L HLA-DRB1*14:17L HLA-DRB1*16:01L
  source 1..10: note = Severe acute respiratory syndrome coronavirus 2
ISMDNSPNLA

SEQ ID NO: 13222 - protein, 10 aa, Severe acute respiratory syndrome-related coronavirus
  REGION 1..10: note = Table B: HLA-DRB1*04:03L HLA-DRB1*01:03L HLA-DRB1*04:02L HLA-DRB1*01:02L HLA-DQA1*03:01-B1*03:02L HLA-DRB1*14:17L HLA-DQA1*02:01-B1*03:03L
  source 1..10: note = Severe acute respiratory syndrome coronavirus 2
TALRANSAVK

SEQ ID NO: 13223 - protein, 10 aa, Severe acute respiratory syndrome-related coronavirus
  REGION 1..10: note = Table B: HLA-DRB1*04:03L HLA-DQA1*01:02-B1*06:02L HLA-DQA1*03:01-B1*03:02L HLA-DRB1*14:17L HLA-DQA1*01:03-B1*06:01L HLA-DQA1*02:01-B1*03:03L
  source 1..10: note = Severe acute respiratory syndrome coronavirus 2
NSAVKLQNNE

SEQ ID NO: 13224 - protein, 10 aa, Severe acute respiratory syndrome-related coronavirus
  REGION 1..10: note = Table B: HLA-DRB1*04:03L HLA-DRB1*14:17L
  source 1..10: note = Severe acute respiratory syndrome coronavirus 2
VKLQNNELSP

SEQ ID NO: 13225 - protein, 10 aa, Severe acute respiratory syndrome-related coronavirus
  REGION 1..10: note = Table B: HLA-DRB1*04:03L HLA-DRB1*04:02L HLA-DRB1*14:17L
  source 1..10: note = Severe acute respiratory syndrome coronavirus 2
KLQNNELSPV

SEQ ID NO: 13226 - protein, 10 aa, Severe acute respiratory syndrome-related coronavirus
  REGION 1..10: note = Table B: HLA-DRB1*04:03L
  source 1..10: note = Severe acute respiratory syndrome coronavirus 2
LQNNELSPVA

SEQ ID NO: 13227 - protein, 10 aa, Severe acute respiratory syndrome-related coronavirus
  REGION 1..10: note = Table B: HLA-DRB1*04:03L HLA-DRB1*01:03L HLA-DQA1*03:01-B1*03:02L HLA-DRB1*14:17L HLA-DQA1*02:01-B1*03:03L
  source 1..10: note = Severe acute respiratory syndrome coronavirus 2
NELSPVALRQ

SEQ ID NO: 13228 - protein, 13 aa, Severe acute respiratory syndrome-related coronavirus
  REGION 1..13: note = Table B: HLA-DRB1*04:03L
  source 1..13: note = Severe acute respiratory syndrome coronavirus 2
SPVALRQMSCAAG

SEQ ID NO: 13229 - protein, 12 aa, Severe acute respiratory syndrome-related coronavirus
  REGION 1..12: note = Table B: HLA-DRB1*04:03L HLA-DQA1*01:02-B1*06:02L HLA-DQA1*05:05-B1*03:01L HLA-DQA1*01:03-B1*06:01L HLA-DQA1*02:01-B1*03:03L
  source 1..12: note = Severe acute respiratory syndrome coronavirus 2
LRQMSCAAGTTQ

SEQ ID NO: 13230 - protein, 11 aa, Severe acute respiratory syndrome-related coronavirus
  REGION 1..11: note = Table B: HLA-DRB1*04:03L HLA-DRB1*04:02L HLA-DQA1*01-B1*05L
  source 1..11: note = Severe acute respiratory syndrome coronavirus 2
DNALAYYNTTK

SEQ ID NO: 13231 - protein, 11 aa, Severe acute respiratory syndrome-related coronavirus
  REGION 1..11: note = Table B: HLA-DRB1*04:03L HLA-DRB1*04:02L HLA-DQA1*03:01-B1*03:02L HLA-DRB1*14:17L HLA-DQA1*02:01-B1*03:03L
  source 1..11: note = Severe acute respiratory syndrome coronavirus 2
NALAYYNTTKG

SEQ ID NO: 13232 - protein, 11 aa, Severe acute respiratory syndrome-related coronavirus
  REGION 1..11: note = Table B: HLA-DRB1*04:03L
  source 1..11: note = Severe acute respiratory syndrome coronavirus 2
LAYYNTTKGGR

SEQ ID NO: 13233 - protein, 13 aa, Severe acute respiratory syndrome-related coronavirus
  REGION 1..13: note = Table B: HLA-DRB1*04:03L HLA-DRB1*04:05L HLA-DRB1*12:01L
  source 1..13: note = Severe acute respiratory syndrome coronavirus 2
GRFVLALLSDLQD

SEQ ID NO: 13234 - protein, 11 aa, Severe acute respiratory syndrome-related coronavirus
  REGION 1..11: note = Table B: HLA-DRB1*04:03L HLA-DQA1*01-B1*05L
  source 1..11: note = Severe acute respiratory syndrome coronavirus 2
VLALLSDLQDL

SEQ ID NO: 13235 - protein, 10 aa, Severe acute respiratory syndrome-related coronavirus
  REGION 1..10: note = Table B: HLA-DRB1*04:03L HLA-DRB1*13:03L HLA-DRB1*04:02L HLA-DRB1*04:05L HLA-DRB4*03:01NL HLA-DQA1*01-B1*05L HLA-DQA1*05:01-B1*02:01L HLA-DRB1*12:01L HLA-DPA1*03:01-B1*105:01L HLA-DQA1*03:01-B1*03:02L
  REGION 1..10: note = CONT. FROM ABOVE: HLA-DRB1*14:54L HLA-DRB1*14:17L HLA-DRB1*16:01 L HLA-DQA1*01:03-B1*06:01L HLA-DQA1*02:01-B1*03:03L
  source 1..10: note = Severe acute respiratory syndrome coronavirus 2
ALLSDLQDLK

SEQ ID NO: 13236 - protein, 11 aa, Severe acute respiratory syndrome-related coronavirus
  REGION 1..11: note = Table B: HLA-DRB1*04:03L HLA-DRB1*14:17L
  source 1..11: note = Severe acute respiratory syndrome coronavirus 2
WARFPKSDGTG

SEQ ID NO: 13237 - protein, 11 aa, Severe acute respiratory syndrome-related coronavirus
  REGION 1..11: note = Table B: HLA-DRB1*04:03L HLA-DRB1*01:03M HLA-DQA1*01:02-B1*06:02M HLA-DRB1*08:77L HLA-DPA1*01:03-B1*03:01L HLA-DRB1*03:01L HLA-DRB1*11:03L HLA-DRB1*14:02L HLA-DRB1*11:01L HLA-DRB5*01:01L
  REGION 1..11: note = CONT. FROM ABOVE: HLA-DQA1*05:01-B1*02:01L HLA-DPA1*01:03-B1*04: 01L HLA-DQA1*05:05-B1*03:116L HLA-DPA1*01:03-B1*04:02L HLA-DRB1* 12:01L HLA-DPA1*03:01-B1*105:01M HLA-DRB1*10:01L HLA-DRB1*16:01L HLA-DQA1*01:03-B1*06:01L HLA-DRB1*08:02L
  REGION 1..11: note = CONT. FROM ABOVE: HLA-DQA1*02:01-B1*03:03L HLA-DRB1*15:03L
  source 1..11: note = Severe acute respiratory syndrome coronavirus 2
FPKSDGTGTIY

SEQ ID NO: 13238 - protein, 11 aa, Severe acute respiratory syndrome-related coronavirus
  REGION 1..11: note = Table B: HLA-DRB1*04:03L HLA-DRB1*01:03L HLA-DPA1*03:01-B1*04:02L HLA-DRB1*12:01L HLA-DRB1*04:08L
  source 1..11: note = Severe acute respiratory syndrome coronavirus 2
TIYTELEPPCR

SEQ ID NO: 13239 - protein, 11 aa, Severe acute respiratory syndrome-related coronavirus
  REGION 1..11: note = Table B: HLA-DRB1*04:03L HLA-DRB1*04:05L HLA-DPA1*02:01-B1*13:01 M
  source 1..11: note = Severe acute respiratory syndrome coronavirus 2
IYTELEPPCRF

SEQ ID NO: 13240 - protein, 11 aa, Severe acute respiratory syndrome-related coronavirus
  REGION 1..11: note = Table B: HLA-DRB1*04:03L HLA-DQA1*01:02-B1*06:02L HLA-DPA1*03:01-B1*04:02L HLA-DQA1*03:01-B1*03:02L HLA-DPA1*01:02-B1*04:01L HLA-DRB1*16:01L
  source 1..11: note = Severe acute respiratory syndrome coronavirus 2
LYFIKGLNNLN

SEQ ID NO: 13241 - protein, 10 aa, Severe acute respiratory syndrome-related coronavirus
  REGION 1..10: note = Table B: HLA-DRB1*04:03L HLA-DRB1*01:03L HLA-DRB1*04:02L HLA-DQA1*03:01-B1*03:02L HLA-DRB1*14:17L HLA-DQA1*02:01-B1*03:03L
  source 1..10: note = Severe acute respiratory syndrome coronavirus 2
IKGLNNLNRG

SEQ ID NO: 13242 - protein, 13 aa, Severe acute respiratory syndrome-related coronavirus
  REGION 1..13: note = Table B: HLA-DRB1*04:03L HLA-DRB1*01:02L HLA-DPA1*01:03-B1*03:01L HLA-DQA1*05:01-B1*02:01L HLA-DRB1*15:03L
  source 1..13: note = Severe acute respiratory syndrome coronavirus 2
LNNLNRGMVLGSL

SEQ ID NO: 13243 - protein, 12 aa, Severe acute respiratory syndrome-related coronavirus
  REGION 1..12: note = Table B: HLA-DRB1*04:03L HLA-DRB1*01:02L
  source 1..12: note = Severe acute respiratory syndrome coronavirus 2
NLNRGMVLGSLA

SEQ ID NO: 13244 - protein, 10 aa, Severe acute respiratory syndrome-related coronavirus
  REGION 1..10: note = Table B: HLA-DRB1*04:03L HLA-DRB1*04:02L HLA-DQA1*01:02-B1*06:02L HLA-DRB1*14:01L HLA-DQA1*01:03-B1*06:01L HLA-DQA1*02:01-B1*03:03L
  source 1..10: note = Severe acute respiratory syndrome coronavirus 2
LAATVRLQAG

SEQ ID NO: 13245 - protein, 11 aa, Severe acute respiratory syndrome-related coronavirus
  REGION 1..11: note = Table B: HLA-DRB1*04:03L HLA-DRB1*04:02L HLA-DRB1*14:17L HLA-DQA1*02:01-B1*03:03L
  source 1..11: note = Severe acute respiratory syndrome coronavirus 2
ATVRLQAGNAT

SEQ ID NO: 13246 - protein, 11 aa, Severe acute respiratory syndrome-related coronavirus
  REGION 1..11: note = Table B: HLA-DRB1*04:03L
  source 1..11: note = Severe acute respiratory syndrome coronavirus 2
TVRLQAGNATE

SEQ ID NO: 13247 - protein, 12 aa, Severe acute respiratory syndrome-related coronavirus
  REGION 1..12: note = Table B: HLA-DRB1*04:03L
  source 1..12: note = Severe acute respiratory syndrome coronavirus 2
GNATEVPANSTV

SEQ ID NO: 13248 - protein, 11 aa, Severe acute respiratory syndrome-related coronavirus
  REGION 1..11: note = Table B: HLA-DRB1*04:03L HLA-DRB1*04:02L HLA-DRB1*14:01L HLA-DRB1*12:01L
  source 1..11: note = Severe acute respiratory syndrome coronavirus 2
ATEVPANSTVL

SEQ ID NO: 13249 - protein, 12 aa, Severe acute respiratory syndrome-related coronavirus
  REGION 1..12: note = Table B: HLA-DRB1*04:03L HLA-DRB4*03:01NL HLA-DPA1*01:03-B1*03:01L HLA-DRB1*03:01L HLA-DRB1*12:01L
  source 1..12: note = Severe acute respiratory syndrome coronavirus 2
TEVPANSTVLSF

SEQ ID NO: 13250 - protein, 12 aa, Severe acute respiratory syndrome-related coronavirus
  REGION 1..12: note = Table B: HLA-DRB1*04:03L HLA-DRB1*04:02L HLA-DRB1*16:01L HLA-DRB1*15:03L
  source 1..12: note = Severe acute respiratory syndrome coronavirus 2
DAAKAYKDYLAS

SEQ ID NO: 13251 - protein, 12 aa, Severe acute respiratory syndrome-related coronavirus
  REGION 1..12: note = Table B: HLA-DRB1*04:03L HLA-DRB1*04:02L HLA-DRB1*04:05L HLA-DRB1*01:02L HLA-DRB1*12:01L HLA-DPA1*02:01-B1*13:01L HLA-DQA1*03:01-B1*03:02L HLA-DRB1*16:01L HLA-DQA1*02:01-B1*03:03L HLA-DRB1*15:03L
  source 1..12: note = Severe acute respiratory syndrome coronavirus 2
AAKAYKDYLASG

SEQ ID NO: 13252 - protein, 12 aa, Severe acute respiratory syndrome-related coronavirus
  REGION 1..12: note = Table B: HLA-DRB1*04:03L HLA-DRB1*04:02L HLA-DRB1*16:01L HLA-DRB1*15:03L
  source 1..12: note = Severe acute respiratory syndrome coronavirus 2
AKAYKDYLASGG

SEQ ID NO: 13253 - protein, 13 aa, Severe acute respiratory syndrome-related coronavirus
  REGION 1..13: note = Table B: HLA-DRB1*04:03L HLA-DRB1*01:03L HLA-DRB1*04:05L HLA-DRB1*01:02L HLA-DRB1*12:01L HLA-DPA1*02:01-B1*13:01L HLA-DPA1*03:01-B1*105:01L HLA-DPA1*01:02-B1*04:01L HLA-DRB1*16:01L HLA-DRB1*04:08L HLA-DRB1*15:03L
  source 1..13: note = Severe acute respiratory syndrome coronavirus 2
KAYKDYLASGGQP

SEQ ID NO: 13254 - protein, 13 aa, Severe acute respiratory syndrome-related coronavirus
  REGION 1..13: note = Table B: HLA-DRB1*04:03L HLA-DRB1*01:03L HLA-DRB1*04:02L HLA-DQA1*01:01-B1*05:01L HLA-DQA1*05:01-B1*02:01L HLA-DRB1*04:08L
  source 1..13: note = Severe acute respiratory syndrome coronavirus 2
HTGTGQAITVTPE

SEQ ID NO: 13255 - protein, 10 aa, Severe acute respiratory syndrome-related coronavirus
  REGION 1..10: note = Table B: HLA-DRB1*04:03L HLA-DQA1*05:01-B1*02:01L HLA-DQA1*03:01-B1*03:02L HLA-DRB1*14:17L HLA-DQA1*02:01-B1*03:03L
  source 1..10: note = Severe acute respiratory syndrome coronavirus 2
ITVTPEANMD

SEQ ID NO: 13256 - protein, 11 aa, Severe acute respiratory syndrome-related coronavirus
  REGION 1..11: note = Table B: HLA-DRB1*04:03L HLA-DQA1*03:01-B1*03:02L HLA-DRB1*14:17L
  source 1..11: note = Severe acute respiratory syndrome coronavirus 2
VTPEANMDQES

SEQ ID NO: 13257 - protein, 10 aa, Severe acute respiratory syndrome-related coronavirus
  REGION 1..10: note = Table B: HLA-DRB1*04:03L
  source 1..10: note = Severe acute respiratory syndrome coronavirus 2
KGKYVQIPTT

SEQ ID NO: 13258 - protein, 10 aa, Severe acute respiratory syndrome-related coronavirus
  REGION 1..10: note = Table B: HLA-DRB1*04:03L HLA-DRB1*14:17L HLA-DRB1*04:08L
  source 1..10: note = Severe acute respiratory syndrome coronavirus 2
YVQIPTTCAN

SEQ ID NO: 13259 - protein, 12 aa, Severe acute respiratory syndrome-related coronavirus
  REGION 1..12: note = Table B: HLA-DRB1*04:03L
  source 1..12: note = Severe acute respiratory syndrome coronavirus 2
NDPVGFTLKNTV

SEQ ID NO: 13260 - protein, 13 aa, Severe acute respiratory syndrome-related coronavirus
  REGION 1..13: note = Table B: HLA-DRB1*04:03L HLA-DRB1*04:02L HLA-DQA1*01:02-B1*06:02L HLA-DQA1*03:01-B1*03:02L HLA-DQA1*01:03-B1*06:01L HLA-DQA1*02:01-B1*03:03L
  source 1..13: note = Severe acute respiratory syndrome coronavirus 2
DQLREPMLQSADA

SEQ ID NO: 13261 - protein, 12 aa, Severe acute respiratory syndrome-related coronavirus
  REGION 1..12: note = Table B: HLA-DRB1*04:03L HLA-DQA1*02:01-B1*03:03L
  source 1..12: note = Severe acute respiratory syndrome coronavirus 2
LREPMLQSADAQ

SEQ ID NO: 13262 - protein, 12 aa, Severe acute respiratory syndrome-related coronavirus
  REGION 1..12: note = Table B: HLA-DRB1*04:03L HLA-DRB1*04:02L HLA-DRB1*04:05L HLA-DQA1*01-B1*05L HLA-DRB1*04:10L HLA-DRB1*14:17L HLA-DQA1*02:01-B1*03:03L
  source 1..12: note = Severe acute respiratory syndrome coronavirus 2
REPMLQSADAQS

SEQ ID NO: 13263 - protein, 13 aa, Severe acute respiratory syndrome-related coronavirus
  REGION 1..13: note = Table B: HLA-DRB1*04:03L HLA-DRB1*04:02L HLA-DRB1*04:05L HLA-DQA1*01:02-B1*06:02L HLA-DRB1*04:10L HLA-DRB1*14:17L
  source 1..13: note = Severe acute respiratory syndrome coronavirus 2
AARLTPCGTGTST

SEQ ID NO: 13264 - protein, 13 aa, Severe acute respiratory syndrome-related coronavirus
  REGION 1..13: note = Table B: HLA-DRB1*04:03L HLA-DRB1*14:17L HLA-DQA1*01:03-B1*06:01L
  source 1..13: note = Severe acute respiratory syndrome coronavirus 2
ARLTPCGTGTSTD

SEQ ID NO: 13265 - protein, 12 aa, Severe acute respiratory syndrome-related coronavirus
  REGION 1..12: note = Table B: HLA-DRB1*04:03L
  source 1..12: note = Severe acute respiratory syndrome coronavirus 2
GTSTDVVYRAFD

SEQ ID NO: 13266 - protein, 10 aa, Severe acute respiratory syndrome-related coronavirus
  REGION 1..10: note = Table B: HLA-DRB1*04:03L HLA-DRB1*01:02L HLA-DQA1*01-B1*05L HLA-DRB1*16:01L HLA-DRB1*15:03L
  source 1..10: note = Severe acute respiratory syndrome coronavirus 2
VVYRAFDIYN

SEQ ID NO: 13267 - protein, 11 aa, Severe acute respiratory syndrome-related coronavirus
  REGION 1..11: note = Table B: HLA-DRB1*04:03L HLA-DRB1*13:03L HLA-DRB1*01:03L HLA-DRB1*04:05L HLA-DRB1*08:01L HLA-DQA1*01-B1*05L HLA-DPA1*01:02-B1*04:01L HLA-DRB1*16:01L HLA-DRB1*04:08L HLA-DQA1*02:01-B1*03:03L
  source 1..11: note = Severe acute respiratory syndrome coronavirus 2
VYRAFDIYNDK

SEQ ID NO: 13268 - protein, 11 aa, Severe acute respiratory syndrome-related coronavirus
  REGION 1..11: note = Table B: HLA-DRB1*04:03L HLA-DRB1*04:02L
  source 1..11: note = Severe acute respiratory syndrome coronavirus 2
RAFDIYNDKVA

SEQ ID NO: 13269 - protein, 10 aa, Severe acute respiratory syndrome-related coronavirus
  REGION 1..10: note = Table B: HLA-DRB1*04:03L HLA-DRB1*14:01L HLA-DQA1*01-B1*05L HLA-DQA1*05:01-B1*02:01L HLA-DPA1*03:01-B1*105:01L HLA-DQA1*03:01-B1*03:02L HLA-DPA1*01:02-B1*04:01L HLA-DRB1*16:01L HLA-DRB1*15:03L
  source 1..10: note = Severe acute respiratory syndrome coronavirus 2
IYNDKVAGFA

SEQ ID NO: 13270 - protein, 13 aa, Severe acute respiratory syndrome-related coronavirus
  REGION 1..13: note = Table B: HLA-DRB1*04:03L HLA-DRB1*13:03L HLA-DRB1*04:02L HLA-DRB1*04:04L HLA-DRB1*04:05L HLA-DRB1*08:04L HLA-DPA1*01:03-B1*03:01L HLA-DRB1*03:01L HLA-DRB1*11:04L HLA-DRB1*11:01L HLA-DQA1*01-B1*05L HLA-DQA1*05:05-B1*03:19L
  REGION 1..13: note = CONT. FROM ABOVE: HLA-DQA1*05:01-B1*02:01L HLA-DRB3*01:01L HLA-D PA1*02:01-B1*13:01L HLA-DPA1*01:03-B1*02:01L HLA-DQA1*05:05-B1*0 3:01L
  source 1..13: note = Severe acute respiratory syndrome coronavirus 2
DKVAGFAKFLKTN

SEQ ID NO: 13271 - protein, 12 aa, Severe acute respiratory syndrome-related coronavirus
  REGION 1..12: note = Table B: HLA-DRB1*04:03L
  source 1..12: note = Severe acute respiratory syndrome coronavirus 2
FQEKDEDDNLID

SEQ ID NO: 13272 - protein, 10 aa, Severe acute respiratory syndrome-related coronavirus
  REGION 1..10: note = Table B: HLA-DRB1*04:03L HLA-DRB1*01:03L HLA-DRB1*04:05L HLA-DQA1*01:02-B1*06:02L HLA-DRB1*01:01L HLA-DRB1*01:02L HLA-DQA1*01:01-B1*05:01L HLA-DRB1*11:01L HLA-DRB1*12:01L HLA-DPA1*02:01-B1*13:01L HLA-DPA1*01:02-B1*04:01L
  REGION 1..10: note = CONT. FROM ABOVE: HLA-DRB1*16:01L HLA-DQA1*01:03-B1*06:01M HLA-D QA1*02:01-B1*03:03L HLA-DRB1*15:03L
  source 1..10: note = Severe acute respiratory syndrome coronavirus 2
SYFVVKRHTF

SEQ ID NO: 13273 - protein, 11 aa, Severe acute respiratory syndrome-related coronavirus
  REGION 1..11: note = Table B: HLA-DRB1*04:03L HLA-DRB1*13:03L HLA-DRB1*04:02L HLA-DQA1*01:02-B1*06:02L HLA-DRB1*16:01L
  source 1..11: note = Severe acute respiratory syndrome coronavirus 2
HTFSNYQHEET

SEQ ID NO: 13274 - protein, 11 aa, Severe acute respiratory syndrome-related coronavirus
  REGION 1..11: note = Table B: HLA-DRB1*04:03L HLA-DRB1*14:17L
  source 1..11: note = Severe acute respiratory syndrome coronavirus 2
TIYNLLKDCPA

SEQ ID NO: 13275 - protein, 11 aa, Severe acute respiratory syndrome-related coronavirus
  REGION 1..11: note = Table B: HLA-DRB1*04:03L HLA-DRB1*04:02L HLA-DRB1*01:02L HLA-DRB1*14:17L HLA-DRB1*16:01L HLA-DRB1*04:08L
  source 1..11: note = Severe acute respiratory syndrome coronavirus 2
YNLLKDCPAVA

SEQ ID NO: 13276 - protein, 13 aa, Severe acute respiratory syndrome-related coronavirus
  REGION 1..13: note = Table B: HLA-DRB1*04:03L HLA-DRB1*04:05L HLA-DRB3*01:01L HLA-DPA1*01:02-B1*04:01L HLA-DRB1*15:03L
  source 1..13: note = Severe acute respiratory syndrome coronavirus 2
IDGDMVPHISRQR

SEQ ID NO: 13277 - protein, 13 aa, Severe acute respiratory syndrome-related coronavirus
  REGION 1..13: note = Table B: HLA-DRB1*04:03L HLA-DRB1*04:02L HLA-DRB1*03:01L HLA-DRB1*11:03L HLA-DRB1*11:01L HLA-DPA1*03:01-B1*105:01L HLA-DPA1*01:02-B1*04:01L
  source 1..13: note = Severe acute respiratory syndrome coronavirus 2
GDMVPHISRQRLT

SEQ ID NO: 13278 - protein, 12 aa, Severe acute respiratory syndrome-related coronavirus
  REGION 1..12: note = Table B: HLA-DRB1*04:03L HLA-DPA1*03:01-B1*105:01L HLA-DRB1*15:03L
  source 1..12: note = Severe acute respiratory syndrome coronavirus 2
LTKYTMADLVYA

SEQ ID NO: 13279 - protein, 13 aa, Severe acute respiratory syndrome-related coronavirus
  REGION 1..13: note = Table B: HLA-DRB1*04:03L HLA-DRB1*04:05L HLA-DRB1*12:01L HLA-DPA1*02:01-B1*13:01L HLA-DRB1*04:08L
  source 1..13: note = Severe acute respiratory syndrome coronavirus 2
YALRHFDEGNCDT

SEQ ID NO: 13280 - protein, 14 aa, Severe acute respiratory syndrome-related coronavirus
  REGION 1..14: note = Table B: HLA-DRB1*04:03L HLA-DRB1*04:05L HLA-DQA1*01:02-B1*06:02L HLA-DPA1*01:03-B1*03:01L HLA-DPA1*03:01-B1*105:01L
  source 1..14: note = Severe acute respiratory syndrome coronavirus 2
LKEILVTYNCCDDD

SEQ ID NO: 13281 - protein, 11 aa, Severe acute respiratory syndrome-related coronavirus
  REGION 1..11: note = Table B: HLA-DRB1*04:03L HLA-DRB1*01:01L HLA-DRB1*11:01L HLA-DQA1*05:05-B1*03:01L
  source 1..11: note = Severe acute respiratory syndrome coronavirus 2
FVENPDILRVY

SEQ ID NO: 13282 - protein, 12 aa, Severe acute respiratory syndrome-related coronavirus
  REGION 1..12: note = Table B: HLA-DRB1*04:03L
  source 1..12: note = Severe acute respiratory syndrome coronavirus 2
PDILRVYANLGE

SEQ ID NO: 13283 - protein, 11 aa, Severe acute respiratory syndrome-related coronavirus
  REGION 1..11: note = Table B: HLA-DRB1*04:03L HLA-DRB1*01:03L HLA-DRB1*04:02L HLA-DRB1*04:04L HLA-DRB1*04:05L HLA-DQA1*01:02-B1*06:02L HLA-DRB1*01:02L HLA-DQA1*01-B1*05L HLA-DRB1*04:10L HLA-DRB1*12:01L HLA-DQA1*03:01-B1*03:02L HLA-DRB1*16:01L
  REGION 1..11: note = CONT. FROM ABOVE: HLA-DRB1*04:08L HLA-DQA1*02:01-B1*03:03L HLA-D RB1*15:03L
  source 1..11: note = Severe acute respiratory syndrome coronavirus 2
ILRVYANLGER

SEQ ID NO: 13284 - protein, 11 aa, Severe acute respiratory syndrome-related coronavirus
  REGION 1..11: note = Table B: HLA-DRB1*04:03L HLA-DRB1*04:02L HLA-DRB1*04:05L HLA-DQA1*01:02-B1*06:02L HLA-DRB1*01:01L HLA-DRB4*03:01NL HLA-DRB1*11:03L HLA-DRB1*11:04L HLA-DRB1*11:01L HLA-DRB3*01:01L HLA-DPA1*03:01-B1*105:01L HLA-DRB1*14:54L HLA-DRB1*14:17L
  source 1..11: note = Severe acute respiratory syndrome coronavirus 2
VYANLGERVRQ

SEQ ID NO: 13285 - protein, 13 aa, Severe acute respiratory syndrome-related coronavirus
  REGION 1..13: note = Table B: HLA-DRB1*04:03L
  source 1..13: note = Severe acute respiratory syndrome coronavirus 2
LKTVQFCDAMRNA

SEQ ID NO: 13286 - protein, 11 aa, Severe acute respiratory syndrome-related coronavirus
  REGION 1..11: note = Table B: HLA-DRB1*04:03L HLA-DQA1*01:02-B1*06:02L HLA-DQA1*05:05-B1*03:01L HLA-DQA1*01:03-B1*06:01L HLA-DQA1*02:01-B1*03:03L
  source 1..11: note = Severe acute respiratory syndrome coronavirus 2
VQFCDAMRNAG

SEQ ID NO: 13287 - protein, 12 aa, Severe acute respiratory syndrome-related coronavirus
  REGION 1..12: note = Table B: HLA-DRB1*04:03L HLA-DQA1*03:01-B1*03:02L HLA-DRB1*14:17L HLA-DQA1*02:01-B1*03:03L
  source 1..12: note = Severe acute respiratory syndrome coronavirus 2
AGIVGVLTLDNQ

SEQ ID NO: 13288 - protein, 10 aa, Severe acute respiratory syndrome-related coronavirus
  REGION 1..10: note = Table B: HLA-DRB1*04:03L HLA-DRB1*04:02L HLA-DRB1*04:05L HLA-DQA1*01-B1*05L HLA-DQA1*05:01-B1*02:01L HLA-DRB1*04:10L HLA-DQA1*03:01-B1*03:02L HLA-DRB1*14:17L
  source 1..10: note = Severe acute respiratory syndrome coronavirus 2
VLTLDNQDLN

SEQ ID NO: 13289 - protein, 15 aa, Severe acute respiratory syndrome-related coronavirus
  REGION 1..15: note = Table B: HLA-DRB1*04:03L HLA-DRB1*13:02L HLA-DRB1*13:03L HLA-DRB1*04:02L HLA-DRB1*04:04L HLA-DRB1*04:05L HLA-DRB1*08:04L HLA-DRB3*02:01L HLA-DRB1*14:01L HLA-DRB1*11:04L HLA-DRB1*14:02L HLA-DQA1*01:01-B1*05:01L HLA-DRB1*11:01L HLA-DRB1*09:01L
  REGION 1..15: note = CONT. FROM ABOVE: HLA-DRB3*01:01L HLA-DPA1*02:01-B1*13:01L HLA-D PA1*01:03-B1*104:01L HLA-DRB1*10:01L HLA-DRB1*08:03L
  source 1..15: note = Severe acute respiratory syndrome coronavirus 2
GNWYDFGDFIQTTPG

SEQ ID NO: 13290 - protein, 10 aa, Severe acute respiratory syndrome-related coronavirus
  REGION 1..10: note = Table B: HLA-DRB1*04:03L HLA-DRB1*13:03L HLA-DRB1*04:02L HLA-DRB1*04:05L HLA-DRB4*03:01NL HLA-DQA1*01-B1*05L HLA-DQA1*03:01-B1*03:02L HLA-DRB1*14:17L
  source 1..10: note = Severe acute respiratory syndrome coronavirus 2
DFIQTTPGSG

SEQ ID NO: 13291 - protein, 13 aa, Severe acute respiratory syndrome-related coronavirus
  REGION 1..13: note = Table B: HLA-DRB1*04:03L HLA-DRB1*01:03L HLA-DQA1*01:02-B1*06:02L HLA-DRB4*03:01NL HLA-DQA1*01:01-B1*05:01L HLA-DQA1*05:01-B1*02:01L HLA-DQA1*05:05-B1*03:116L HLA-DPA1*03:01-B1*105:01L
  REGION 1..13: note = CONT. FROM ABOVE: HLA-DRB1*16:01L HLA-DRB1*04:08L
  source 1..13: note = Severe acute respiratory syndrome coronavirus 2
IQTTPGSGVPVVD

SEQ ID NO: 13292 - protein, 12 aa, Severe acute respiratory syndrome-related coronavirus
  REGION 1..12: note = Table B: HLA-DRB1*04:03L HLA-DRB1*13:03L HLA-DRB1*01:03L HLA-DRB1*08:77L HLA-DPA1*01:03-B1*03:01L HLA-DRB1*14:02L HLA-DQA1*01-B1*05L HLA-DQA1*05:05-B1*03:116L HLA-DPA1*01:03-B1*04:02L HLA-DRB1*12:01L
  REGION 1..12: note = CONT. FROM ABOVE: HLA-DPA1*03:01-B1*105:01L HLA-DPA1*01:03-B1*10 4:01L HLA-DRB1*16:01L HLA-DRB1*04:08L HLA-DRB1*15:03L
  source 1..12: note = Severe acute respiratory syndrome coronavirus 2
TPGSGVPVVDSY

SEQ ID NO: 13293 - protein, 14 aa, Severe acute respiratory syndrome-related coronavirus
  REGION 1..14: note = Table B: HLA-DRB1*04:03L HLA-DQA1*01:02-B1*06:02L HLA-DRB1*01:02L HLA-DPA1*03:01-B1*04:02L HLA-DRB1*12:01L HLA-DPA1*03:01-B1*105:01L HLA-DRB1*16:01L
  source 1..14: note = Severe acute respiratory syndrome coronavirus 2
VPVVDSYYSLLMPI

SEQ ID NO: 13294 - protein, 11 aa, Severe acute respiratory syndrome-related coronavirus
  REGION 1..11: note = Table B: HLA-DRB1*04:03L HLA-DRB1*04:02L HLA-DRB1*14:01L HLA-DRB1*14:54L HLA-DRB1*14:17L
  source 1..11: note = Severe acute respiratory syndrome coronavirus 2
MPILTLTRALT

SEQ ID NO: 13295 - protein, 11 aa, Severe acute respiratory syndrome-related coronavirus
  REGION 1..11: note = Table B: HLA-DRB1*04:03L HLA-DRB1*14:17L
  source 1..11: note = Severe acute respiratory syndrome coronavirus 2
ILTLTRALTAE

SEQ ID NO: 13296 - protein, 11 aa, Severe acute respiratory syndrome-related coronavirus
  REGION 1..11: note = Table B: HLA-DRB1*04:03L
  source 1..11: note = Severe acute respiratory syndrome coronavirus 2
LTLTRALTAES

SEQ ID NO: 13297 - protein, 10 aa, Severe acute respiratory syndrome-related coronavirus
  REGION 1..10: note = Table B: HLA-DRB1*04:03L HLA-DQA1*03:01-B1*03:02L HLA-DRB1*14:17L
  source 1..10: note = Severe acute respiratory syndrome coronavirus 2
LTRALTAESH

SEQ ID NO: 13298 - protein, 11 aa, Severe acute respiratory syndrome-related coronavirus
  REGION 1..11: note = Table B: HLA-DRB1*04:03L HLA-DQA1*01:03-B1*06:01L
  source 1..11: note = Severe acute respiratory syndrome coronavirus 2
TRALTAESHVD

SEQ ID NO: 13299 - protein, 10 aa, Severe acute respiratory syndrome-related coronavirus
  REGION 1..10: note = Table B: HLA-DRB1*04:03L HLA-DQA1*03:01-B1*03:02L
  source 1..10: note = Severe acute respiratory syndrome coronavirus 2
SHVDTDLTKP

SEQ ID NO: 13300 - protein, 11 aa, Severe acute respiratory syndrome-related coronavirus
  REGION 1..11: note = Table B: HLA-DRB1*04:03L HLA-DRB1*01:03L HLA-DQA1*01:03-B1*06:01L HLA-DQA1*02:01-B1*03:03L
  source 1..11: note = Severe acute respiratory syndrome coronavirus 2
VDTDLTKPYIK

SEQ ID NO: 13301 - protein, 12 aa, Severe acute respiratory syndrome-related coronavirus
  REGION 1..12: note = Table B: HLA-DRB1*04:03L HLA-DQA1*05:01-B1*02:01L HLA-DRB1*16:01L HLA-DRB1*15:03L
  source 1..12: note = Severe acute respiratory syndrome coronavirus 2
DLLKYDFTEERL

SEQ ID NO: 13302 - protein, 11 aa, Severe acute respiratory syndrome-related coronavirus
  REGION 1..11: note = Table B: HLA-DRB1*04:03L HLA-DRB1*13:02L HLA-DRB1*04:05L HLA-DRB1*03:01L HLA-DRB1*14:01L HLA-DRB1*08:01L HLA-DRB1*12:01L HLA-DRB3*01:01L HLA-DRB1*04:08L HLA-DRB1*15:03L
  source 1..11: note = Severe acute respiratory syndrome coronavirus 2
LKYDFTEERLK

SEQ ID NO: 13303 - protein, 11 aa, Severe acute respiratory syndrome-related coronavirus
  REGION 1..11: note = Table B: HLA-DRB1*04:03L HLA-DRB1*13:03L HLA-DRB1*01:03L HLA-DRB1*04:02L HLA-DRB1*04:05L HLA-DRB1*08:01L HLA-DRB1*04:08L
  source 1..11: note = Severe acute respiratory syndrome coronavirus 2
FKYWDQTYHPN

SEQ ID NO: 13304 - protein, 12 aa, Severe acute respiratory syndrome-related coronavirus
  REGION 1..12: note = Table B: HLA-DRB1*04:03L HLA-DPA1*03:01-B1*04:02L HLA-DRB1*12:01L HLA-DPA1*03:01-B1*105:01L HLA-DRB1*15:03L
  source 1..12: note = Severe acute respiratory syndrome coronavirus 2
FNVLFSTVFPPT

SEQ ID NO: 13305 - protein, 14 aa, Severe acute respiratory syndrome-related coronavirus
  REGION 1..14: note = Table B: HLA-DRB1*04:03L HLA-DRB1*13:02L HLA-DRB1*01:03L HLA-DRB1*04:02L HLA-DRB1*04:04L HLA-DRB1*04:05L HLA-DQA1*01:02-B1*06:02L HLA-DRB1*08:04L HLA-DPA1*01:03-B1*03:01L HLA-DPA1*03:01-B1*04:02L
  REGION 1..14: note = CONT. FROM ABOVE: HLA-DRB1*14:01L HLA-DRB1*08:01L HLA-DQA1*05:01 -B1*02:01L HLA-DPA1*01:03-B1*04:02L HLA-DRB1*12:01L HLA-DRB3*01: 01L HLA-DPA1*02:01-B1*13:01L HLA-DPA1*03:01-B1*105:01L HLA-DPA1* 01:02-B1*04:01L HLA-DQA1*01:03-B1*06:01L HLA-DRB1*04:08L
  REGION 1..14: note = CONT. FROM ABOVE: HLA-DQA1*02:01-B1*03:03L
  source 1..14: note = Severe acute respiratory syndrome coronavirus 2
GPLVRKIFVDGVPF

SEQ ID NO: 13306 - protein, 12 aa, Severe acute respiratory syndrome-related coronavirus
  REGION 1..12: note = Table B: HLA-DRB1*04:03L HLA-DRB1*13:02L HLA-DRB1*13:03L HLA-DRB1*01:03L HLA-DRB1*04:02L HLA-DRB1*04:05L HLA-DRB1*01:02L HLA-DQA1*01-B1*05L HLA-DRB1*12:01L HLA-DRB3*01:01L HLA-DRB1*04:08L
  source 1..12: note = Severe acute respiratory syndrome coronavirus 2
VRKIFVDGVPFV

SEQ ID NO: 13307 - protein, 10 aa, Severe acute respiratory syndrome-related coronavirus
  REGION 1..10: note = Table B: HLA-DRB1*04:03L HLA-DRB1*04:02L HLA-DQA1*01-B1*05L HLA-DQA1*03:01-B1*03:02L HLA-DQA1*02:01-B1*03:03L
  source 1..10: note = Severe acute respiratory syndrome coronavirus 2
VPFVVSTGYH

SEQ ID NO: 13308 - protein, 10 aa, Severe acute respiratory syndrome-related coronavirus
  REGION 1..10: note = Table B: HLA-DRB1*04:03L HLA-DRB1*01:03L HLA-DRB1*04:05M HLA-DQA1*01:02-B1*06:02L HLA-DRB1*01:01L HLA-DRB1*01:02L HLA-DRB1*08:77L HLA-DPA1*03:01-B1*04:02L HLA-DRB1*11:03L HLA-DQA1*01:01-B1*05:01L HLA-DRB1*11:01L
  REGION 1..10: note = CONT. FROM ABOVE: HLA-DQA1*05:05-B1*03:19L HLA-DRB1*12:01L HLA-D PA1*02:01-B1*13:01M HLA-DPA1*03:01-B1*105:01L HLA-DRB1*16:01L HL A-DQA1*01:03-B1*06:01M HLA-DQA1*02:01-B1*03:03L HLA-DRB1*15:03L
  source 1..10: note = Severe acute respiratory syndrome coronavirus 2
PFVVSTGYHF

SEQ ID NO: 13309 - protein, 11 aa, Severe acute respiratory syndrome-related coronavirus
  REGION 1..11: note = Table B: HLA-DRB1*04:03L HLA-DRB1*01:03L HLA-DRB1*04:02L HLA-DRB1*04:05L HLA-DRB1*01:02L HLA-DRB1*14:17L HLA-DRB1*10:01L HLA-DRB1*16:01L HLA-DRB1*04:08L HLA-DQA1*02:01-B1*03:03L
  source 1..11: note = Severe acute respiratory syndrome coronavirus 2
FRELGVVHNQD

SEQ ID NO: 13310 - protein, 13 aa, Severe acute respiratory syndrome-related coronavirus
  REGION 1..13: note = Table B: HLA-DRB1*04:03L HLA-DRB1*04:02L HLA-DRB1*04:05L HLA-DRB1*14:01L HLA-DRB1*08:01L HLA-DPA1*03:01-B1*105:01L
  source 1..13: note = Severe acute respiratory syndrome coronavirus 2
DVNLHSSRLSFKE

SEQ ID NO: 13311 - protein, 11 aa, Severe acute respiratory syndrome-related coronavirus
  REGION 1..11: note = Table B: HLA-DRB1*04:03L HLA-DQA1*01-B1*05L
  source 1..11: note = Severe acute respiratory syndrome coronavirus 2
KELLVYAADPA

SEQ ID NO: 13312 - protein, 10 aa, Severe acute respiratory syndrome-related coronavirus
  REGION 1..10: note = Table B: HLA-DRB1*04:03L
  source 1..10: note = Severe acute respiratory syndrome coronavirus 2
AADPAMHAAS

SEQ ID NO: 13313 - protein, 11 aa, Severe acute respiratory syndrome-related coronavirus
  REGION 1..11: note = Table B: HLA-DRB1*04:03L HLA-DRB1*13:03L HLA-DRB1*01:03L HLA-DRB1*04:02L HLA-DRB1*04:05L HLA-DRB1*01:02L HLA-DRB4*03:01NL HLA-DRB1*14:01L HLA-DRB1*11:03L HLA-DQA1*05:05-B1*03:19L HLA-DRB1*12:02L HLA-DQA1*05:05-B1*03:01L
  REGION 1..11: note = CONT. FROM ABOVE: HLA-DQA1*01:03-B1*06:01L
  source 1..11: note = Severe acute respiratory syndrome coronavirus 2
PAMHAASGNLL

SEQ ID NO: 13314 - protein, 11 aa, Severe acute respiratory syndrome-related coronavirus
  REGION 1..11: note = Table B: HLA-DRB1*04:03L HLA-DRB1*13:03L HLA-DRB1*04:02L HLA-DRB1*14:17L
  source 1..11: note = Severe acute respiratory syndrome coronavirus 2
HAASGNLLLDK

SEQ ID NO: 13315 - protein, 13 aa, Severe acute respiratory syndrome-related coronavirus
  REGION 1..13: note = Table B: HLA-DRB1*04:03L HLA-DRB1*13:03L HLA-DRB1*01:03L HLA-DRB1*04:02L HLA-DQA1*01:02-B1*06:02L HLA-DRB1*08:04L HLA-DRB1*08:77L HLA-DPA1*01:03-B1*03:01L HLA-DRB1*11:03L HLA-DRB1*11:04L HLA-DRB1*14:02L HLA-DRB1*08:01L HLA-DRB1*11:01L
  REGION 1..13: note = CONT. FROM ABOVE: HLA-DQA1*05:01-B1*02:01L HLA-DRB1*12:01L HLA-D RB1*14:54L HLA-DRB1*04:08L
  source 1..13: note = Severe acute respiratory syndrome coronavirus 2
GNLLLDKRTTCFS

SEQ ID NO: 13316 - protein, 10 aa, Severe acute respiratory syndrome-related coronavirus
  REGION 1..10: note = Table B: HLA-DRB1*04:03L HLA-DRB1*14:17L
  source 1..10: note = Severe acute respiratory syndrome coronavirus 2
AALTNNVAFQ

SEQ ID NO: 13317 - protein, 10 aa, Severe acute respiratory syndrome-related coronavirus
  REGION 1..10: note = Table B: HLA-DRB1*04:03L HLA-DRB1*04:02L HLA-DQA1*03:01-B1*03:02L HLA-DRB1*14:17L HLA-DPA1*01:02-B1*04:01L HLA-DQA1*01:03-B1*06:01L HLA-DQA1*02:01-B1*03:03L
  source 1..10: note = Severe acute respiratory syndrome coronavirus 2
NVAFQTVKPG

SEQ ID NO: 13318 - protein, 11 aa, Severe acute respiratory syndrome-related coronavirus
  REGION 1..11: note = Table B: HLA-DRB1*04:03L HLA-DRB1*04:02L HLA-DRB1*01:02L HLA-DRB1*14:17L HLA-DPA1*01:02-B1*04:01L HLA-DRB1*16:01L HLA-DQA1*01:03-B1*06:01L
  source 1..11: note = Severe acute respiratory syndrome coronavirus 2
FAVSKGFFKEG

SEQ ID NO: 13319 - protein, 12 aa, Severe acute respiratory syndrome-related coronavirus
  REGION 1..12: note = Table B: HLA-DRB1*04:03L HLA-DQA1*01:02-B1*06:02L
  source 1..12: note = Severe acute respiratory syndrome coronavirus 2
SKGFFKEGSSVE

SEQ ID NO: 13320 - protein, 10 aa, Severe acute respiratory syndrome-related coronavirus
  REGION 1..10: note = Table B: HLA-DRB1*04:03L
  source 1..10: note = Severe acute respiratory syndrome coronavirus 2
FFFAQDGNAA

SEQ ID NO: 13321 - protein, 10 aa, Severe acute respiratory syndrome-related coronavirus
  REGION 1..10: note = Table B: HLA-DRB1*04:03L HLA-DRB1*14:17L
  source 1..10: note = Severe acute respiratory syndrome coronavirus 2
FAQDGNAAIS

SEQ ID NO: 13322 - protein, 10 aa, Severe acute respiratory syndrome-related coronavirus
  REGION 1..10: note = Table B: HLA-DRB1*04:03L HLA-DRB1*13:02L HLA-DRB1*13:03L HLA-DRB1*04:02L HLA-DRB4*03:01NL HLA-DRB1*12:01L HLA-DPA1*03:01-B1*105:01L HLA-DQA1*03:01-B1*03:02L HLA-DQA1*05:05-B1*03:01L HLA-DRB1*14:17L
  REGION 1..10: note = CONT. FROM ABOVE: HLA-DPA1*01:02-B1*04:01L HLA-DQA1*01:03-B1*06: 01L HLA-DQA1*02:01-B1*03:03L
  source 1..10: note = Severe acute respiratory syndrome coronavirus 2
AAISDYDYYR

SEQ ID NO: 13323 - protein, 13 aa, Severe acute respiratory syndrome-related coronavirus
  REGION 1..13: note = Table B: HLA-DRB1*04:03L HLA-DRB1*04:05L HLA-DRB1*08:04L HLA-DRB3*02:01L HLA-DPA1*01:03-B1*04:01L HLA-DPA1*01:03-B1*04:02L HLA-DPA1*01:03-B1*104:01L HLA-DRB1*07:01L HLA-DRB1*04:08L
  source 1..13: note = Severe acute respiratory syndrome coronavirus 2
YDYYRYNLPTMCD

SEQ ID NO: 13324 - protein, 13 aa, Severe acute respiratory syndrome-related coronavirus
  REGION 1..13: note = Table B: HLA-DRB1*04:03L HLA-DRB1*01:03L HLA-DQA1*01:02-B1*06:02L HLA-DRB1*01:02L HLA-DRB1*08:04L HLA-DRB1*08:01L HLA-DQA1*01-B1*05L HLA-DRB1*04:10L HLA-DRB1*12:01L HLA-DPA1*02:01-B1*13:01L
  REGION 1..13: note = CONT. FROM ABOVE: HLA-DPA1*03:01-B1*105:01L HLA-DQA1*03:01-B1*03 :02L HLA-DRB1*16:01L HLA-DRB1*04:08L HLA-DRB1*15:03L
  source 1..13: note = Severe acute respiratory syndrome coronavirus 2
IRQLLFVVEVVDK

SEQ ID NO: 13325 - protein, 14 aa, Severe acute respiratory syndrome-related coronavirus
  REGION 1..14: note = Table B: HLA-DRB1*04:03L HLA-DRB1*01:03L HLA-DRB1*04:05L HLA-DQA1*01:02-B1*06:02L HLA-DQA1*01-B1*05L HLA-DRB1*12:01L HLA-DPA1*02:01-B1*13:01L HLA-DQA1*05:05-B1*03:01L HLA-DRB1*04:08L
  source 1..14: note = Severe acute respiratory syndrome coronavirus 2
VDKYFDCYDGGCIN

SEQ ID NO: 13326 - protein, 10 aa, Severe acute respiratory syndrome-related coronavirus
  REGION 1..10: note = Table B: HLA-DRB1*04:03L HLA-DRB1*04:02L HLA-DRB1*04:05L HLA-DRB4*03:01NL HLA-DRB1*04:10L HLA-DQA1*03:01-B1*03:02L HLA-DRB1*14:17L HLA-DQA1*01:03-B1*06:01L HLA-DQA1*02:01-B1*03:03L
  source 1..10: note = Severe acute respiratory syndrome coronavirus 2
NQVIVNNLDK

SEQ ID NO: 13327 - protein, 10 aa, Severe acute respiratory syndrome-related coronavirus
  REGION 1..10: note = Table B: HLA-DRB1*04:03L HLA-DRB1*14:17L
  source 1..10: note = Severe acute respiratory syndrome coronavirus 2
VIVNNLDKSA

SEQ ID NO: 13328 - protein, 13 aa, Severe acute respiratory syndrome-related coronavirus
  REGION 1..13: note = Table B: HLA-DRB1*04:03L HLA-DRB1*01:03L HLA-DRB1*04:02L HLA-DRB1*04:05L HLA-DRB1*01:02L HLA-DQA1*05:01-B1*02:01L HLA-DRB1*12:01L HLA-DPA1*02:01-B1*13:01L HLA-DPA1*03:01-B1*105:01L HLA-DQA1*03:01-B1*03:02L
  REGION 1..13: note = CONT. FROM ABOVE: HLA-DRB1*16:01L HLA-DRB1*04:08L HLA-DRB1*15:03 L
  source 1..13: note = Severe acute respiratory syndrome coronavirus 2
GKARLYYDSMSYE

SEQ ID NO: 13329 - protein, 12 aa, Severe acute respiratory syndrome-related coronavirus
  REGION 1..12: note = Table B: HLA-DRB1*04:03L
  source 1..12: note = Severe acute respiratory syndrome coronavirus 2
ARLYYDSMSYED

SEQ ID NO: 13330 - protein, 12 aa, Severe acute respiratory syndrome-related coronavirus
  REGION 1..12: note = Table B: HLA-DRB1*04:03L HLA-DRB1*04:05L HLA-DQA1*05:01-B1*02:01L HLA-DRB1*04:10L HLA-DPA1*03:01-B1*105:01L HLA-DQA1*03:01-B1*03:02L
  source 1..12: note = Severe acute respiratory syndrome coronavirus 2
RLYYDSMSYEDQ

SEQ ID NO: 13331 - protein, 12 aa, Severe acute respiratory syndrome-related coronavirus
  REGION 1..12: note = Table B: HLA-DRB1*04:03L HLA-DRB1*04:02L HLA-DRB1*04:05L HLA-DQA1*01:02-B1*06:02L HLA-DPA1*03:01-B1*04:02L HLA-DQA1*01:01-B1*05:01L HLA-DRB1*12:01L HLA-DPA1*02:01-B1*13:01L HLA-DPA1*03:01-B1*105:01L
  REGION 1..12: note = CONT. FROM ABOVE: HLA-DRB1*04:08L HLA-DQA1*02:01-B1*03:03L HLA-D RB1*15:03L
  source 1..12: note = Severe acute respiratory syndrome coronavirus 2
YDSMSYEDQDAL

SEQ ID NO: 13332 - protein, 12 aa, Severe acute respiratory syndrome-related coronavirus
  REGION 1..12: note = Table B: HLA-DRB1*04:03L HLA-DRB1*04:02L HLA-DPA1*03:01-B1*105:01L HLA-DRB1*14:17L HLA-DQA1*02:01-B1*03:03L
  source 1..12: note = Severe acute respiratory syndrome coronavirus 2
YEDQDALFAYTK

SEQ ID NO: 13333 - protein, 16 aa, Severe acute respiratory syndrome-related coronavirus
  REGION 1..16: note = Table B: HLA-DRB1*04:03L HLA-DPA1*01:03-B1*03:01L HLA-DQA1*05:05-B1*03:19L HLA-DQA1*05:01-B1*02:01L HLA-DQA1*05:05-B1*03:01L
  source 1..16: note = Severe acute respiratory syndrome coronavirus 2
EDQDALFAYTKRNVIP

SEQ ID NO: 13334 - protein, 10 aa, Severe acute respiratory syndrome-related coronavirus
  REGION 1..10: note = Table B: HLA-DRB1*04:03L HLA-DRB1*13:03L HLA-DRB1*01:03L HLA-DRB1*04:02L HLA-DRB1*01:02L HLA-DRB4*03:01NL HLA-DRB1*14:01L HLA-DRB1*08:01L HLA-DRB1*12:01L HLA-DQA1*03:01-B1*03:02L HLA-DRB1*14:54L HLA-DRB1*14:17L HLA-DPA1*01:02-B1*04:01L
  REGION 1..10: note = CONT. FROM ABOVE: HLA-DRB1*16:01L HLA-DRB1*04:08L HLA-DQA1*02:01 -B1*03:03L
  source 1..10: note = Severe acute respiratory syndrome coronavirus 2
AYTKRNVIPT

SEQ ID NO: 13335 - protein, 12 aa, Severe acute respiratory syndrome-related coronavirus
  REGION 1..12: note = Table B: HLA-DRB1*04:03L HLA-DRB1*04:05L HLA-DQA1*01:02-B1*06:02L HLA-DRB1*12:01L
  source 1..12: note = Severe acute respiratory syndrome coronavirus 2
KRNVIPTITQMN

SEQ ID NO: 13336 - protein, 12 aa, Severe acute respiratory syndrome-related coronavirus
  REGION 1..12: note = Table B: HLA-DRB1*04:03L HLA-DRB1*12:01L HLA-DRB1*14:17L
  source 1..12: note = Severe acute respiratory syndrome coronavirus 2
RNVIPTITQMNL

SEQ ID NO: 13337 - protein, 11 aa, Severe acute respiratory syndrome-related coronavirus
  REGION 1..11: note = Table B: HLA-DRB1*04:03L HLA-DRB1*04:02L HLA-DQA1*01:02-B1*06:02L HLA-DRB4*03:01NL HLA-DRB1*12:01L HLA-DPA1*03:01-B1*105:01L HLA-DQA1*05:05-B1*03:01L HLA-DRB1*14:17L HLA-DRB1*16:01L HLA-DQA1*01:03-B1*06:01L
  source 1..11: note = Severe acute respiratory syndrome coronavirus 2
VIPTITQMNLK

SEQ ID NO: 13338 - protein, 12 aa, Severe acute respiratory syndrome-related coronavirus
  REGION 1..12: note = Table B: HLA-DRB1*04:03L HLA-DRB1*04:02L HLA-DRB1*14:01L HLA-DPA1*03:01-B1*105:01L HLA-DRB1*14:17L HLA-DRB1*15:03L
  source 1..12: note = Severe acute respiratory syndrome coronavirus 2
IPTITQMNLKYA

SEQ ID NO: 13339 - protein, 11 aa, Severe acute respiratory syndrome-related coronavirus
  REGION 1..11: note = Table B: HLA-DRB1*04:03L
  source 1..11: note = Severe acute respiratory syndrome coronavirus 2
MNLKYAISAKN

SEQ ID NO: 13340 - protein, 11 aa, Severe acute respiratory syndrome-related coronavirus
  REGION 1..11: note = Table B: HLA-DRB1*04:03L HLA-DRB1*13:03L HLA-DRB1*04:02L HLA-DRB1*04:05L HLA-DRB1*01:02L HLA-DRB1*14:01L HLA-DRB1*12:01L HLA-DRB1*04:08L
  source 1..11: note = Severe acute respiratory syndrome coronavirus 2
LKYAISAKNRA

SEQ ID NO: 13341 - protein, 13 aa, Severe acute respiratory syndrome-related coronavirus
  REGION 1..13: note = Table B: HLA-DRB1*04:03L HLA-DRB1*04:02L HLA-DRB1*14:17L HLA-DQA1*02:01-B1*03:03L
  source 1..13: note = Severe acute respiratory syndrome coronavirus 2
VAGVSICSTMTNR

SEQ ID NO: 13342 - protein, 11 aa, Severe acute respiratory syndrome-related coronavirus
  REGION 1..11: note = Table B: HLA-DRB1*04:03L HLA-DRB1*04:02L HLA-DQA1*01:02-B1*06:02L HLA-DQA1*03:01-B1*03:02L HLA-DQA1*05:05-B1*03:01L HLA-DRB1*14:17L HLA-DQA1*01:03-B1*06:01L HLA-DQA1*02:01-B1*03:03L
  source 1..11: note = Severe acute respiratory syndrome coronavirus 2
VSICSTMTNRQ

SEQ ID NO: 13343 - protein, 10 aa, Severe acute respiratory syndrome-related coronavirus
  REGION 1..10: note = Table B: HLA-DRB1*04:03L HLA-DQA1*03:01-B1*03:02L HLA-DRB1*14:17L
  source 1..10: note = Severe acute respiratory syndrome coronavirus 2
LLKSIAATRG

SEQ ID NO: 13344 - protein, 11 aa, Severe acute respiratory syndrome-related coronavirus
  REGION 1..11: note = Table B: HLA-DRB1*04:03L HLA-DRB1*04:02L HLA-DQA1*03:01-B1*03:02L HLA-DRB1*14:17L
  source 1..11: note = Severe acute respiratory syndrome coronavirus 2
LKSIAATRGAT

SEQ ID NO: 13345 - protein, 10 aa, Severe acute respiratory syndrome-related coronavirus
  REGION 1..10: note = Table B: HLA-DRB1*04:03L HLA-DRB1*04:02L HLA-DRB1*14:01L HLA-DRB1*14:17L HLA-DQA1*02:01-B1*03:03L
  source 1..10: note = Severe acute respiratory syndrome coronavirus 2
VVIGTSKFYG

SEQ ID NO: 13346 - protein, 11 aa, Severe acute respiratory syndrome-related coronavirus
  REGION 1..11: note = Table B: HLA-DRB1*04:03L HLA-DQA1*05:01-B1*02:01L HLA-DPA1*03:01-B1*105:01L HLA-DPA1*01:02-B1*04:01L
  source 1..11: note = Severe acute respiratory syndrome coronavirus 2
NMLKTVYSDVE

SEQ ID NO: 13347 - protein, 11 aa, Severe acute respiratory syndrome-related coronavirus
  REGION 1..11: note = Table B: HLA-DRB1*04:03L HLA-DQA1*01-B1*05L HLA-DQA1*03:01-B1*03:02L
  source 1..11: note = Severe acute respiratory syndrome coronavirus 2
NPHLMGWDYPK

SEQ ID NO: 13348 - protein, 14 aa, Severe acute respiratory syndrome-related coronavirus
  REGION 1..14: note = Table B: HLA-DRB1*04:03L
  source 1..14: note = Severe acute respiratory syndrome coronavirus 2
PNMLRIMASLVLAR

SEQ ID NO: 13349 - protein, 13 aa, Severe acute respiratory syndrome-related coronavirus
  REGION 1..13: note = Table B: HLA-DRB1*04:03L HLA-DRB1*13:02L HLA-DRB1*13:03L HLA-DRB1*04:04L HLA-DQA1*01:02-B1*06:02L HLA-DRB1*01:01L HLA-DPA1*01:03-B1*03:01L HLA-DRB1*11:04L HLA-DRB1*11:01L HLA-DRB3*01:01L HLA-DQA1*03:01-B1*03:02L
  REGION 1..13: note = CONT. FROM ABOVE: HLA-DPA1*01:02-B1*04:01L HLA-DRB1*07:01L HLA-D QA1*02:01-B1*03:03L HLA-DRB1*15:03L
  source 1..13: note = Severe acute respiratory syndrome coronavirus 2
SHRFYRLANECAQ

SEQ ID NO: 13350 - protein, 13 aa, Severe acute respiratory syndrome-related coronavirus
  REGION 1..13: note = Table B: HLA-DRB1*04:03L HLA-DRB1*13:02L HLA-DRB1*04:05L HLA-DPA1*01:03-B1*104:01L HLA-DQA1*05:05-B1*03:01L
  source 1..13: note = Severe acute respiratory syndrome coronavirus 2
FYRLANECAQVLS

SEQ ID NO: 13351 - protein, 13 aa, Severe acute respiratory syndrome-related coronavirus
  REGION 1..13: note = Table B: HLA-DRB1*04:03L HLA-DPA1*01:03-B1*03:01L HLA-DRB1*12:01L HLA-DPA1*03:01-B1*105:01L HLA-DQA1*05:05-B1*03:01L
  source 1..13: note = Severe acute respiratory syndrome coronavirus 2
YRLANECAQVLSE

SEQ ID NO: 13352 - protein, 14 aa, Severe acute respiratory syndrome-related coronavirus
  REGION 1..14: note = Table B: HLA-DRB1*04:03L HLA-DPA1*03:01-B1*105:01L HLA-DQA1*05:05-B1*03:01L HLA-DQA1*01:03-B1*06:01L
  source 1..14: note = Severe acute respiratory syndrome coronavirus 2
AQVLSEMVMCGGSL

SEQ ID NO: 13353 - protein, 15 aa, Severe acute respiratory syndrome-related coronavirus
  REGION 1..15: note = Table B: HLA-DRB1*04:03L HLA-DRB1*01:03L HLA-DRB1*14:01L HLA-DQA1*05:05-B1*03:19L HLA-DRB1*12:01L HLA-DRB1*16:01L HLA-DRB1*04:08L
  source 1..15: note = Severe acute respiratory syndrome coronavirus 2
SEMVMCGGSLYVKPG

SEQ ID NO: 13354 - protein, 10 aa, Severe acute respiratory syndrome-related coronavirus
  REGION 1..10: note = Table B: HLA-DRB1*04:03L HLA-DRB1*04:02L HLA-DQA1*03:01-B1*03:02L HLA-DRB1*14:17L HLA-DQA1*02:01-B1*03:03L
  source 1..10: note = Severe acute respiratory syndrome coronavirus 2
SLYVKPGGTS

SEQ ID NO: 13355 - protein, 10 aa, Severe acute respiratory syndrome-related coronavirus
  REGION 1..10: note = Table B: HLA-DRB1*04:03L HLA-DRB1*14:17L
  source 1..10: note = Severe acute respiratory syndrome coronavirus 2
YVKPGGTSSG

SEQ ID NO: 13356 - protein, 15 aa, Severe acute respiratory syndrome-related coronavirus
  REGION 1..15: note = Table B: HLA-DRB1*04:03L HLA-DQA1*01:03-B1*06:01L
  source 1..15: note = Severe acute respiratory syndrome coronavirus 2
VKPGGTSSGDATTAY

SEQ ID NO: 13357 - protein, 16 aa, Severe acute respiratory syndrome-related coronavirus
  REGION 1..16: note = Table B: HLA-DRB1*04:03L HLA-DRB1*04:02L HLA-DRB1*01:02L HLA-DQA1*01:01-B1*05:01L HLA-DRB1*08:01L HLA-DRB1*11:01L HLA-DQA1*05:05-B1*03:116L HLA-DRB1*04:08L
  source 1..16: note = Severe acute respiratory syndrome coronavirus 2
KPGGTSSGDATTAYAN

SEQ ID NO: 13358 - protein, 11 aa, Severe acute respiratory syndrome-related coronavirus
  REGION 1..11: note = Table B: HLA-DRB1*04:03L
  source 1..11: note = Severe acute respiratory syndrome coronavirus 2
ATTAYANSVFN

SEQ ID NO: 13359 - protein, 14 aa, Severe acute respiratory syndrome-related coronavirus
  REGION 1..14: note = Table B: HLA-DRB1*04:03L HLA-DRB1*08:04L HLA-DRB1*14:01L HLA-DRB1*11:04L
  source 1..14: note = Severe acute respiratory syndrome coronavirus 2
TTAYANSVFNICQA

SEQ ID NO: 13360 - protein, 13 aa, Severe acute respiratory syndrome-related coronavirus
  REGION 1..13: note = Table B: HLA-DRB1*04:03L
  source 1..13: note = Severe acute respiratory syndrome coronavirus 2
ANSVFNICQAVTA

SEQ ID NO: 13361 - protein, 12 aa, Severe acute respiratory syndrome-related coronavirus
  REGION 1..12: note = Table B: HLA-DRB1*04:03L
  source 1..12: note = Severe acute respiratory syndrome coronavirus 2
AVTANVNALLST

SEQ ID NO: 13362 - protein, 12 aa, Severe acute respiratory syndrome-related coronavirus
  REGION 1..12: note = Table B: HLA-DRB1*04:03L
  source 1..12: note = Severe acute respiratory syndrome coronavirus 2
VTANVNALLSTD

SEQ ID NO: 13363 - protein, 12 aa, Severe acute respiratory syndrome-related coronavirus
  REGION 1..12: note = Table B: HLA-DRB1*04:03L
  source 1..12: note = Severe acute respiratory syndrome coronavirus 2
TANVNALLSTDG

SEQ ID NO: 13364 - protein, 12 aa, Severe acute respiratory syndrome-related coronavirus
  REGION 1..12: note = Table B: HLA-DRB1*04:03L HLA-DRB1*04:02L HLA-DQA1*01:02-B1*06:02L HLA-DQA1*03:01-B1*03:02L HLA-DQA1*01:03-B1*06:01L HLA-DQA1*02:01-B1*03:03L
  source 1..12: note = Severe acute respiratory syndrome coronavirus 2
ANVNALLSTDGN

SEQ ID NO: 13365 - protein, 11 aa, Severe acute respiratory syndrome-related coronavirus
  REGION 1..11: note = Table B: HLA-DRB1*04:03L HLA-DQA1*03:01-B1*03:02L
  source 1..11: note = Severe acute respiratory syndrome coronavirus 2
VNALLSTDGNK

SEQ ID NO: 13366 - protein, 10 aa, Severe acute respiratory syndrome-related coronavirus
  REGION 1..10: note = Table B: HLA-DRB1*04:03L HLA-DRB1*04:02L HLA-DQA1*03:01-B1*03:02L HLA-DRB1*14:17L
  source 1..10: note = Severe acute respiratory syndrome coronavirus 2
LSTDGNKIAD

SEQ ID NO: 13367 - protein, 10 aa, Severe acute respiratory syndrome-related coronavirus
  REGION 1..10: note = Table B: HLA-DRB1*04:03L HLA-DRB1*13:02L HLA-DRB1*13:03L HLA-DRB1*04:02L HLA-DRB1*01:01L HLA-DRB4*03:01NL HLA-DRB1*11:04L HLA-DRB1*08:01L HLA-DRB5*01:01L HLA-DRB1*12:01L HLA-DQA1*03:01-B1*03:02L HLA-DQA1*05:05-B1*03:01L
  REGION 1..10: note = CONT. FROM ABOVE: HLA-DRB1*14:17L HLA-DRB1*16:01L HLA-DQA1*02:01 -B1*03:03L
  source 1..10: note = Severe acute respiratory syndrome coronavirus 2
STDGNKIADK

SEQ ID NO: 13368 - protein, 13 aa, Severe acute respiratory syndrome-related coronavirus
  REGION 1..13: note = Table B: HLA-DRB1*04:03L HLA-DRB1*04:02L HLA-DQA1*01:02-B1*06:02L HLA-DRB3*02:01L HLA-DPA1*03:01-B1*04:02L HLA-DRB1*11:03L HLA-DRB1*11:01L HLA-DPA1*02:01-B1*13:01L HLA-DPA1*03:01-B1*105:01L
  source 1..13: note = Severe acute respiratory syndrome coronavirus 2
IADKYVRNLQHRL

SEQ ID NO: 13369 - protein, 11 aa, Severe acute respiratory syndrome-related coronavirus
  REGION 1..11: note = Table B: HLA-DRB1*04:03L HLA-DRB1*13:03L HLA-DRB1*04:02L HLA-DRB1*04:05L HLA-DRB1*11:03L HLA-DRB1*11:04L HLA-DRB1*08:01L HLA-DRB3*01:01L HLA-DQA1*03:01-B1*03:02L HLA-DRB1*04:08L
  source 1..11: note = Severe acute respiratory syndrome coronavirus 2
YVRNLQHRLYE

SEQ ID NO: 13370 - protein, 11 aa, Severe acute respiratory syndrome-related coronavirus
  REGION 1..11: note = Table B: HLA-DRB1*04:03L HLA-DRB1*01:03L HLA-DRB1*04:05L HLA-DPA1*03:01-B1*04:02L HLA-DRB1*14:01L HLA-DRB4*01:01L HLA-DQA1*05:05-B1*03:116L HLA-DPA1*01:03-B1*04:02L HLA-DRB1*12:01L HLA-DQA1*03:01-B1*03:02L
  REGION 1..11: note = CONT. FROM ABOVE: HLA-DPA1*01:02-B1*04:01L
  source 1..11: note = Severe acute respiratory syndrome coronavirus 2
RDVDTDFVNEF

SEQ ID NO: 13371 - protein, 11 aa, Severe acute respiratory syndrome-related coronavirus
  REGION 1..11: note = Table B: HLA-DRB1*04:03L HLA-DRB1*01:03L HLA-DRB4*03:01NL HLA-DPA1*03:01-B1*04:02L HLA-DRB1*11:03L HLA-DPA1*01:03-B1*04:02L HLA-DPA1*01:02-B1*04:01L HLA-DRB1*08:02L
  source 1..11: note = Severe acute respiratory syndrome coronavirus 2
DVDTDFVNEFY

SEQ ID NO: 13372 - protein, 14 aa, Severe acute respiratory syndrome-related coronavirus
  REGION 1..14: note = Table B: HLA-DRB1*04:03L HLA-DRB1*04:05L HLA-DRB1*14:02L HLA-DQA1*03:01-B1*03:02L HLA-DQA1*05:05-B1*03:01L
  source 1..14: note = Severe acute respiratory syndrome coronavirus 2
VDTDFVNEFYAYLR

SEQ ID NO: 13373 - protein, 13 aa, Severe acute respiratory syndrome-related coronavirus
  REGION 1..13: note = Table B: HLA-DRB1*04:03L HLA-DRB1*13:02L HLA-DRB1*04:04L HLA-DRB1*04:05L HLA-DRB1*14:01L HLA-DQA1*02:01-B1*03:03L
  source 1..13: note = Severe acute respiratory syndrome coronavirus 2
TDFVNEFYAYLRK

SEQ ID NO: 13374 - protein, 13 aa, Severe acute respiratory syndrome-related coronavirus
  REGION 1..13: note = Table B: HLA-DRB1*04:03L HLA-DPA1*02:01-B1*13:01L
  source 1..13: note = Severe acute respiratory syndrome coronavirus 2
DFVNEFYAYLRKH

SEQ ID NO: 13375 - protein, 14 aa, Severe acute respiratory syndrome-related coronavirus
  REGION 1..14: note = Table B: HLA-DRB1*04:03L HLA-DRB1*13:02L HLA-DRB1*01:03L HLA-DRB1*04:04L HLA-DQA1*01-B1*05L HLA-DPA1*01:03-B1*104:01L HLA-DQA1*05:05-B1*03:01L
  source 1..14: note = Severe acute respiratory syndrome coronavirus 2
LRKHFSMMILSDDA

SEQ ID NO: 13376 - protein, 11 aa, Severe acute respiratory syndrome-related coronavirus
  REGION 1..11: note = Table B: HLA-DRB1*04:03L HLA-DRB1*14:01L HLA-DRB1*14:02L HLA-DQA1*05:01-B1*02:01L HLA-DPA1*03:01-B1*105:01L HLA-DRB1*14:17L
  source 1..11: note = Severe acute respiratory syndrome coronavirus 2
ILSDDAVVCFN

SEQ ID NO: 13377 - protein, 13 aa, Severe acute respiratory syndrome-related coronavirus
  REGION 1..13: note = Table B: HLA-DRB1*04:03L
  source 1..13: note = Severe acute respiratory syndrome coronavirus 2
DDAVVCFNSTYAS

SEQ ID NO: 13378 - protein, 13 aa, Severe acute respiratory syndrome-related coronavirus
  REGION 1..13: note = Table B: HLA-DRB1*04:03L HLA-DRB1*04:02L HLA-DRB1*01:02L HLA-DQA1*01-B1*05L HLA-DRB1*12:01L HLA-DRB1*14:17L HLA-DRB1*16:01L HLA-DRB1*15:03L
  source 1..13: note = Severe acute respiratory syndrome coronavirus 2
DAVVCFNSTYASQ

SEQ ID NO: 13379 - protein, 12 aa, Severe acute respiratory syndrome-related coronavirus
  REGION 1..12: note = Table B: HLA-DRB1*04:03L HLA-DRB1*04:02L HLA-DRB1*14:17L HLA-DRB1*15:03L
  source 1..12: note = Severe acute respiratory syndrome coronavirus 2
VVCFNSTYASQG

SEQ ID NO: 13380 - protein, 11 aa, Severe acute respiratory syndrome-related coronavirus
  REGION 1..11: note = Table B: HLA-DRB1*04:03L HLA-DRB1*01:03L HLA-DRB1*04:02L HLA-DRB4*03:01NL HLA-DPA1*03:01-B1*105:01L HLA-DRB1*14:17L
  source 1..11: note = Severe acute respiratory syndrome coronavirus 2
YASQGLVASIK

SEQ ID NO: 13381 - protein, 10 aa, Severe acute respiratory syndrome-related coronavirus
  REGION 1..10: note = Table B: HLA-DRB1*04:03L
  source 1..10: note = Severe acute respiratory syndrome coronavirus 2
LVASIKNFKS

SEQ ID NO: 13382 - protein, 11 aa, Severe acute respiratory syndrome-related coronavirus
  REGION 1..11: note = Table B: HLA-DRB1*04:03L HLA-DRB1*04:02L HLA-DQA1*01-B1*05L HLA-DRB1*12:01L HLA-DQA1*03:01-B1*03:02L HLA-DRB1*14:17L HLA-DRB1*16:01L HLA-DQA1*02:01-B1*03:03L HLA-DRB1*15:03L
  source 1..11: note = Severe acute respiratory syndrome coronavirus 2
VASIKNFKSVL

SEQ ID NO: 13383 - protein, 11 aa, Severe acute respiratory syndrome-related coronavirus
  REGION 1..11: note = Table B: HLA-DRB1*04:03L HLA-DRB1*01:02L HLA-DRB1*12:01L HLA-DRB1*16:01L
  source 1..11: note = Severe acute respiratory syndrome coronavirus 2
IKNFKSVLYYQ

SEQ ID NO: 13384 - protein, 12 aa, Severe acute respiratory syndrome-related coronavirus
  REGION 1..12: note = Table B: HLA-DRB1*04:03L HLA-DRB1*04:02L HLA-DQA1*01:02-B1*06:02L HLA-DRB1*01:02L HLA-DPA1*03:01-B1*04:02L HLA-DRB1*14:01L HLA-DQA1*05:01-B1*02:01L HLA-DRB1*12:01L
  REGION 1..12: note = CONT. FROM ABOVE: HLA-DPA1*03:01-B1*105:01L
  source 1..12: note = Severe acute respiratory syndrome coronavirus 2
VLYYQNNVFMSE

SEQ ID NO: 13385 - protein, 15 aa, Severe acute respiratory syndrome-related coronavirus
  REGION 1..15: note = Table B: HLA-DRB1*04:03L HLA-DRB1*01:03L HLA-DRB1*14:02L HLA-DRB1*08:01L HLA-DRB1*12:01L HLA-DPA1*02:01-B1*13:01L HLA-DPA1*01:03-B1*02:01L HLA-DRB1*16:01L
  source 1..15: note = Severe acute respiratory syndrome coronavirus 2
NNVFMSEAKCWTETD

SEQ ID NO: 13386 - protein, 11 aa, Severe acute respiratory syndrome-related coronavirus
  REGION 1..11: note = Table B: HLA-DRB1*04:03L
  source 1..11: note = Severe acute respiratory syndrome coronavirus 2
HTMLVKQGDDY

SEQ ID NO: 13387 - protein, 12 aa, Severe acute respiratory syndrome-related coronavirus
  REGION 1..12: note = Table B: HLA-DRB1*04:03L
  source 1..12: note = Severe acute respiratory syndrome coronavirus 2
TMLVKQGDDYVY

SEQ ID NO: 13388 - protein, 11 aa, Severe acute respiratory syndrome-related coronavirus
  REGION 1..11: note = Table B: HLA-DRB1*04:03L HLA-DRB1*01:03L HLA-DRB1*14:17L
  source 1..11: note = Severe acute respiratory syndrome coronavirus 2
LPYPDPSRILG

SEQ ID NO: 13389 - protein, 10 aa, Severe acute respiratory syndrome-related coronavirus
  REGION 1..10: note = Table B: HLA-DRB1*04:03L
  source 1..10: note = Severe acute respiratory syndrome coronavirus 2
PDPSRILGAG

SEQ ID NO: 13390 - protein, 10 aa, Severe acute respiratory syndrome-related coronavirus
  REGION 1..10: note = Table B: HLA-DRB1*04:03L HLA-DRB1*04:02L HLA-DQA1*01-B1*05L HLA-DQA1*03:01-B1*03:02L HLA-DRB1*14:17L HLA-DQA1*02:01-B1*03:03L
  source 1..10: note = Severe acute respiratory syndrome coronavirus 2
FVDDIVKTDG

SEQ ID NO: 13391 - protein, 11 aa, Severe acute respiratory syndrome-related coronavirus
  REGION 1..11: note = Table B: HLA-DRB1*04:03L HLA-DQA1*02:01-B1*03:03L
  source 1..11: note = Severe acute respiratory syndrome coronavirus 2
VDDIVKTDGTL

SEQ ID NO: 13392 - protein, 11 aa, Severe acute respiratory syndrome-related coronavirus
  REGION 1..11: note = Table B: HLA-DRB1*04:03L HLA-DRB1*13:02L HLA-DRB1*01:03L HLA-DRB1*04:02L HLA-DRB1*01:02L HLA-DRB4*03:01NL HLA-DRB1*08:77L HLA-DPA1*01:03-B1*03:01L HLA-DRB1*14:01L HLA-DRB1*14:02L HLA-DQA1*05:01-B1*02:01L HLA-DRB1*12:01L HLA-DRB1*12:02L
  REGION 1..11: note = CONT. FROM ABOVE: HLA-DRB1*14:54L HLA-DRB1*14:17L HLA-DRB1*16:01 L HLA-DQA1*02:01-B1*03:03L HLA-DRB1*15:03L
  source 1..11: note = Severe acute respiratory syndrome coronavirus 2
IVKTDGTLMIE

SEQ ID NO: 13393 - protein, 11 aa, Severe acute respiratory syndrome-related coronavirus
  REGION 1..11: note = Table B: HLA-DRB1*04:03L HLA-DRB1*01:03L
  source 1..11: note = Severe acute respiratory syndrome coronavirus 2
VKTDGTLMIER

SEQ ID NO: 13394 - protein, 11 aa, Severe acute respiratory syndrome-related coronavirus
  REGION 1..11: note = Table B: HLA-DRB1*04:03L HLA-DRB1*13:02L HLA-DRB1*13:03L HLA-DRB1*04:05L HLA-DRB1*08:04L HLA-DRB1*08:77L HLA-DRB3*02:01L HLA-DRB1*11:03L HLA-DRB1*11:04L HLA-DRB1*09:01L HLA-DRB3*01:01L HLA-DPA1*01:03-B1*02:01L HLA-DRB1*07:01L HLA-DRB1*08:03L
  source 1..11: note = Severe acute respiratory syndrome coronavirus 2
GTLMIERFVSL

SEQ ID NO: 13395 - protein, 11 aa, Severe acute respiratory syndrome-related coronavirus
  REGION 1..11: note = Table B: HLA-DRB1*04:03L HLA-DQA1*01-B1*05L HLA-DRB1*15:03L
  source 1..11: note = Severe acute respiratory syndrome coronavirus 2
IERFVSLAIDA

SEQ ID NO: 13396 - protein, 12 aa, Severe acute respiratory syndrome-related coronavirus
  REGION 1..12: note = Table B: HLA-DRB1*04:03L HLA-DRB1*01:02L HLA-DPA1*01:03-B1*03:01L HLA-DPA1*03:01-B1*04:02L HLA-DQA1*05:01-B1*02:01L HLA-DRB1*12:01L HLA-DPA1*03:01-B1*105:01L HLA-DRB1*16:01L HLA-DRB1*15:03L
  source 1..12: note = Severe acute respiratory syndrome coronavirus 2
RFVSLAIDAYPL

SEQ ID NO: 13397 - protein, 11 aa, Severe acute respiratory syndrome-related coronavirus
  REGION 1..11: note = Table B: HLA-DRB1*04:03L HLA-DRB1*04:02L
  source 1..11: note = Severe acute respiratory syndrome coronavirus 2
IDAYPLTKHPN

SEQ ID NO: 13398 - protein, 10 aa, Severe acute respiratory syndrome-related coronavirus
  REGION 1..10: note = Table B: HLA-DRB1*04:03L HLA-DRB1*13:03L HLA-DRB1*01:03L HLA-DRB1*04:02L HLA-DQA1*03:01-B1*03:02L HLA-DRB1*14:17L HLA-DRB1*16:01L HLA-DQA1*02:01-B1*03:03L
  source 1..10: note = Severe acute respiratory syndrome coronavirus 2
YPLTKHPNQE

SEQ ID NO: 13399 - protein, 13 aa, Severe acute respiratory syndrome-related coronavirus
  REGION 1..13: note = Table B: HLA-DRB1*04:03L HLA-DRB1*04:02L HLA-DRB1*04:04L HLA-DRB1*07:01L
  source 1..13: note = Severe acute respiratory syndrome coronavirus 2
ADVFHLYLQYIRK

SEQ ID NO: 13400 - protein, 11 aa, Severe acute respiratory syndrome-related coronavirus
  REGION 1..11: note = Table B: HLA-DRB1*04:03L HLA-DRB1*04:05L HLA-DRB1*12:01L HLA-DRB1*16:01L
  source 1..11: note = Severe acute respiratory syndrome coronavirus 2
YIRKLHDELTG

SEQ ID NO: 13401 - protein, 14 aa, Severe acute respiratory syndrome-related coronavirus
  REGION 1..14: note = Table B: HLA-DRB1*04:03L HLA-DRB1*04:04L HLA-DQA1*01:02-B1*06:02L HLA-DRB3*01:01L
  source 1..14: note = Severe acute respiratory syndrome coronavirus 2
IRKLHDELTGHMLD

SEQ ID NO: 13402 - protein, 13 aa, Severe acute respiratory syndrome-related coronavirus
  REGION 1..13: note = Table B: HLA-DRB1*04:03L HLA-DRB1*04:08L
  source 1..13: note = Severe acute respiratory syndrome coronavirus 2
HDELTGHMLDMYS

SEQ ID NO: 13403 - protein, 13 aa, Severe acute respiratory syndrome-related coronavirus
  REGION 1..13: note = Table B: HLA-DRB1*04:03L
  source 1..13: note = Severe acute respiratory syndrome coronavirus 2
TGHMLDMYSVMLT

SEQ ID NO: 13404 - protein, 13 aa, Severe acute respiratory syndrome-related coronavirus
  REGION 1..13: note = Table B: HLA-DRB1*04:03L HLA-DRB1*04:02L HLA-DRB1*01:02L HLA-DQA1*01-B1*05L HLA-DRB1*12:01L HLA-DRB1*16:01L
  source 1..13: note = Severe acute respiratory syndrome coronavirus 2
GHMLDMYSVMLTN

SEQ ID NO: 13405 - protein, 11 aa, Severe acute respiratory syndrome-related coronavirus
  REGION 1..11: note = Table B: HLA-DRB1*04:03L HLA-DRB1*14:17L
  source 1..11: note = Severe acute respiratory syndrome coronavirus 2
YSVMLTNDNTS

SEQ ID NO: 13406 - protein, 10 aa, Severe acute respiratory syndrome-related coronavirus
  REGION 1..10: note = Table B: HLA-DRB1*04:03M HLA-DRB1*13:03L HLA-DRB1*01:03L HLA-DRB1*04:02L HLA-DRB1*04:04L HLA-DRB1*04:05L HLA-DRB4*03:01NL HLA-DRB1*11:04L HLA-DRB1*04:10L HLA-DRB1*12:01L HLA-DQA1*03:01-B1*03:02L HLA-DRB1*14:54L HLA-DRB1*14:17L
  REGION 1..10: note = CONT. FROM ABOVE: HLA-DRB1*10:01L HLA-DRB1*16:01L HLA-DRB1*04:08 L HLA-DQA1*02:01-B1*03:03L
  source 1..10: note = Severe acute respiratory syndrome coronavirus 2
VMLTNDNTSR

SEQ ID NO: 13407 - protein, 12 aa, Severe acute respiratory syndrome-related coronavirus
  REGION 1..12: note = Table B: HLA-DRB1*04:03L HLA-DRB1*13:02L HLA-DRB1*13:03L HLA-DRB1*04:05L HLA-DRB1*08:04L HLA-DRB1*11:04L HLA-DRB3*01:01L HLA-DPA1*01:03-B1*02:01L HLA-DRB1*08:03L
  source 1..12: note = Severe acute respiratory syndrome coronavirus 2
SRYWEPEFYEAM

SEQ ID NO: 13408 - protein, 10 aa, Severe acute respiratory syndrome-related coronavirus
  REGION 1..10: note = Table B: HLA-DRB1*04:03L HLA-DRB1*01:03L HLA-DRB1*04:02L HLA-DRB1*01:02L HLA-DRB1*14:01L HLA-DRB1*12:01L HLA-DRB1*14:17L HLA-DRB1*16:01L HLA-DQA1*02:01-B1*03:03L HLA-DRB1*15:03L
  source 1..10: note = Severe acute respiratory syndrome coronavirus 2
AMYTPHTVLQ

SEQ ID NO: 13409 - protein, 11 aa, Severe acute respiratory syndrome-related coronavirus
  REGION 1..11: note = Table B: HLA-DRB1*04:03L HLA-DRB1*13:03L HLA-DRB1*01:03L HLA-DRB1*04:02L HLA-DRB1*04:05L HLA-DQA1*01:02-B1*06:02L HLA-DRB1*01:02L HLA-DRB4*03:01NL HLA-DRB1*14:01L HLA-DQA1*01-B1*05L HLA-DRB1*04:10L HLA-DRB1*12:01L
  REGION 1..11: note = CONT. FROM ABOVE: HLA-DRB1*14:54L HLA-DRB1*14:17L HLA-DPA1*01:02 -B1*04:01L HLA-DRB1*04:08L HLA-DQA1*02:01-B1*03:03L
  source 1..11: note = Severe acute respiratory syndrome coronavirus 2
YTPHTVLQAVG

SEQ ID NO: 13410 - protein, 11 aa, Severe acute respiratory syndrome-related coronavirus
  REGION 1..11: note = Table B: HLA-DRB1*04:03L HLA-DRB1*13:03L HLA-DRB1*04:02L HLA-DRB1*04:05L HLA-DQA1*01-B1*05L HLA-DRB1*14:17L HLA-DRB1*16:01L HLA-DQA1*02:01-B1*03:03L
  source 1..11: note = Severe acute respiratory syndrome coronavirus 2
TPHTVLQAVGA

SEQ ID NO: 13411 - protein, 10 aa, Severe acute respiratory syndrome-related coronavirus
  REGION 1..10: note = Table B: HLA-DRB1*04:03L HLA-DQA1*01:02-B1*06:02L HLA-DQA1*03:01-B1*03:02L HLA-DRB1*14:17L HLA-DQA1*01:03-B1*06:01L HLA-DQA1*02:01-B1*03:03L
  source 1..10: note = Severe acute respiratory syndrome coronavirus 2
VLCNSQTSLR

SEQ ID NO: 13412 - protein, 12 aa, Severe acute respiratory syndrome-related coronavirus
  REGION 1..12: note = Table B: HLA-DRB1*04:03L HLA-DQA1*01:02-B1*06:02L
  source 1..12: note = Severe acute respiratory syndrome coronavirus 2
YDHVISTSHKLV

SEQ ID NO: 13413 - protein, 12 aa, Severe acute respiratory syndrome-related coronavirus
  REGION 1..12: note = Table B: HLA-DRB1*04:03L HLA-DRB1*13:02L HLA-DRB1*13:03L HLA-DRB1*04:02L HLA-DRB1*01:02L HLA-DRB1*08:04L HLA-DRB1*11:04L HLA-DRB1*12:02L HLA-DRB3*01:01L
  source 1..12: note = Severe acute respiratory syndrome coronavirus 2
DHVISTSHKLVL

SEQ ID NO: 13414 - protein, 11 aa, Severe acute respiratory syndrome-related coronavirus
  REGION 1..11: note = Table B: HLA-DRB1*04:03L
  source 1..11: note = Severe acute respiratory syndrome coronavirus 2
HKLVLSVNPYV

SEQ ID NO: 13415 - protein, 13 aa, Severe acute respiratory syndrome-related coronavirus
  REGION 1..13: note = Table B: HLA-DRB1*04:03L HLA-DQA1*01:02-B1*06:02L HLA-DPA1*03:01-B1*04:02L HLA-DPA1*01:03-B1*04:02L HLA-DPA1*01:02-B1*04:01L HLA-DQA1*01:03-B1*06:01L HLA-DQA1*02:01-B1*03:03L
  source 1..13: note = Severe acute respiratory syndrome coronavirus 2
VLSVNPYVCNAPG

SEQ ID NO: 13416 - protein, 13 aa, Severe acute respiratory syndrome-related coronavirus
  REGION 1..13: note = Table B: HLA-DRB1*04:03L HLA-DRB1*12:01L HLA-DQA1*05:05-B1*03:01L
  source 1..13: note = Severe acute respiratory syndrome coronavirus 2
VTDVTQLYLGGMS

SEQ ID NO: 13417 - protein, 19 aa, Severe acute respiratory syndrome-related coronavirus
  REGION 1..19: note = Table B: HLA-DRB1*04:03L
  source 1..19: note = Severe acute respiratory syndrome coronavirus 2
VTQLYLGGMSYYCKSHKPP

SEQ ID NO: 13418 - protein, 10 aa, Severe acute respiratory syndrome-related coronavirus
  REGION 1..10: note = Table B: HLA-DRB1*04:03L HLA-DRB1*01:03L HLA-DQA1*03:01-B1*03:02L HLA-DPA1*01:02-B1*04:01L HLA-DRB1*16:01L HLA-DQA1*02:01-B1*03:03L
  source 1..10: note = Severe acute respiratory syndrome coronavirus 2
SHKPPISFPL

SEQ ID NO: 13419 - protein, 11 aa, Severe acute respiratory syndrome-related coronavirus
  REGION 1..11: note = Table B: HLA-DRB1*04:03L
  source 1..11: note = Severe acute respiratory syndrome coronavirus 2
GDYILANTCTE

SEQ ID NO: 13420 - protein, 10 aa, Severe acute respiratory syndrome-related coronavirus
  REGION 1..10: note = Table B: HLA-DRB1*04:03L HLA-DRB1*04:02L HLA-DQA1*03:01-B1*03:02L HLA-DRB1*14:17L HLA-DQA1*02:01-B1*03:03L
  source 1..10: note = Severe acute respiratory syndrome coronavirus 2
YILANTCTER

SEQ ID NO: 13421 - protein, 12 aa, Severe acute respiratory syndrome-related coronavirus
  REGION 1..12: note = Table B: HLA-DRB1*04:03L HLA-DRB1*01:03L HLA-DRB1*04:05L HLA-DQA1*01:02-B1*06:02L HLA-DRB1*08:01L HLA-DQA1*03:01-B1*03:02L HLA-DRB1*07:01L HLA-DQA1*01:03-B1*06:01L HLA-DRB1*04:08L
  REGION 1..12: note = CONT. FROM ABOVE: HLA-DQA1*02:01-B1*03:03L HLA-DRB1*15:01L
  source 1..12: note = Severe acute respiratory syndrome coronavirus 2
ERLKLFAAETLK

SEQ ID NO: 13422 - protein, 10 aa, Severe acute respiratory syndrome-related coronavirus
  REGION 1..10: note = Table B: HLA-DRB1*04:03L HLA-DQA1*01:02-B1*06:02L HLA-DPA1*03:01-B1*105:01L HLA-DQA1*01:03-B1*06:01L HLA-DQA1*02:01-B1*03:03L
  source 1..10: note = Severe acute respiratory syndrome coronavirus 2
LFAAETLKAT

SEQ ID NO: 13423 - protein, 10 aa, Severe acute respiratory syndrome-related coronavirus
  REGION 1..10: note = Table B: HLA-DRB1*04:03L HLA-DRB1*04:02L HLA-DQA1*03:01-B1*03:02L HLA-DRB1*14:17L HLA-DQA1*02:01-B1*03:03L
  source 1..10: note = Severe acute respiratory syndrome coronavirus 2
AAETLKATEE

SEQ ID NO: 13424 - protein, 10 aa, Severe acute respiratory syndrome-related coronavirus
  REGION 1..10: note = Table B: HLA-DRB1*04:03L HLA-DQA1*03:01-B1*03:02L HLA-DQA1*01:03-B1*06:01L HLA-DQA1*02:01-B1*03:03L
  source 1..10: note = Severe acute respiratory syndrome coronavirus 2
TLKATEETFK

SEQ ID NO: 13425 - protein, 13 aa, Severe acute respiratory syndrome-related coronavirus
  REGION 1..13: note = Table B: HLA-DRB1*04:03L HLA-DRB1*04:05L HLA-DQA1*01:02-B1*06:02L HLA-DRB1*11:03L HLA-DRB1*07:01L HLA-DRB1*10:01L HLA-DQA1*01:03-B1*06:01L
  source 1..13: note = Severe acute respiratory syndrome coronavirus 2
ETFKLSYGIATVR

SEQ ID NO: 13426 - protein, 10 aa, Severe acute respiratory syndrome-related coronavirus
  REGION 1..10: note = Table B: HLA-DRB1*04:03L HLA-DQA1*01:02-B1*06:02L HLA-DQA1*03:01-B1*03:02L HLA-DQA1*01:03-B1*06:01L HLA-DQA1*02:01-B1*03:03L
  source 1..10: note = Severe acute respiratory syndrome coronavirus 2
IATVREVLSD

SEQ ID NO: 13427 - protein, 11 aa, Severe acute respiratory syndrome-related coronavirus
  REGION 1..11: note = Table B: HLA-DRB1*04:03L
  source 1..11: note = Severe acute respiratory syndrome coronavirus 2
ATVREVLSDRE

SEQ ID NO: 13428 - protein, 12 aa, Severe acute respiratory syndrome-related coronavirus
  REGION 1..12: note = Table B: HLA-DRB1*04:03L HLA-DRB1*04:02L HLA-DRB1*04:05L HLA-DRB4*03:01NL HLA-DRB1*08:04L HLA-DRB1*11:04L HLA-DRB3*01:01L HLA-DRB1*14:54L HLA-DRB1*14:17L HLA-DRB1*04:08L
  source 1..12: note = Severe acute respiratory syndrome coronavirus 2
VREVLSDRELHL

SEQ ID NO: 13429 - protein, 11 aa, Severe acute respiratory syndrome-related coronavirus
  REGION 1..11: note = Table B: HLA-DRB1*04:03L
  source 1..11: note = Severe acute respiratory syndrome coronavirus 2
EVLSDRELHLS

SEQ ID NO: 13430 - protein, 11 aa, Severe acute respiratory syndrome-related coronavirus
  REGION 1..11: note = Table B: HLA-DRB1*04:03L HLA-DRB1*01:03L HLA-DQA1*01:02-B1*06:02L HLA-DRB1*01:02L HLA-DQA1*05:05-B1*03:01L HLA-DRB1*16:01L HLA-DQA1*01:03-B1*06:01L
  source 1..11: note = Severe acute respiratory syndrome coronavirus 2
LSWEVGKPRPP

SEQ ID NO: 13431 - protein, 19 aa, Severe acute respiratory syndrome-related coronavirus
  REGION 1..19: note = Table B: HLA-DRB1*04:03L HLA-DRB1*11:02L HLA-DRB1*11:03L HLA-DQA1*05:05-B1*03:19L
  source 1..19: note = Severe acute respiratory syndrome coronavirus 2
KPRPPLNRNYVFTGYRVTK

SEQ ID NO: 13432 - protein, 19 aa, Severe acute respiratory syndrome-related coronavirus
  REGION 1..19: note = Table B: HLA-DRB1*04:03L HLA-DRB1*08:04L HLA-DRB1*03:01L HLA-DRB1*11:02L HLA-DRB1*14:02L HLA-DPA1*01:03-B1*104:01L
  source 1..19: note = Severe acute respiratory syndrome coronavirus 2
PRPPLNRNYVFTGYRVTKN

SEQ ID NO: 13433 - protein, 13 aa, Severe acute respiratory syndrome-related coronavirus
  REGION 1..13: note = Table B: HLA-DRB1*04:03L HLA-DRB1*04:02L HLA-DRB1*04:05L HLA-DQA1*01:01-B1*05:01L HLA-DRB1*08:01L HLA-DRB1*04:08L
  source 1..13: note = Severe acute respiratory syndrome coronavirus 2
VTKNSKVQIGEYT

SEQ ID NO: 13434 - protein, 13 aa, Severe acute respiratory syndrome-related coronavirus
  REGION 1..13: note = Table B: HLA-DRB1*04:03L HLA-DRB1*04:02L HLA-DRB1*04:05L HLA-DQA1*01:02-B1*06:02L HLA-DRB1*16:01L HLA-DQA1*01:03-B1*06:01L
  source 1..13: note = Severe acute respiratory syndrome coronavirus 2
SKVQIGEYTFEKG

SEQ ID NO: 13435 - protein, 12 aa, Severe acute respiratory syndrome-related coronavirus
  REGION 1..12: note = Table B: HLA-DRB1*04:03L HLA-DQA1*01:02-B1*06:02L HLA-DQA1*01-B1*05L HLA-DPA1*03:01-B1*105:01L HLA-DQA1*01:03-B1*06:01L HLA-DQA1*02:01-B1*03:03L
  source 1..12: note = Severe acute respiratory syndrome coronavirus 2
VQIGEYTFEKGD

SEQ ID NO: 13436 - protein, 11 aa, Severe acute respiratory syndrome-related coronavirus
  REGION 1..11: note = Table B: HLA-DRB1*04:03L HLA-DRB1*13:03L HLA-DRB1*01:03L HLA-DRB1*04:02L HLA-DRB1*04:05L HLA-DRB1*04:10L HLA-DRB1*14:54L HLA-DRB1*14:17L HLA-DRB1*04:08L HLA-DQA1*02:01-B1*03:03L
  source 1..11: note = Severe acute respiratory syndrome coronavirus 2
GEYTFEKGDYG

SEQ ID NO: 13437 - protein, 13 aa, Severe acute respiratory syndrome-related coronavirus
  REGION 1..13: note = Table B: HLA-DRB1*04:03L
  source 1..13: note = Severe acute respiratory syndrome coronavirus 2
TFEKGDYGDAVVY

SEQ ID NO: 13438 - protein, 12 aa, Severe acute respiratory syndrome-related coronavirus
  REGION 1..12: note = Table B: HLA-DRB1*04:03L
  source 1..12: note = Severe acute respiratory syndrome coronavirus 2
KGDYGDAVVYRG

SEQ ID NO: 13439 - protein, 10 aa, Severe acute respiratory syndrome-related coronavirus
  REGION 1..10: note = Table B: HLA-DRB1*04:03L HLA-DRB1*01:03L HLA-DRB1*04:05M HLA-DQA1*01:02-B1*06:02L HLA-DRB1*01:01L HLA-DRB1*01:02L HLA-DRB1*08:77L HLA-DPA1*03:01-B1*04:02L HLA-DRB1*11:03L HLA-DRB1*14:02L HLA-DQA1*01:01-B1*05:01L
  REGION 1..10: note = CONT. FROM ABOVE: HLA-DQA1*05:05-B1*03:19L HLA-DQA1*05:01-B1*02: 01L HLA-DPA1*01:03-B1*04:01L HLA-DRB1*12:01L HLA-DPA1*02:01-B1*1 3:01M HLA-DPA1*03:01-B1*105:01L HLA-DRB1*16:01L HLA-DQA1*01:03-B 1*06:01M HLA-DQA1*02:01-B1*03:03L HLA-DRB1*15:03L
  source 1..10: note = Severe acute respiratory syndrome coronavirus 2
TYKLNVGDYF

SEQ ID NO: 13440 - protein, 12 aa, Severe acute respiratory syndrome-related coronavirus
  REGION 1..12: note = Table B: HLA-DRB1*04:03L HLA-DRB1*13:02L HLA-DRB1*13:03L HLA-DRB1*01:03L HLA-DRB1*04:02L HLA-DRB1*04:04L HLA-DRB4*03:01NL HLA-DRB1*08:04L HLA-DRB3*02:01L HLA-DPA1*01:03-B1*03:01L HLA-DRB1*14:01L HLA-DRB1*11:03L HLA-DRB1*11:04L HLA-DRB1*14:02L
  REGION 1..12: note = CONT. FROM ABOVE: HLA-DQA1*01:01-B1*05:01L HLA-DRB1*08:01L HLA-D RB1*11:01L HLA-DRB4*01:01L HLA-DPA1*01:03-B1*04:01L HLA-DRB1*04: 10L HLA-DRB1*09:01L HLA-DPA1*01:03-B1*04:02L HLA-DRB1*12:02L HLA -DRB3*01:01L HLA-DRB1*14:54L HLA-DQA1*05:05-B1*03:01L
  REGION 1..12: note = CONT. FROM ABOVE: HLA-DRB1*14:17L HLA-DRB1*07:01L HLA-DRB1*10:01 L HLA-DRB1*04:08L HLA-DRB1*08:03L
  source 1..12: note = Severe acute respiratory syndrome coronavirus 2
VGDYFVLTSHTV

SEQ ID NO: 13441 - protein, 10 aa, Severe acute respiratory syndrome-related coronavirus
  REGION 1..10: note = Table B: HLA-DRB1*04:03L HLA-DRB1*14:01L
  source 1..10: note = Severe acute respiratory syndrome coronavirus 2
FVLTSHTVMP

SEQ ID NO: 13442 - protein, 11 aa, Severe acute respiratory syndrome-related coronavirus
  REGION 1..11: note = Table B: HLA-DRB1*04:03L HLA-DQA1*01:03-B1*06:01L
  source 1..11: note = Severe acute respiratory syndrome coronavirus 2
VLTSHTVMPLS

SEQ ID NO: 13443 - protein, 11 aa, Severe acute respiratory syndrome-related coronavirus
  REGION 1..11: note = Table B: HLA-DRB1*04:03L HLA-DRB1*14:17L
  source 1..11: note = Severe acute respiratory syndrome coronavirus 2
SHTVMPLSAPT

SEQ ID NO: 13444 - protein, 12 aa, Severe acute respiratory syndrome-related coronavirus
  REGION 1..12: note = Table B: HLA-DRB1*04:03L HLA-DQA1*01:02-B1*06:02L HLA-DQA1*05:05-B1*03:01L
  source 1..12: note = Severe acute respiratory syndrome coronavirus 2
PLSAPTLVPQEH

SEQ ID NO: 13445 - protein, 10 aa, Severe acute respiratory syndrome-related coronavirus
  REGION 1..10: note = Table B: HLA-DRB1*04:03L HLA-DRB1*04:02L HLA-DQA1*03:01-B1*03:02L HLA-DRB1*14:17L HLA-DQA1*02:01-B1*03:03L
  source 1..10: note = Severe acute respiratory syndrome coronavirus 2
YVRITGLYPT

SEQ ID NO: 13446 - protein, 13 aa, Severe acute respiratory syndrome-related coronavirus
  REGION 1..13: note = Table B: HLA-DRB1*04:03L HLA-DRB1*01:02L HLA-DQA1*05:05-B1*03:19L HLA-DRB1*10:01L HLA-DRB1*16:01L HLA-DRB1*15:03L
  source 1..13: note = Severe acute respiratory syndrome coronavirus 2
VRITGLYPTLNIS

SEQ ID NO: 13447 - protein, 10 aa, Severe acute respiratory syndrome-related coronavirus
  REGION 1..10: note = Table B: HLA-DRB1*04:03L HLA-DRB1*04:05L HLA-DQA1*01-B1*05L HLA-DQA1*03:01-B1*03:02L HLA-DRB1*14:17L HLA-DQA1*02:01-B1*03:03L
  source 1..10: note = Severe acute respiratory syndrome coronavirus 2
LYPTLNISDE

SEQ ID NO: 13448 - protein, 10 aa, Severe acute respiratory syndrome-related coronavirus
  REGION 1..10: note = Table B: HLA-DRB1*04:03L
  source 1..10: note = Severe acute respiratory syndrome coronavirus 2
LNISDEFSSN

SEQ ID NO: 13449 - protein, 11 aa, Severe acute respiratory syndrome-related coronavirus
  REGION 1..11: note = Table B: HLA-DRB1*04:03L HLA-DRB1*13:02L HLA-DRB1*04:05L HLA-DRB1*14:17L
  source 1..11: note = Severe acute respiratory syndrome coronavirus 2
DEFSSNVANYQ

SEQ ID NO: 13450 - protein, 10 aa, Severe acute respiratory syndrome-related coronavirus
  REGION 1..10: note = Table B: HLA-DRB1*04:03L HLA-DRB1*04:02L HLA-DRB1*14:01L HLA-DQA1*01-B1*05L HLA-DQA1*03:01-B1*03:02L HLA-DRB1*14:17L HLA-DQA1*02:01-B1*03:03L
  source 1..10: note = Severe acute respiratory syndrome coronavirus 2
VANYQKVGMQ

SEQ ID NO: 13451 - protein, 13 aa, Severe acute respiratory syndrome-related coronavirus
  REGION 1..13: note = Table B: HLA-DRB1*04:03L HLA-DRB1*04:02L HLA-DQA1*01:02-B1*06:02L HLA-DPA1*03:01-B1*105:01L HLA-DQA1*03:01-B1*03:02L HLA-DRB1*14:17L HLA-DRB1*16:01L HLA-DQA1*01:03-B1*06:01L HLA-DQA1*02:01-B1*03:03L
  source 1..13: note = Severe acute respiratory syndrome coronavirus 2
VGMQKYSTLQGPP

SEQ ID NO: 13452 - protein, 10 aa, Severe acute respiratory syndrome-related coronavirus
  REGION 1..10: note = Table B: HLA-DRB1*04:03L
  source 1..10: note = Severe acute respiratory syndrome coronavirus 2
KYSTLQGPPG

SEQ ID NO: 13453 - protein, 11 aa, Severe acute respiratory syndrome-related coronavirus
  REGION 1..11: note = Table B: HLA-DRB1*04:03L HLA-DRB1*01:03L HLA-DRB1*01:02L HLA-DRB1*14:17L HLA-DRB1*16:01L HLA-DRB1*04:08L
  source 1..11: note = Severe acute respiratory syndrome coronavirus 2
YSTLQGPPGTG

SEQ ID NO: 13454 - protein, 10 aa, Severe acute respiratory syndrome-related coronavirus
  REGION 1..10: note = Table B: HLA-DRB1*04:03L HLA-DRB1*13:03L HLA-DRB1*01:03L HLA-DRB1*04:02L HLA-DRB4*03:01NL HLA-DQA1*03:01-B1*03:02L HLA-DRB1*14:17L
  source 1..10: note = Severe acute respiratory syndrome coronavirus 2
QGPPGTGKSH

SEQ ID NO: 13455 - protein, 13 aa, Severe acute respiratory syndrome-related coronavirus
  REGION 1..13: note = Table B: HLA-DRB1*04:03L HLA-DPA1*01:02-B1*04:01L
  source 1..13: note = Severe acute respiratory syndrome coronavirus 2
SHFAIGLALYYPS

SEQ ID NO: 13456 - protein, 10 aa, Severe acute respiratory syndrome-related coronavirus
  REGION 1..10: note = Table B: HLA-DRB1*04:03L
  source 1..10: note = Severe acute respiratory syndrome coronavirus 2
IVYTACSHAA

SEQ ID NO: 13457 - protein, 10 aa, Severe acute respiratory syndrome-related coronavirus
  REGION 1..10: note = Table B: HLA-DRB1*04:03L HLA-DRB1*01:03L HLA-DRB1*04:02L HLA-DRB1*04:05L HLA-DRB1*01:02L HLA-DRB1*08:01L HLA-DRB1*12:01L HLA-DQA1*03:01-B1*03:02L HLA-DRB1*14:17L HLA-DPA1*01:02-B1*04:01L HLA-DRB1*16:01L HLA-DRB1*04:08L
  REGION 1..10: note = CONT. FROM ABOVE: HLA-DQA1*02:01-B1*03:03L HLA-DRB1*15:03L
  source 1..10: note = Severe acute respiratory syndrome coronavirus 2
KALKYLPIDK

SEQ ID NO: 13458 - protein, 11 aa, Severe acute respiratory syndrome-related coronavirus
  REGION 1..11: note = Table B: HLA-DRB1*04:03L HLA-DRB1*01:03L HLA-DRB1*08:77L HLA-DPA1*01:03-B1*03:01L HLA-DPA1*03:01-B1*04:02L HLA-DRB1*14:01L HLA-DRB1*14:02L HLA-DQA1*01-B1*05L HLA-DRB4*01:01L HLA-DPA1*01:03-B1*04:01L
  REGION 1..11: note = CONT. FROM ABOVE: HLA-DQA1*05:05-B1*03:116L HLA-DPA1*01:03-B1*04 :02L HLA-DRB1*12:01L HLA-DPA1*02:01-B1*13:01L HLA-DPA1*01:03-B1* 104:01L HLA-DQA1*05:05-B1*03:01L HLA-DPA1*01:02-B1*04:01L HLA-DR B1*16:01L
  source 1..11: note = Severe acute respiratory syndrome coronavirus 2
KVNSTLEQYVF

SEQ ID NO: 13459 - protein, 12 aa, Severe acute respiratory syndrome-related coronavirus
  REGION 1..12: note = Table B: HLA-DRB1*04:03L HLA-DQA1*01:02-B1*06:02L HLA-DPA1*03:01-B1*105:01L HLA-DQA1*01:03-B1*06:01L
  source 1..12: note = Severe acute respiratory syndrome coronavirus 2
QYVFCTVNALPE

SEQ ID NO: 13460 - protein, 12 aa, Severe acute respiratory syndrome-related coronavirus
  REGION 1..12: note = Table B: HLA-DRB1*04:03L HLA-DQA1*01:02-B1*06:02L HLA-DPA1*03:01-B1*105:01L HLA-DQA1*05:05-B1*03:01L HLA-DQA1*01:03-B1*06:01L
  source 1..12: note = Severe acute respiratory syndrome coronavirus 2
YVFCTVNALPET

SEQ ID NO: 13461 - protein, 11 aa, Severe acute respiratory syndrome-related coronavirus
  REGION 1..11: note = Table B: HLA-DRB1*04:03L HLA-DQA1*02:01-B1*03:03L
  source 1..11: note = Severe acute respiratory syndrome coronavirus 2
TVNALPETTAD

SEQ ID NO: 13462 - protein, 11 aa, Severe acute respiratory syndrome-related coronavirus
  REGION 1..11: note = Table B: HLA-DRB1*04:03L HLA-DRB1*12:01L HLA-DRB1*16:01L
  source 1..11: note = Severe acute respiratory syndrome coronavirus 2
DIVVFDEISMA

SEQ ID NO: 13463 - protein, 11 aa, Severe acute respiratory syndrome-related coronavirus
  REGION 1..11: note = Table B: HLA-DRB1*04:03L HLA-DRB1*14:17L
  source 1..11: note = Severe acute respiratory syndrome coronavirus 2
IVVFDEISMAT

SEQ ID NO: 13464 - protein, 11 aa, Severe acute respiratory syndrome-related coronavirus
  REGION 1..11: note = Table B: HLA-DRB1*04:03L HLA-DRB1*04:02L HLA-DQA1*01-B1*05L HLA-DQA1*05:01-B1*02:01L HLA-DQA1*03:01-B1*03:02L HLA-DRB1*14:17L HLA-DQA1*02:01-B1*03:03L
  source 1..11: note = Severe acute respiratory syndrome coronavirus 2
VVFDEISMATN

SEQ ID NO: 13465 - protein, 11 aa, Severe acute respiratory syndrome-related coronavirus
  REGION 1..11: note = Table B: HLA-DRB1*04:03L HLA-DQA1*03:01-B1*03:02L HLA-DRB1*14:17L
  source 1..11: note = Severe acute respiratory syndrome coronavirus 2
FDEISMATNYD

SEQ ID NO: 13466 - protein, 10 aa, Severe acute respiratory syndrome-related coronavirus
  REGION 1..10: note = Table B: HLA-DRB1*04:03L HLA-DRB1*14:17L
  source 1..10: note = Severe acute respiratory syndrome coronavirus 2
ISMATNYDLS

SEQ ID NO: 13467 - protein, 10 aa, Severe acute respiratory syndrome-related coronavirus
  REGION 1..10: note = Table B: HLA-DRB1*04:03L HLA-DRB1*13:02L HLA-DRB1*13:03L HLA-DRB1*01:03L HLA-DRB1*04:02L HLA-DRB4*03:01NL HLA-DRB1*08:01L HLA-DRB5*01:01L HLA-DPA1*01:03-B1*04:02L HLA-DRB1*12:01L HLA-DQA1*03:01-B1*03:02L HLA-DQA1*05:05-B1*03:01L
  REGION 1..10: note = CONT. FROM ABOVE: HLA-DRB1*14:17L HLA-DRB1*16:01L HLA-DQA1*01:03 -B1*06:01L HLA-DQA1*02:01-B1*03:03L
  source 1..10: note = Severe acute respiratory syndrome coronavirus 2
NYDLSVVNAR

SEQ ID NO: 13468 - protein, 11 aa, Severe acute respiratory syndrome-related coronavirus
  REGION 1..11: note = Table B: HLA-DRB1*04:03L HLA-DRB1*04:02L HLA-DQA1*01-B1*05L HLA-DRB1*14:17L HLA-DRB1*16:01L
  source 1..11: note = Severe acute respiratory syndrome coronavirus 2
YVYIGDPAQLP

SEQ ID NO: 13469 - protein, 11 aa, Severe acute respiratory syndrome-related coronavirus
  REGION 1..11: note = Table B: HLA-DRB1*04:03L HLA-DRB1*04:02L HLA-DQA1*03:01-B1*03:02L HLA-DRB1*14:17L
  source 1..11: note = Severe acute respiratory syndrome coronavirus 2
TLLTKGTLEPE

SEQ ID NO: 13470 - protein, 18 aa, Severe acute respiratory syndrome-related coronavirus
  REGION 1..18: note = Table B: HLA-DRB1*04:03L HLA-DPA1*01:03-B1*03:01L HLA-DRB1*11:02L HLA-DPA1*01:03-B1*04:02L HLA-DRB3*01:01L HLA-DPA1*01:03-B1*02:01L HLA-DPA1*01:03-B1*104:01L HLA-DRB1*08:02L HLA-DRB1*08:03L
  source 1..18: note = Severe acute respiratory syndrome coronavirus 2
EPEYFNSVCRLMKTIGPD

SEQ ID NO: 13471 - protein, 12 aa, Severe acute respiratory syndrome-related coronavirus
  REGION 1..12: note = Table B: HLA-DRB1*04:03L HLA-DQA1*01-B1*05L HLA-DRB1*16:01L
  source 1..12: note = Severe acute respiratory syndrome coronavirus 2
DTVSALVYDNKL

SEQ ID NO: 13472 - protein, 10 aa, Severe acute respiratory syndrome-related coronavirus
  REGION 1..10: note = Table B: HLA-DRB1*04:03L HLA-DRB1*04:02L HLA-DRB1*14:01L HLA-DRB1*14:17L HLA-DRB1*16:01L
  source 1..10: note = Severe acute respiratory syndrome coronavirus 2
ALVYDNKLKA

SEQ ID NO: 13473 - protein, 10 aa, Severe acute respiratory syndrome-related coronavirus
  REGION 1..10: note = Table B: HLA-DRB1*04:03L HLA-DRB1*13:02L HLA-DRB1*13:03L HLA-DRB1*01:03L HLA-DRB1*04:02L HLA-DRB1*04:05L HLA-DRB1*01:02L HLA-DRB4*03:01NL HLA-DRB1*14:01L HLA-DRB1*11:04L HLA-DRB1*08:01L HLA-DRB1*11:01L HLA-DRB1*12:01L HLA-DRB3*01:01L
  REGION 1..10: note = CONT. FROM ABOVE: HLA-DQA1*03:01-B1*03:02L HLA-DRB1*14:54L HLA-D RB1*14:17L HLA-DRB1*16:01L HLA-DRB1*04:08L HLA-DRB1*15:03L
  source 1..10: note = Severe acute respiratory syndrome coronavirus 2
LVYDNKLKAH

SEQ ID NO: 13474 - protein, 13 aa, Severe acute respiratory syndrome-related coronavirus
  REGION 1..13: note = Table B: HLA-DRB1*04:03L HLA-DRB1*01:03L HLA-DRB1*04:02L HLA-DRB1*04:04L HLA-DRB1*04:05L HLA-DQA1*01:02-B1*06:02L HLA-DRB1*01:02L HLA-DRB1*14:01L HLA-DRB1*08:01L HLA-DQA1*01-B1*05L HLA-DRB1*04:10L HLA-DRB1*12:01L
  REGION 1..13: note = CONT. FROM ABOVE: HLA-DQA1*03:01-B1*03:02L HLA-DRB1*14:17L HLA-D RB1*16:01L HLA-DRB1*04:08L HLA-DQA1*02:01-B1*03:03L HLA-DRB1*15: 03L
  source 1..13: note = Severe acute respiratory syndrome coronavirus 2
DNKLKAHKDKSAQ

SEQ ID NO: 13475 - protein, 11 aa, Severe acute respiratory syndrome-related coronavirus
  REGION 1..11: note = Table B: HLA-DRB1*04:03L HLA-DRB1*13:02L HLA-DRB1*13:03L HLA-DRB1*01:03L HLA-DRB1*04:02L HLA-DRB1*04:05L HLA-DRB1*01:02L HLA-DRB4*03:01NL HLA-DPA1*01:03-B1*03:01L HLA-DRB1*14:01L HLA-DQA1*01:01-B1*05:01L HLA-DRB1*08:01L HLA-DRB4*02:01NL
  REGION 1..11: note = CONT. FROM ABOVE: HLA-DQA1*05:05-B1*03:116L HLA-DRB1*04:10L HLA- DPA1*01:03-B1*04:02L HLA-DRB1*12:01L HLA-DRB1*14:54L HLA-DRB1*14 :17L HLA-DPA1*01:02-B1*04:01L HLA-DRB1*16:01L HLA-DRB1*04:08L HL A-DRB1*15:03L
  source 1..11: note = Severe acute respiratory syndrome coronavirus 2
VSSAINRPQIG

SEQ ID NO: 13476 - protein, 10 aa, Severe acute respiratory syndrome-related coronavirus
  REGION 1..10: note = Table B: HLA-DRB1*04:03L HLA-DRB1*14:01L HLA-DQA1*03:01-B1*03:02L HLA-DQA1*02:01-B1*03:03L
  source 1..10: note = Severe acute respiratory syndrome coronavirus 2
AINRPQIGVV

SEQ ID NO: 13477 - protein, 13 aa, Severe acute respiratory syndrome-related coronavirus
  REGION 1..13: note = Table B: HLA-DRB1*04:03L HLA-DRB1*04:02L HLA-DRB1*04:05L HLA-DRB1*12:01L HLA-DRB1*04:08L
  source 1..13: note = Severe acute respiratory syndrome coronavirus 2
RPQIGVVREFLTR

SEQ ID NO: 13478 - protein, 13 aa, Severe acute respiratory syndrome-related coronavirus
  REGION 1..13: note = Table B: HLA-DRB1*04:03L HLA-DRB1*01:03L HLA-DRB1*04:02L HLA-DRB1*04:05L HLA-DQA1*01:02-B1*06:02L HLA-DRB1*01:02L HLA-DRB1*14:01L HLA-DRB1*08:01L HLA-DRB1*12:01L HLA-DQA1*03:01-B1*03:02L HLA-DRB1*14:17L HLA-DRB1*16:01L
  REGION 1..13: note = CONT. FROM ABOVE: HLA-DRB1*04:08L HLA-DQA1*02:01-B1*03:03L
  source 1..13: note = Severe acute respiratory syndrome coronavirus 2
IGVVREFLTRNPA

SEQ ID NO: 13479 - protein, 10 aa, Severe acute respiratory syndrome-related coronavirus
  REGION 1..10: note = Table B: HLA-DRB1*04:03L HLA-DRB1*13:03L HLA-DRB1*01:03L HLA-DRB1*04:02L HLA-DRB1*08:01L HLA-DQA1*03:01-B1*03:02L HLA-DRB1*14:17L HLA-DRB1*04:08L HLA-DQA1*02:01-B1*03:03L
  source 1..10: note = Severe acute respiratory syndrome coronavirus 2
EFLTRNPAWR

SEQ ID NO: 13480 - protein, 10 aa, Severe acute respiratory syndrome-related coronavirus
  REGION 1..10: note = Table B: HLA-DRB1*04:03L HLA-DQA1*01-B1*05L HLA-DQA1*03:01-B1*03:02L HLA-DRB1*14:17L
  source 1..10: note = Severe acute respiratory syndrome coronavirus 2
VFISPYNSQN

SEQ ID NO: 13481 - protein, 10 aa, Severe acute respiratory syndrome-related coronavirus
  REGION 1..10: note = Table B: HLA-DRB1*04:03L HLA-DQA1*01-B1*05L HLA-DRB1*16:01L
  source 1..10: note = Severe acute respiratory syndrome coronavirus 2
ISPYNSQNAV

SEQ ID NO: 13482 - protein, 11 aa, Severe acute respiratory syndrome-related coronavirus
  REGION 1..11: note = Table B: HLA-DRB1*04:03L HLA-DRB1*04:02L HLA-DRB4*03:01NL HLA-DRB1*14:54L HLA-DRB1*14:17L
  source 1..11: note = Severe acute respiratory syndrome coronavirus 2
SPYNSQNAVAS

SEQ ID NO: 13483 - protein, 10 aa, Severe acute respiratory syndrome-related coronavirus
  REGION 1..10: note = Table B: HLA-DRB1*04:03L HLA-DRB1*13:03L HLA-DRB1*04:02L HLA-DRB4*03:01NL HLA-DRB1*12:01L HLA-DQA1*03:01-B1*03:02L HLA-DRB1*14:17L HLA-DRB1*16:01L
  source 1..10: note = Severe acute respiratory syndrome coronavirus 2
YNSQNAVASK

SEQ ID NO: 13484 - protein, 12 aa, Severe acute respiratory syndrome-related coronavirus
  REGION 1..12: note = Table B: HLA-DRB1*04:03L
  source 1..12: note = Severe acute respiratory syndrome coronavirus 2
LGLPTQTVDSSQ

SEQ ID NO: 13485 - protein, 11 aa, Severe acute respiratory syndrome-related coronavirus
  REGION 1..11: note = Table B: HLA-DRB1*04:03L HLA-DQA1*01-B1*05L HLA-DQA1*05:01-B1*02:01L HLA-DQA1*03:01-B1*03:02L HLA-DRB1*14:17L
  source 1..11: note = Severe acute respiratory syndrome coronavirus 2
LPTQTVDSSQG

SEQ ID NO: 13486 - protein, 11 aa, Severe acute respiratory syndrome-related coronavirus
  REGION 1..11: note = Table B: HLA-DRB1*04:03L HLA-DQA1*01-B1*05L HLA-DQA1*03:01-B1*03:02L
  source 1..11: note = Severe acute respiratory syndrome coronavirus 2
DYVIFTQTTET

SEQ ID NO: 13487 - protein, 11 aa, Severe acute respiratory syndrome-related coronavirus
  REGION 1..11: note = Table B: HLA-DRB1*04:03L HLA-DRB1*14:17L
  source 1..11: note = Severe acute respiratory syndrome coronavirus 2
YVIFTQTTETA

SEQ ID NO: 13488 - protein, 10 aa, Severe acute respiratory syndrome-related coronavirus
  REGION 1..10: note = Table B: HLA-DRB1*04:03L HLA-DRB1*13:03L HLA-DRB1*01:03L HLA-DRB1*04:02L HLA-DRB1*04:05L HLA-DRB4*03:01NL HLA-DQA1*01-B1*05L HLA-DQA1*05:01-B1*02:01L HLA-DRB1*04:10L HLA-DRB1*12:01L HLA-DQA1*03:01-B1*03:02L HLA-DRB1*14:54L
  REGION 1..10: note = CONT. FROM ABOVE: HLA-DRB1*14:17L HLA-DRB1*16:01L HLA-DRB1*04:08 L HLA-DQA1*02:01-B1*03:03L
  source 1..10: note = Severe acute respiratory syndrome coronavirus 2
IFTQTTETAH

SEQ ID NO: 13489 - protein, 13 aa, Severe acute respiratory syndrome-related coronavirus
  REGION 1..13: note = Table B: HLA-DRB1*04:03L HLA-DRB1*01:03L HLA-DRB1*01:02L HLA-DPA1*01:03-B1*03:01L HLA-DQA1*05:01-B1*02:01L HLA-DPA1*01:03-B1*04:02L HLA-DRB1*16:01L HLA-DRB1*04:08L
  source 1..13: note = Severe acute respiratory syndrome coronavirus 2
TQTTETAHSCNVN

SEQ ID NO: 13490 - protein, 12 aa, Severe acute respiratory syndrome-related coronavirus
  REGION 1..12: note = Table B: HLA-DRB1*04:03L HLA-DQA1*01:02-B1*06:02L
  source 1..12: note = Severe acute respiratory syndrome coronavirus 2
VGILCIMSDRDL

SEQ ID NO: 13491 - protein, 10 aa, Severe acute respiratory syndrome-related coronavirus
  REGION 1..10: note = Table B: HLA-DRB1*04:03L HLA-DRB1*13:03L HLA-DRB1*01:03L HLA-DRB1*04:02L HLA-DRB1*04:04L HLA-DRB1*04:05L HLA-DRB4*03:01NL HLA-DRB1*08:01L HLA-DQA1*01-B1*05L HLA-DRB1*04:10L HLA-DRB1*12:01L HLA-DQA1*03:01-B1*03:02L HLA-DRB1*14:54L
  REGION 1..10: note = CONT. FROM ABOVE: HLA-DRB1*14:17L HLA-DRB1*16:01L HLA-DRB1*04:08 L HLA-DQA1*02:01-B1*03:03L
  source 1..10: note = Severe acute respiratory syndrome coronavirus 2
IMSDRDLYDK

SEQ ID NO: 13492 - protein, 10 aa, Severe acute respiratory syndrome-related coronavirus
  REGION 1..10: note = Table B: HLA-DRB1*04:03L HLA-DRB1*04:02L HLA-DQA1*01-B1*05L HLA-DPA1*03:01-B1*105:01L HLA-DQA1*03:01-B1*03:02L HLA-DRB1*14:17L HLA-DPA1*01:02-B1*04:01L HLA-DQA1*01:03-B1*06:01L HLA-DQA1*02:01-B1*03:03L
  source 1..10: note = Severe acute respiratory syndrome coronavirus 2
LQFTSLEIPR

SEQ ID NO: 13493 - protein, 10 aa, Severe acute respiratory syndrome-related coronavirus
  REGION 1..10: note = Table B: HLA-DRB1*04:03L HLA-DRB1*04:02L HLA-DQA1*03:01-B1*03:02L HLA-DRB1*14:17L HLA-DQA1*02:01-B1*03:03L
  source 1..10: note = Severe acute respiratory syndrome coronavirus 2
RNVATLQAEN

SEQ ID NO: 13494 - protein, 10 aa, Severe acute respiratory syndrome-related coronavirus
  REGION 1..10: note = Table B: HLA-DRB1*04:03L HLA-DQA1*05:01-B1*02:01L HLA-DRB1*12:01L HLA-DQA1*03:01-B1*03:02L HLA-DQA1*01:03-B1*06:01L HLA-DQA1*02:01-B1*03:03L
  source 1..10: note = Severe acute respiratory syndrome coronavirus 2
VATLQAENVT

SEQ ID NO: 13495 - protein, 10 aa, Severe acute respiratory syndrome-related coronavirus
  REGION 1..10: note = Table B: HLA-DRB1*04:03L HLA-DRB1*14:17L
  source 1..10: note = Severe acute respiratory syndrome coronavirus 2
ATLQAENVTG

SEQ ID NO: 13496 - protein, 12 aa, Severe acute respiratory syndrome-related coronavirus
  REGION 1..12: note = Table B: HLA-DRB1*04:03L HLA-DRB1*01:02L HLA-DRB1*12:01L HLA-DQA1*05:05-B1*03:01L HLA-DRB1*14:17L
  source 1..12: note = Severe acute respiratory syndrome coronavirus 2
TLQAENVTGLFK

SEQ ID NO: 13497 - protein, 12 aa, Severe acute respiratory syndrome-related coronavirus
  REGION 1..12: note = Table B: HLA-DRB1*04:03L
  source 1..12: note = Severe acute respiratory syndrome coronavirus 2
LQAENVTGLFKD

SEQ ID NO: 13498 - protein, 13 aa, Severe acute respiratory syndrome-related coronavirus
  REGION 1..13: note = Table B: HLA-DRB1*04:03L HLA-DRB1*13:02L HLA-DRB1*13:03L HLA-DRB1*01:03L HLA-DRB1*04:02L HLA-DRB1*04:05L HLA-DRB1*01:02L HLA-DRB1*14:01L HLA-DRB1*08:01L HLA-DRB1*12:01L HLA-DRB3*01:01L HLA-DRB1*14:54L HLA-DRB1*14:17L HLA-DRB1*16:01L HLA-DRB1*04:08L
  source 1..13: note = Severe acute respiratory syndrome coronavirus 2
APTHLSVDTKFKT

SEQ ID NO: 13499 - protein, 10 aa, Severe acute respiratory syndrome-related coronavirus
  REGION 1..10: note = Table B: HLA-DRB1*04:03L HLA-DRB1*13:03L HLA-DRB1*01:03L HLA-DRB1*04:02L HLA-DQA1*03:01-B1*03:02L HLA-DRB1*14:17L HLA-DPA1*01:02-B1*04:01L HLA-DRB1*16:01L HLA-DQA1*02:01-B1*03:03L
  source 1..10: note = Severe acute respiratory syndrome coronavirus 2
SVDTKFKTEG

SEQ ID NO: 13500 - protein, 12 aa, Severe acute respiratory syndrome-related coronavirus
  REGION 1..12: note = Table B: HLA-DRB1*04:03L HLA-DPA1*03:01-B1*105:01L
  source 1..12: note = Severe acute respiratory syndrome coronavirus 2
LISMMGFKMNYQ

SEQ ID NO: 13501 - protein, 14 aa, Severe acute respiratory syndrome-related coronavirus
  REGION 1..14: note = Table B: HLA-DRB1*04:03L HLA-DRB1*01:02L HLA-DRB1*08:04L HLA-DRB1*04:08L HLA-DRB1*15:03L
  source 1..14: note = Severe acute respiratory syndrome coronavirus 2
ISMMGFKMNYQVNG

SEQ ID NO: 13502 - protein, 11 aa, Severe acute respiratory syndrome-related coronavirus
  REGION 1..11: note = Table B: HLA-DRB1*04:03L HLA-DRB1*04:02L HLA-DRB1*16:01L HLA-DRB1*15:03L
  source 1..11: note = Severe acute respiratory syndrome coronavirus 2
VNGYPNMFITR

SEQ ID NO: 13503 - protein, 13 aa, Severe acute respiratory syndrome-related coronavirus
  REGION 1..13: note = Table B: HLA-DRB1*04:03L HLA-DRB1*13:03L HLA-DRB1*04:02L HLA-DRB1*04:05L HLA-DRB4*03:01NL HLA-DRB1*08:77L HLA-DRB3*02:01L HLA-DPA1*01:03-B1*03:01L HLA-DRB1*11:03L HLA-DRB1*11:04L HLA-DRB1*14:02L HLA-DQA1*01:01-B1*05:01L
  REGION 1..13: note = CONT. FROM ABOVE: HLA-DQA1*05:05-B1*03:19L HLA-DPA1*01:03-B1*04: 01L HLA-DRB1*04:10L HLA-DRB1*09:01L HLA-DRB1*12:02L HLA-DRB3*01: 01L HLA-DPA1*02:01-B1*13:01L HLA-DRB1*14:54L HLA-DQA1*05:05-B1*0 3:01L HLA-DRB1*14:17L HLA-DRB1*08:03L
  source 1..13: note = Severe acute respiratory syndrome coronavirus 2
YPNMFITREEAIR

SEQ ID NO: 13504 - protein, 12 aa, Severe acute respiratory syndrome-related coronavirus
  REGION 1..12: note = Table B: HLA-DRB1*04:03L HLA-DRB1*04:02L HLA-DRB1*01:02L HLA-DRB1*14:01L HLA-DRB1*08:01L HLA-DRB1*14:17L
  source 1..12: note = Severe acute respiratory syndrome coronavirus 2
EEAIRHVRAWIG

SEQ ID NO: 13505 - protein, 12 aa, Severe acute respiratory syndrome-related coronavirus
  REGION 1..12: note = Table B: HLA-DRB1*04:03L HLA-DRB1*04:05L HLA-DQA1*01:02-B1*06:02L HLA-DRB1*01:02L HLA-DRB1*12:01L HLA-DPA1*02:01-B1*13:01L HLA-DRB1*16:01L HLA-DRB1*04:08L
  source 1..12: note = Severe acute respiratory syndrome coronavirus 2
RHVRAWIGFDVE

SEQ ID NO: 13506 - protein, 12 aa, Severe acute respiratory syndrome-related coronavirus
  REGION 1..12: note = Table B: HLA-DRB1*04:03L HLA-DRB1*04:02L HLA-DQA1*01:02-B1*06:02L HLA-DRB1*01:02L HLA-DRB1*12:01L HLA-DRB1*16:01L HLA-DQA1*01:03-B1*06:01L HLA-DQA1*02:01-B1*03:03L HLA-DRB1*15:01L
  source 1..12: note = Severe acute respiratory syndrome coronavirus 2
HVRAWIGFDVEG

SEQ ID NO: 13507 - protein, 14 aa, Severe acute respiratory syndrome-related coronavirus
  REGION 1..14: note = Table B: HLA-DRB1*04:03L HLA-DRB1*01:03L HLA-DRB1*04:05L HLA-DRB1*01:02L HLA-DQA1*01:01-B1*05:01L HLA-DPA1*02:01-B1*13:01L HLA-DRB1*16:01L HLA-DRB1*15:03L
  source 1..14: note = Severe acute respiratory syndrome coronavirus 2
FDVEGCHATREAVG

SEQ ID NO: 13508 - protein, 13 aa, Severe acute respiratory syndrome-related coronavirus
  REGION 1..13: note = Table B: HLA-DRB1*04:03L
  source 1..13: note = Severe acute respiratory syndrome coronavirus 2
STGVNLVAVPTGY

SEQ ID NO: 13509 - protein, 12 aa, Severe acute respiratory syndrome-related coronavirus
  REGION 1..12: note = Table B: HLA-DRB1*04:03L HLA-DRB1*14:17L
  source 1..12: note = Severe acute respiratory syndrome coronavirus 2
GVNLVAVPTGYV

SEQ ID NO: 13510 - protein, 10 aa, Severe acute respiratory syndrome-related coronavirus
  REGION 1..10: note = Table B: HLA-DRB1*04:03L HLA-DRB1*04:02L HLA-DQA1*05:01-B1*02:01L HLA-DQA1*03:01-B1*03:02L HLA-DRB1*14:17L HLA-DQA1*02:01-B1*03:03L
  source 1..10: note = Severe acute respiratory syndrome coronavirus 2
LVAVPTGYVD

SEQ ID NO: 13511 - protein, 10 aa, Severe acute respiratory syndrome-related coronavirus
  REGION 1..10: note = Table B: HLA-DRB1*04:03L HLA-DQA1*01-B1*05L HLA-DQA1*03:01-B1*03:02L
  source 1..10: note = Severe acute respiratory syndrome coronavirus 2
GYVDTPNNTD

SEQ ID NO: 13512 - protein, 11 aa, Severe acute respiratory syndrome-related coronavirus
  REGION 1..11: note = Table B: HLA-DRB1*04:03L HLA-DRB1*04:02L HLA-DRB1*14:17L
  source 1..11: note = Severe acute respiratory syndrome coronavirus 2
FSRVSAKPPPG

SEQ ID NO: 13513 - protein, 13 aa, Severe acute respiratory syndrome-related coronavirus
  REGION 1..13: note = Table B: HLA-DRB1*04:03L HLA-DRB1*13:02L HLA-DRB1*01:01L HLA-DRB1*14:01L HLA-DRB1*08:01L HLA-DRB1*11:01L HLA-DRB3*01:01L HLA-DRB1*07:01L
  source 1..13: note = Severe acute respiratory syndrome coronavirus 2
DQFKHLIPLMYKG

SEQ ID NO: 13514 - protein, 13 aa, Severe acute respiratory syndrome-related coronavirus
  REGION 1..13: note = Table B: HLA-DRB1*04:03L HLA-DRB1*01:03L HLA-DRB1*04:02L HLA-DRB1*04:04L HLA-DRB1*04:05L HLA-DQA1*01:02-B1*06:02L HLA-DRB1*01:02L HLA-DRB1*08:04L HLA-DPA1*01:03-B1*03:01L HLA-DPA1*03:01-B1*04:02L HLA-DRB1*14:01L HLA-DRB1*08:01L
  REGION 1..13: note = CONT. FROM ABOVE: HLA-DRB1*04:10L HLA-DRB1*12:01L HLA-DPA1*02:01 -B1*13:01L HLA-DPA1*03:01-B1*105:01L HLA-DQA1*03:01-B1*03:02L HL A-DRB1*14:17L HLA-DPA1*01:02-B1*04:01L HLA-DRB1*16:01L HLA-DRB1* 04:08L HLA-DQA1*02:01-B1*03:03L HLA-DRB1*15:03L
  source 1..13: note = Severe acute respiratory syndrome coronavirus 2
VVRIKIVQMLSDT

SEQ ID NO: 13515 - protein, 10 aa, Severe acute respiratory syndrome-related coronavirus
  REGION 1..10: note = Table B: HLA-DRB1*04:03L HLA-DRB1*04:02L HLA-DRB1*01:02L HLA-DQA1*01-B1*05L HLA-DQA1*05:01-B1*02:01L HLA-DRB1*12:01L HLA-DPA1*03:01-B1*105:01L HLA-DQA1*03:01-B1*03:02L HLA-DRB1*14:17L HLA-DRB1*16:01L HLA-DQA1*01:03-B1*06:01L
  REGION 1..10: note = CONT. FROM ABOVE: HLA-DQA1*02:01-B1*03:03L HLA-DRB1*15:03L
  source 1..10: note = Severe acute respiratory syndrome coronavirus 2
IVQMLSDTLK

SEQ ID NO: 13516 - protein, 10 aa, Severe acute respiratory syndrome-related coronavirus
  REGION 1..10: note = Table B: HLA-DRB1*04:03L HLA-DRB1*14:17L
  source 1..10: note = Severe acute respiratory syndrome coronavirus 2
VQMLSDTLKN

SEQ ID NO: 13517 - protein, 11 aa, Severe acute respiratory syndrome-related coronavirus
  REGION 1..11: note = Table B: HLA-DRB1*04:03L HLA-DQA1*01-B1*05L HLA-DQA1*03:01-B1*03:02L
  source 1..11: note = Severe acute respiratory syndrome coronavirus 2
DTLKNLSDRVV

SEQ ID NO: 13518 - protein, 11 aa, Severe acute respiratory syndrome-related coronavirus
  REGION 1..11: note = Table B: HLA-DRB1*04:03L HLA-DRB1*01:03L HLA-DQA1*01:02-B1*06:02L HLA-DRB1*01:02L HLA-DPA1*01:03-B1*03:01L HLA-DRB1*04:08L
  source 1..11: note = Severe acute respiratory syndrome coronavirus 2
VLWAHGFELTS

SEQ ID NO: 13519 - protein, 11 aa, Severe acute respiratory syndrome-related coronavirus
  REGION 1..11: note = Table B: HLA-DRB1*04:03L
  source 1..11: note = Severe acute respiratory syndrome coronavirus 2
PFMIDVQQWGF

SEQ ID NO: 13520 - protein, 12 aa, Severe acute respiratory syndrome-related coronavirus
  REGION 1..12: note = Table B: HLA-DRB1*04:03L HLA-DRB1*04:02L HLA-DRB1*04:05L HLA-DRB4*03:01NL HLA-DRB1*04:10L HLA-DRB1*14:17L HLA-DRB1*16:01L
  source 1..12: note = Severe acute respiratory syndrome coronavirus 2
VQQWGFTGNLQS

SEQ ID NO: 13521 - protein, 12 aa, Severe acute respiratory syndrome-related coronavirus
  REGION 1..12: note = Table B: HLA-DRB1*04:03L HLA-DRB1*13:02L HLA-DRB1*01:03L HLA-DRB1*04:02L HLA-DRB1*04:05L HLA-DRB1*01:02L HLA-DRB3*02:01L HLA-DPA1*01:03-B1*03:01L HLA-DPA1*03:01-B1*04:02L HLA-DRB1*14:01L HLA-DQA1*01:01-B1*05:01L HLA-DRB1*08:01L
  REGION 1..12: note = CONT. FROM ABOVE: HLA-DPA1*01:03-B1*04:01L HLA-DPA1*01:03-B1*04: 02L HLA-DRB1*12:01L HLA-DPA1*02:01-B1*13:01L HLA-DPA1*01:02-B1*0 4:01L HLA-DRB1*04:08L HLA-DRB1*15:03L
  source 1..12: note = Severe acute respiratory syndrome coronavirus 2
RVDWTIEYPIIG

SEQ ID NO: 13522 - protein, 13 aa, Severe acute respiratory syndrome-related coronavirus
  REGION 1..13: note = Table B: HLA-DRB1*04:03L HLA-DRB1*01:03L HLA-DRB1*04:02L HLA-DRB1*04:05L HLA-DPA1*01:03-B1*03:01L HLA-DPA1*03:01-B1*04:02L HLA-DRB1*14:02L HLA-DPA1*01:03-B1*04:02L HLA-DRB1*12:01L
  REGION 1..13: note = CONT. FROM ABOVE: HLA-DPA1*02:01-B1*13:01L HLA-DRB1*14:17L HLA-D RB1*10:01L HLA-DRB1*04:08L HLA-DRB1*15:03L
  source 1..13: note = Severe acute respiratory syndrome coronavirus 2
VDWTIEYPIIGDE

SEQ ID NO: 13523 - protein, 11 aa, Severe acute respiratory syndrome-related coronavirus
  REGION 1..11: note = Table B: HLA-DRB1*04:03L HLA-DRB1*04:02L HLA-DRB1*04:05L HLA-DRB4*03:01NL HLA-DQA1*01:01-B1*05:01L HLA-DQA1*05:05-B1*03:01L HLA-DRB1*14:17L
  source 1..11: note = Severe acute respiratory syndrome coronavirus 2
IEYPIIGDELK

SEQ ID NO: 13524 - protein, 11 aa, Severe acute respiratory syndrome-related coronavirus
  REGION 1..11: note = Table B: HLA-DRB1*04:03L HLA-DQA1*05:01-B1*02:01L HLA-DQA1*03:01-B1*03:02L HLA-DQA1*02:01-B1*03:03L
  source 1..11: note = Severe acute respiratory syndrome coronavirus 2
YPIIGDELKIN

SEQ ID NO: 13525 - protein, 12 aa, Severe acute respiratory syndrome-related coronavirus
  REGION 1..12: note = Table B: HLA-DRB1*04:03L HLA-DRB1*01:03L HLA-DRB1*04:02L HLA-DRB1*04:05L HLA-DQA1*01:02-B1*06:02L HLA-DRB1*14:01L HLA-DQA1*05:01-B1*02:01L HLA-DPA1*03:01-B1*105:01L HLA-DQA1*03:01-B1*03:02L HLA-DRB1*14:17L
  REGION 1..12: note = CONT. FROM ABOVE: HLA-DPA1*01:02-B1*04:01L HLA-DRB1*16:01L HLA-D QA1*01:03-B1*06:01L HLA-DQA1*02:01-B1*03:03L
  source 1..12: note = Severe acute respiratory syndrome coronavirus 2
PIIGDELKINAA

SEQ ID NO: 13526 - protein, 12 aa, Severe acute respiratory syndrome-related coronavirus
  REGION 1..12: note = Table B: HLA-DRB1*04:03L HLA-DRB1*13:02L HLA-DRB1*13:03L HLA-DRB1*08:04L HLA-DPA1*01:03-B1*03:01L HLA-DRB1*11:04L HLA-DRB1*08:01L HLA-DRB3*01:01L HLA-DRB1*14:54L HLA-DPA1*01:03-B1*02:01L HLA-DRB1*04:08L
  source 1..12: note = Severe acute respiratory syndrome coronavirus 2
KAALLADKFPVL

SEQ ID NO: 13527 - protein, 13 aa, Severe acute respiratory syndrome-related coronavirus
  REGION 1..13: note = Table B: HLA-DRB1*04:03L HLA-DRB1*13:03L HLA-DRB1*04:02L HLA-DRB1*04:04L HLA-DRB1*04:05L
  source 1..13: note = Severe acute respiratory syndrome coronavirus 2
AALLADKFPVLHD

SEQ ID NO: 13528 - protein, 10 aa, Severe acute respiratory syndrome-related coronavirus
  REGION 1..10: note = Table B: HLA-DRB1*04:03L HLA-DRB1*13:03L HLA-DRB1*01:03L HLA-DRB1*04:02L HLA-DQA1*03:01-B1*03:02L HLA-DRB1*14:17L HLA-DRB1*16:01L HLA-DQA1*02:01-B1*03:03L
  source 1..10: note = Severe acute respiratory syndrome coronavirus 2
PVLHDIGNPK

SEQ ID NO: 13529 - protein, 10 aa, Severe acute respiratory syndrome-related coronavirus
  REGION 1..10: note = Table B: HLA-DRB1*04:03L HLA-DRB1*04:02L HLA-DQA1*03:01-B1*03:02L HLA-DRB1*14:17L HLA-DQA1*02:01-B1*03:03L
  source 1..10: note = Severe acute respiratory syndrome coronavirus 2
HDIGNPKAIK

SEQ ID NO: 13530 - protein, 13 aa, Severe acute respiratory syndrome-related coronavirus
  REGION 1..13: note = Table B: HLA-DRB1*04:03L HLA-DRB1*01:03L HLA-DRB1*04:02L HLA-DQA1*01:02-B1*06:02L HLA-DRB1*12:01L HLA-DPA1*03:01-B1*105:01L HLA-DQA1*01:03-B1*06:01L HLA-DRB1*04:08L HLA-DQA1*02:01-B1*03:03L
  source 1..13: note = Severe acute respiratory syndrome coronavirus 2
DVEWKFYDAQPCS

SEQ ID NO: 13531 - protein, 10 aa, Severe acute respiratory syndrome-related coronavirus
  REGION 1..10: note = Table B: HLA-DRB1*04:03L HLA-DRB1*13:03L HLA-DRB1*01:03L HLA-DRB1*04:02L HLA-DRB1*04:05L HLA-DRB4*03:01NL HLA-DQA1*01-B1*05L HLA-DRB1*04:10L HLA-DPA1*03:01-B1*105:01L HLA-DQA1*03:01-B1*03:02L HLA-DRB1*14:17L HLA-DRB1*16:01L
  REGION 1..10: note = CONT. FROM ABOVE: HLA-DRB1*04:08L HLA-DQA1*02:01-B1*03:03L
  source 1..10: note = Severe acute respiratory syndrome coronavirus 2
FYDAQPCSDK

SEQ ID NO: 13532 - protein, 14 aa, Severe acute respiratory syndrome-related coronavirus
  REGION 1..14: note = Table B: HLA-DRB1*04:03L HLA-DRB1*13:02L HLA-DRB1*14:01L HLA-DRB1*08:01L HLA-DRB1*11:01L HLA-DPA1*01:03-B1*02:01L HLA-DRB1*08:03L
  source 1..14: note = Severe acute respiratory syndrome coronavirus 2
DKAYKIEELFYSYA

SEQ ID NO: 13533 - protein, 17 aa, Severe acute respiratory syndrome-related coronavirus
  REGION 1..17: note = Table B: HLA-DRB1*04:03L HLA-DRB1*13:02L HLA-DRB1*04:04L HLA-DRB1*08:04L HLA-DRB1*11:04L HLA-DRB1*08:01L HLA-DRB3*01:01L
  source 1..17: note = Severe acute respiratory syndrome coronavirus 2
YPANSIVCRFDTRVLSN

SEQ ID NO: 13534 - protein, 10 aa, Severe acute respiratory syndrome-related coronavirus
  REGION 1..10: note = Table B: HLA-DRB1*04:03L HLA-DRB1*04:02L HLA-DRB1*14:17L
  source 1..10: note = Severe acute respiratory syndrome coronavirus 2
RVLSNLNLPG

SEQ ID NO: 13535 - protein, 11 aa, Severe acute respiratory syndrome-related coronavirus
  REGION 1..11: note = Table B: HLA-DRB1*04:03L HLA-DRB1*13:03L HLA-DRB1*01:03L HLA-DRB1*04:02L HLA-DQA1*03:01-B1*03:02L HLA-DRB1*14:17L HLA-DPA1*01:02-B1*04:01L HLA-DRB1*16:01L HLA-DRB1*04:08L
  source 1..11: note = Severe acute respiratory syndrome coronavirus 2
YVNKHAFHTPA

SEQ ID NO: 13536 - protein, 11 aa, Severe acute respiratory syndrome-related coronavirus
  REGION 1..11: note = Table B: HLA-DRB1*04:03L HLA-DRB1*13:02L HLA-DRB1*13:03L HLA-DRB1*01:03L HLA-DRB1*04:05L HLA-DQA1*01:02-B1*06:02L HLA-DRB1*01:02L HLA-DRB1*08:77L HLA-DRB3*02:01L HLA-DPA1*01:03-B1*03:01L HLA-DRB1*14:01L HLA-DRB1*08:01L
  REGION 1..11: note = CONT. FROM ABOVE: HLA-DQA1*01-B1*05L HLA-DQA1*05:05-B1*03:19L HL A-DPA1*01:03-B1*04:02L HLA-DRB1*12:01L HLA-DPA1*02:01-B1*13:01L HLA-DPA1*01:03-B1*104:01L HLA-DRB1*07:01L HLA-DRB1*04:08L
  source 1..11: note = Severe acute respiratory syndrome coronavirus 2
PAFDKSAFVNL

SEQ ID NO: 13537 - protein, 12 aa, Severe acute respiratory syndrome-related coronavirus
  REGION 1..12: note = Table B: HLA-DRB1*04:03L HLA-DRB1*04:02L HLA-DQA1*05:01-B1*02:01L HLA-DRB1*14:17L HLA-DRB1*16:01L HLA-DRB1*15:03L
  source 1..12: note = Severe acute respiratory syndrome coronavirus 2
LPFFYYSDSPCE

SEQ ID NO: 13538 - protein, 11 aa, Severe acute respiratory syndrome-related coronavirus
  REGION 1..11: note = Table B: HLA-DRB1*04:03L HLA-DRB1*04:02L HLA-DRB1*14:17L HLA-DRB1*04:08L
  source 1..11: note = Severe acute respiratory syndrome coronavirus 2
YYSDSPCESHG

SEQ ID NO: 13539 - protein, 11 aa, Severe acute respiratory syndrome-related coronavirus
  REGION 1..11: note = Table B: HLA-DRB1*04:03L HLA-DRB1*01:03L HLA-DRB1*01:01L HLA-DRB1*01:02L HLA-DRB1*16:01L HLA-DRB1*04:08L HLA-DRB1*15:03L
  source 1..11: note = Severe acute respiratory syndrome coronavirus 2
YVPLKSATCIT

SEQ ID NO: 13540 - protein, 11 aa, Severe acute respiratory syndrome-related coronavirus
  REGION 1..11: note = Table B: HLA-DRB1*04:03L HLA-DRB1*04:02L HLA-DRB1*04:05L HLA-DRB1*04:10L HLA-DRB1*14:17L
  source 1..11: note = Severe acute respiratory syndrome coronavirus 2
NEYRLYLDAYN

SEQ ID NO: 13541 - protein, 12 aa, Severe acute respiratory syndrome-related coronavirus
  REGION 1..12: note = Table B: HLA-DRB1*04:03L HLA-DRB1*04:02L HLA-DQA1*01-B1*05L HLA-DQA1*05:01-B1*02:01L HLA-DPA1*03:01-B1*105:01L HLA-DQA1*03:01-B1*03:02L HLA-DRB1*14:17L HLA-DQA1*02:01-B1*03:03L
  source 1..12: note = Severe acute respiratory syndrome coronavirus 2
YLDAYNMMISAG

SEQ ID NO: 13542 - protein, 10 aa, Severe acute respiratory syndrome-related coronavirus
  REGION 1..10: note = Table B: HLA-DRB1*04:03L HLA-DRB1*04:05L HLA-DQA1*01:02-B1*06:02L HLA-DRB1*01:01L HLA-DPA1*02:01-B1*13:01M HLA-DRB1*16:01L HLA-DQA1*01:03-B1*06:01M HLA-DRB1*15:03L
  source 1..10: note = Severe acute respiratory syndrome coronavirus 2
AYNMMISAGF

SEQ ID NO: 13543 - protein, 15 aa, Severe acute respiratory syndrome-related coronavirus
  REGION 1..15: note = Table B: HLA-DRB1*04:03L HLA-DRB1*13:02L HLA-DRB1*01:03L HLA-DRB1*14:01L HLA-DPA1*01:03-B1*02:01L HLA-DPA1*01:03-B1*104:01L
  source 1..15: note = Severe acute respiratory syndrome coronavirus 2
ISAGFSLWVYKQFDT

SEQ ID NO: 13544 - protein, 11 aa, Severe acute respiratory syndrome-related coronavirus
  REGION 1..11: note = Table B: HLA-DRB1*04:03L HLA-DRB1*01:03L HLA-DRB1*04:05L HLA-DRB1*01:01L HLA-DRB1*01:02L HLA-DPA1*03:01-B1*04:02L HLA-DRB1*14:02L HLA-DQA1*01:01-B1*05:01L HLA-DQA1*05:05-B1*03:19L HLA-DQA1*05:01-B1*02:01L
  REGION 1..11: note = CONT. FROM ABOVE: HLA-DRB4*01:01L HLA-DPA1*01:03-B1*04:01L HLA-D PA1*03:01-B1*105:01L
  source 1..11: note = Severe acute respiratory syndrome coronavirus 2
VYKQFDTYNLW

SEQ ID NO: 13545 - protein, 12 aa, Severe acute respiratory syndrome-related coronavirus
  REGION 1..12: note = Table B: HLA-DRB1*04:03L HLA-DRB1*01:03L HLA-DRB1*04:02L HLA-DRB1*01:02L HLA-DRB1*12:01L HLA-DPA1*03:01-B1*105:01L HLA-DRB1*04:08L
  source 1..12: note = Severe acute respiratory syndrome coronavirus 2
YKQFDTYNLWNT

SEQ ID NO: 13546 - protein, 12 aa, Severe acute respiratory syndrome-related coronavirus
  REGION 1..12: note = Table B: HLA-DRB1*04:03L HLA-DRB1*01:03L HLA-DRB1*04:05L HLA-DQA1*01:02-B1*06:02L HLA-DRB1*01:02L HLA-DPA1*03:01-B1*04:02L HLA-DQA1*01-B1*05L HLA-DRB1*04:08L HLA-DRB1*15:03L
  source 1..12: note = Severe acute respiratory syndrome coronavirus 2
FDTYNLWNTFTR

SEQ ID NO: 13547 - protein, 12 aa, Severe acute respiratory syndrome-related coronavirus
  REGION 1..12: note = Table B: HLA-DRB1*04:03L HLA-DRB1*13:02L HLA-DRB1*01:03L HLA-DRB1*14:01L HLA-DRB1*14:02L HLA-DRB1*12:01L HLA-DRB1*04:08L
  source 1..12: note = Severe acute respiratory syndrome coronavirus 2
TYNLWNTFTRLQ

SEQ ID NO: 13548 - protein, 12 aa, Severe acute respiratory syndrome-related coronavirus
  REGION 1..12: note = Table B: HLA-DRB1*04:03L HLA-DRB1*13:02L HLA-DRB1*01:03L HLA-DRB1*04:02L HLA-DRB1*04:05L HLA-DRB1*11:01L HLA-DRB1*12:01L HLA-DRB1*04:08L
  source 1..12: note = Severe acute respiratory syndrome coronavirus 2
YNLWNTFTRLQS

SEQ ID NO: 13549 - protein, 11 aa, Severe acute respiratory syndrome-related coronavirus
  REGION 1..11: note = Table B: HLA-DRB1*04:03L HLA-DRB1*01:03L HLA-DRB1*04:02L HLA-DRB1*04:04L HLA-DRB1*04:05L HLA-DRB1*01:02L HLA-DRB4*03:01NL HLA-DQA1*01-B1*05L HLA-DRB1*04:10L HLA-DRB1*12:01L HLA-DPA1*03:01-B1*105:01L HLA-DQA1*03:01-B1*03:02L
  REGION 1..11: note = CONT. FROM ABOVE: HLA-DRB1*14:54L HLA-DRB1*14:17L HLA-DRB1*10:01 L HLA-DRB1*16:01L HLA-DRB1*04:08L HLA-DQA1*02:01-B1*03:03L HLA-D RB1*15:03L
  source 1..11: note = Severe acute respiratory syndrome coronavirus 2
FTRLQSLENVA

SEQ ID NO: 13550 - protein, 10 aa, Severe acute respiratory syndrome-related coronavirus
  REGION 1..10: note = Table B: HLA-DRB1*04:03L
  source 1..10: note = Severe acute respiratory syndrome coronavirus 2
LQSLENVAFN

SEQ ID NO: 13551 - protein, 11 aa, Severe acute respiratory syndrome-related coronavirus
  REGION 1..11: note = Table B: HLA-DRB1*04:03L HLA-DRB1*01:03L HLA-DRB1*04:02L HLA-DQA1*01:02-B1*06:02L HLA-DRB1*04:08L
  source 1..11: note = Severe acute respiratory syndrome coronavirus 2
LENVAFNVVNK

SEQ ID NO: 13552 - protein, 10 aa, Severe acute respiratory syndrome-related coronavirus
  REGION 1..10: note = Table B: HLA-DRB1*04:03L HLA-DQA1*03:01-B1*03:02L HLA-DQA1*01:03-B1*06:01L HLA-DQA1*02:01-B1*03:03L
  source 1..10: note = Severe acute respiratory syndrome coronavirus 2
NVAFNVVNKG

SEQ ID NO: 13553 - protein, 12 aa, Severe acute respiratory syndrome-related coronavirus
  REGION 1..12: note = Table B: HLA-DRB1*04:03L HLA-DQA1*01:02-B1*06:02L HLA-DRB1*14:01L HLA-DRB1*14:17L HLA-DQA1*01:03-B1*06:01L
  source 1..12: note = Severe acute respiratory syndrome coronavirus 2
NVVNKGHFDGQQ

SEQ ID NO: 13554 - protein, 12 aa, Severe acute respiratory syndrome-related coronavirus
  REGION 1..12: note = Table B: HLA-DRB1*04:03L HLA-DRB1*04:02L HLA-DQA1*03:01-B1*03:02L
  source 1..12: note = Severe acute respiratory syndrome coronavirus 2
VVNKGHFDGQQG

SEQ ID NO: 13555 - protein, 11 aa, Severe acute respiratory syndrome-related coronavirus
  REGION 1..11: note = Table B: HLA-DRB1*04:03L HLA-DQA1*01-B1*05L HLA-DQA1*05:01-B1*02:01L HLA-DQA1*03:01-B1*03:02L HLA-DQA1*02:01-B1*03:03L
  source 1..11: note = Severe acute respiratory syndrome coronavirus 2
GHFDGQQGEVP

SEQ ID NO: 13556 - protein, 14 aa, Severe acute respiratory syndrome-related coronavirus
  REGION 1..14: note = Table B: HLA-DRB1*04:03L HLA-DRB1*13:02L HLA-DRB1*13:03L HLA-DRB1*04:02L HLA-DRB1*04:05L HLA-DRB1*01:02L HLA-DRB4*03:01NL HLA-DRB1*08:01L HLA-DRB1*04:10L HLA-DPA1*01:03-B1*04:02L HLA-DRB1*14:17L
  source 1..14: note = Severe acute respiratory syndrome coronavirus 2
DGQQGEVPVSIINN

SEQ ID NO: 13557 - protein, 11 aa, Severe acute respiratory syndrome-related coronavirus
  REGION 1..11: note = Table B: HLA-DRB1*04:03L HLA-DRB1*13:02L HLA-DRB1*01:03L HLA-DRB1*04:02L HLA-DRB4*03:01NL HLA-DRB1*08:77L HLA-DRB1*03:01L HLA-DRB1*14:02L HLA-DRB4*01:01L HLA-DPA1*01:03-B1*04:01L HLA-DPA1*01:03-B1*04:02L HLA-DRB1*12:01L
  REGION 1..11: note = CONT. FROM ABOVE: HLA-DPA1*01:03-B1*104:01L HLA-DQA1*05:05-B1*03 :01L HLA-DRB1*14:17L HLA-DRB1*10:01L HLA-DQA1*01:03-B1*06:01L HL A-DRB1*08:02L
  source 1..11: note = Severe acute respiratory syndrome coronavirus 2
VPVSIINNTVY

SEQ ID NO: 13558 - protein, 10 aa, Severe acute respiratory syndrome-related coronavirus
  REGION 1..10: note = Table B: HLA-DRB1*04:03L HLA-DRB1*12:01L HLA-DRB1*14:17L
  source 1..10: note = Severe acute respiratory syndrome coronavirus 2
VSIINNTVYT

SEQ ID NO: 13559 - protein, 11 aa, Severe acute respiratory syndrome-related coronavirus
  REGION 1..11: note = Table B: HLA-DRB1*04:03L HLA-DRB1*04:02L HLA-DRB1*14:17L HLA-DQA1*01:03-B1*06:01L HLA-DQA1*02:01-B1*03:03L
  source 1..11: note = Severe acute respiratory syndrome coronavirus 2
INNTVYTKVDG

SEQ ID NO: 13560 - protein, 12 aa, Severe acute respiratory syndrome-related coronavirus
  REGION 1..12: note = Table B: HLA-DRB1*04:03L HLA-DRB1*13:03L HLA-DRB1*04:02L HLA-DRB1*04:05L HLA-DRB1*01:02L HLA-DRB4*03:01NL HLA-DRB1*14:01L HLA-DQA1*01-B1*05L HLA-DRB1*04:10L HLA-DRB1*12:01L HLA-DRB1*14:54L HLA-DRB1*14:17L HLA-DRB1*16:01L HLA-DRB1*04:08L
  REGION 1..12: note = CONT. FROM ABOVE: HLA-DQA1*02:01-B1*03:03L HLA-DRB1*15:03L
  source 1..12: note = Severe acute respiratory syndrome coronavirus 2
VELFENKTTLPV

SEQ ID NO: 13561 - protein, 10 aa, Severe acute respiratory syndrome-related coronavirus
  REGION 1..10: note = Table B: HLA-DRB1*04:03L HLA-DQA1*03:01-B1*03:02L HLA-DQA1*01:03-B1*06:01L HLA-DQA1*02:01-B1*03:03L
  source 1..10: note = Severe acute respiratory syndrome coronavirus 2
TTLPVNVAFE

SEQ ID NO: 13562 - protein, 12 aa, Severe acute respiratory syndrome-related coronavirus
  REGION 1..12: note = Table B: HLA-DRB1*04:03L HLA-DRB1*13:02L HLA-DRB1*13:03L HLA-DRB1*04:04L HLA-DQA1*01:02-B1*06:02L HLA-DPA1*01:03-B1*03:01L HLA-DRB1*14:01L HLA-DRB1*11:04L HLA-DRB1*11:01L HLA-DRB3*01:01L HLA-DRB1*07:01L HLA-DRB1*04:08L
  REGION 1..12: note = CONT. FROM ABOVE: HLA-DRB1*15:03L
  source 1..12: note = Severe acute respiratory syndrome coronavirus 2
LWAKRNIKPVPE

SEQ ID NO: 13563 - protein, 13 aa, Severe acute respiratory syndrome-related coronavirus
  REGION 1..13: note = Table B: HLA-DRB1*04:03L HLA-DRB1*04:05L
  source 1..13: note = Severe acute respiratory syndrome coronavirus 2
KRNIKPVPEVKIL

SEQ ID NO: 13564 - protein, 13 aa, Severe acute respiratory syndrome-related coronavirus
  REGION 1..13: note = Table B: HLA-DRB1*04:03L HLA-DRB1*04:05L HLA-DQA1*01:02-B1*06:02L
  source 1..13: note = Severe acute respiratory syndrome coronavirus 2
RNIKPVPEVKILN

SEQ ID NO: 13565 - protein, 10 aa, Severe acute respiratory syndrome-related coronavirus
  REGION 1..10: note = Table B: HLA-DRB1*04:03L HLA-DQA1*03:01-B1*03:02L HLA-DQA1*02:01-B1*03:03L
  source 1..10: note = Severe acute respiratory syndrome coronavirus 2
PVPEVKILNN

SEQ ID NO: 13566 - protein, 11 aa, Severe acute respiratory syndrome-related coronavirus
  REGION 1..11: note = Table B: HLA-DRB1*04:03L HLA-DRB1*04:02L HLA-DRB1*04:10L HLA-DRB1*14:17L
  source 1..11: note = Severe acute respiratory syndrome coronavirus 2
VPEVKILNNLG

SEQ ID NO: 13567 - protein, 10 aa, Severe acute respiratory syndrome-related coronavirus
  REGION 1..10: note = Table B: HLA-DRB1*04:03L HLA-DRB1*04:02L HLA-DRB1*04:04L HLA-DRB1*04:05L HLA-DRB1*01:02L HLA-DRB4*03:01NL HLA-DRB1*14:01L HLA-DQA1*01-B1*05L HLA-DRB1*04:10L HLA-DRB1*12:01L HLA-DQA1*03:01-B1*03:02L HLA-DRB1*14:54L HLA-DRB1*14:17L
  REGION 1..10: note = CONT. FROM ABOVE: HLA-DRB1*16:01L HLA-DQA1*02:01-B1*03:03L HLA-D RB1*15:03L
  source 1..10: note = Severe acute respiratory syndrome coronavirus 2
VKILNNLGVD

SEQ ID NO: 13568 - protein, 11 aa, Severe acute respiratory syndrome-related coronavirus
  REGION 1..11: note = Table B: HLA-DRB1*04:03L
  source 1..11: note = Severe acute respiratory syndrome coronavirus 2
ILNNLGVDIAA

SEQ ID NO: 13569 - protein, 11 aa, Severe acute respiratory syndrome-related coronavirus
  REGION 1..11: note = Table B: HLA-DRB1*04:03L HLA-DRB1*14:17L
  source 1..11: note = Severe acute respiratory syndrome coronavirus 2
LNNLGVDIAAN

SEQ ID NO: 13570 - protein, 11 aa, Severe acute respiratory syndrome-related coronavirus
  REGION 1..11: note = Table B: HLA-DRB1*04:03L
  source 1..11: note = Severe acute respiratory syndrome coronavirus 2
VDIAANTVIWD

SEQ ID NO: 13571 - protein, 13 aa, Severe acute respiratory syndrome-related coronavirus
  REGION 1..13: note = Table B: HLA-DRB1*04:03L HLA-DRB1*01:03L HLA-DRB1*04:02L HLA-DQA1*01:02-B1*06:02L HLA-DRB1*08:01L HLA-DRB1*12:01L HLA-DRB1*14:54L HLA-DRB1*14:17L HLA-DRB1*04:08L HLA-DRB1*15:03L
  source 1..13: note = Severe acute respiratory syndrome coronavirus 2
ANTVIWDYKRDAP

SEQ ID NO: 13572 - protein, 11 aa, Severe acute respiratory syndrome-related coronavirus
  REGION 1..11: note = Table B: HLA-DRB1*04:03L HLA-DRB1*13:03L HLA-DRB1*01:03L HLA-DRB1*04:02L HLA-DRB1*14:01L HLA-DRB1*14:17L HLA-DRB1*16:01L
  source 1..11: note = Severe acute respiratory syndrome coronavirus 2
VIWDYKRDAPA

SEQ ID NO: 13573 - protein, 11 aa, Severe acute respiratory syndrome-related coronavirus
  REGION 1..11: note = Table B: HLA-DRB1*04:03L HLA-DRB1*13:03L HLA-DRB1*01:03L HLA-DRB1*04:02L HLA-DRB1*01:02L HLA-DRB4*03:01NL HLA-DRB1*08:04L HLA-DRB1*08:77L HLA-DRB3*02:01L HLA-DPA1*01:03-B1*03:01L HLA-DRB1*03:01L HLA-DRB1*11:03L HLA-DRB1*11:04L HLA-DRB1*14:02L
  REGION 1..11: note = CONT. FROM ABOVE: HLA-DQA1*05:01-B1*02:01L HLA-DRB1*12:01L HLA-D RB3*01:01L HLA-DQA1*03:01-B1*03:02L HLA-DRB1*14:54L HLA-DRB1*14: 17L HLA-DPA1*01:02-B1*04:01L HLA-DRB1*04:08L HLA-DQA1*02:01-B1*0 3:03L HLA-DRB1*15:03L
  source 1..11: note = Severe acute respiratory syndrome coronavirus 2
DYKRDAPAHIS

SEQ ID NO: 13574 - protein, 13 aa, Severe acute respiratory syndrome-related coronavirus
  REGION 1..13: note = Table B: HLA-DRB1*04:03L
  source 1..13: note = Severe acute respiratory syndrome coronavirus 2
DAPAHISTIGVCS

SEQ ID NO: 13575 - protein, 14 aa, Severe acute respiratory syndrome-related coronavirus
  REGION 1..14: note = Table B: HLA-DRB1*04:03L HLA-DRB1*13:02L HLA-DQA1*05:05-B1*03:19L HLA-DPA1*01:03-B1*04:02L HLA-DPA1*01:03-B1*104:01L HLA-DQA1*05:05-B1*03:01L
  source 1..14: note = Severe acute respiratory syndrome coronavirus 2
APAHISTIGVCSMT

SEQ ID NO: 13576 - protein, 10 aa, Severe acute respiratory syndrome-related coronavirus
  REGION 1..10: note = Table B: HLA-DRB1*04:03L HLA-DRB1*04:02L HLA-DQA1*03:01-B1*03:02L HLA-DQA1*02:01-B1*03:03L
  source 1..10: note = Severe acute respiratory syndrome coronavirus 2
MTDIAKKPTE

SEQ ID NO: 13577 - protein, 11 aa, Severe acute respiratory syndrome-related coronavirus
  REGION 1..11: note = Table B: HLA-DRB1*04:03L HLA-DRB1*04:02L HLA-DQA1*01-B1*05L HLA-DRB1*14:17L
  source 1..11: note = Severe acute respiratory syndrome coronavirus 2
GQVDLFRNARN

SEQ ID NO: 13578 - protein, 10 aa, Severe acute respiratory syndrome-related coronavirus
  REGION 1..10: note = Table B: HLA-DRB1*04:03L HLA-DRB1*04:02L HLA-DQA1*03:01-B1*03:02L HLA-DRB1*14:17L HLA-DQA1*02:01-B1*03:03L
  source 1..10: note = Severe acute respiratory syndrome coronavirus 2
GVLITEGSVK

SEQ ID NO: 13579 - protein, 10 aa, Severe acute respiratory syndrome-related coronavirus
  REGION 1..10: note = Table B: HLA-DRB1*04:03L HLA-DRB1*13:03L HLA-DRB1*01:03L HLA-DRB1*04:02L HLA-DRB1*04:05L HLA-DRB4*03:01NL HLA-DRB1*04:10L HLA-DRB1*12:01L HLA-DQA1*03:01-B1*03:02L HLA-DRB1*14:54L HLA-DRB1*14:17L HLA-DRB1*16:01L HLA-DQA1*02:01-B1*03:03L
  source 1..10: note = Severe acute respiratory syndrome coronavirus 2
VLITEGSVKG

SEQ ID NO: 13580 - protein, 11 aa, Severe acute respiratory syndrome-related coronavirus
  REGION 1..11: note = Table B: HLA-DRB1*04:03L HLA-DRB1*14:17L
  source 1..11: note = Severe acute respiratory syndrome coronavirus 2
LITEGSVKGLQ

SEQ ID NO: 13581 - protein, 11 aa, Severe acute respiratory syndrome-related coronavirus
  REGION 1..11: note = Table B: HLA-DRB1*04:03L HLA-DQA1*03:01-B1*03:02L HLA-DRB1*14:17L HLA-DQA1*02:01-B1*03:03L
  source 1..11: note = Severe acute respiratory syndrome coronavirus 2
VKGLQPSVGPK

SEQ ID NO: 13582 - protein, 10 aa, Severe acute respiratory syndrome-related coronavirus
  REGION 1..10: note = Table B: HLA-DRB1*04:03L HLA-DRB1*04:02L HLA-DQA1*03:01-B1*03:02L HLA-DRB1*14:17L
  source 1..10: note = Severe acute respiratory syndrome coronavirus 2
LQPSVGPKQA

SEQ ID NO: 13583 - protein, 13 aa, Severe acute respiratory syndrome-related coronavirus
  REGION 1..13: note = Table B: HLA-DRB1*04:03L HLA-DQA1*05:05-B1*03:01L HLA-DQA1*02:01-B1*03:03L
  source 1..13: note = Severe acute respiratory syndrome coronavirus 2
QPSVGPKQASLNG

SEQ ID NO: 13584 - protein, 10 aa, Severe acute respiratory syndrome-related coronavirus
  REGION 1..10: note = Table B: HLA-DRB1*04:03L HLA-DQA1*03:01-B1*03:02L HLA-DQA1*01:03-B1*06:01L HLA-DQA1*02:01-B1*03:03L
  source 1..10: note = Severe acute respiratory syndrome coronavirus 2
GVTLIGEAVK

SEQ ID NO: 13585 - protein, 10 aa, Severe acute respiratory syndrome-related coronavirus
  REGION 1..10: note = Table B: HLA-DRB1*04:03L HLA-DQA1*03:01-B1*03:02L HLA-DRB1*14:17L HLA-DQA1*02:01-B1*03:03L
  source 1..10: note = Severe acute respiratory syndrome coronavirus 2
VTLIGEAVKT

SEQ ID NO: 13586 - protein, 10 aa, Severe acute respiratory syndrome-related coronavirus
  REGION 1..10: note = Table B: HLA-DRB1*04:03L HLA-DRB1*01:03L HLA-DRB1*04:02L HLA-DRB4*03:01NL HLA-DQA1*03:01-B1*03:02L HLA-DRB1*14:17L HLA-DRB1*16:01L
  source 1..10: note = Severe acute respiratory syndrome coronavirus 2
YKKVDGVVQQ

SEQ ID NO: 13587 - protein, 14 aa, Severe acute respiratory syndrome-related coronavirus
  REGION 1..14: note = Table B: HLA-DRB1*04:03L HLA-DQA1*01:02-B1*06:02L HLA-DRB1*01:02L HLA-DPA1*03:01-B1*105:01L HLA-DRB1*16:01L HLA-DRB1*15:03L
  source 1..14: note = Severe acute respiratory syndrome coronavirus 2
VQQLPETYFTQSRN

SEQ ID NO: 13588 - protein, 10 aa, Severe acute respiratory syndrome-related coronavirus
  REGION 1..10: note = Table B: HLA-DRB1*04:03L HLA-DRB1*13:03L HLA-DRB1*04:02L HLA-DRB1*14:17L HLA-DRB1*16:01L HLA-DRB1*04:08L
  source 1..10: note = Severe acute respiratory syndrome coronavirus 2
YFTQSRNLQE

SEQ ID NO: 13589 - protein, 12 aa, Severe acute respiratory syndrome-related coronavirus
  REGION 1..12: note = Table B: HLA-DRB1*04:03L HLA-DRB1*04:08L
  source 1..12: note = Severe acute respiratory syndrome coronavirus 2
FTQSRNLQEFKP

SEQ ID NO: 13590 - protein, 10 aa, Severe acute respiratory syndrome-related coronavirus
  REGION 1..10: note = Table B: HLA-DRB1*04:03L HLA-DRB1*01:03L HLA-DQA1*03:01-B1*03:02L HLA-DRB1*14:17L HLA-DQA1*02:01-B1*03:03L
  source 1..10: note = Severe acute respiratory syndrome coronavirus 2
NLQEFKPRSQ

SEQ ID NO: 13591 - protein, 17 aa, Severe acute respiratory syndrome-related coronavirus
  REGION 1..17: note = Table B: HLA-DRB1*04:03L HLA-DRB1*01:03L HLA-DRB1*08:04L HLA-DPA1*01:03-B1*03:01L HLA-DPA1*01:03-B1*04:01L HLA-DPA1*01:03-B1*02:01L HLA-DRB1*04:08L
  source 1..17: note = Severe acute respiratory syndrome coronavirus 2
KPRSQMEIDFLELAMDE

SEQ ID NO: 13592 - protein, 14 aa, Severe acute respiratory syndrome-related coronavirus
  REGION 1..14: note = Table B: HLA-DRB1*04:03L HLA-DRB1*04:05L HLA-DRB1*01:02L HLA-DPA1*03:01-B1*04:02L HLA-DQA1*05:01-B1*02:01L
  source 1..14: note = Severe acute respiratory syndrome coronavirus 2
IDFLELAMDEFIER

SEQ ID NO: 13593 - protein, 15 aa, Severe acute respiratory syndrome-related coronavirus
  REGION 1..15: note = Table B: HLA-DRB1*04:03L HLA-DRB1*04:04L HLA-DRB1*14:01L HLA-DRB1*11:04L HLA-DRB3*01:01L
  source 1..15: note = Severe acute respiratory syndrome coronavirus 2
RYKLEGYAFEHIVYG

SEQ ID NO: 13594 - protein, 13 aa, Severe acute respiratory syndrome-related coronavirus
  REGION 1..13: note = Table B: HLA-DRB1*04:03L HLA-DRB1*08:04L HLA-DRB1*08:01L HLA-DPA1*01:03-B1*02:01L
  source 1..13: note = Severe acute respiratory syndrome coronavirus 2
GYAFEHIVYGDFS

SEQ ID NO: 13595 - protein, 11 aa, Severe acute respiratory syndrome-related coronavirus
  REGION 1..11: note = Table B: HLA-DRB1*04:03L HLA-DQA1*03:01-B1*03:02L
  source 1..11: note = Severe acute respiratory syndrome coronavirus 2
KNYFITDAQTG

SEQ ID NO: 13596 - protein, 10 aa, Severe acute respiratory syndrome-related coronavirus
  REGION 1..10: note = Table B: HLA-DRB1*04:03L HLA-DRB1*13:03L HLA-DQA1*05:01-B1*02:01L HLA-DRB1*14:17L
  source 1..10: note = Severe acute respiratory syndrome coronavirus 2
FITDAQTGSS

SEQ ID NO: 13597 - protein, 10 aa, Severe acute respiratory syndrome-related coronavirus
  REGION 1..10: note = Table B: HLA-DRB1*04:03L HLA-DPA1*03:01-B1*04:02L HLA-DQA1*01-B1*05L HLA-DQA1*05:01-B1*02:01L HLA-DPA1*01:03-B1*04:01L HLA-DPA1*01:03-B1*04:02L HLA-DPA1*03:01-B1*105:01L HLA-DQA1*03:01-B1*03:02L
  REGION 1..10: note = CONT. FROM ABOVE: HLA-DPA1*01:02-B1*04:01L HLA-DRB1*16:01L HLA-D QA1*01:03-B1*06:01L HLA-DQA1*02:01-B1*03:03L
  source 1..10: note = Severe acute respiratory syndrome coronavirus 2
LLDDFVEIIK

SEQ ID NO: 13598 - protein, 11 aa, Severe acute respiratory syndrome-related coronavirus
  REGION 1..11: note = Table B: HLA-DRB1*04:03L HLA-DRB1*13:03L HLA-DRB1*01:03L HLA-DRB1*04:02L HLA-DRB1*04:05L HLA-DRB4*03:01NL HLA-DRB1*08:04L HLA-DRB1*14:01L HLA-DQA1*01:01-B1*05:01L HLA-DRB1*08:01L HLA-DQA1*05:05-B1*03:19L HLA-DPA1*01:03-B1*04:02L
  REGION 1..11: note = CONT. FROM ABOVE: HLA-DRB1*14:54L HLA-DQA1*05:05-B1*03:01L HLA-D RB1*14:17L HLA-DRB1*16:01L HLA-DRB1*04:08L
  source 1..11: note = Severe acute respiratory syndrome coronavirus 2
DDFVEIIKSQD

SEQ ID NO: 13599 - protein, 10 aa, Severe acute respiratory syndrome-related coronavirus
  REGION 1..10: note = Table B: HLA-DRB1*04:03L HLA-DQA1*01-B1*05L HLA-DQA1*05:01-B1*02:01L HLA-DQA1*03:01-B1*03:02L HLA-DRB1*16:01L HLA-DRB1*15:03L
  source 1..10: note = Severe acute respiratory syndrome coronavirus 2
IIKSQDLSVV

SEQ ID NO: 13600 - protein, 12 aa, Severe acute respiratory syndrome-related coronavirus
  REGION 1..12: note = Table B: HLA-DRB1*04:03L HLA-DRB1*04:02L HLA-DRB1*04:05L HLA-DQA1*01:02-B1*06:02L HLA-DQA1*01-B1*05L HLA-DRB1*04:10L HLA-DRB1*12:01L HLA-DQA1*03:01-B1*03:02L HLA-DRB1*14:17L HLA-DRB1*15:03L
  source 1..12: note = Severe acute respiratory syndrome coronavirus 2
SKVVKVTIDYTE

SEQ ID NO: 13601 - protein, 11 aa, Severe acute respiratory syndrome-related coronavirus
  REGION 1..11: note = Table B: HLA-DRB1*04:03L HLA-DQA1*01-B1*05L HLA-DQA1*05:01-B1*02:01L HLA-DQA1*03:01-B1*03:02L
  source 1..11: note = Severe acute respiratory syndrome coronavirus 2
VKVTIDYTEIS

SEQ ID NO: 13602 - protein, 13 aa, Severe acute respiratory syndrome-related coronavirus
  REGION 1..13: note = Table B: HLA-DRB1*04:03L HLA-DRB1*04:02L HLA-DRB1*04:05L HLA-DRB1*14:17L HLA-DRB1*15:03L
  source 1..13: note = Severe acute respiratory syndrome coronavirus 2
DGHVETFYPKLQS

SEQ ID NO: 13603 - protein, 10 aa, Severe acute respiratory syndrome-related coronavirus
  REGION 1..10: note = Table B: HLA-DRB1*04:03L HLA-DRB1*13:03L HLA-DRB1*04:02L HLA-DRB1*14:01L HLA-DQA1*03:01-B1*03:02L HLA-DRB1*14:17L HLA-DPA1*01:02-B1*04:01L HLA-DQA1*02:01-B1*03:03L
  source 1..10: note = Severe acute respiratory syndrome coronavirus 2
TFYPKLQSSQ

SEQ ID NO: 13604 - protein, 11 aa, Severe acute respiratory syndrome-related coronavirus
  REGION 1..11: note = Table B: HLA-DRB1*04:03L HLA-DRB1*01:03L HLA-DRB1*04:05L HLA-DRB1*08:77L HLA-DQA1*05:05-B1*03:19L HLA-DPA1*01:03-B1*04:01L HLA-DRB1*16:01L HLA-DQA1*01:03-B1*06:01L
  source 1..11: note = Severe acute respiratory syndrome coronavirus 2
FYPKLQSSQAW

SEQ ID NO: 13605 - protein, 12 aa, Severe acute respiratory syndrome-related coronavirus
  REGION 1..12: note = Table B: HLA-DRB1*04:03L HLA-DRB1*04:02L HLA-DQA1*01:02-B1*06:02L HLA-DQA1*05:01-B1*02:01L HLA-DQA1*01:03-B1*06:01L HLA-DQA1*02:01-B1*03:03L
  source 1..12: note = Severe acute respiratory syndrome coronavirus 2
SQAWQPGVAMPN

SEQ ID NO: 13606 - protein, 11 aa, Severe acute respiratory syndrome-related coronavirus
  REGION 1..11: note = Table B: HLA-DRB1*04:03L HLA-DRB1*01:02L HLA-DPA1*01:03-B1*03:01L HLA-DRB1*14:02L HLA-DQA1*05:05-B1*03:116L HLA-DPA1*01:03-B1*04:02L HLA-DRB1*12:01L HLA-DPA1*02:01-B1*13:01L HLA-DRB1*16:01L
  REGION 1..11: note = CONT. FROM ABOVE: HLA-DRB1*15:03L
  source 1..11: note = Severe acute respiratory syndrome coronavirus 2
AWQPGVAMPNL

SEQ ID NO: 13607 - protein, 10 aa, Severe acute respiratory syndrome-related coronavirus
  REGION 1..10: note = Table B: HLA-DRB1*04:03L HLA-DRB1*13:02L HLA-DRB1*13:03L HLA-DRB1*01:03L HLA-DRB1*04:02L HLA-DRB4*03:01NL HLA-DQA1*01-B1*05L HLA-DRB1*12:01L HLA-DQA1*03:01-B1*03:02L HLA-DQA1*05:05-B1*03:01L HLA-DRB1*14:17L HLA-DRB1*16:01L
  REGION 1..10: note = CONT. FROM ABOVE: HLA-DQA1*02:01-B1*03:03L
  source 1..10: note = Severe acute respiratory syndrome coronavirus 2
NYGDSATLPK

SEQ ID NO: 13608 - protein, 10 aa, Severe acute respiratory syndrome-related coronavirus
  REGION 1..10: note = Table B: HLA-DRB1*04:03L HLA-DRB1*13:02L HLA-DRB1*04:02L HLA-DRB1*01:02L HLA-DRB1*14:01L HLA-DRB1*12:01L HLA-DQA1*03:01-B1*03:02L HLA-DRB1*14:54L HLA-DRB1*14:17L HLA-DRB1*16:01L HLA-DQA1*02:01-B1*03:03L HLA-DRB1*15:03L
  source 1..10: note = Severe acute respiratory syndrome coronavirus 2
IMMNVAKYTQ

SEQ ID NO: 13609 - protein, 13 aa, Severe acute respiratory syndrome-related coronavirus
  REGION 1..13: note = Table B: HLA-DRB1*04:03L HLA-DRB1*01:03L HLA-DRB1*04:05L HLA-DRB1*01:02L HLA-DRB1*08:04L HLA-DPA1*01:03-B1*03:01L HLA-DRB1*08:01L HLA-DPA1*01:03-B1*04:02L HLA-DRB1*12:01L HLA-DPA1*02:01-B1*13:01L HLA-DQA1*03:01-B1*03:02L
  REGION 1..13: note = CONT. FROM ABOVE: HLA-DPA1*01:03-B1*104:01L HLA-DQA1*05:05-B1*03 :01L HLA-DRB1*10:01L HLA-DRB1*16:01L HLA-DRB1*04:08L HLA-DQA1*02 :01-B1*03:03L HLA-DRB1*15:03L
  source 1..13: note = Severe acute respiratory syndrome coronavirus 2
VAKYTQLCQYLNT

SEQ ID NO: 13610 - protein, 12 aa, Severe acute respiratory syndrome-related coronavirus
  REGION 1..12: note = Table B: HLA-DRB1*04:03L HLA-DQA1*05:01-B1*02:01L HLA-DRB1*12:01L HLA-DRB1*15:03L
  source 1..12: note = Severe acute respiratory syndrome coronavirus 2
LNTLTLAVPYNM

SEQ ID NO: 13611 - protein, 10 aa, Severe acute respiratory syndrome-related coronavirus
  REGION 1..10: note = Table B: HLA-DRB1*04:03L HLA-DRB1*04:02L HLA-DQA1*03:01-B1*03:02L HLA-DRB1*14:17L HLA-DQA1*02:01-B1*03:03L
  source 1..10: note = Severe acute respiratory syndrome coronavirus 2
VIHFGAGSDK

SEQ ID NO: 13612 - protein, 12 aa, Severe acute respiratory syndrome-related coronavirus
  REGION 1..12: note = Table B: HLA-DRB1*04:03L HLA-DRB1*13:03L HLA-DRB1*04:02L HLA-DRB1*01:02L HLA-DRB4*03:01NL HLA-DRB1*08:04L HLA-DRB1*08:77L HLA-DRB3*02:01L HLA-DPA1*01:03-B1*03:01L HLA-DRB1*11:03L HLA-DRB1*11:04L HLA-DRB1*12:01L HLA-DRB1*12:02L HLA-DRB1*14:54L
  REGION 1..12: note = CONT. FROM ABOVE: HLA-DQA1*05:05-B1*03:01L HLA-DRB1*14:17L HLA-D RB1*07:01L HLA-DRB1*04:08L
  source 1..12: note = Severe acute respiratory syndrome coronavirus 2
RQWLPTGTLLVD

SEQ ID NO: 13613 - protein, 11 aa, Severe acute respiratory syndrome-related coronavirus
  REGION 1..11: note = Table B: HLA-DRB1*04:03L HLA-DRB1*14:17L
  source 1..11: note = Severe acute respiratory syndrome coronavirus 2
GTLLVDSDLND

SEQ ID NO: 13614 - protein, 13 aa, Severe acute respiratory syndrome-related coronavirus
  REGION 1..13: note = Table B: HLA-DRB1*04:03L
  source 1..13: note = Severe acute respiratory syndrome coronavirus 2
SDLNDFVSDADST

SEQ ID NO: 13615 - protein, 13 aa, Severe acute respiratory syndrome-related coronavirus
  REGION 1..13: note = Table B: HLA-DRB1*04:03L HLA-DQA1*05:05-B1*03:19L HLA-DQA1*05:01-B1*02:01L HLA-DPA1*03:01-B1*105:01L
  source 1..13: note = Severe acute respiratory syndrome coronavirus 2
ADSTLIGDCATVH

SEQ ID NO: 13616 - protein, 12 aa, Severe acute respiratory syndrome-related coronavirus
  REGION 1..12: note = Table B: HLA-DRB1*04:03L HLA-DQA1*01:02-B1*06:02L HLA-DQA1*03:01-B1*03:02L HLA-DQA1*02:01-B1*03:03L
  source 1..12: note = Severe acute respiratory syndrome coronavirus 2
STLIGDCATVHT

SEQ ID NO: 13617 - protein, 10 aa, Severe acute respiratory syndrome-related coronavirus
  REGION 1..10: note = Table B: HLA-DRB1*04:03L HLA-DRB1*04:02L HLA-DRB1*04:05L HLA-DRB4*03:01NL HLA-DQA1*01-B1*05L HLA-DRB1*04:10L HLA-DQA1*03:01-B1*03:02L HLA-DRB1*14:54L HLA-DRB1*14:17L HLA-DQA1*02:01-B1*03:03L
  source 1..10: note = Severe acute respiratory syndrome coronavirus 2
LIISDMYDPK

SEQ ID NO: 13618 - protein, 10 aa, Severe acute respiratory syndrome-related coronavirus
  REGION 1..10: note = Table B: HLA-DRB1*04:03L HLA-DRB1*04:02L HLA-DRB1*04:05L HLA-DQA1*01-B1*05L HLA-DQA1*05:01-B1*02:01L HLA-DQA1*03:01-B1*03:02L HLA-DRB1*14:17L HLA-DRB1*16:01L
  source 1..10: note = Severe acute respiratory syndrome coronavirus 2
IISDMYDPKT

SEQ ID NO: 13619 - protein, 10 aa, Severe acute respiratory syndrome-related coronavirus
  REGION 1..10: note = Table B: HLA-DRB1*04:03L HLA-DRB1*04:02L HLA-DQA1*01-B1*05L HLA-DQA1*03:01-B1*03:02L HLA-DRB1*14:17L
  source 1..10: note = Severe acute respiratory syndrome coronavirus 2
ISDMYDPKTK

SEQ ID NO: 13620 - protein, 10 aa, Severe acute respiratory syndrome-related coronavirus
  REGION 1..10: note = Table B: HLA-DRB1*04:03L HLA-DQA1*03:01-B1*03:02L
  source 1..10: note = Severe acute respiratory syndrome coronavirus 2
VTKENDSKEG

SEQ ID NO: 13621 - protein, 10 aa, Severe acute respiratory syndrome-related coronavirus
  REGION 1..10: note = Table B: HLA-DRB1*04:03L
  source 1..10: note = Severe acute respiratory syndrome coronavirus 2
IQQKLALGGS

SEQ ID NO: 13622 - protein, 11 aa, Severe acute respiratory syndrome-related coronavirus
  REGION 1..11: note = Table B: HLA-DRB1*04:03L HLA-DRB1*04:02L HLA-DQA1*01:02-B1*06:02L HLA-DRB1*14:17L
  source 1..11: note = Severe acute respiratory syndrome coronavirus 2
GSVAIKITEHS

SEQ ID NO: 13623 - protein, 11 aa, Severe acute respiratory syndrome-related coronavirus
  REGION 1..11: note = Table B: HLA-DRB1*04:03L HLA-DRB1*04:02L HLA-DRB1*04:05L HLA-DRB1*14:01L HLA-DRB1*12:01L HLA-DQA1*03:01-B1*03:02L HLA-DRB1*14:54L HLA-DRB1*14:17L HLA-DRB1*16:01L
  source 1..11: note = Severe acute respiratory syndrome coronavirus 2
VAIKITEHSWN

SEQ ID NO: 13624 - protein, 10 aa, Severe acute respiratory syndrome-related coronavirus
  REGION 1..10: note = Table B: HLA-DRB1*04:03L HLA-DQA1*01-B1*05L HLA-DQA1*05:01-B1*02:01L HLA-DQA1*03:01-B1*03:02L HLA-DRB1*16:01L HLA-DQA1*02:01-B1*03:03L
  source 1..10: note = Severe acute respiratory syndrome coronavirus 2
EHSWNADLYK

SEQ ID NO: 13625 - protein, 10 aa, Severe acute respiratory syndrome-related coronavirus
  REGION 1..10: note = Table B: HLA-DRB1*04:03L HLA-DRB1*01:03L HLA-DRB1*04:05L HLA-DQA1*01:02-B1*06:02L HLA-DRB1*01:01L HLA-DPA1*02:01-B1*13:01L HLA-DRB1*16:01L HLA-DQA1*01:03-B1*06:01L
  source 1..10: note = Severe acute respiratory syndrome coronavirus 2
LYKLMGHFAW

SEQ ID NO: 13626 - protein, 13 aa, Severe acute respiratory syndrome-related coronavirus
  REGION 1..13: note = Table B: HLA-DRB1*04:03L HLA-DRB1*13:02L HLA-DRB1*01:03L HLA-DRB3*02:01L HLA-DRB1*08:01L HLA-DQA1*03:01-B1*03:02L HLA-DPA1*01:03-B1*104:01L
  source 1..13: note = Severe acute respiratory syndrome coronavirus 2
HFAWWTAFVTNVN

SEQ ID NO: 13627 - protein, 11 aa, Severe acute respiratory syndrome-related coronavirus
  REGION 1..11: note = Table B: HLA-DRB1*04:03L
  source 1..11: note = Severe acute respiratory syndrome coronavirus 2
WTAFVTNVNAS

SEQ ID NO: 13628 - protein, 11 aa, Severe acute respiratory syndrome-related coronavirus
  REGION 1..11: note = Table B: HLA-DRB1*04:03L HLA-DRB1*13:03L HLA-DRB1*04:02L HLA-DRB4*03:01NL HLA-DRB1*14:54L HLA-DRB1*14:17L HLA-DRB1*16:01L
  source 1..11: note = Severe acute respiratory syndrome coronavirus 2
TAFVTNVNASS

SEQ ID NO: 13629 - protein, 10 aa, Severe acute respiratory syndrome-related coronavirus
  REGION 1..10: note = Table B: HLA-DRB1*04:03L HLA-DRB1*14:54L HLA-DRB1*14:17L
  source 1..10: note = Severe acute respiratory syndrome coronavirus 2
FVTNVNASSS

SEQ ID NO: 13630 - protein, 10 aa, Severe acute respiratory syndrome-related coronavirus
  REGION 1..10: note = Table B: HLA-DRB1*04:03L HLA-DRB1*14:17L
  source 1..10: note = Severe acute respiratory syndrome coronavirus 2
VTNVNASSSE

SEQ ID NO: 13631 - protein, 11 aa, Severe acute respiratory syndrome-related coronavirus
  REGION 1..11: note = Table B: HLA-DRB1*04:03L HLA-DRB3*02:01L HLA-DQA1*01-B1*05L HLA-DRB1*12:01L HLA-DQA1*05:05-B1*03:01L HLA-DRB1*07:01L HLA-DRB1*16:01L
  source 1..11: note = Severe acute respiratory syndrome coronavirus 2
NVNASSSEAFL

SEQ ID NO: 13632 - protein, 13 aa, Severe acute respiratory syndrome-related coronavirus
  REGION 1..13: note = Table B: HLA-DRB1*04:03L HLA-DQA1*01:02-B1*06:02L HLA-DRB1*01:02L HLA-DPA1*03:01-B1*04:02L HLA-DPA1*01:03-B1*04:02L HLA-DPA1*01:02-B1*04:01L HLA-DRB1*16:01L HLA-DRB1*04:08L HLA-DRB1*15:03L
  source 1..13: note = Severe acute respiratory syndrome coronavirus 2
EAFLIGCNYLGKP

SEQ ID NO: 13633 - protein, 11 aa, Severe acute respiratory syndrome-related coronavirus
  REGION 1..11: note = Table B: HLA-DRB1*04:03L HLA-DRB1*04:02L HLA-DQA1*01:02-B1*06:02L HLA-DQA1*01-B1*05L HLA-DQA1*05:01-B1*02:01L HLA-DRB1*14:17L HLA-DQA1*01:03-B1*06:01L HLA-DQA1*02:01-B1*03:03L
  source 1..11: note = Severe acute respiratory syndrome coronavirus 2
EQIDGYVMHAN

SEQ ID NO: 13634 - protein, 10 aa, Severe acute respiratory syndrome-related coronavirus
  REGION 1..10: note = Table B: HLA-DRB1*04:03L HLA-DRB1*01:03L HLA-DRB1*04:05L HLA-DQA1*01:02-B1*06:02L HLA-DRB1*01:01L HLA-DRB1*01:02L HLA-DQA1*01:01-B1*05:01L HLA-DPA1*02:01-B1*13:01M HLA-DRB1*16:01L HLA-DQA1*01:03-B1*06:01M
  REGION 1..10: note = CONT. FROM ABOVE: HLA-DQA1*02:01-B1*03:03L HLA-DRB1*15:03L
  source 1..10: note = Severe acute respiratory syndrome coronavirus 2
GYVMHANYIF

SEQ ID NO: 13635 - protein, 10 aa, Severe acute respiratory syndrome-related coronavirus
  REGION 1..10: note = Table B: HLA-DRB1*04:03L HLA-DRB1*01:03L HLA-DRB1*04:05L HLA-DQA1*01:02-B1*06:02L HLA-DRB1*01:01L HLA-DRB1*01:02L HLA-DRB1*08:77L HLA-DPA1*03:01-B1*04:02L HLA-DRB1*14:02L HLA-DQA1*01:01-B1*05:01L HLA-DQA1*05:05-B1*03:19L
  REGION 1..10: note = CONT. FROM ABOVE: HLA-DQA1*05:01-B1*02:01L HLA-DRB4*01:01L HLA-D PA1*01:03-B1*04:01L HLA-DQA1*05:05-B1*03:116L HLA-DPA1*01:03-B1* 04:02L HLA-DRB1*12:01L HLA-DPA1*02:01-B1*13:01M HLA-DPA1*03:01-B 1*105:01L HLA-DRB1*16:01L HLA-DQA1*01:03-B1*06:01M
  REGION 1..10: note = CONT. FROM ABOVE: HLA-DQA1*02:01-B1*03:03L HLA-DRB1*15:03L
  source 1..10: note = Severe acute respiratory syndrome coronavirus 2
YVMHANYIFW

SEQ ID NO: 13636 - protein, 12 aa, Severe acute respiratory syndrome-related coronavirus
  REGION 1..12: note = Table B: HLA-DRB1*04:03L HLA-DRB1*04:02L HLA-DPA1*03:01-B1*04:02L HLA-DQA1*01-B1*05L HLA-DPA1*03:01-B1*105:01L HLA-DQA1*03:01-B1*03:02L HLA-DPA1*01:02-B1*04:01L HLA-DRB1*16:01L
  REGION 1..12: note = CONT. FROM ABOVE: HLA-DQA1*02:01-B1*03:03L HLA-DRB1*15:03L
  source 1..12: note = Severe acute respiratory syndrome coronavirus 2
ANYIFWRNTNPI

SEQ ID NO: 13637 - protein, 11 aa, Severe acute respiratory syndrome-related coronavirus
  REGION 1..11: note = Table B: HLA-DRB1*04:03L
  source 1..11: note = Severe acute respiratory syndrome coronavirus 2
WRNTNPIQLSS

SEQ ID NO: 13638 - protein, 12 aa, Severe acute respiratory syndrome-related coronavirus
  REGION 1..12: note = Table B: HLA-DRB1*04:03L HLA-DRB1*01:02L HLA-DRB1*14:01L HLA-DQA1*05:05-B1*03:01L HLA-DRB1*16:01L
  source 1..12: note = Severe acute respiratory syndrome coronavirus 2
NPIQLSSYSLFD

SEQ ID NO: 13639 - protein, 10 aa, Severe acute respiratory syndrome-related coronavirus
  REGION 1..10: note = Table B: HLA-DRB1*04:03L HLA-DRB1*04:05L HLA-DRB1*01:01L HLA-DPA1*02:01-B1*13:01M HLA-DQA1*01:03-B1*06:01M
  source 1..10: note = Severe acute respiratory syndrome coronavirus 2
SYSLFDMSKF

SEQ ID NO: 13640 - protein, 10 aa, Severe acute respiratory syndrome-related coronavirus
  REGION 1..10: note = Table B: HLA-DRB1*04:03L HLA-DRB1*01:03L HLA-DRB1*04:02L HLA-DRB1*14:01L HLA-DQA1*03:01-B1*03:02L HLA-DRB1*14:17L HLA-DPA1*01:02-B1*04:01L HLA-DRB1*16:01L HLA-DQA1*02:01-B1*03:03L
  source 1..10: note = Severe acute respiratory syndrome coronavirus 2
LFDMSKFPLK

SEQ ID NO: 13641 - protein, 15 aa, Severe acute respiratory syndrome-related coronavirus
  REGION 1..15: note = Table B: HLA-DRB1*04:03L HLA-DQA1*05:05-B1*03:19L
  source 1..15: note = Severe acute respiratory syndrome coronavirus 2
FPLKLRGTAVMSLKE

SEQ ID NO: 13642 - protein, 14 aa, Severe acute respiratory syndrome-related coronavirus
  REGION 1..14: note = Table B: HLA-DRB1*04:03L
  source 1..14: note = Severe acute respiratory syndrome coronavirus 2
EGQINDMILSLLSK

SEQ ID NO: 13643 - protein, 10 aa, Severe acute respiratory syndrome-related coronavirus
  REGION 1..10: note = Table B: HLA-DRB1*04:03L HLA-DRB1*14:17L
  source 1..10: note = Severe acute respiratory syndrome coronavirus 2
DMILSLLSKG

SEQ ID NO: 13644 - protein, 12 aa, Severe acute respiratory syndrome-related coronavirus
  REGION 1..12: note = Table B: HLA-DRB1*04:03L HLA-DRB1*01:03L HLA-DRB1*04:02L HLA-DRB1*04:05L HLA-DRB1*01:02L HLA-DRB1*14:01L HLA-DRB1*08:01L HLA-DRB1*12:01L HLA-DPA1*01:02-B1*04:01L HLA-DRB1*16:01L HLA-DRB1*04:08L HLA-DRB1*15:03L
  source 1..12: note = Severe acute respiratory syndrome coronavirus 2
GRLIIRENNRVV

SEQ ID NO: 13645 - protein, 11 aa, Severe acute respiratory syndrome-related coronavirus
  REGION 1..11: note = Table B: HLA-DRB1*04:03L HLA-DRB1*13:02L HLA-DRB1*13:03L HLA-DRB1*01:03L HLA-DRB1*04:02L HLA-DRB1*01:02L HLA-DRB1*08:04L HLA-DRB1*11:04L HLA-DRB1*12:01L HLA-DRB1*12:02L HLA-DRB3*01:01L HLA-DRB1*14:54L HLA-DRB1*14:17L HLA-DPA1*01:02-B1*04:01L
  REGION 1..11: note = CONT. FROM ABOVE: HLA-DRB1*04:08L HLA-DRB1*15:03L
  source 1..11: note = Severe acute respiratory syndrome coronavirus 2
IIRENNRVVIS

SEQ ID NO: 13646 - protein, 10 aa, Severe acute respiratory syndrome-related coronavirus
  REGION 1..10: note = Table B: HLA-DRB1*04:03L HLA-DRB1*14:17L
  source 1..10: note = Severe acute respiratory syndrome coronavirus 2
VVISSDVLVN

SEQ ID NO: 13647 - protein, 10 aa, Severe acute respiratory syndrome-related coronavirus
  REGION 1..10: note = Table B: HLA-DRB1*04:03L HLA-DRB1*14:17L
  source 1..10: note = Severe acute respiratory syndrome coronavirus 2
LVLLPLVSSQ

SEQ ID NO: 13648 - protein, 12 aa, Severe acute respiratory syndrome-related coronavirus
  REGION 1..12: note = Table B: HLA-DRB1*04:03L HLA-DRB1*01:03L HLA-DQA1*01:02-B1*06:02L HLA-DRB1*01:01L HLA-DQA1*05:05-B1*03:19L HLA-DRB1*12:01L HLA-DPA1*03:01-B1*105:01L HLA-DQA1*05:05-B1*03:01L
  REGION 1..12: note = CONT. FROM ABOVE: HLA-DRB1*10:01L HLA-DRB1*16:01L HLA-DRB1*04:08 L HLA-DRB1*15:03L
  source 1..12: note = Severe acute respiratory syndrome coronavirus 2
VLLPLVSSQCVN

SEQ ID NO: 13649 - protein, 11 aa, Severe acute respiratory syndrome-related coronavirus
  REGION 1..11: note = Table B: HLA-DRB1*04:03L HLA-DRB1*04:02L HLA-DRB1*14:01L HLA-DRB1*14:54L HLA-DRB1*14:17L
  source 1..11: note = Severe acute respiratory syndrome coronavirus 2
VNLTTRTQLPP

SEQ ID NO: 13650 - protein, 13 aa, Severe acute respiratory syndrome-related coronavirus
  REGION 1..13: note = Table B: HLA-DRB1*04:03L HLA-DRB1*04:02L
  source 1..13: note = Severe acute respiratory syndrome coronavirus 2
YTNSFTRGVYYPD

SEQ ID NO: 13651 - protein, 11 aa, Severe acute respiratory syndrome-related coronavirus
  REGION 1..11: note = Table B: HLA-DRB1*04:03L HLA-DRB1*13:03L HLA-DRB1*04:05L HLA-DRB1*01:02L HLA-DRB1*08:01L HLA-DQA1*01-B1*05L HLA-DRB1*12:01L HLA-DPA1*03:01-B1*105:01L HLA-DRB1*14:17L HLA-DRB1*04:08L HLA-DRB1*15:03L
  source 1..11: note = Severe acute respiratory syndrome coronavirus 2
SFTRGVYYPDK

SEQ ID NO: 13652 - protein, 11 aa, Severe acute respiratory syndrome-related coronavirus
  REGION 1..11: note = Table B: HLA-DRB1*04:03L HLA-DRB1*01:03L HLA-DRB1*04:05L HLA-DRB1*01:02L HLA-DRB1*14:54L HLA-DPA1*01:02-B1*04:01L HLA-DRB1*04:08L HLA-DRB1*15:03L
  source 1..11: note = Severe acute respiratory syndrome coronavirus 2
GVYYPDKVFRS

SEQ ID NO: 13653 - protein, 11 aa, Severe acute respiratory syndrome-related coronavirus
  REGION 1..11: note = Table B: HLA-DRB1*04:03L HLA-DRB1*13:03L HLA-DRB1*01:03L HLA-DRB1*04:02L HLA-DRB1*14:01L HLA-DQA1*03:01-B1*03:02L HLA-DRB1*14:17L HLA-DPA1*01:02-B1*04:01L HLA-DRB1*16:01L HLA-DRB1*04:08L HLA-DQA1*02:01-B1*03:03L
  source 1..11: note = Severe acute respiratory syndrome coronavirus 2
VYYPDKVFRSS

SEQ ID NO: 13654 - protein, 14 aa, Severe acute respiratory syndrome-related coronavirus
  REGION 1..14: note = Table B: HLA-DRB1*04:03L HLA-DRB1*13:02L HLA-DRB1*01:03L HLA-DRB1*04:02L HLA-DRB1*04:05L HLA-DRB1*01:02L HLA-DPA1*01:03-B1*03:01L HLA-DPA1*03:01-B1*04:02L HLA-DRB1*14:01L HLA-DRB1*08:01L HLA-DRB1*12:01L
  REGION 1..14: note = CONT. FROM ABOVE: HLA-DQA1*01:03-B1*06:01L HLA-DRB1*04:08L HLA-D QA1*02:01-B1*03:03L HLA-DRB1*15:03L
  source 1..14: note = Severe acute respiratory syndrome coronavirus 2
YPDKVFRSSVLHST

SEQ ID NO: 13655 - protein, 14 aa, Severe acute respiratory syndrome-related coronavirus
  REGION 1..14: note = Table B: HLA-DRB1*04:03L HLA-DRB1*04:05L
  source 1..14: note = Severe acute respiratory syndrome coronavirus 2
PDKVFRSSVLHSTQ

SEQ ID NO: 13656 - protein, 13 aa, Severe acute respiratory syndrome-related coronavirus
  REGION 1..13: note = Table B: HLA-DRB1*04:03L HLA-DRB1*13:02L HLA-DRB1*04:02L HLA-DRB1*04:05L HLA-DRB1*01:02L HLA-DRB3*02:01L HLA-DRB1*14:54L HLA-DRB1*14:17L
  source 1..13: note = Severe acute respiratory syndrome coronavirus 2
SSVLHSTQDLFLP

SEQ ID NO: 13657 - protein, 12 aa, Severe acute respiratory syndrome-related coronavirus
  REGION 1..12: note = Table B: HLA-DRB1*04:03L HLA-DPA1*03:01-B1*04:02L HLA-DRB1*14:01L HLA-DQA1*05:01-B1*02:01L HLA-DRB1*12:01L HLA-DPA1*03:01-B1*105:01L HLA-DPA1*01:02-B1*04:01L HLA-DRB1*16:01L HLA-DRB1*15:03L
  source 1..12: note = Severe acute respiratory syndrome coronavirus 2
VLHSTQDLFLPF

SEQ ID NO: 13658 - protein, 10 aa, Severe acute respiratory syndrome-related coronavirus
  REGION 1..10: note = Table B: HLA-DRB1*04:03L HLA-DRB1*01:03L HLA-DRB1*04:05L HLA-DQA1*01:02-B1*06:02L HLA-DRB1*01:01L HLA-DRB1*01:02L HLA-DRB1*08:77L HLA-DRB1*14:02L HLA-DQA1*05:05-B1*03:19L HLA-DRB4*01:01L HLA-DPA1*01:03-B1*04:01L
  REGION 1..10: note = CONT. FROM ABOVE: HLA-DQA1*05:05-B1*03:116L HLA-DPA1*02:01-B1*13 :01M HLA-DPA1*03:01-B1*105:01L HLA-DRB1*16:01L HLA-DQA1*01:03-B1 *06:01M HLA-DQA1*02:01-B1*03:03L HLA-DRB1*15:03L
  source 1..10: note = Severe acute respiratory syndrome coronavirus 2
FLPFFSNVTW

SEQ ID NO: 13659 - protein, 12 aa, Severe acute respiratory syndrome-related coronavirus
  REGION 1..12: note = Table B: HLA-DRB1*04:03L HLA-DPA1*03:01-B1*04:02L HLA-DRB1*14:01L HLA-DQA1*01-B1*05L HLA-DRB1*12:01L HLA-DPA1*01:02-B1*04:01L HLA-DRB1*16:01L
  source 1..12: note = Severe acute respiratory syndrome coronavirus 2
LPFFSNVTWFHA

SEQ ID NO: 13660 - protein, 11 aa, Severe acute respiratory syndrome-related coronavirus
  REGION 1..11: note = Table B: HLA-DRB1*04:03L HLA-DRB1*01:03L HLA-DRB1*04:02L HLA-DRB1*04:05L HLA-DRB1*01:02L HLA-DRB1*14:01L HLA-DRB1*12:01L HLA-DPA1*03:01-B1*105:01L HLA-DRB1*14:17L HLA-DPA1*01:02-B1*04:01L HLA-DQA1*01:03-B1*06:01L
  REGION 1..11: note = CONT. FROM ABOVE: HLA-DRB1*04:08L HLA-DQA1*02:01-B1*03:03L
  source 1..11: note = Severe acute respiratory syndrome coronavirus 2
VTWFHAIHVSG

SEQ ID NO: 13661 - protein, 11 aa, Severe acute respiratory syndrome-related coronavirus
  REGION 1..11: note = Table B: HLA-DRB1*04:03L HLA-DRB1*14:17L
  source 1..11: note = Severe acute respiratory syndrome coronavirus 2
FHAIHVSGTNG

SEQ ID NO: 13662 - protein, 10 aa, Severe acute respiratory syndrome-related coronavirus
  REGION 1..10: note = Table B: HLA-DRB1*04:03L HLA-DRB1*01:03L HLA-DRB1*04:02L HLA-DRB1*04:05L HLA-DRB4*03:01NL HLA-DQA1*03:01-B1*03:02L HLA-DRB1*14:17L
  source 1..10: note = Severe acute respiratory syndrome coronavirus 2
IHVSGTNGTK

SEQ ID NO: 13663 - protein, 10 aa, Severe acute respiratory syndrome-related coronavirus
  REGION 1..10: note = Table B: HLA-DRB1*04:03L HLA-DRB1*04:05L HLA-DQA1*01:02-B1*06:02L HLA-DRB1*01:01L HLA-DPA1*02:01-B1*13:01L HLA-DPA1*03:01-B1*105:01L HLA-DQA1*01:03-B1*06:01L HLA-DRB1*15:03L
  source 1..10: note = Severe acute respiratory syndrome coronavirus 2
VLPFNDGVYF

SEQ ID NO: 13664 - protein, 11 aa, Severe acute respiratory syndrome-related coronavirus
  REGION 1..11: note = Table B: HLA-DRB1*04:03L HLA-DQA1*01:02-B1*06:02L HLA-DRB1*01:02L HLA-DPA1*03:01-B1*105:01L HLA-DRB1*14:54L HLA-DPA1*01:02-B1*04:01L HLA-DRB1*04:08L
  source 1..11: note = Severe acute respiratory syndrome coronavirus 2
FASTEKSNIIR

SEQ ID NO: 13665 - protein, 10 aa, Severe acute respiratory syndrome-related coronavirus
  REGION 1..10: note = Table B: HLA-DRB1*04:03L HLA-DRB1*13:03L HLA-DRB1*01:03L HLA-DRB1*04:02L HLA-DRB4*03:01NL HLA-DQA1*03:01-B1*03:02L HLA-DRB1*14:17L HLA-DRB1*16:01L HLA-DQA1*02:01-B1*03:03L
  source 1..10: note = Severe acute respiratory syndrome coronavirus 2
STEKSNIIRG

SEQ ID NO: 13666 - protein, 10 aa, Severe acute respiratory syndrome-related coronavirus
  REGION 1..10: note = Table B: HLA-DRB1*04:03L HLA-DQA1*01-B1*05L HLA-DQA1*03:01-B1*03:02L HLA-DQA1*02:01-B1*03:03L
  source 1..10: note = Severe acute respiratory syndrome coronavirus 2
IFGTTLDSKT

SEQ ID NO: 13667 - protein, 10 aa, Severe acute respiratory syndrome-related coronavirus
  REGION 1..10: note = Table B: HLA-DRB1*04:03L HLA-DQA1*03:01-B1*03:02L HLA-DQA1*02:01-B1*03:03L
  source 1..10: note = Severe acute respiratory syndrome coronavirus 2
GTTLDSKTQS

SEQ ID NO: 13668 - protein, 11 aa, Severe acute respiratory syndrome-related coronavirus
  REGION 1..11: note = Table B: HLA-DRB1*04:03L HLA-DQA1*01:03-B1*06:01L
  source 1..11: note = Severe acute respiratory syndrome coronavirus 2
SKTQSLLIVNN

SEQ ID NO: 13669 - protein, 10 aa, Severe acute respiratory syndrome-related coronavirus
  REGION 1..10: note = Table B: HLA-DRB1*04:03L HLA-DRB1*14:17L
  source 1..10: note = Severe acute respiratory syndrome coronavirus 2
SLLIVNNATN

SEQ ID NO: 13670 - protein, 15 aa, Severe acute respiratory syndrome-related coronavirus
  REGION 1..15: note = Table B: HLA-DRB1*04:03L HLA-DRB1*04:04L
  source 1..15: note = Severe acute respiratory syndrome coronavirus 2
NKSWMESEFRVYSSA

SEQ ID NO: 13671 - protein, 15 aa, Severe acute respiratory syndrome-related coronavirus
  REGION 1..15: note = Table B: HLA-DRB1*04:03L
  source 1..15: note = Severe acute respiratory syndrome coronavirus 2
KSWMESEFRVYSSAN

SEQ ID NO: 13672 - protein, 10 aa, Severe acute respiratory syndrome-related coronavirus
  REGION 1..10: note = Table B: HLA-DRB1*04:03L HLA-DQA1*01-B1*05L HLA-DQA1*03:01-B1*03:02L
  source 1..10: note = Severe acute respiratory syndrome coronavirus 2
EFRVYSSANN

SEQ ID NO: 13673 - protein, 11 aa, Severe acute respiratory syndrome-related coronavirus
  REGION 1..11: note = Table B: HLA-DRB1*04:03L
  source 1..11: note = Severe acute respiratory syndrome coronavirus 2
FRVYSSANNCT

SEQ ID NO: 13674 - protein, 10 aa, Severe acute respiratory syndrome-related coronavirus
  REGION 1..10: note = Table B: HLA-DRB1*04:03L HLA-DRB1*01:03L HLA-DRB1*04:05L HLA-DQA1*01:02-B1*06:02L HLA-DRB1*01:01L HLA-DPA1*02:01-B1*13:01M HLA-DRB1*16:01L HLA-DQA1*01:03-B1*06:01M HLA-DRB1*15:03L
  source 1..10: note = Severe acute respiratory syndrome coronavirus 2
VYSSANNCTF

SEQ ID NO: 13675 - protein, 11 aa, Severe acute respiratory syndrome-related coronavirus
  REGION 1..11: note = Table B: HLA-DRB1*04:03L HLA-DRB1*13:03L HLA-DRB1*04:02L HLA-DRB1*04:05L HLA-DQA1*03:01-B1*03:02L HLA-DRB1*14:17L
  source 1..11: note = Severe acute respiratory syndrome coronavirus 2
PFLMDLEGKQG

SEQ ID NO: 13676 - protein, 10 aa, Severe acute respiratory syndrome-related coronavirus
  REGION 1..10: note = Table B: HLA-DRB1*04:03L HLA-DRB1*04:02L HLA-DRB1*14:17L
  source 1..10: note = Severe acute respiratory syndrome coronavirus 2
PINLVRDLPQ

SEQ ID NO: 13677 - protein, 10 aa, Severe acute respiratory syndrome-related coronavirus
  REGION 1..10: note = Table B: HLA-DRB1*04:03M HLA-DRB1*13:03L HLA-DRB1*01:03L HLA-DRB1*04:02L HLA-DRB1*04:04L HLA-DRB1*04:05L HLA-DRB4*03:01NL HLA-DRB1*14:01L HLA-DRB1*11:04L HLA-DQA1*01-B1*05L HLA-DRB1*04:10L HLA-DRB1*12:01L HLA-DQA1*03:01-B1*03:02L
  REGION 1..10: note = CONT. FROM ABOVE: HLA-DRB1*14:54L HLA-DRB1*14:17L HLA-DRB1*16:01 L HLA-DRB1*04:08L HLA-DRB1*08:03L
  source 1..10: note = Severe acute respiratory syndrome coronavirus 2
INLVRDLPQG

SEQ ID NO: 13678 - protein, 10 aa, Severe acute respiratory syndrome-related coronavirus
  REGION 1..10: note = Table B: HLA-DRB1*04:03L HLA-DRB1*13:02L HLA-DRB1*13:03L HLA-DRB1*01:03L HLA-DRB1*04:02L HLA-DRB1*14:01L HLA-DRB1*14:02L HLA-DQA1*01-B1*05L HLA-DQA1*05:01-B1*02:01L HLA-DRB1*12:01L HLA-DRB3*01:01L HLA-DQA1*03:01-B1*03:02L HLA-DRB1*16:01L
  REGION 1..10: note = CONT. FROM ABOVE: HLA-DRB1*15:03L
  source 1..10: note = Severe acute respiratory syndrome coronavirus 2
LVRDLPQGFS

SEQ ID NO: 13679 - protein, 12 aa, Severe acute respiratory syndrome-related coronavirus
  REGION 1..12: note = Table B: HLA-DRB1*04:03L
  source 1..12: note = Severe acute respiratory syndrome coronavirus 2
FSALEPLVDLPI

SEQ ID NO: 13680 - protein, 11 aa, Severe acute respiratory syndrome-related coronavirus
  REGION 1..11: note = Table B: HLA-DRB1*04:03L HLA-DRB1*04:02L HLA-DRB1*14:17L
  source 1..11: note = Severe acute respiratory syndrome coronavirus 2
LPIGINITRFQ

SEQ ID NO: 13681 - protein, 11 aa, Severe acute respiratory syndrome-related coronavirus
  REGION 1..11: note = Table B: HLA-DRB1*04:03L HLA-DRB1*01:03L HLA-DRB1*04:02L HLA-DRB1*04:04L HLA-DRB1*04:05L HLA-DQA1*01:02-B1*06:02L HLA-DRB1*01:02L HLA-DPA1*01:03-B1*03:01L HLA-DRB1*12:01L HLA-DPA1*03:01-B1*105:01L HLA-DQA1*03:01-B1*03:02L
  REGION 1..11: note = CONT. FROM ABOVE: HLA-DRB1*14:17L HLA-DPA1*01:02-B1*04:01L HLA-D RB1*16:01L HLA-DRB1*04:08L HLA-DQA1*02:01-B1*03:03L HLA-DRB1*15: 03L
  source 1..11: note = Severe acute respiratory syndrome coronavirus 2
ITRFQTLLALH

SEQ ID NO: 13682 - protein, 13 aa, Severe acute respiratory syndrome-related coronavirus
  REGION 1..13: note = Table B: HLA-DRB1*04:03L HLA-DRB1*13:02L HLA-DRB1*04:02L HLA-DRB1*08:04L HLA-DRB1*11:04L HLA-DRB1*08:01L HLA-DRB1*04:08L
  source 1..13: note = Severe acute respiratory syndrome coronavirus 2
TLLALHRSYLTPG

SEQ ID NO: 13683 - protein, 12 aa, Severe acute respiratory syndrome-related coronavirus
  REGION 1..12: note = Table B: HLA-DRB1*04:03L HLA-DRB1*04:05L HLA-DQA1*01:02-B1*06:02L HLA-DRB1*01:02L HLA-DPA1*01:03-B1*03:01L HLA-DQA1*01-B1*05L HLA-DRB1*12:01L HLA-DPA1*02:01-B1*13:01L HLA-DQA1*03:01-B1*03:02L
  REGION 1..12: note = CONT. FROM ABOVE: HLA-DRB1*16:01L HLA-DQA1*01:03-B1*06:01L HLA-D QA1*02:01-B1*03:03L
  source 1..12: note = Severe acute respiratory syndrome coronavirus 2
ALHRSYLTPGDS

SEQ ID NO: 13684 - protein, 10 aa, Severe acute respiratory syndrome-related coronavirus
  REGION 1..10: note = Table B: HLA-DRB1*04:03L HLA-DRB1*14:17L
  source 1..10: note = Severe acute respiratory syndrome coronavirus 2
YLTPGDSSSG

SEQ ID NO: 13685 - protein, 15 aa, Severe acute respiratory syndrome-related coronavirus
  REGION 1..15: note = Table B: HLA-DRB1*04:03L HLA-DRB1*13:03L HLA-DRB1*04:02L HLA-DRB1*04:05L HLA-DRB1*01:02L HLA-DRB4*03:01NL HLA-DPA1*01:03-B1*03:01L HLA-DRB1*08:01L HLA-DRB1*11:01L HLA-DQA1*01-B1*05L HLA-DPA1*01:03-B1*04:02L HLA-DRB1*12:01L
  REGION 1..15: note = CONT. FROM ABOVE: HLA-DPA1*03:01-B1*105:01L HLA-DPA1*01:03-B1*10 4:01L HLA-DRB1*14:17L HLA-DRB1*16:01L HLA-DRB1*04:08L
  source 1..15: note = Severe acute respiratory syndrome coronavirus 2
TPGDSSSGWTAGAAA

SEQ ID NO: 13686 - protein, 13 aa, Severe acute respiratory syndrome-related coronavirus
  REGION 1..13: note = Table B: HLA-DRB1*04:03L HLA-DRB1*01:03L HLA-DRB1*01:02L HLA-DQA1*01:01-B1*05:01L HLA-DQA1*05:05-B1*03:116L HLA-DPA1*01:03-B1*04:02L HLA-DRB1*12:01L
  source 1..13: note = Severe acute respiratory syndrome coronavirus 2
SGWTAGAAAYYVG

SEQ ID NO: 13687 - protein, 11 aa, Severe acute respiratory syndrome-related coronavirus
  REGION 1..11: note = Table B: HLA-DRB1*04:03L HLA-DRB1*13:02L HLA-DRB1*04:02L HLA-DRB1*14:01L HLA-DRB1*12:01L HLA-DRB1*14:17L HLA-DRB1*16:01L HLA-DQA1*02:01-B1*03:03L HLA-DRB1*15:03L
  source 1..11: note = Severe acute respiratory syndrome coronavirus 2
LLKYNENGTIT

SEQ ID NO: 13688 - protein, 11 aa, Severe acute respiratory syndrome-related coronavirus
  REGION 1..11: note = Table B: HLA-DRB1*04:03L HLA-DRB1*13:02L HLA-DRB1*04:02L HLA-DRB1*14:01L HLA-DQA1*01-B1*05L HLA-DRB1*12:01L HLA-DQA1*03:01-B1*03:02L HLA-DRB1*14:17L HLA-DRB1*16:01L HLA-DQA1*02:01-B1*03:03L
  source 1..11: note = Severe acute respiratory syndrome coronavirus 2
LKYNENGTITD

SEQ ID NO: 13689 - protein, 11 aa, Severe acute respiratory syndrome-related coronavirus
  REGION 1..11: note = Table B: HLA-DRB1*04:03L
  source 1..11: note = Severe acute respiratory syndrome coronavirus 2
KYNENGTITDA

SEQ ID NO: 13690 - protein, 14 aa, Severe acute respiratory syndrome-related coronavirus
  REGION 1..14: note = Table B: HLA-DRB1*04:03L HLA-DQA1*01:02-B1*06:02L HLA-DQA1*01-B1*05L HLA-DPA1*03:01-B1*105:01L HLA-DQA1*03:01-B1*03:02L HLA-DQA1*01:03-B1*06:01L HLA-DQA1*02:01-B1*03:03L
  source 1..14: note = Severe acute respiratory syndrome coronavirus 2
GTITDAVDCALDPL

SEQ ID NO: 13691 - protein, 12 aa, Severe acute respiratory syndrome-related coronavirus
  REGION 1..12: note = Table B: HLA-DRB1*04:03L HLA-DQA1*01-B1*05L HLA-DQA1*05:01-B1*02:01L HLA-DRB1*14:17L
  source 1..12: note = Severe acute respiratory syndrome coronavirus 2
DAVDCALDPLSE

SEQ ID NO: 13692 - protein, 12 aa, Severe acute respiratory syndrome-related coronavirus
  REGION 1..12: note = Table B: HLA-DRB1*04:03L HLA-DRB1*14:17L
  source 1..12: note = Severe acute respiratory syndrome coronavirus 2
AVDCALDPLSET

SEQ ID NO: 13693 - protein, 12 aa, Severe acute respiratory syndrome-related coronavirus
  REGION 1..12: note = Table B: HLA-DRB1*04:03L HLA-DQA1*01:02-B1*06:02L HLA-DPA1*03:01-B1*105:01L HLA-DQA1*03:01-B1*03:02L HLA-DQA1*01:03-B1*06:01L HLA-DQA1*02:01-B1*03:03L
  source 1..12: note = Severe acute respiratory syndrome coronavirus 2
VDCALDPLSETK

SEQ ID NO: 13694 - protein, 10 aa, Severe acute respiratory syndrome-related coronavirus
  REGION 1..10: note = Table B: HLA-DRB1*04:03L HLA-DRB1*13:03L HLA-DRB1*04:02L HLA-DQA1*03:01-B1*03:02L HLA-DRB1*14:17L HLA-DRB1*16:01L HLA-DQA1*02:01-B1*03:03L
  source 1..10: note = Severe acute respiratory syndrome coronavirus 2
FTVEKGIYQT

SEQ ID NO: 13695 - protein, 11 aa, Severe acute respiratory syndrome-related coronavirus
  REGION 1..11: note = Table B: HLA-DRB1*04:03L HLA-DQA1*03:01-B1*03:02L HLA-DRB1*14:17L HLA-DQA1*01:03-B1*06:01L HLA-DQA1*02:01-B1*03:03L
  source 1..11: note = Severe acute respiratory syndrome coronavirus 2
TVEKGIYQTSN

SEQ ID NO: 13696 - protein, 10 aa, Severe acute respiratory syndrome-related coronavirus
  REGION 1..10: note = Table B: HLA-DRB1*04:03L HLA-DQA1*03:01-B1*03:02L HLA-DQA1*02:01-B1*03:03L
  source 1..10: note = Severe acute respiratory syndrome coronavirus 2
TSNFRVQPTE

SEQ ID NO: 13697 - protein, 10 aa, Severe acute respiratory syndrome-related coronavirus
  REGION 1..10: note = Table B: HLA-DRB1*04:03L HLA-DQA1*03:01-B1*03:02L
  source 1..10: note = Severe acute respiratory syndrome coronavirus 2
SNFRVQPTES

SEQ ID NO: 13698 - protein, 10 aa, Severe acute respiratory syndrome-related coronavirus
  REGION 1..10: note = Table B: HLA-DRB1*04:03L HLA-DQA1*03:01-B1*03:02L HLA-DPA1*01:02-B1*04:01L HLA-DQA1*01:03-B1*06:01L HLA-DQA1*02:01-B1*03:03L
  source 1..10: note = Severe acute respiratory syndrome coronavirus 2
PTESIVRFPN

SEQ ID NO: 13699 - protein, 13 aa, Severe acute respiratory syndrome-related coronavirus
  REGION 1..13: note = Table B: HLA-DRB1*04:03L HLA-DQA1*01:02-B1*06:02L HLA-DRB1*01:02L HLA-DPA1*03:01-B1*04:02L HLA-DQA1*05:01-B1*02:01L HLA-DRB1*12:01L HLA-DPA1*03:01-B1*105:01L HLA-DQA1*03:01-B1*03:02L
  REGION 1..13: note = CONT. FROM ABOVE: HLA-DQA1*05:05-B1*03:01L HLA-DQA1*01:03-B1*06: 01L HLA-DQA1*02:01-B1*03:03L HLA-DRB1*15:03L
  source 1..13: note = Severe acute respiratory syndrome coronavirus 2
FPNITNLCPFGEV

SEQ ID NO: 13700 - protein, 12 aa, Severe acute respiratory syndrome-related coronavirus
  REGION 1..12: note = Table B: HLA-DRB1*04:03L HLA-DRB1*13:02L HLA-DRB1*13:03L HLA-DRB1*04:05L HLA-DRB1*08:04L HLA-DRB3*02:01L HLA-DRB1*11:04L HLA-DRB1*08:01L HLA-DRB1*11:01L HLA-DRB1*14:54L HLA-DPA1*01:03-B1*02:01L HLA-DRB1*04:08L
  source 1..12: note = Severe acute respiratory syndrome coronavirus 2
GEVFNATRFASV

SEQ ID NO: 13701 - protein, 12 aa, Severe acute respiratory syndrome-related coronavirus
  REGION 1..12: note = Table B: HLA-DRB1*04:03L HLA-DRB1*04:04L HLA-DRB3*01:01L
  source 1..12: note = Severe acute respiratory syndrome coronavirus 2
VFNATRFASVYA

SEQ ID NO: 13702 - protein, 13 aa, Severe acute respiratory syndrome-related coronavirus
  REGION 1..13: note = Table B: HLA-DRB1*04:03L HLA-DRB1*04:02L HLA-DRB1*01:01L HLA-DRB1*03:01L HLA-DRB1*14:01L HLA-DRB1*11:04L HLA-DRB3*01:01L HLA-DPA1*03:01-B1*105:01L
  source 1..13: note = Severe acute respiratory syndrome coronavirus 2
ATRFASVYAWNRK

SEQ ID NO: 13703 - protein, 14 aa, Severe acute respiratory syndrome-related coronavirus
  REGION 1..14: note = Table B: HLA-DRB1*04:03L HLA-DRB1*04:04L HLA-DRB1*01:01L HLA-DPA1*01:03-B1*03:01L HLA-DPA1*03:01-B1*105:01L HLA-DQA1*01:03-B1*06:01L
  source 1..14: note = Severe acute respiratory syndrome coronavirus 2
FASVYAWNRKRISN

SEQ ID NO: 13704 - protein, 13 aa, Severe acute respiratory syndrome-related coronavirus
  REGION 1..13: note = Table B: HLA-DRB1*04:03L HLA-DRB1*01:02L HLA-DQA1*02:01-B1*03:03L HLA-DRB1*15:03L
  source 1..13: note = Severe acute respiratory syndrome coronavirus 2
KRISNCVADYSVL

SEQ ID NO: 13705 - protein, 11 aa, Severe acute respiratory syndrome-related coronavirus
  REGION 1..11: note = Table B: HLA-DRB1*04:03L HLA-DRB1*14:17L
  source 1..11: note = Severe acute respiratory syndrome coronavirus 2
ADYSVLYNSAS

SEQ ID NO: 13706 - protein, 11 aa, Severe acute respiratory syndrome-related coronavirus
  REGION 1..11: note = Table B: HLA-DRB1*04:03L HLA-DPA1*02:01-B1*13:01L
  source 1..11: note = Severe acute respiratory syndrome coronavirus 2
DYSVLYNSASF

SEQ ID NO: 13707 - protein, 11 aa, Severe acute respiratory syndrome-related coronavirus
  REGION 1..11: note = Table B: HLA-DRB1*04:03L HLA-DRB1*04:02L HLA-DRB1*04:04L HLA-DRB1*04:05L HLA-DRB4*03:01NL HLA-DRB1*04:10L HLA-DRB1*14:17L HLA-DRB1*16:01L HLA-DRB1*04:08L
  source 1..11: note = Severe acute respiratory syndrome coronavirus 2
YSVLYNSASFS

SEQ ID NO: 13708 - protein, 10 aa, Severe acute respiratory syndrome-related coronavirus
  REGION 1..10: note = Table B: HLA-DRB1*04:03L HLA-DRB1*01:03L HLA-DRB1*04:05L HLA-DQA1*01:02-B1*06:02L HLA-DRB1*01:01L HLA-DRB1*08:77L HLA-DQA1*01:01-B1*05:01L HLA-DPA1*02:01-B1*13:01M HLA-DPA1*03:01-B1*105:01L HLA-DRB1*16:01L
  REGION 1..10: note = CONT. FROM ABOVE: HLA-DQA1*01:03-B1*06:01M HLA-DQA1*02:01-B1*03: 03L HLA-DRB1*15:03L
  source 1..10: note = Severe acute respiratory syndrome coronavirus 2
LYNSASFSTF

SEQ ID NO: 13709 - protein, 15 aa, Severe acute respiratory syndrome-related coronavirus
  REGION 1..15: note = Table B: HLA-DRB1*04:03L HLA-DRB1*13:02L HLA-DRB1*04:02L HLA-DRB1*04:04L HLA-DRB1*01:01L HLA-DRB3*02:01L HLA-DPA1*01:03-B1*03:01L HLA-DPA1*03:01-B1*04:02L HLA-DRB1*14:01L HLA-DRB1*11:03L HLA-DRB1*11:04L HLA-DRB1*14:02L
  REGION 1..15: note = CONT. FROM ABOVE: HLA-DQA1*05:05-B1*03:19L HLA-DPA1*01:03-B1*04: 02L HLA-DRB3*01:01L HLA-DPA1*02:01-B1*13:01L HLA-DQA1*03:01-B1*0 3:02L HLA-DQA1*05:05-B1*03:01L HLA-DRB1*07:01L HLA-DRB1*10:01L H LA-DRB1*15:01L
  source 1..15: note = Severe acute respiratory syndrome coronavirus 2
SASFSTFKCYGVSPT

SEQ ID NO: 13710 - protein, 16 aa, Severe acute respiratory syndrome-related coronavirus
  REGION 1..16: note = Table B: HLA-DRB1*04:03L HLA-DRB1*01:03L HLA-DQA1*03:01-B1*03:02L HLA-DRB1*16:01L
  source 1..16: note = Severe acute respiratory syndrome coronavirus 2
SPTKLNDLCFTNVYAD

SEQ ID NO: 13711 - protein, 11 aa, Severe acute respiratory syndrome-related coronavirus
  REGION 1..11: note = Table B: HLA-DRB1*04:03L
  source 1..11: note = Severe acute respiratory syndrome coronavirus 2
NVYADSFVIRG

SEQ ID NO: 13712 - protein, 10 aa, Severe acute respiratory syndrome-related coronavirus
  REGION 1..10: note = Table B: HLA-DRB1*04:03L HLA-DRB1*01:03L HLA-DRB1*04:02L HLA-DRB1*01:02L HLA-DQA1*03:01-B1*03:02L HLA-DRB1*14:17L HLA-DRB1*16:01L HLA-DRB1*04:08L HLA-DQA1*02:01-B1*03:03L
  source 1..10: note = Severe acute respiratory syndrome coronavirus 2
FVIRGDEVRQ

SEQ ID NO: 13713 - protein, 10 aa, Severe acute respiratory syndrome-related coronavirus
  REGION 1..10: note = Table B: HLA-DRB1*04:03L HLA-DQA1*03:01-B1*03:02L
  source 1..10: note = Severe acute respiratory syndrome coronavirus 2
VRQIAPGQTG

SEQ ID NO: 13714 - protein, 10 aa, Severe acute respiratory syndrome-related coronavirus
  REGION 1..10: note = Table B: HLA-DRB1*04:03L HLA-DQA1*01-B1*05L HLA-DQA1*03:01-B1*03:02L
  source 1..10: note = Severe acute respiratory syndrome coronavirus 2
NYKLPDDFTG

SEQ ID NO: 13715 - protein, 10 aa, Severe acute respiratory syndrome-related coronavirus
  REGION 1..10: note = Table B: HLA-DRB1*04:03L HLA-DRB1*04:02L HLA-DRB1*04:05L HLA-DQA1*01-B1*05L HLA-DRB1*04:10L HLA-DRB1*14:17L
  source 1..10: note = Severe acute respiratory syndrome coronavirus 2
IAWNSNNLDS

SEQ ID NO: 13716 - protein, 11 aa, Severe acute respiratory syndrome-related coronavirus
  REGION 1..11: note = Table B: HLA-DRB1*04:03L HLA-DQA1*02:01-B1*03:03L
  source 1..11: note = Severe acute respiratory syndrome coronavirus 2
WNSNNLDSKVG

SEQ ID NO: 13717 - protein, 10 aa, Severe acute respiratory syndrome-related coronavirus
  REGION 1..10: note = Table B: HLA-DRB1*04:03L HLA-DQA1*03:01-B1*03:02L HLA-DRB1*14:17L
  source 1..10: note = Severe acute respiratory syndrome coronavirus 2
NNLDSKVGGN

SEQ ID NO: 13718 - protein, 11 aa, Severe acute respiratory syndrome-related coronavirus
  REGION 1..11: note = Table B: HLA-DRB1*04:03L HLA-DQA1*01-B1*05L HLA-DQA1*03:01-B1*03:02L
  source 1..11: note = Severe acute respiratory syndrome coronavirus 2
LKPFERDISTE

SEQ ID NO: 13719 - protein, 12 aa, Severe acute respiratory syndrome-related coronavirus
  REGION 1..12: note = Table B: HLA-DRB1*04:03L HLA-DRB1*13:02L HLA-DRB1*13:03L HLA-DRB1*01:03L HLA-DRB1*01:02L HLA-DRB1*08:04L HLA-DRB3*02:01L HLA-DPA1*01:03-B1*04:02L HLA-DRB1*12:01L HLA-DRB3*01:01L HLA-DPA1*03:01-B1*105:01L HLA-DPA1*01:02-B1*04:01L
  REGION 1..12: note = CONT. FROM ABOVE: HLA-DRB1*04:08L
  source 1..12: note = Severe acute respiratory syndrome coronavirus 2
KPFERDISTEIY

SEQ ID NO: 13720 - protein, 11 aa, Severe acute respiratory syndrome-related coronavirus
  REGION 1..11: note = Table B: HLA-DRB1*04:03L HLA-DRB1*14:17L
  source 1..11: note = Severe acute respiratory syndrome coronavirus 2
FERDISTEIYQ

SEQ ID NO: 13721 - protein, 12 aa, Severe acute respiratory syndrome-related coronavirus
  REGION 1..12: note = Table B: HLA-DRB1*04:03L HLA-DQA1*01:02-B1*06:02L HLA-DQA1*05:01-B1*02:01L HLA-DQA1*02:01-B1*03:03L
  source 1..12: note = Severe acute respiratory syndrome coronavirus 2
ERDISTEIYQAG

SEQ ID NO: 13722 - protein, 11 aa, Severe acute respiratory syndrome-related coronavirus
  REGION 1..11: note = Table B: HLA-DRB1*04:03L HLA-DQA1*05:05-B1*03:01L
  source 1..11: note = Severe acute respiratory syndrome coronavirus 2
IYQAGSTPCNG

SEQ ID NO: 13723 - protein, 12 aa, Severe acute respiratory syndrome-related coronavirus
  REGION 1..12: note = Table B: HLA-DRB1*04:03L HLA-DPA1*03:01-B1*04:02L HLA-DQA1*01-B1*05L HLA-DPA1*03:01-B1*105:01L HLA-DQA1*03:01-B1*03:02L HLA-DPA1*01:02-B1*04:01L HLA-DQA1*02:01-B1*03:03L
  source 1..12: note = Severe acute respiratory syndrome coronavirus 2
FPLQSYGFQPTN

SEQ ID NO: 13724 - protein, 10 aa, Severe acute respiratory syndrome-related coronavirus
  REGION 1..10: note = Table B: HLA-DRB1*04:03L HLA-DRB1*04:02L HLA-DRB4*03:01NL HLA-DQA1*01-B1*05L HLA-DQA1*03:01-B1*03:02L HLA-DRB1*14:17L HLA-DQA1*02:01-B1*03:03L
  source 1..10: note = Severe acute respiratory syndrome coronavirus 2
YGFQPTNGVG

SEQ ID NO: 13725 - protein, 13 aa, Severe acute respiratory syndrome-related coronavirus
  REGION 1..13: note = Table B: HLA-DRB1*04:03L HLA-DRB1*01:03L HLA-DRB1*04:02L HLA-DRB1*04:05L HLA-DRB1*01:02L HLA-DRB1*08:04L HLA-DPA1*01:03-B1*03:01L HLA-DRB1*14:01L HLA-DRB1*08:01L HLA-DQA1*01-B1*05L HLA-DQA1*05:01-B1*02:01L
  REGION 1..13: note = CONT. FROM ABOVE: HLA-DPA1*01:03-B1*04:01L HLA-DPA1*01:03-B1*04: 02L HLA-DRB1*12:01L HLA-DQA1*03:01-B1*03:02L HLA-DPA1*01:03-B1*0 2:01L HLA-DRB1*14:17L HLA-DRB1*16:01L HLA-DQA1*01:03-B1*06:01L H LA-DRB1*04:08L HLA-DQA1*02:01-B1*03:03L
  source 1..13: note = Severe acute respiratory syndrome coronavirus 2
VVVLSFELLHAPA

SEQ ID NO: 13726 - protein, 15 aa, Severe acute respiratory syndrome-related coronavirus
  REGION 1..15: note = Table B: HLA-DRB1*04:03L HLA-DRB1*13:02L HLA-DRB1*08:77L HLA-DRB1*07:01L
  source 1..15: note = Severe acute respiratory syndrome coronavirus 2
VNFNFNGLTGTGVLT

SEQ ID NO: 13727 - protein, 13 aa, Severe acute respiratory syndrome-related coronavirus
  REGION 1..13: note = Table B: HLA-DRB1*04:03L
  source 1..13: note = Severe acute respiratory syndrome coronavirus 2
NGLTGTGVLTESN

SEQ ID NO: 13728 - protein, 12 aa, Severe acute respiratory syndrome-related coronavirus
  REGION 1..12: note = Table B: HLA-DRB1*04:03L HLA-DRB1*13:02L HLA-DRB1*01:03L HLA-DRB1*04:02L HLA-DRB1*04:05L HLA-DQA1*01:02-B1*06:02L HLA-DRB1*01:02L HLA-DRB1*14:01L HLA-DRB1*08:01L HLA-DRB1*12:01L HLA-DPA1*02:01-B1*13:01L HLA-DPA1*03:01-B1*105:01L
  REGION 1..12: note = CONT. FROM ABOVE: HLA-DQA1*01:03-B1*06:01L HLA-DRB1*04:08L
  source 1..12: note = Severe acute respiratory syndrome coronavirus 2
KKFLPFQQFGRD

SEQ ID NO: 13729 - protein, 13 aa, Severe acute respiratory syndrome-related coronavirus
  REGION 1..13: note = Table B: HLA-DRB1*04:03L HLA-DRB1*01:02L HLA-DRB1*11:04L HLA-DRB1*11:01L HLA-DRB1*12:01L HLA-DRB1*14:54L HLA-DRB1*14:17L HLA-DRB1*08:03L HLA-DRB1*15:03L
  source 1..13: note = Severe acute respiratory syndrome coronavirus 2
LPFQQFGRDIADT

SEQ ID NO: 13730 - protein, 11 aa, Severe acute respiratory syndrome-related coronavirus
  REGION 1..11: note = Table B: HLA-DRB1*04:03L HLA-DQA1*03:01-B1*03:02L HLA-DRB1*14:17L
  source 1..11: note = Severe acute respiratory syndrome coronavirus 2
FGRDIADTTDA

SEQ ID NO: 13731 - protein, 11 aa, Severe acute respiratory syndrome-related coronavirus
  REGION 1..11: note = Table B: HLA-DRB1*04:03L HLA-DQA1*01:03-B1*06:01L
  source 1..11: note = Severe acute respiratory syndrome coronavirus 2
TDAVRDPQTLE

SEQ ID NO: 13732 - protein, 13 aa, Severe acute respiratory syndrome-related coronavirus
  REGION 1..13: note = Table B: HLA-DRB1*04:03L HLA-DPA1*03:01-B1*04:02L HLA-DRB1*12:01L HLA-DPA1*03:01-B1*105:01L HLA-DRB1*16:01L HLA-DRB1*15:03L
  source 1..13: note = Severe acute respiratory syndrome coronavirus 2
DPQTLEILDITPC

SEQ ID NO: 13733 - protein, 12 aa, Severe acute respiratory syndrome-related coronavirus
  REGION 1..12: note = Table B: HLA-DRB1*04:03L HLA-DRB1*01:03L HLA-DRB1*04:02L HLA-DPA1*01:03-B1*03:01L HLA-DQA1*01:01-B1*05:01L HLA-DPA1*03:01-B1*105:01L HLA-DRB1*04:08L
  source 1..12: note = Severe acute respiratory syndrome coronavirus 2
FGGVSVITPGTN

SEQ ID NO: 13734 - protein, 12 aa, Severe acute respiratory syndrome-related coronavirus
  REGION 1..12: note = Table B: HLA-DRB1*04:03L
  source 1..12: note = Severe acute respiratory syndrome coronavirus 2
GGVSVITPGTNT

SEQ ID NO: 13735 - protein, 10 aa, Severe acute respiratory syndrome-related coronavirus
  REGION 1..10: note = Table B: HLA-DRB1*04:03L HLA-DRB1*14:17L
  source 1..10: note = Severe acute respiratory syndrome coronavirus 2
VITPGTNTSN

SEQ ID NO: 13736 - protein, 15 aa, Severe acute respiratory syndrome-related coronavirus
  REGION 1..15: note = Table B: HLA-DRB1*04:03L
  source 1..15: note = Severe acute respiratory syndrome coronavirus 2
TPGTNTSNQVAVLYQ

SEQ ID NO: 13737 - protein, 12 aa, Severe acute respiratory syndrome-related coronavirus
  REGION 1..12: note = Table B: HLA-DRB1*04:03L HLA-DQA1*01-B1*05L HLA-DRB1*15:03L
  source 1..12: note = Severe acute respiratory syndrome coronavirus 2
VAVLYQDVNCTE

SEQ ID NO: 13738 - protein, 14 aa, Severe acute respiratory syndrome-related coronavirus
  REGION 1..14: note = Table B: HLA-DRB1*04:03L HLA-DQA1*01-B1*05L HLA-DQA1*05:01-B1*02:01L
  source 1..14: note = Severe acute respiratory syndrome coronavirus 2
AVLYQDVNCTEVPV

SEQ ID NO: 13739 - protein, 11 aa, Severe acute respiratory syndrome-related coronavirus
  REGION 1..11: note = Table B: HLA-DRB1*04:03L HLA-DRB1*04:02L HLA-DRB1*14:17L
  source 1..11: note = Severe acute respiratory syndrome coronavirus 2
TEVPVAIHADQ

SEQ ID NO: 13740 - protein, 12 aa, Severe acute respiratory syndrome-related coronavirus
  REGION 1..12: note = Table B: HLA-DRB1*04:03L
  source 1..12: note = Severe acute respiratory syndrome coronavirus 2
VPVAIHADQLTP

SEQ ID NO: 13741 - protein, 11 aa, Severe acute respiratory syndrome-related coronavirus
  REGION 1..11: note = Table B: HLA-DRB1*04:03L HLA-DRB1*04:02L HLA-DRB4*03:01NL HLA-DQA1*03:01-B1*03:02L HLA-DRB1*14:54L HLA-DRB1*14:17L HLA-DRB1*16:01L
  source 1..11: note = Severe acute respiratory syndrome coronavirus 2
VAIHADQLTPT

SEQ ID NO: 13742 - protein, 13 aa, Severe acute respiratory syndrome-related coronavirus
  REGION 1..13: note = Table B: HLA-DRB1*04:03L HLA-DRB1*13:02L HLA-DRB1*04:05L HLA-DRB1*01:02L HLA-DPA1*03:01-B1*04:02L HLA-DRB1*11:02L HLA-DRB1*11:03L HLA-DRB1*11:04L HLA-DRB1*11:01L HLA-DQA1*05:05-B1*03:116L HLA-DRB1*12:01L HLA-DRB3*01:01L
  REGION 1..13: note = CONT. FROM ABOVE: HLA-DPA1*01:03-B1*02:01L HLA-DRB1*14:17L HLA-D RB1*04:08L HLA-DRB1*08:02L HLA-DRB1*08:03L
  source 1..13: note = Severe acute respiratory syndrome coronavirus 2
DQLTPTWRVYSTG

SEQ ID NO: 13743 - protein, 10 aa, Severe acute respiratory syndrome-related coronavirus
  REGION 1..10: note = Table B: HLA-DRB1*04:03L HLA-DRB4*03:01NL HLA-DRB1*12:01L HLA-DRB1*16:01L HLA-DQA1*02:01-B1*03:03L
  source 1..10: note = Severe acute respiratory syndrome coronavirus 2
VYSTGSNVFQ

SEQ ID NO: 13744 - protein, 10 aa, Severe acute respiratory syndrome-related coronavirus
  REGION 1..10: note = Table B: HLA-DRB1*04:03L HLA-DQA1*03:01-B1*03:02L
  source 1..10: note = Severe acute respiratory syndrome coronavirus 2
GAEHVNNSYE

SEQ ID NO: 13745 - protein, 10 aa, Severe acute respiratory syndrome-related coronavirus
  REGION 1..10: note = Table B: HLA-DRB1*04:03L HLA-DRB1*13:03L HLA-DRB1*01:03L HLA-DRB1*04:02L HLA-DRB4*03:01NL HLA-DRB1*08:01L HLA-DRB1*12:01L HLA-DQA1*03:01-B1*03:02L HLA-DRB1*14:17L HLA-DRB1*16:01L HLA-DQA1*02:01-B1*03:03L
  source 1..10: note = Severe acute respiratory syndrome coronavirus 2
YQTQTNSPRR

SEQ ID NO: 13746 - protein, 12 aa, Severe acute respiratory syndrome-related coronavirus
  REGION 1..12: note = Table B: HLA-DRB1*04:03L HLA-DQA1*01:02-B1*06:02L
  source 1..12: note = Severe acute respiratory syndrome coronavirus 2
SQSIIAYTMSLG

SEQ ID NO: 13747 - protein, 11 aa, Severe acute respiratory syndrome-related coronavirus
  REGION 1..11: note = Table B: HLA-DRB1*04:03L HLA-DRB1*14:17L
  source 1..11: note = Severe acute respiratory syndrome coronavirus 2
IIAYTMSLGAE

SEQ ID NO: 13748 - protein, 11 aa, Severe acute respiratory syndrome-related coronavirus
  REGION 1..11: note = Table B: HLA-DRB1*04:03L HLA-DRB1*04:02L HLA-DRB1*04:05L HLA-DRB4*03:01NL HLA-DRB1*04:10L HLA-DQA1*03:01-B1*03:02L HLA-DRB1*14:17L HLA-DQA1*02:01-B1*03:03L
  source 1..11: note = Severe acute respiratory syndrome coronavirus 2
IAYTMSLGAEN

SEQ ID NO: 13749 - protein, 13 aa, Severe acute respiratory syndrome-related coronavirus
  REGION 1..13: note = Table B: HLA-DRB1*04:03L
  source 1..13: note = Severe acute respiratory syndrome coronavirus 2
SLGAENSVAYSNN

SEQ ID NO: 13750 - protein, 11 aa, Severe acute respiratory syndrome-related coronavirus
  REGION 1..11: note = Table B: HLA-DRB1*04:03L HLA-DRB1*14:17L
  source 1..11: note = Severe acute respiratory syndrome coronavirus 2
NSVAYSNNSIA

SEQ ID NO: 13751 - protein, 12 aa, Severe acute respiratory syndrome-related coronavirus
  REGION 1..12: note = Table B: HLA-DRB1*04:03L HLA-DRB1*04:02L HLA-DRB1*04:05L HLA-DRB4*03:01NL HLA-DQA1*01-B1*05L HLA-DRB1*04:10L HLA-DRB1*12:01L HLA-DQA1*03:01-B1*03:02L HLA-DRB1*14:54L HLA-DRB1*14:17L HLA-DRB1*16:01L HLA-DQA1*02:01-B1*03:03L
  source 1..12: note = Severe acute respiratory syndrome coronavirus 2
VAYSNNSIAIPT

SEQ ID NO: 13752 - protein, 13 aa, Severe acute respiratory syndrome-related coronavirus
  REGION 1..13: note = Table B: HLA-DRB1*04:03L
  source 1..13: note = Severe acute respiratory syndrome coronavirus 2
SNNSIAIPTNFTI

SEQ ID NO: 13753 - protein, 13 aa, Severe acute respiratory syndrome-related coronavirus
  REGION 1..13: note = Table B: HLA-DRB1*04:03L HLA-DQA1*01-B1*05L HLA-DQA1*05:01-B1*02:01L HLA-DRB1*12:01L
  source 1..13: note = Severe acute respiratory syndrome coronavirus 2
NNSIAIPTNFTIS

SEQ ID NO: 13754 - protein, 15 aa, Severe acute respiratory syndrome-related coronavirus
  REGION 1..15: note = Table B: HLA-DRB1*04:03L HLA-DRB1*13:02L HLA-DQA1*01:02-B1*06:02L HLA-DRB1*01:02L HLA-DPA1*03:01-B1*04:02L HLA-DRB1*14:01L HLA-DRB1*12:01L HLA-DPA1*03:01-B1*105:01L HLA-DQA1*05:05-B1*03:01L
  REGION 1..15: note = CONT. FROM ABOVE: HLA-DRB1*16:01L HLA-DRB1*15:03L
  source 1..15: note = Severe acute respiratory syndrome coronavirus 2
IPTNFTISVTTEILP

SEQ ID NO: 13755 - protein, 12 aa, Severe acute respiratory syndrome-related coronavirus
  REGION 1..12: note = Table B: HLA-DRB1*04:03L
  source 1..12: note = Severe acute respiratory syndrome coronavirus 2
VTTEILPVSMTK

SEQ ID NO: 13756 - protein, 10 aa, Severe acute respiratory syndrome-related coronavirus
  REGION 1..10: note = Table B: HLA-DRB1*04:03L
  source 1..10: note = Severe acute respiratory syndrome coronavirus 2
ILPVSMTKTS

SEQ ID NO: 13757 - protein, 13 aa, Severe acute respiratory syndrome-related coronavirus
  REGION 1..13: note = Table B: HLA-DRB1*04:03L HLA-DRB1*01:03L HLA-DQA1*01:02-B1*06:02L HLA-DPA1*03:01-B1*04:02L HLA-DQA1*01-B1*05L HLA-DRB1*12:01L HLA-DQA1*01:03-B1*06:01L HLA-DRB1*04:08L HLA-DRB1*15:01L
  source 1..13: note = Severe acute respiratory syndrome coronavirus 2
SNLLLQYGSFCTQ

SEQ ID NO: 13758 - protein, 13 aa, Severe acute respiratory syndrome-related coronavirus
  REGION 1..13: note = Table B: HLA-DRB1*04:03L HLA-DRB1*04:05L HLA-DQA1*05:05-B1*03:19L HLA-DRB1*12:01L HLA-DRB1*15:03L
  source 1..13: note = Severe acute respiratory syndrome coronavirus 2
LLQYGSFCTQLNR

SEQ ID NO: 13759 - protein, 10 aa, Severe acute respiratory syndrome-related coronavirus
  REGION 1..10: note = Table B: HLA-DRB1*04:03L HLA-DRB1*01:03L HLA-DRB1*01:02L HLA-DRB1*14:17L HLA-DRB1*16:01L
  source 1..10: note = Severe acute respiratory syndrome coronavirus 2
RALTGIAVEQ

SEQ ID NO: 13760 - protein, 10 aa, Severe acute respiratory syndrome-related coronavirus
  REGION 1..10: note = Table B: HLA-DRB1*04:03L HLA-DRB1*04:02L HLA-DRB1*04:05L HLA-DRB4*03:01NL HLA-DQA1*01-B1*05L HLA-DQA1*05:01-B1*02:01L HLA-DRB1*04:10L HLA-DQA1*03:01-B1*03:02L HLA-DRB1*14:54L HLA-DRB1*14:17L HLA-DQA1*02:01-B1*03:03L
  source 1..10: note = Severe acute respiratory syndrome coronavirus 2
IAVEQDKNTQ

SEQ ID NO: 13761 - protein, 10 aa, Severe acute respiratory syndrome-related coronavirus
  REGION 1..10: note = Table B: HLA-DRB1*04:03L HLA-DRB1*14:17L
  source 1..10: note = Severe acute respiratory syndrome coronavirus 2
AVEQDKNTQE

SEQ ID NO: 13762 - protein, 14 aa, Severe acute respiratory syndrome-related coronavirus
  REGION 1..14: note = Table B: HLA-DRB1*04:03L HLA-DRB1*04:05L HLA-DRB3*01:01L HLA-DRB1*04:08L
  source 1..14: note = Severe acute respiratory syndrome coronavirus 2
EVFAQVKQIYKTPP

SEQ ID NO: 13763 - protein, 13 aa, Severe acute respiratory syndrome-related coronavirus
  REGION 1..13: note = Table B: HLA-DRB1*04:03L HLA-DRB1*13:02L HLA-DRB1*13:03L HLA-DRB1*01:03L HLA-DRB1*04:04L HLA-DRB1*04:05L HLA-DQA1*01:02-B1*06:02L HLA-DRB1*01:02L HLA-DRB1*08:04L HLA-DRB1*11:04L HLA-DRB1*08:01L HLA-DRB1*11:01L HLA-DRB1*12:01L
  REGION 1..13: note = CONT. FROM ABOVE: HLA-DRB3*01:01L HLA-DRB1*04:08L HLA-DQA1*02:01 -B1*03:03L
  source 1..13: note = Severe acute respiratory syndrome coronavirus 2
AQVKQIYKTPPIK

SEQ ID NO: 13764 - protein, 10 aa, Severe acute respiratory syndrome-related coronavirus
  REGION 1..10: note = Table B: HLA-DRB1*04:03L HLA-DRB1*01:03L HLA-DRB1*04:05L HLA-DQA1*01:02-B1*06:02L HLA-DRB1*01:01L HLA-DRB1*01:02L HLA-DRB1*08:77L HLA-DRB1*14:02L HLA-DQA1*01:01-B1*05:01L HLA-DRB1*11:01L HLA-DQA1*05:05-B1*03:19L
  REGION 1..10: note = CONT. FROM ABOVE: HLA-DPA1*01:03-B1*04:01L HLA-DRB1*12:01L HLA-D PA1*02:01-B1*13:01M HLA-DPA1*03:01-B1*105:01L HLA-DRB1*16:01L HL A-DQA1*01:03-B1*06:01M HLA-DQA1*02:01-B1*03:03L HLA-DRB1*15:03L
  source 1..10: note = Severe acute respiratory syndrome coronavirus 2
IYKTPPIKDF

SEQ ID NO: 13765 - protein, 13 aa, Severe acute respiratory syndrome-related coronavirus
  REGION 1..13: note = Table B: HLA-DRB1*04:03L HLA-DRB1*01:03L HLA-DPA1*01:03-B1*03:01L HLA-DQA1*05:05-B1*03:19L HLA-DRB1*12:01L HLA-DPA1*02:01-B1*13:01L HLA-DQA1*05:05-B1*03:01L HLA-DRB1*16:01L HLA-DRB1*04:08L
  REGION 1..13: note = CONT. FROM ABOVE: HLA-DQA1*02:01-B1*03:03L HLA-DRB1*15:03L
  source 1..13: note = Severe acute respiratory syndrome coronavirus 2
FGGFNFSQILPDP

SEQ ID NO: 13766 - protein, 11 aa, Severe acute respiratory syndrome-related coronavirus
  REGION 1..11: note = Table B: HLA-DRB1*04:03L HLA-DRB1*14:17L HLA-DQA1*02:01-B1*03:03L
  source 1..11: note = Severe acute respiratory syndrome coronavirus 2
NFSQILPDPSK

SEQ ID NO: 13767 - protein, 11 aa, Severe acute respiratory syndrome-related coronavirus
  REGION 1..11: note = Table B: HLA-DRB1*04:03L HLA-DRB1*08:04L HLA-DPA1*01:03-B1*03:01L HLA-DRB1*14:01L HLA-DRB1*08:01L HLA-DPA1*01:03-B1*02:01L
  source 1..11: note = Severe acute respiratory syndrome coronavirus 2
FIEDLLFNKVT

SEQ ID NO: 13768 - protein, 13 aa, Severe acute respiratory syndrome-related coronavirus
  REGION 1..13: note = Table B: HLA-DRB1*04:03L HLA-DRB1*13:02L HLA-DRB1*13:03L HLA-DRB1*04:02L HLA-DRB1*04:05L HLA-DRB1*01:02L HLA-DRB4*03:01NL HLA-DRB1*08:04L HLA-DRB3*02:01L HLA-DPA1*01:03-B1*03:01L HLA-DRB1*11:03L HLA-DRB1*11:04L HLA-DRB1*14:02L HLA-DRB1*08:01L
  REGION 1..13: note = CONT. FROM ABOVE: HLA-DRB1*12:02L HLA-DRB1*14:54L HLA-DQA1*05:05 -B1*03:01L HLA-DRB1*14:17L
  source 1..13: note = Severe acute respiratory syndrome coronavirus 2
IEDLLFNKVTLAD

SEQ ID NO: 13769 - protein, 11 aa, Severe acute respiratory syndrome-related coronavirus
  REGION 1..11: note = Table B: HLA-DRB1*04:03L HLA-DRB1*14:01L
  source 1..11: note = Severe acute respiratory syndrome coronavirus 2
LLFNKVTLADA

SEQ ID NO: 13770 - protein, 11 aa, Severe acute respiratory syndrome-related coronavirus
  REGION 1..11: note = Table B: HLA-DRB1*04:03L HLA-DQA1*03:01-B1*03:02L
  source 1..11: note = Severe acute respiratory syndrome coronavirus 2
LFNKVTLADAG

SEQ ID NO: 13771 - protein, 13 aa, Severe acute respiratory syndrome-related coronavirus
  REGION 1..13: note = Table B: HLA-DRB1*04:03L HLA-DQA1*01-B1*05L HLA-DRB1*16:01L HLA-DRB1*15:03L
  source 1..13: note = Severe acute respiratory syndrome coronavirus 2
DAGFIKQYGDCLG

SEQ ID NO: 13772 - protein, 13 aa, Severe acute respiratory syndrome-related coronavirus
  REGION 1..13: note = Table B: HLA-DRB1*04:03L HLA-DRB1*01:02L HLA-DQA1*01-B1*05L HLA-DRB1*12:01L HLA-DRB1*16:01L
  source 1..13: note = Severe acute respiratory syndrome coronavirus 2
AGFIKQYGDCLGD

SEQ ID NO: 13773 - protein, 13 aa, Severe acute respiratory syndrome-related coronavirus
  REGION 1..13: note = Table B: HLA-DRB1*04:03L HLA-DRB1*01:03L HLA-DQA1*01:02-B1*06:02L HLA-DRB1*01:02L HLA-DRB1*12:01L HLA-DPA1*02:01-B1*13:01L HLA-DPA1*03:01-B1*105:01L HLA-DRB1*04:08L
  source 1..13: note = Severe acute respiratory syndrome coronavirus 2
GFIKQYGDCLGDI

SEQ ID NO: 13774 - protein, 12 aa, Severe acute respiratory syndrome-related coronavirus
  REGION 1..12: note = Table B: HLA-DRB1*04:03L HLA-DRB1*04:05L HLA-DQA1*01:02-B1*06:02L HLA-DRB1*01:02L HLA-DPA1*01:03-B1*03:01L HLA-DQA1*01-B1*05L HLA-DQA1*05:01-B1*02:01L HLA-DRB1*12:01L
  REGION 1..12: note = CONT. FROM ABOVE: HLA-DPA1*02:01-B1*13:01L HLA-DPA1*03:01-B1*105 :01L HLA-DQA1*03:01-B1*03:02L HLA-DRB1*16:01L HLA-DQA1*01:03-B1* 06:01L HLA-DRB1*04:08L HLA-DQA1*02:01-B1*03:03L HLA-DRB1*15:03L
  source 1..12: note = Severe acute respiratory syndrome coronavirus 2
IKQYGDCLGDIA

SEQ ID NO: 13775 - protein, 13 aa, Severe acute respiratory syndrome-related coronavirus
  REGION 1..13: note = Table B: HLA-DRB1*04:03L HLA-DRB1*04:05L HLA-DQA1*01:02-B1*06:02L HLA-DPA1*03:01-B1*105:01L HLA-DRB1*16:01L HLA-DRB1*04:08L
  source 1..13: note = Severe acute respiratory syndrome coronavirus 2
AQKFNGLTVLPPL

SEQ ID NO: 13776 - protein, 13 aa, Severe acute respiratory syndrome-related coronavirus
  REGION 1..13: note = Table B: HLA-DRB1*04:03L HLA-DQA1*01:02-B1*06:02L HLA-DPA1*03:01-B1*105:01L
  source 1..13: note = Severe acute respiratory syndrome coronavirus 2
NGLTVLPPLLTDE

SEQ ID NO: 13777 - protein, 13 aa, Severe acute respiratory syndrome-related coronavirus
  REGION 1..13: note = Table B: HLA-DRB1*04:03L HLA-DPA1*03:01-B1*04:02L HLA-DRB1*12:01L HLA-DPA1*03:01-B1*105:01L HLA-DRB1*15:03L
  source 1..13: note = Severe acute respiratory syndrome coronavirus 2
LPPLLTDEMIAQY

SEQ ID NO: 13778 - protein, 11 aa, Severe acute respiratory syndrome-related coronavirus
  REGION 1..11: note = Table B: HLA-DRB1*04:03L HLA-DQA1*01-B1*05L HLA-DQA1*05:01-B1*02:01L HLA-DQA1*03:01-B1*03:02L HLA-DQA1*02:01-B1*03:03L
  source 1..11: note = Severe acute respiratory syndrome coronavirus 2
DEMIAQYTSAL

SEQ ID NO: 13779 - protein, 11 aa, Severe acute respiratory syndrome-related coronavirus
  REGION 1..11: note = Table B: HLA-DRB1*04:03L HLA-DRB1*04:02L HLA-DRB1*01:02L HLA-DQA1*01-B1*05L HLA-DRB1*12:01L HLA-DRB1*14:17L HLA-DRB1*16:01L HLA-DQA1*01:03-B1*06:01L HLA-DRB1*04:08L HLA-DQA1*02:01-B1*03:03L HLA-DRB1*15:01L HLA-DRB1*15:03L
  source 1..11: note = Severe acute respiratory syndrome coronavirus 2
IAQYTSALLAG

SEQ ID NO: 13780 - protein, 13 aa, Severe acute respiratory syndrome-related coronavirus
  REGION 1..13: note = Table B: HLA-DRB1*04:03L HLA-DRB1*01:03L HLA-DRB1*04:02L HLA-DRB1*01:02L HLA-DPA1*01:03-B1*03:01L HLA-DPA1*03:01-B1*04:02L HLA-DQA1*05:01-B1*02:01L HLA-DRB1*12:01L HLA-DPA1*01:02-B1*04:01L HLA-DRB1*16:01L
  REGION 1..13: note = CONT. FROM ABOVE: HLA-DRB1*04:08L HLA-DRB1*15:03L
  source 1..13: note = Severe acute respiratory syndrome coronavirus 2
AQYTSALLAGTIT

SEQ ID NO: 13781 - protein, 13 aa, Severe acute respiratory syndrome-related coronavirus
  REGION 1..13: note = Table B: HLA-DRB1*04:03L HLA-DQA1*03:01-B1*03:02L
  source 1..13: note = Severe acute respiratory syndrome coronavirus 2
SALLAGTITSGWT

SEQ ID NO: 13782 - protein, 12 aa, Severe acute respiratory syndrome-related coronavirus
  REGION 1..12: note = Table B: HLA-DRB1*04:03L HLA-DRB1*01:03L HLA-DRB1*01:02L HLA-DPA1*01:03-B1*03:01L HLA-DQA1*05:01-B1*02:01L HLA-DPA1*01:03-B1*04:02L HLA-DPA1*03:01-B1*105:01L HLA-DRB1*04:08L
  source 1..12: note = Severe acute respiratory syndrome coronavirus 2
FGAGAALQIPFA

SEQ ID NO: 13783 - protein, 13 aa, Severe acute respiratory syndrome-related coronavirus
  REGION 1..13: note = Table B: HLA-DRB1*04:03L HLA-DRB1*01:03L HLA-DRB1*04:05L HLA-DRB1*04:08L
  source 1..13: note = Severe acute respiratory syndrome coronavirus 2
IPFAMQMAYRFNG

SEQ ID NO: 13784 - protein, 10 aa, Severe acute respiratory syndrome-related coronavirus
  REGION 1..10: note = Table B: HLA-DRB1*04:03L HLA-DQA1*01-B1*05L HLA-DQA1*03:01-B1*03:02L HLA-DRB1*14:17L HLA-DQA1*02:01-B1*03:03L
  source 1..10: note = Severe acute respiratory syndrome coronavirus 2
RFNGIGVTQN

SEQ ID NO: 13785 - protein, 11 aa, Severe acute respiratory syndrome-related coronavirus
  REGION 1..11: note = Table B: HLA-DRB1*04:03L HLA-DQA1*05:05-B1*03:19L HLA-DQA1*05:05-B1*03:01L
  source 1..11: note = Severe acute respiratory syndrome coronavirus 2
FNGIGVTQNVL

SEQ ID NO: 13786 - protein, 11 aa, Severe acute respiratory syndrome-related coronavirus
  REGION 1..11: note = Table B: HLA-DRB1*04:03L HLA-DRB1*13:02L HLA-DRB4*03:01NL HLA-DRB3*02:01L HLA-DPA1*03:01-B1*04:02L HLA-DRB1*14:01L HLA-DRB1*11:02L HLA-DQA1*01-B1*05L HLA-DRB4*01:01L HLA-DQA1*05:05-B1*03:116L HLA-DPA1*01:03-B1*04:02L
  REGION 1..11: note = CONT. FROM ABOVE: HLA-DRB1*12:02L HLA-DPA1*02:01-B1*13:01L HLA-D QA1*05:05-B1*03:01L HLA-DRB1*14:17L HLA-DPA1*01:02-B1*04:01L HLA -DRB1*10:01L HLA-DRB1*08:02L
  source 1..11: note = Severe acute respiratory syndrome coronavirus 2
NGIGVTQNVLY

SEQ ID NO: 13787 - protein, 12 aa, Severe acute respiratory syndrome-related coronavirus
  REGION 1..12: note = Table B: HLA-DRB1*04:03L HLA-DQA1*05:01-B1*02:01L HLA-DRB1*12:01L HLA-DQA1*03:01-B1*03:02L HLA-DRB1*14:17L HLA-DQA1*01:03-B1*06:01L
  source 1..12: note = Severe acute respiratory syndrome coronavirus 2
IGVTQNVLYENQ

SEQ ID NO: 13788 - protein, 10 aa, Severe acute respiratory syndrome-related coronavirus
  REGION 1..10: note = Table B: HLA-DRB1*04:03L HLA-DRB1*04:02L HLA-DRB1*01:02L HLA-DRB1*14:01L HLA-DQA1*01-B1*05L HLA-DQA1*03:01-B1*03:02L HLA-DRB1*16:01L HLA-DQA1*02:01-B1*03:03L HLA-DRB1*15:03L
  source 1..10: note = Severe acute respiratory syndrome coronavirus 2
VLYENQKLIA

SEQ ID NO: 13789 - protein, 11 aa, Severe acute respiratory syndrome-related coronavirus
  REGION 1..11: note = Table B: HLA-DRB1*04:03L HLA-DQA1*03:01-B1*03:02L
  source 1..11: note = Severe acute respiratory syndrome coronavirus 2
ENQKLIANQFN

SEQ ID NO: 13790 - protein, 11 aa, Severe acute respiratory syndrome-related coronavirus
  REGION 1..11: note = Table B: HLA-DRB1*04:03L HLA-DRB1*01:03L HLA-DRB1*04:02L HLA-DQA1*01:02-B1*06:02L HLA-DPA1*03:01-B1*04:02L HLA-DQA1*01-B1*05L HLA-DQA1*05:01-B1*02:01L HLA-DPA1*01:03-B1*04:01L HLA-DPA1*01:03-B1*04:02L
  REGION 1..11: note = CONT. FROM ABOVE: HLA-DRB1*12:01L HLA-DPA1*03:01-B1*105:01L HLA- DRB1*14:17L HLA-DPA1*01:02-B1*04:01L HLA-DRB1*16:01L HLA-DQA1*01 :03-B1*06:01L HLA-DRB1*04:08L HLA-DQA1*02:01-B1*03:03L
  source 1..11: note = Severe acute respiratory syndrome coronavirus 2
LIANQFNSAIG

SEQ ID NO: 13791 - protein, 11 aa, Severe acute respiratory syndrome-related coronavirus
  REGION 1..11: note = Table B: HLA-DRB1*04:03L HLA-DRB1*13:03L HLA-DRB1*01:03L HLA-DRB1*04:02L HLA-DRB4*03:01NL HLA-DQA1*01-B1*05L HLA-DRB1*12:01L HLA-DRB1*14:54L HLA-DQA1*05:05-B1*03:01L HLA-DRB1*14:17L HLA-DPA1*01:02-B1*04:01L HLA-DRB1*16:01L
  REGION 1..11: note = CONT. FROM ABOVE: HLA-DQA1*02:01-B1*03:03L
  source 1..11: note = Severe acute respiratory syndrome coronavirus 2
IANQFNSAIGK

SEQ ID NO: 13792 - protein, 10 aa, Severe acute respiratory syndrome-related coronavirus
  REGION 1..10: note = Table B: HLA-DRB1*04:03L HLA-DQA1*01:02-B1*06:02L HLA-DQA1*03:01-B1*03:02L HLA-DQA1*01:03-B1*06:01L HLA-DQA1*02:01-B1*03:03L
  source 1..10: note = Severe acute respiratory syndrome coronavirus 2
AIGKIQDSLS

SEQ ID NO: 13793 - protein, 10 aa, Severe acute respiratory syndrome-related coronavirus
  REGION 1..10: note = Table B: HLA-DRB1*04:03L HLA-DRB1*04:02L HLA-DQA1*03:01-B1*03:02L HLA-DRB1*14:17L
  source 1..10: note = Severe acute respiratory syndrome coronavirus 2
IGKIQDSLSS

SEQ ID NO: 13794 - protein, 12 aa, Severe acute respiratory syndrome-related coronavirus
  REGION 1..12: note = Table B: HLA-DRB1*04:03L
  source 1..12: note = Severe acute respiratory syndrome coronavirus 2
GKIQDSLSSTAS

SEQ ID NO: 13795 - protein, 12 aa, Severe acute respiratory syndrome-related coronavirus
  REGION 1..12: note = Table B: HLA-DRB1*04:03L
  source 1..12: note = Severe acute respiratory syndrome coronavirus 2
KIQDSLSSTASA

SEQ ID NO: 13796 - protein, 10 aa, Severe acute respiratory syndrome-related coronavirus
  REGION 1..10: note = Table B: HLA-DRB1*04:03L HLA-DRB1*13:03L HLA-DRB1*01:03L HLA-DRB1*04:02L HLA-DRB4*03:01NL HLA-DRB1*12:01L HLA-DQA1*03:01-B1*03:02L HLA-DRB1*14:54L HLA-DQA1*05:05-B1*03:01L HLA-DRB1*14:17L HLA-DRB1*16:01L
  REGION 1..10: note = CONT. FROM ABOVE: HLA-DQA1*01:03-B1*06:01L HLA-DQA1*02:01-B1*03: 03L
  source 1..10: note = Severe acute respiratory syndrome coronavirus 2
LSSTASALGK

SEQ ID NO: 13797 - protein, 10 aa, Severe acute respiratory syndrome-related coronavirus
  REGION 1..10: note = Table B: HLA-DRB1*04:03L HLA-DQA1*03:01-B1*03:02L HLA-DQA1*02:01-B1*03:03L
  source 1..10: note = Severe acute respiratory syndrome coronavirus 2
GKLQDVVNQN

SEQ ID NO: 13798 - protein, 10 aa, Severe acute respiratory syndrome-related coronavirus
  REGION 1..10: note = Table B: HLA-DRB1*04:03L HLA-DRB1*04:02L HLA-DRB1*04:05L HLA-DQA1*05:01-B1*02:01L HLA-DRB1*04:10L HLA-DQA1*03:01-B1*03:02L HLA-DRB1*14:54L HLA-DRB1*14:17L
  source 1..10: note = Severe acute respiratory syndrome coronavirus 2
LQDVVNQNAQ

SEQ ID NO: 13799 - protein, 10 aa, Severe acute respiratory syndrome-related coronavirus
  REGION 1..10: note = Table B: HLA-DRB1*04:03L HLA-DRB1*13:02L HLA-DRB1*13:03L HLA-DRB1*01:03L HLA-DRB1*04:02L HLA-DRB1*01:02L HLA-DRB4*03:01NL HLA-DRB1*08:77L HLA-DRB1*14:01L HLA-DQA1*05:01-B1*02:01L HLA-DRB1*12:01L HLA-DRB1*12:02L HLA-DQA1*03:01-B1*03:02L
  REGION 1..10: note = CONT. FROM ABOVE: HLA-DRB1*14:54L HLA-DRB1*14:17L HLA-DRB1*16:01 L HLA-DQA1*02:01-B1*03:03L HLA-DRB1*15:03L
  source 1..10: note = Severe acute respiratory syndrome coronavirus 2
VVNQNAQALN

SEQ ID NO: 13800 - protein, 12 aa, Severe acute respiratory syndrome-related coronavirus
  REGION 1..12: note = Table B: HLA-DRB1*04:03L HLA-DRB1*04:02L
  source 1..12: note = Severe acute respiratory syndrome coronavirus 2
NQNAQALNTLVK

SEQ ID NO: 13801 - protein, 10 aa, Severe acute respiratory syndrome-related coronavirus
  REGION 1..10: note = Table B: HLA-DRB1*04:03L HLA-DRB1*04:02L HLA-DRB4*03:01NL HLA-DQA1*03:01-B1*03:02L HLA-DRB1*14:17L HLA-DQA1*01:03-B1*06:01L HLA-DQA1*02:01-B1*03:03L
  source 1..10: note = Severe acute respiratory syndrome coronavirus 2
AQALNTLVKQ

SEQ ID NO: 13802 - protein, 10 aa, Severe acute respiratory syndrome-related coronavirus
  REGION 1..10: note = Table B: HLA-DRB1*04:03L HLA-DRB1*04:02L HLA-DQA1*01:02-B1*06:02L HLA-DQA1*03:01-B1*03:02L HLA-DRB1*14:17L HLA-DQA1*01:03-B1*06:01L HLA-DQA1*02:01-B1*03:03L
  source 1..10: note = Severe acute respiratory syndrome coronavirus 2
NTLVKQLSSN

SEQ ID NO: 13803 - protein, 10 aa, Severe acute respiratory syndrome-related coronavirus
  REGION 1..10: note = Table B: HLA-DRB1*04:03L HLA-DRB1*04:02L HLA-DRB1*12:01L HLA-DQA1*03:01-B1*03:02L HLA-DRB1*14:17L HLA-DQA1*02:01-B1*03:03L
  source 1..10: note = Severe acute respiratory syndrome coronavirus 2
LVKQLSSNFG

SEQ ID NO: 13804 - protein, 11 aa, Severe acute respiratory syndrome-related coronavirus
  REGION 1..11: note = Table B: HLA-DRB1*04:03L
  source 1..11: note = Severe acute respiratory syndrome coronavirus 2
VKQLSSNFGAI

SEQ ID NO: 13805 - protein, 10 aa, Severe acute respiratory syndrome-related coronavirus
  REGION 1..10: note = Table B: HLA-DRB1*04:03L HLA-DQA1*01-B1*05L HLA-DQA1*05:01-B1*02:01L HLA-DPA1*03:01-B1*105:01L HLA-DQA1*03:01-B1*03:02L HLA-DQA1*01:03-B1*06:01L HLA-DQA1*02:01-B1*03:03L
  source 1..10: note = Severe acute respiratory syndrome coronavirus 2
VLNDILSRLD

SEQ ID NO: 13806 - protein, 11 aa, Severe acute respiratory syndrome-related coronavirus
  REGION 1..11: note = Table B: HLA-DRB1*04:03L HLA-DRB1*04:02L HLA-DQA1*03:01-B1*03:02L
  source 1..11: note = Severe acute respiratory syndrome coronavirus 2
ILSRLDKVEAE

SEQ ID NO: 13807 - protein, 11 aa, Severe acute respiratory syndrome-related coronavirus
  REGION 1..11: note = Table B: HLA-DRB1*04:03L HLA-DQA1*01-B1*05L HLA-DRB1*14:17L HLA-DQA1*02:01-B1*03:03L
  source 1..11: note = Severe acute respiratory syndrome coronavirus 2
SRLDKVEAEVQ

SEQ ID NO: 13808 - protein, 12 aa, Severe acute respiratory syndrome-related coronavirus
  REGION 1..12: note = Table B: HLA-DRB1*04:03L HLA-DRB1*01:02L HLA-DQA1*05:01-B1*02:01L HLA-DPA1*03:01-B1*105:01L HLA-DRB1*14:54L
  source 1..12: note = Severe acute respiratory syndrome coronavirus 2
EVQIDRLITGRL

SEQ ID NO: 13809 - protein, 12 aa, Severe acute respiratory syndrome-related coronavirus
  REGION 1..12: note = Table B: HLA-DRB1*04:03L HLA-DRB1*04:05L HLA-DQA1*01:02-B1*06:02L HLA-DRB1*01:02L HLA-DQA1*05:01-B1*02:01L HLA-DPA1*03:01-B1*105:01L HLA-DRB1*04:08L
  source 1..12: note = Severe acute respiratory syndrome coronavirus 2
VQIDRLITGRLQ

SEQ ID NO: 13810 - protein, 11 aa, Severe acute respiratory syndrome-related coronavirus
  REGION 1..11: note = Table B: HLA-DRB1*04:03L HLA-DRB1*14:17L
  source 1..11: note = Severe acute respiratory syndrome coronavirus 2
GRLQSLQTYVT

SEQ ID NO: 13811 - protein, 11 aa, Severe acute respiratory syndrome-related coronavirus
  REGION 1..11: note = Table B: HLA-DRB1*04:03L HLA-DRB1*04:02L HLA-DRB1*14:17L
  source 1..11: note = Severe acute respiratory syndrome coronavirus 2
LQSLQTYVTQQ

SEQ ID NO: 13812 - protein, 11 aa, Severe acute respiratory syndrome-related coronavirus
  REGION 1..11: note = Table B: HLA-DRB1*04:03L
  source 1..11: note = Severe acute respiratory syndrome coronavirus 2
QSLQTYVTQQL

SEQ ID NO: 13813 - protein, 11 aa, Severe acute respiratory syndrome-related coronavirus
  REGION 1..11: note = Table B: HLA-DRB1*04:03L HLA-DQA1*01:02-B1*06:02L HLA-DRB1*01:02L HLA-DQA1*01-B1*05L HLA-DRB1*15:03L
  source 1..11: note = Severe acute respiratory syndrome coronavirus 2
LQTYVTQQLIR

SEQ ID NO: 13814 - protein, 10 aa, Severe acute respiratory syndrome-related coronavirus
  REGION 1..10: note = Table B: HLA-DRB1*04:03L HLA-DPA1*03:01-B1*04:02L HLA-DPA1*03:01-B1*105:01L HLA-DQA1*03:01-B1*03:02L HLA-DPA1*01:02-B1*04:01L HLA-DQA1*01:03-B1*06:01L HLA-DQA1*02:01-B1*03:03L
  source 1..10: note = Severe acute respiratory syndrome coronavirus 2
YVTQQLIRAA

SEQ ID NO: 13815 - protein, 10 aa, Severe acute respiratory syndrome-related coronavirus
  REGION 1..10: note = Table B: HLA-DRB1*04:03L HLA-DQA1*01:02-B1*06:02L HLA-DQA1*03:01-B1*03:02L HLA-DQA1*01:03-B1*06:01L HLA-DQA1*02:01-B1*03:03L
  source 1..10: note = Severe acute respiratory syndrome coronavirus 2
LIRAAEIRAS

SEQ ID NO: 13816 - protein, 11 aa, Severe acute respiratory syndrome-related coronavirus
  REGION 1..11: note = Table B: HLA-DRB1*04:03L HLA-DRB1*01:03L HLA-DRB1*04:02L HLA-DRB1*01:02L HLA-DQA1*01:01-B1*05:01L HLA-DRB1*08:01L HLA-DQA1*05:01-B1*02:01L HLA-DPA1*01:03-B1*04:02L HLA-DRB1*12:01L HLA-DRB1*14:17L HLA-DPA1*01:02-B1*04:01L
  REGION 1..11: note = CONT. FROM ABOVE: HLA-DRB1*16:01L HLA-DRB1*04:08L
  source 1..11: note = Severe acute respiratory syndrome coronavirus 2
IRAAEIRASAN

SEQ ID NO: 13817 - protein, 11 aa, Severe acute respiratory syndrome-related coronavirus
  REGION 1..11: note = Table B: HLA-DRB1*04:03L HLA-DRB1*13:03L HLA-DRB1*04:02L HLA-DRB1*04:05L HLA-DRB1*04:10L HLA-DRB1*14:54L HLA-DRB1*14:17L HLA-DRB1*16:01L
  source 1..11: note = Severe acute respiratory syndrome coronavirus 2
AEIRASANLAA

SEQ ID NO: 13818 - protein, 10 aa, Severe acute respiratory syndrome-related coronavirus
  REGION 1..10: note = Table B: HLA-DRB1*04:03L HLA-DRB1*04:02L HLA-DRB1*14:17L
  source 1..10: note = Severe acute respiratory syndrome coronavirus 2
IRASANLAAT

SEQ ID NO: 13819 - protein, 15 aa, Severe acute respiratory syndrome-related coronavirus
  REGION 1..15: note = Table B: HLA-DRB1*04:03L
  source 1..15: note = Severe acute respiratory syndrome coronavirus 2
LAATKMSECVLGQSK

SEQ ID NO: 13820 - protein, 12 aa, Severe acute respiratory syndrome-related coronavirus
  REGION 1..12: note = Table B: HLA-DRB1*04:03L HLA-DQA1*01:02-B1*06:02L HLA-DPA1*03:01-B1*105:01L
  source 1..12: note = Severe acute respiratory syndrome coronavirus 2
GYHLMSFPQSAP

SEQ ID NO: 13821 - protein, 10 aa, Severe acute respiratory syndrome-related coronavirus
  REGION 1..10: note = Table B: HLA-DRB1*04:03L HLA-DRB1*04:02L HLA-DQA1*03:01-B1*03:02L HLA-DRB1*14:17L HLA-DQA1*02:01-B1*03:03L
  source 1..10: note = Severe acute respiratory syndrome coronavirus 2
LMSFPQSAPH

SEQ ID NO: 13822 - protein, 11 aa, Severe acute respiratory syndrome-related coronavirus
  REGION 1..11: note = Table B: HLA-DRB1*04:03L
  source 1..11: note = Severe acute respiratory syndrome coronavirus 2
SFPQSAPHGVV

SEQ ID NO: 13823 - protein, 12 aa, Severe acute respiratory syndrome-related coronavirus
  REGION 1..12: note = Table B: HLA-DRB1*04:03L HLA-DRB1*01:02L HLA-DPA1*03:01-B1*04:02L HLA-DRB1*14:01L HLA-DRB1*12:01L HLA-DPA1*03:01-B1*105:01L HLA-DPA1*01:02-B1*04:01L HLA-DRB1*15:03L
  source 1..12: note = Severe acute respiratory syndrome coronavirus 2
GVVFLHVTYVPA

SEQ ID NO: 13824 - protein, 10 aa, Severe acute respiratory syndrome-related coronavirus
  REGION 1..10: note = Table B: HLA-DRB1*04:03L HLA-DQA1*03:01-B1*03:02L HLA-DRB1*14:17L HLA-DQA1*01:03-B1*06:01L HLA-DQA1*02:01-B1*03:03L
  source 1..10: note = Severe acute respiratory syndrome coronavirus 2
LHVTYVPAQE

SEQ ID NO: 13825 - protein, 10 aa, Severe acute respiratory syndrome-related coronavirus
  REGION 1..10: note = Table B: HLA-DRB1*04:03L HLA-DRB1*01:03L HLA-DRB1*04:05M HLA-DQA1*01:02-B1*06:02L HLA-DRB1*01:01L HLA-DRB1*01:02L HLA-DRB1*08:77L HLA-DPA1*03:01-B1*04:02L HLA-DRB1*11:03L HLA-DRB1*14:02L HLA-DQA1*01:01-B1*05:01L HLA-DRB1*11:01L
  REGION 1..10: note = CONT. FROM ABOVE: HLA-DQA1*05:05-B1*03:19L HLA-DQA1*05:01-B1*02: 01L HLA-DRB4*01:01L HLA-DPA1*01:03-B1*04:01L HLA-DQA1*05:05-B1*0 3:116L HLA-DPA1*01:03-B1*04:02L HLA-DRB1*12:01L HLA-DPA1*02:01-B 1*13:01M HLA-DPA1*03:01-B1*105:01L HLA-DRB1*16:01L
  REGION 1..10: note = CONT. FROM ABOVE: HLA-DQA1*01:03-B1*06:01M HLA-DQA1*02:01-B1*03: 03L HLA-DRB1*15:03L
  source 1..10: note = Severe acute respiratory syndrome coronavirus 2
TYVPAQEKNF

SEQ ID NO: 13826 - protein, 13 aa, Severe acute respiratory syndrome-related coronavirus
  REGION 1..13: note = Table B: HLA-DRB1*04:03L HLA-DRB1*13:02L HLA-DRB1*13:03L HLA-DRB1*01:02L HLA-DRB1*11:04L HLA-DRB1*08:01L HLA-DRB1*13:01L HLA-DRB1*12:01L HLA-DRB1*14:17L HLA-DRB1*04:08L HLA-DRB1*15:03L
  source 1..13: note = Severe acute respiratory syndrome coronavirus 2
PAICHDGKAHFPR

SEQ ID NO: 13827 - protein, 10 aa, Severe acute respiratory syndrome-related coronavirus
  REGION 1..10: note = Table B: HLA-DRB1*04:03L HLA-DRB1*01:03L HLA-DRB1*04:05M HLA-DQA1*01:02-B1*06:02L HLA-DRB1*01:01L HLA-DRB1*01:02L HLA-DRB1*08:77L HLA-DPA1*03:01-B1*04:02L HLA-DRB1*11:03L HLA-DRB1*14:02L HLA-DQA1*01:01-B1*05:01L HLA-DRB1*11:01L
  REGION 1..10: note = CONT. FROM ABOVE: HLA-DQA1*05:05-B1*03:19L HLA-DQA1*05:01-B1*02: 01L HLA-DRB4*01:01L HLA-DPA1*01:03-B1*04:01L HLA-DQA1*05:05-B1*0 3:116L HLA-DRB1*12:01L HLA-DPA1*02:01-B1*13:01M HLA-DPA1*03:01-B 1*105:01L HLA-DRB1*16:01L HLA-DQA1*01:03-B1*06:01M
  REGION 1..10: note = CONT. FROM ABOVE: HLA-DQA1*02:01-B1*03:03L HLA-DRB1*15:03L
  source 1..10: note = Severe acute respiratory syndrome coronavirus 2
VFVSNGTHWF

SEQ ID NO: 13828 - protein, 10 aa, Severe acute respiratory syndrome-related coronavirus
  REGION 1..10: note = Table B: HLA-DRB1*04:03L HLA-DQA1*03:01-B1*03:02L HLA-DRB1*14:17L HLA-DQA1*02:01-B1*03:03L
  source 1..10: note = Severe acute respiratory syndrome coronavirus 2
VTQRNFYEPQ

SEQ ID NO: 13829 - protein, 14 aa, Severe acute respiratory syndrome-related coronavirus
  REGION 1..14: note = Table B: HLA-DRB1*04:03L HLA-DRB1*04:05L HLA-DRB1*01:02L HLA-DPA1*01:03-B1*03:01L HLA-DPA1*03:01-B1*04:02L HLA-DRB1*12:01L HLA-DPA1*02:01-B1*13:01L HLA-DRB1*04:08L
  source 1..14: note = Severe acute respiratory syndrome coronavirus 2
TQRNFYEPQIITTD

SEQ ID NO: 13830 - protein, 10 aa, Severe acute respiratory syndrome-related coronavirus
  REGION 1..10: note = Table B: HLA-DRB1*04:03L HLA-DRB1*14:17L
  source 1..10: note = Severe acute respiratory syndrome coronavirus 2
IITTDNTFVS

SEQ ID NO: 13831 - protein, 11 aa, Severe acute respiratory syndrome-related coronavirus
  REGION 1..11: note = Table B: HLA-DRB1*04:03L
  source 1..11: note = Severe acute respiratory syndrome coronavirus 2
ITTDNTFVSGN

SEQ ID NO: 13832 - protein, 12 aa, Severe acute respiratory syndrome-related coronavirus
  REGION 1..12: note = Table B: HLA-DRB1*04:03L
  source 1..12: note = Severe acute respiratory syndrome coronavirus 2
DPLQPELDSFKE

SEQ ID NO: 13833 - protein, 12 aa, Severe acute respiratory syndrome-related coronavirus
  REGION 1..12: note = Table B: HLA-DRB1*04:03L HLA-DQA1*05:01-B1*02:01L HLA-DPA1*02:01-B1*13:01L HLA-DRB1*16:01L HLA-DQA1*01:03-B1*06:01L HLA-DQA1*02:01-B1*03:03L
  source 1..12: note = Severe acute respiratory syndrome coronavirus 2
QPELDSFKEELD

SEQ ID NO: 13834 - protein, 10 aa, Severe acute respiratory syndrome-related coronavirus
  REGION 1..10: note = Table B: HLA-DRB1*04:03L HLA-DRB1*04:02L HLA-DQA1*01-B1*05L HLA-DQA1*03:01-B1*03:02L
  source 1..10: note = Severe acute respiratory syndrome coronavirus 2
LDSFKEELDK

SEQ ID NO: 13835 - protein, 12 aa, Severe acute respiratory syndrome-related coronavirus
  REGION 1..12: note = Table B: HLA-DRB1*04:03L HLA-DRB1*13:03L HLA-DRB1*01:03L HLA-DRB1*04:02L HLA-DRB1*04:05L HLA-DQA1*01:02-B1*06:02L HLA-DRB1*01:02L HLA-DRB4*03:01NL HLA-DRB1*14:01L HLA-DRB1*08:01L HLA-DRB1*12:01L HLA-DRB1*14:54L HLA-DRB1*14:17L
  REGION 1..12: note = CONT. FROM ABOVE: HLA-DPA1*01:02-B1*04:01L HLA-DRB1*16:01L HLA-D RB1*04:08L HLA-DQA1*02:01-B1*03:03L
  source 1..12: note = Severe acute respiratory syndrome coronavirus 2
LDKYFKNHTSPD

SEQ ID NO: 13836 - protein, 12 aa, Severe acute respiratory syndrome-related coronavirus
  REGION 1..12: note = Table B: HLA-DRB1*04:03L HLA-DRB1*13:03L HLA-DRB1*01:03L HLA-DRB1*04:02L HLA-DRB1*04:05L HLA-DRB1*14:01L HLA-DRB1*08:01L HLA-DRB1*12:01L HLA-DRB1*14:54L HLA-DRB1*14:17L HLA-DRB1*16:01L HLA-DRB1*04:08L
  source 1..12: note = Severe acute respiratory syndrome coronavirus 2
DKYFKNHTSPDV

SEQ ID NO: 13837 - protein, 10 aa, Severe acute respiratory syndrome-related coronavirus
  REGION 1..10: note = Table B: HLA-DRB1*04:03L HLA-DQA1*03:01-B1*03:02L HLA-DRB1*16:01L HLA-DQA1*02:01-B1*03:03L
  source 1..10: note = Severe acute respiratory syndrome coronavirus 2
FKNHTSPDVD

SEQ ID NO: 13838 - protein, 12 aa, Severe acute respiratory syndrome-related coronavirus
  REGION 1..12: note = Table B: HLA-DRB1*04:03L HLA-DRB1*04:02L HLA-DQA1*05:01-B1*02:01L HLA-DRB1*12:01L HLA-DRB1*14:17L HLA-DRB1*16:01L
  source 1..12: note = Severe acute respiratory syndrome coronavirus 2
LGDISGINASVV

SEQ ID NO: 13839 - protein, 11 aa, Severe acute respiratory syndrome-related coronavirus
  REGION 1..11: note = Table B: HLA-DRB1*04:03L HLA-DRB1*04:02L HLA-DQA1*01:02-B1*06:02L HLA-DRB1*01:02L HLA-DRB4*03:01NL HLA-DQA1*05:01-B1*02:01L HLA-DRB1*12:01L HLA-DPA1*03:01-B1*105:01L HLA-DRB1*14:17L HLA-DRB1*16:01L
  REGION 1..11: note = CONT. FROM ABOVE: HLA-DQA1*01:03-B1*06:01L
  source 1..11: note = Severe acute respiratory syndrome coronavirus 2
DISGINASVVN

SEQ ID NO: 13840 - protein, 12 aa, Severe acute respiratory syndrome-related coronavirus
  REGION 1..12: note = Table B: HLA-DRB1*04:03L HLA-DRB1*04:02L HLA-DQA1*01:02-B1*06:02L HLA-DQA1*05:01-B1*02:01L HLA-DPA1*03:01-B1*105:01L HLA-DRB1*14:17L HLA-DQA1*01:03-B1*06:01L
  source 1..12: note = Severe acute respiratory syndrome coronavirus 2
ISGINASVVNIQ

SEQ ID NO: 13841 - protein, 13 aa, Severe acute respiratory syndrome-related coronavirus
  REGION 1..13: note = Table B: HLA-DRB1*04:03L HLA-DRB1*01:03L HLA-DRB1*04:02L HLA-DRB1*04:05L HLA-DRB1*01:02L HLA-DRB1*12:01L HLA-DRB1*16:01L HLA-DRB1*04:08L HLA-DQA1*02:01-B1*03:03L
  source 1..13: note = Severe acute respiratory syndrome coronavirus 2
IQKEIDRLNEVAK

SEQ ID NO: 13842 - protein, 10 aa, Severe acute respiratory syndrome-related coronavirus
  REGION 1..10: note = Table B: HLA-DRB1*04:03L HLA-DQA1*03:01-B1*03:02L HLA-DRB1*14:17L
  source 1..10: note = Severe acute respiratory syndrome coronavirus 2
LNEVAKNLNE

SEQ ID NO: 13843 - protein, 11 aa, Severe acute respiratory syndrome-related coronavirus
  REGION 1..11: note = Table B: HLA-DRB1*04:03L HLA-DRB1*12:02L
  source 1..11: note = Severe acute respiratory syndrome coronavirus 2
NEVAKNLNESL

SEQ ID NO: 13844 - protein, 12 aa, Severe acute respiratory syndrome-related coronavirus
  REGION 1..12: note = Table B: HLA-DRB1*04:03L HLA-DRB1*12:02L HLA-DRB1*14:54L
  source 1..12: note = Severe acute respiratory syndrome coronavirus 2
EVAKNLNESLID

SEQ ID NO: 13845 - protein, 13 aa, Severe acute respiratory syndrome-related coronavirus
  REGION 1..13: note = Table B: HLA-DRB1*04:03L HLA-DRB1*13:02L HLA-DRB1*04:05L HLA-DQA1*01:02-B1*06:02L HLA-DRB1*01:02L HLA-DRB3*02:01L HLA-DPA1*01:03-B1*03:01L HLA-DPA1*03:01-B1*04:02L HLA-DRB1*12:01L HLA-DPA1*03:01-B1*105:01L
  REGION 1..13: note = CONT. FROM ABOVE: HLA-DPA1*01:03-B1*104:01L HLA-DQA1*05:05-B1*03 :01L HLA-DPA1*01:02-B1*04:01L HLA-DRB1*16:01L HLA-DQA1*01:03-B1* 06:01L HLA-DQA1*02:01-B1*03:03L HLA-DRB1*15:03L
  source 1..13: note = Severe acute respiratory syndrome coronavirus 2
VAKNLNESLIDLQ

SEQ ID NO: 13846 - protein, 12 aa, Severe acute respiratory syndrome-related coronavirus
  REGION 1..12: note = Table B: HLA-DRB1*04:03L HLA-DRB1*04:02L HLA-DRB1*04:05L HLA-DQA1*01:02-B1*06:02L HLA-DQA1*05:01-B1*02:01L HLA-DRB1*04:10L HLA-DPA1*02:01-B1*13:01L HLA-DPA1*03:01-B1*105:01L HLA-DQA1*03:01-B1*03:02L
  REGION 1..12: note = CONT. FROM ABOVE: HLA-DRB1*16:01L HLA-DQA1*01:03-B1*06:01L HLA-D QA1*02:01-B1*03:03L
  source 1..12: note = Severe acute respiratory syndrome coronavirus 2
KNLNESLIDLQE

SEQ ID NO: 13847 - protein, 12 aa, Severe acute respiratory syndrome-related coronavirus
  REGION 1..12: note = Table B: HLA-DRB1*04:03L
  source 1..12: note = Severe acute respiratory syndrome coronavirus 2
NESLIDLQELGK

SEQ ID NO: 13848 - protein, 11 aa, Severe acute respiratory syndrome-related coronavirus
  REGION 1..11: note = Table B: HLA-DRB1*04:03L HLA-DRB1*13:03L HLA-DRB1*04:02L HLA-DRB1*14:01L HLA-DRB1*08:01L HLA-DRB1*14:54L HLA-DRB1*14:17L HLA-DQA1*02:01-B1*03:03L
  source 1..11: note = Severe acute respiratory syndrome coronavirus 2
IDLQELGKYEQ

SEQ ID NO: 13849 - protein, 10 aa, Severe acute respiratory syndrome-related coronavirus
  REGION 1..10: note = Table B: HLA-DRB1*04:03L HLA-DRB1*01:03L HLA-DRB1*04:05M HLA-DQA1*01:02-B1*06:02L HLA-DRB1*01:01L HLA-DRB1*01:02L HLA-DRB1*08:77L HLA-DQA1*01:01-B1*05:01L HLA-DRB1*11:01L HLA-DQA1*05:05-B1*03:19L HLA-DRB4*01:01L
  REGION 1..10: note = CONT. FROM ABOVE: HLA-DPA1*02:01-B1*13:01H HLA-DRB1*16:01L HLA-D QA1*01:03-B1*06:01M HLA-DQA1*02:01-B1*03:03L HLA-DRB1*15:03L
  source 1..10: note = Severe acute respiratory syndrome coronavirus 2
QYIKWPWYIW

SEQ ID NO: 13850 - protein, 11 aa, Severe acute respiratory syndrome-related coronavirus
  REGION 1..11: note = Table B: HLA-DRB1*04:03L HLA-DRB1*13:03L HLA-DRB1*14:02L HLA-DRB1*16:01L HLA-DQA1*02:01-B1*03:03L
  source 1..11: note = Severe acute respiratory syndrome coronavirus 2
KFDEDDSEPVL

SEQ ID NO: 13851 - protein, 11 aa, Severe acute respiratory syndrome-related coronavirus
  REGION 1..11: note = Table B: HLA-DRB1*04:03L HLA-DRB1*01:03L HLA-DRB1*04:02L HLA-DRB1*04:05L HLA-DRB4*03:01NL HLA-DRB1*14:02L HLA-DRB1*12:01L HLA-DRB1*14:54L HLA-DRB1*14:17L HLA-DRB1*16:01L HLA-DRB1*04:08L HLA-DQA1*02:01-B1*03:03L
  source 1..11: note = Severe acute respiratory syndrome coronavirus 2
FDEDDSEPVLK

SEQ ID NO: 13852 - protein, 14 aa, Severe acute respiratory syndrome-related coronavirus
  REGION 1..14: note = Table B: HLA-DRB1*04:03L HLA-DRB1*13:02L HLA-DRB1*11:04L HLA-DRB1*11:01L HLA-DRB3*01:01L HLA-DPA1*02:01-B1*13:01L HLA-DPA1*03:01-B1*105:01L HLA-DQA1*05:05-B1*03:01L
  source 1..14: note = Severe acute respiratory syndrome coronavirus 2
DSEPVLKGVKLHYT

SEQ ID NO: 13853 - protein, 11 aa, Severe acute respiratory syndrome-related coronavirus
  REGION 1..11: note = Table B: HLA-DRB1*04:03L
  source 1..11: note = Severe acute respiratory syndrome coronavirus 2
FMRIFTIGTVT

SEQ ID NO: 13854 - protein, 10 aa, Severe acute respiratory syndrome-related coronavirus
  REGION 1..10: note = Table B: HLA-DRB1*04:03L HLA-DRB1*13:02L HLA-DRB1*04:02L HLA-DRB4*03:01NL HLA-DRB1*12:01L HLA-DPA1*03:01-B1*105:01L HLA-DQA1*03:01-B1*03:02L HLA-DQA1*05:05-B1*03:01L HLA-DRB1*14:17L HLA-DRB1*16:01L HLA-DQA1*01:03-B1*06:01L
  REGION 1..10: note = CONT. FROM ABOVE: HLA-DQA1*02:01-B1*03:03L
  source 1..10: note = Severe acute respiratory syndrome coronavirus 2
IFTIGTVTLK

SEQ ID NO: 13855 - protein, 10 aa, Severe acute respiratory syndrome-related coronavirus
  REGION 1..10: note = Table B: HLA-DRB1*04:03L HLA-DRB1*04:02L HLA-DQA1*03:01-B1*03:02L HLA-DRB1*14:17L HLA-DQA1*01:03-B1*06:01L HLA-DQA1*02:01-B1*03:03L
  source 1..10: note = Severe acute respiratory syndrome coronavirus 2
TIGTVTLKQG

SEQ ID NO: 13856 - protein, 10 aa, Severe acute respiratory syndrome-related coronavirus
  REGION 1..10: note = Table B: HLA-DRB1*04:03L HLA-DQA1*01:02-B1*06:02L HLA-DQA1*03:01-B1*03:02L HLA-DQA1*01:03-B1*06:01L HLA-DQA1*02:01-B1*03:03L
  source 1..10: note = Severe acute respiratory syndrome coronavirus 2
IGTVTLKQGE

SEQ ID NO: 13857 - protein, 13 aa, Severe acute respiratory syndrome-related coronavirus
  REGION 1..13: note = Table B: HLA-DRB1*04:03L
  source 1..13: note = Severe acute respiratory syndrome coronavirus 2
TLKQGEIKDATPS

SEQ ID NO: 13858 - protein, 11 aa, Severe acute respiratory syndrome-related coronavirus
  REGION 1..11: note = Table B: HLA-DRB1*04:03L HLA-DQA1*02:01-B1*03:03L
  source 1..11: note = Severe acute respiratory syndrome coronavirus 2
QGEIKDATPSD

SEQ ID NO: 13859 - protein, 11 aa, Severe acute respiratory syndrome-related coronavirus
  REGION 1..11: note = Table B: HLA-DRB1*04:03L HLA-DRB1*04:02L HLA-DRB1*04:05L HLA-DRB3*02:01L HLA-DRB1*11:02L HLA-DRB4*01:01L HLA-DRB1*09:01L HLA-DPA1*01:03-B1*104:01L HLA-DRB1*10:01L HLA-DRB1*08:02L
  source 1..11: note = Severe acute respiratory syndrome coronavirus 2
GEIKDATPSDF

SEQ ID NO: 13860 - protein, 11 aa, Severe acute respiratory syndrome-related coronavirus
  REGION 1..11: note = Table B: HLA-DRB1*04:03L HLA-DQA1*01-B1*05L
  source 1..11: note = Severe acute respiratory syndrome coronavirus 2
DATPSDFVRAT

SEQ ID NO: 13861 - protein, 11 aa, Severe acute respiratory syndrome-related coronavirus
  REGION 1..11: note = Table B: HLA-DRB1*04:03L HLA-DRB1*14:17L HLA-DQA1*02:01-B1*03:03L
  source 1..11: note = Severe acute respiratory syndrome coronavirus 2
TIPIQASLPFG

SEQ ID NO: 13862 - protein, 11 aa, Severe acute respiratory syndrome-related coronavirus
  REGION 1..11: note = Table B: HLA-DRB1*04:03L HLA-DRB1*14:17L
  source 1..11: note = Severe acute respiratory syndrome coronavirus 2
VALLAVFQSAS

SEQ ID NO: 13863 - protein, 10 aa, Severe acute respiratory syndrome-related coronavirus
  REGION 1..10: note = Table B: HLA-DRB1*04:03L HLA-DRB1*14:17L
  source 1..10: note = Severe acute respiratory syndrome coronavirus 2
LLAVFQSASK

SEQ ID NO: 13864 - protein, 12 aa, Severe acute respiratory syndrome-related coronavirus
  REGION 1..12: note = Table B: HLA-DRB1*04:03L HLA-DRB1*01:03L HLA-DRB1*01:02L HLA-DPA1*01:03-B1*03:01L HLA-DRB1*12:01L HLA-DPA1*01:03-B1*02:01L HLA-DQA1*02:01-B1*03:03L
  source 1..12: note = Severe acute respiratory syndrome coronavirus 2
TVYSHLLLVAAG

SEQ ID NO: 13865 - protein, 13 aa, Severe acute respiratory syndrome-related coronavirus
  REGION 1..13: note = Table B: HLA-DRB1*04:03L HLA-DQA1*01:02-B1*06:02L
  source 1..13: note = Severe acute respiratory syndrome coronavirus 2
SHLLLVAAGLEAP

SEQ ID NO: 13866 - protein, 13 aa, Severe acute respiratory syndrome-related coronavirus
  REGION 1..13: note = Table B: HLA-DRB1*04:03L HLA-DQA1*01:02-B1*06:02L HLA-DPA1*03:01-B1*105:01L HLA-DRB1*15:03L
  source 1..13: note = Severe acute respiratory syndrome coronavirus 2
HLLLVAAGLEAPF

SEQ ID NO: 13867 - protein, 14 aa, Severe acute respiratory syndrome-related coronavirus
  REGION 1..14: note = Table B: HLA-DRB1*04:03L HLA-DRB1*01:03L HLA-DRB1*04:02L HLA-DRB1*04:05L HLA-DRB1*01:02L HLA-DPA1*01:03-B1*03:01L HLA-DRB1*08:01L HLA-DRB1*11:01L HLA-DRB4*02:01NL HLA-DPA1*01:03-B1*04:02L HLA-DRB1*12:01L HLA-DRB1*16:01L
  source 1..14: note = Severe acute respiratory syndrome coronavirus 2
NSVTSSIVITSGDG

SEQ ID NO: 13868 - protein, 12 aa, Severe acute respiratory syndrome-related coronavirus
  REGION 1..12: note = Table B: HLA-DRB1*04:03L HLA-DRB1*04:02L HLA-DQA1*05:01-B1*02:01L HLA-DQA1*03:01-B1*03:02L HLA-DRB1*14:17L HLA-DQA1*02:01-B1*03:03L
  source 1..12: note = Severe acute respiratory syndrome coronavirus 2
SSIVITSGDGTT

SEQ ID NO: 13869 - protein, 11 aa, Severe acute respiratory syndrome-related coronavirus
  REGION 1..11: note = Table B: HLA-DRB1*04:03L
  source 1..11: note = Severe acute respiratory syndrome coronavirus 2
HDYQIGGYTEK

SEQ ID NO: 13870 - protein, 11 aa, Severe acute respiratory syndrome-related coronavirus
  REGION 1..11: note = Table B: HLA-DRB1*04:03L HLA-DPA1*03:01-B1*04:02L HLA-DPA1*01:03-B1*04:01L HLA-DRB1*12:01L HLA-DPA1*03:01-B1*105:01L HLA-DRB1*16:01L HLA-DQA1*01:03-B1*06:01L HLA-DRB1*15:03L
  source 1..11: note = Severe acute respiratory syndrome coronavirus 2
VVLHSYFTSDY

SEQ ID NO: 13871 - protein, 12 aa, Severe acute respiratory syndrome-related coronavirus
  REGION 1..12: note = Table B: HLA-DRB1*04:03L HLA-DRB1*13:02L HLA-DRB1*01:02L HLA-DRB1*08:04L HLA-DRB3*02:01L HLA-DRB1*14:01L HLA-DRB1*08:01L HLA-DRB1*04:08L
  source 1..12: note = Severe acute respiratory syndrome coronavirus 2
HSYFTSDYYQLY

SEQ ID NO: 13872 - protein, 14 aa, Severe acute respiratory syndrome-related coronavirus
  REGION 1..14: note = Table B: HLA-DRB1*04:03L HLA-DRB1*13:02L HLA-DRB1*01:02L HLA-DRB1*08:04L HLA-DRB1*14:01L HLA-DRB1*08:01L HLA-DRB1*11:01L HLA-DRB3*01:01L
  source 1..14: note = Severe acute respiratory syndrome coronavirus 2
SYFTSDYYQLYSTQ

SEQ ID NO: 13873 - protein, 12 aa, Severe acute respiratory syndrome-related coronavirus
  REGION 1..12: note = Table B: HLA-DRB1*04:03L HLA-DRB1*08:77L HLA-DRB3*02:01L HLA-DPA1*01:03-B1*03:01L HLA-DRB1*14:01L HLA-DPA1*01:03-B1*04:01L HLA-DRB1*09:01L HLA-DPA1*01:03-B1*04:02L HLA-DQA1*05:05-B1*03:01L
  source 1..12: note = Severe acute respiratory syndrome coronavirus 2
TSDYYQLYSTQL

SEQ ID NO: 13874 - protein, 12 aa, Severe acute respiratory syndrome-related coronavirus
  REGION 1..12: note = Table B: HLA-DRB1*04:03L
  source 1..12: note = Severe acute respiratory syndrome coronavirus 2
SDYYQLYSTQLS

SEQ ID NO: 13875 - protein, 12 aa, Severe acute respiratory syndrome-related coronavirus
  REGION 1..12: note = Table B: HLA-DRB1*04:03L HLA-DRB1*01:03L HLA-DRB1*01:01L HLA-DRB1*14:17L HLA-DRB1*04:08L
  source 1..12: note = Severe acute respiratory syndrome coronavirus 2
DYYQLYSTQLST

SEQ ID NO: 13876 - protein, 11 aa, Severe acute respiratory syndrome-related coronavirus
  REGION 1..11: note = Table B: HLA-DRB1*04:03L HLA-DRB1*04:02L HLA-DQA1*01-B1*05L HLA-DRB1*14:17L HLA-DRB1*16:01L
  source 1..11: note = Severe acute respiratory syndrome coronavirus 2
YQLYSTQLSTD

SEQ ID NO: 13877 - protein, 10 aa, Severe acute respiratory syndrome-related coronavirus
  REGION 1..10: note = Table B: HLA-DRB1*04:03L HLA-DRB1*13:03L HLA-DRB1*04:02L HLA-DRB4*03:01NL HLA-DQA1*05:01-B1*02:01L HLA-DRB1*12:01L HLA-DQA1*03:01-B1*03:02L HLA-DRB1*14:17L HLA-DRB1*16:01L HLA-DQA1*02:01-B1*03:03L
  source 1..10: note = Severe acute respiratory syndrome coronavirus 2
QLSTDTGVEH

SEQ ID NO: 13878 - protein, 10 aa, Severe acute respiratory syndrome-related coronavirus
  REGION 1..10: note = Table B: HLA-DRB1*04:03L HLA-DRB1*14:17L
  source 1..10: note = Severe acute respiratory syndrome coronavirus 2
QIHTIDGSSG

SEQ ID NO: 13879 - protein, 11 aa, Severe acute respiratory syndrome-related coronavirus
  REGION 1..11: note = Table B: HLA-DRB1*04:03L HLA-DRB1*14:17L
  source 1..11: note = Severe acute respiratory syndrome coronavirus 2
IHTIDGSSGVV

SEQ ID NO: 13880 - protein, 12 aa, Severe acute respiratory syndrome-related coronavirus
  REGION 1..12: note = Table B: HLA-DRB1*04:03L
  source 1..12: note = Severe acute respiratory syndrome coronavirus 2
HTIDGSSGVVNP

SEQ ID NO: 13881 - protein, 12 aa, Severe acute respiratory syndrome-related coronavirus
  REGION 1..12: note = Table B: HLA-DRB1*04:03L HLA-DRB1*01:03L HLA-DRB1*04:02L HLA-DRB1*04:05L HLA-DRB1*01:02L HLA-DPA1*01:03-B1*03:01L HLA-DQA1*01:01-B1*05:01L HLA-DRB1*08:01L HLA-DQA1*01-B1*05L HLA-DPA1*01:03-B1*04:02L HLA-DRB1*12:01L
  source 1..12: note = Severe acute respiratory syndrome coronavirus 2
IDGSSGVVNPVM

SEQ ID NO: 13882 - protein, 12 aa, Severe acute respiratory syndrome-related coronavirus
  REGION 1..12: note = Table B: HLA-DRB1*04:03L HLA-DRB1*14:01L HLA-DQA1*03:01-B1*03:02L
  source 1..12: note = Severe acute respiratory syndrome coronavirus 2
SGVVNPVMEPIY

SEQ ID NO: 13883 - protein, 12 aa, Severe acute respiratory syndrome-related coronavirus
  REGION 1..12: note = Table B: HLA-DRB1*04:03L
  source 1..12: note = Severe acute respiratory syndrome coronavirus 2
GVVNPVMEPIYD

SEQ ID NO: 13884 - protein, 11 aa, Severe acute respiratory syndrome-related coronavirus
  REGION 1..11: note = Table B: HLA-DRB1*04:03L HLA-DQA1*01-B1*05L
  source 1..11: note = Severe acute respiratory syndrome coronavirus 2
PVMEPIYDEPT

SEQ ID NO: 13885 - protein, 13 aa, Severe acute respiratory syndrome-related coronavirus
  REGION 1..13: note = Table B: HLA-DRB1*04:03L
  source 1..13: note = Severe acute respiratory syndrome coronavirus 2
PIYDEPTTTTSVP

SEQ ID NO: 13886 - protein, 12 aa, Severe acute respiratory syndrome-related coronavirus
  REGION 1..12: note = Table B: HLA-DRB1*04:03L
  source 1..12: note = Severe acute respiratory syndrome coronavirus 2
EETGTLIVNSVL

SEQ ID NO: 13887 - protein, 11 aa, Severe acute respiratory syndrome-related coronavirus
  REGION 1..11: note = Table B: HLA-DRB1*04:03L
  source 1..11: note = Severe acute respiratory syndrome coronavirus 2
LVTLAILTALR

SEQ ID NO: 13888 - protein, 11 aa, Severe acute respiratory syndrome-related coronavirus
  REGION 1..11: note = Table B: HLA-DRB1*04:03L HLA-DRB1*08:77L HLA-DQA1*05:05-B1*03:19L HLA-DRB1*12:02L
  source 1..11: note = Severe acute respiratory syndrome coronavirus 2
VTLAILTALRL

SEQ ID NO: 13889 - protein, 10 aa, Severe acute respiratory syndrome-related coronavirus
  REGION 1..10: note = Table B: HLA-DRB1*04:03L HLA-DQA1*03:01-B1*03:02L HLA-DRB1*14:17L HLA-DQA1*01:03-B1*06:01L HLA-DQA1*02:01-B1*03:03L
  source 1..10: note = Severe acute respiratory syndrome coronavirus 2
NIVNVSLVKP

SEQ ID NO: 13890 - protein, 13 aa, Severe acute respiratory syndrome-related coronavirus
  REGION 1..13: note = Table B: HLA-DRB1*04:03L HLA-DRB1*04:04L HLA-DPA1*03:01-B1*105:01L HLA-DPA1*01:03-B1*02:01L HLA-DQA1*01:03-B1*06:01L
  source 1..13: note = Severe acute respiratory syndrome coronavirus 2
VKPSFYVYSRVKN

SEQ ID NO: 13891 - protein, 11 aa, Severe acute respiratory syndrome-related coronavirus
  REGION 1..11: note = Table B: HLA-DRB1*04:03L HLA-DRB1*01:03L HLA-DRB1*04:02L HLA-DRB1*14:17L HLA-DRB1*16:01L HLA-DRB1*04:08L
  source 1..11: note = Severe acute respiratory syndrome coronavirus 2
VYSRVKNLNSS

SEQ ID NO: 13892 - protein, 12 aa, Severe acute respiratory syndrome-related coronavirus
  REGION 1..12: note = Table B: HLA-DRB1*04:03L HLA-DRB1*01:03L HLA-DRB1*04:05L HLA-DRB1*01:02L HLA-DRB1*14:01L HLA-DRB1*12:01L HLA-DRB1*16:01L HLA-DRB1*04:08L HLA-DRB1*15:03L
  source 1..12: note = Severe acute respiratory syndrome coronavirus 2
SRVKNLNSSRVP

SEQ ID NO: 13893 - protein, 11 aa, Severe acute respiratory syndrome-related coronavirus
  REGION 1..11: note = Table B: HLA-DRB1*04:03L HLA-DRB1*01:03L HLA-DQA1*01-B1*05L HLA-DRB1*12:01L
  source 1..11: note = Severe acute respiratory syndrome coronavirus 2
SNGTITVEELK

SEQ ID NO: 13894 - protein, 13 aa, Severe acute respiratory syndrome-related coronavirus
  REGION 1..13: note = Table B: HLA-DRB1*04:03L HLA-DRB1*04:05L HLA-DQA1*01:02-B1*06:02L HLA-DPA1*01:03-B1*03:01L HLA-DPA1*03:01-B1*04:02L HLA-DQA1*05:01-B1*02:01L HLA-DPA1*01:02-B1*04:01L HLA-DRB1*16:01L
  source 1..13: note = Severe acute respiratory syndrome coronavirus 2
LKKLLEQWNLVIG

SEQ ID NO: 13895 - protein, 12 aa, Severe acute respiratory syndrome-related coronavirus
  REGION 1..12: note = Table B: HLA-DRB1*04:03L HLA-DRB1*04:02L HLA-DRB1*14:01L HLA-DRB1*14:17L
  source 1..12: note = Severe acute respiratory syndrome coronavirus 2
AAVYRINWITGG

SEQ ID NO: 13896 - protein, 10 aa, Severe acute respiratory syndrome-related coronavirus
  REGION 1..10: note = Table B: HLA-DRB1*04:03L HLA-DQA1*03:01-B1*03:02L
  source 1..10: note = Severe acute respiratory syndrome coronavirus 2
RINWITGGIA

SEQ ID NO: 13897 - protein, 13 aa, Severe acute respiratory syndrome-related coronavirus
  REGION 1..13: note = Table B: HLA-DRB1*04:03L HLA-DPA1*01:03-B1*03:01L HLA-DPA1*03:01-B1*04:02L HLA-DPA1*01:03-B1*04:02L HLA-DQA1*03:01-B1*03:02L HLA-DRB1*16:01L HLA-DRB1*04:08L
  source 1..13: note = Severe acute respiratory syndrome coronavirus 2
INWITGGIAIAMA

SEQ ID NO: 13898 - protein, 13 aa, Severe acute respiratory syndrome-related coronavirus
  REGION 1..13: note = Table B: HLA-DRB1*04:03L HLA-DPA1*03:01-B1*04:02L HLA-DQA1*05:05-B1*03:19L HLA-DRB1*12:01L HLA-DQA1*05:05-B1*03:01L HLA-DRB1*15:03L
  source 1..13: note = Severe acute respiratory syndrome coronavirus 2
TGGIAIAMACLVG

SEQ ID NO: 13899 - protein, 10 aa, Severe acute respiratory syndrome-related coronavirus
  REGION 1..10: note = Table B: HLA-DRB1*04:03L HLA-DRB1*01:03L HLA-DRB1*04:05L HLA-DQA1*01:02-B1*06:02L HLA-DRB1*01:01L HLA-DRB1*01:02L HLA-DPA1*03:01-B1*04:02L HLA-DRB1*14:02L HLA-DQA1*01:01-B1*05:01L HLA-DQA1*05:05-B1*03:19L
  REGION 1..10: note = CONT. FROM ABOVE: HLA-DRB4*01:01L HLA-DPA1*01:03-B1*04:01L HLA-D RB1*12:01L HLA-DPA1*02:01-B1*13:01M HLA-DPA1*03:01-B1*105:01L HL A-DPA1*01:02-B1*04:01L HLA-DRB1*16:01L HLA-DQA1*01:03-B1*06:01M HLA-DQA1*02:01-B1*03:03L HLA-DRB1*15:03L
  source 1..10: note = Severe acute respiratory syndrome coronavirus 2
SYFIASFRLF

SEQ ID NO: 13900 - protein, 10 aa, Severe acute respiratory syndrome-related coronavirus
  REGION 1..10: note = Table B: HLA-DRB1*04:03L HLA-DRB1*04:02L HLA-DRB1*12:01L HLA-DRB1*14:17L HLA-DRB1*16:01L
  source 1..10: note = Severe acute respiratory syndrome coronavirus 2
NILLNVPLHG

SEQ ID NO: 13901 - protein, 10 aa, Severe acute respiratory syndrome-related coronavirus
  REGION 1..10: note = Table B: HLA-DRB1*04:03L HLA-DRB1*04:02L HLA-DQA1*03:01-B1*03:02L HLA-DRB1*14:17L HLA-DPA1*01:02-B1*04:01L HLA-DRB1*16:01L HLA-DQA1*02:01-B1*03:03L
  source 1..10: note = Severe acute respiratory syndrome coronavirus 2
ILTRPLLESE

SEQ ID NO: 13902 - protein, 13 aa, Severe acute respiratory syndrome-related coronavirus
  REGION 1..13: note = Table B: HLA-DRB1*04:03L HLA-DQA1*01:02-B1*06:02L HLA-DPA1*01:03-B1*03:01L HLA-DPA1*03:01-B1*04:02L HLA-DQA1*05:01-B1*02:01L HLA-DPA1*03:01-B1*105:01L HLA-DQA1*01:03-B1*06:01L HLA-DRB1*15:03L
  source 1..13: note = Severe acute respiratory syndrome coronavirus 2
RPLLESELVIGAV

SEQ ID NO: 13903 - protein, 12 aa, Severe acute respiratory syndrome-related coronavirus
  REGION 1..12: note = Table B: HLA-DRB1*04:03L HLA-DQA1*01:02-B1*06:02L
  source 1..12: note = Severe acute respiratory syndrome coronavirus 2
SELVIGAVILRG

SEQ ID NO: 13904 - protein, 12 aa, Severe acute respiratory syndrome-related coronavirus
  REGION 1..12: note = Table B: HLA-DRB1*04:03L
  source 1..12: note = Severe acute respiratory syndrome coronavirus 2
ELVIGAVILRGH

SEQ ID NO: 13905 - protein, 12 aa, Severe acute respiratory syndrome-related coronavirus
  REGION 1..12: note = Table B: HLA-DRB1*04:03L HLA-DRB1*14:17L HLA-DQA1*02:01-B1*03:03L
  source 1..12: note = Severe acute respiratory syndrome coronavirus 2
DLPKEITVATSR

SEQ ID NO: 13906 - protein, 10 aa, Severe acute respiratory syndrome-related coronavirus
  REGION 1..10: note = Table B: HLA-DRB1*04:03L HLA-DRB1*04:02L HLA-DQA1*03:01-B1*03:02L HLA-DRB1*14:17L HLA-DQA1*01:03-B1*06:01L HLA-DQA1*02:01-B1*03:03L
  source 1..10: note = Severe acute respiratory syndrome coronavirus 2
ITVATSRTLS

SEQ ID NO: 13907 - protein, 13 aa, Severe acute respiratory syndrome-related coronavirus
  REGION 1..13: note = Table B: HLA-DRB1*04:03L HLA-DRB1*04:02L HLA-DRB1*04:05L HLA-DRB1*01:02L HLA-DRB1*08:01L HLA-DQA1*03:01-B1*03:02L HLA-DRB1*14:17L HLA-DRB1*16:01L HLA-DRB1*04:08L HLA-DQA1*02:01-B1*03:03L
  source 1..13: note = Severe acute respiratory syndrome coronavirus 2
SRTLSYYKLGASQ

SEQ ID NO: 13908 - protein, 12 aa, Severe acute respiratory syndrome-related coronavirus
  REGION 1..12: note = Table B: HLA-DRB1*04:03L HLA-DRB1*01:03L HLA-DRB1*04:02L HLA-DRB1*04:05L HLA-DQA1*01:02-B1*06:02L HLA-DRB1*01:02L HLA-DPA1*01:02-B1*04:01L HLA-DRB1*16:01L HLA-DRB1*04:08L
  source 1..12: note = Severe acute respiratory syndrome coronavirus 2
TLSYYKLGASQR

SEQ ID NO: 13909 - protein, 10 aa, Severe acute respiratory syndrome-related coronavirus
  REGION 1..10: note = Table B: HLA-DRB1*04:03L HLA-DRB1*13:03L HLA-DRB1*01:03L HLA-DRB1*04:02L HLA-DRB1*01:02L HLA-DRB4*03:01NL HLA-DRB1*08:77L HLA-DRB1*11:03L HLA-DRB1*14:02L HLA-DRB1*12:01L HLA-DQA1*03:01-B1*03:02L HLA-DRB1*14:17L
  REGION 1..10: note = CONT. FROM ABOVE: HLA-DPA1*01:02-B1*04:01L HLA-DRB1*16:01L HLA-D RB1*04:08L HLA-DQA1*02:01-B1*03:03L
  source 1..10: note = Severe acute respiratory syndrome coronavirus 2
LGASQRVAGD

SEQ ID NO: 13910 - protein, 14 aa, Severe acute respiratory syndrome-related coronavirus
  REGION 1..14: note = Table B: HLA-DRB1*04:03L HLA-DRB1*04:04L HLA-DRB1*01:01L HLA-DRB1*11:02L HLA-DQA1*05:05-B1*03:116L HLA-DRB1*07:01L
  source 1..14: note = Severe acute respiratory syndrome coronavirus 2
DSGFAAYSRYRIGN

SEQ ID NO: 13911 - protein, 11 aa, Severe acute respiratory syndrome-related coronavirus
  REGION 1..11: note = Table B: HLA-DRB1*04:03L HLA-DRB1*04:02L HLA-DQA1*01-B1*05L HLA-DRB1*14:17L HLA-DQA1*02:01-B1*03:03L
  source 1..11: note = Severe acute respiratory syndrome coronavirus 2
IGNYKLNTDHS

SEQ ID NO: 13912 - protein, 11 aa, Severe acute respiratory syndrome-related coronavirus
  REGION 1..11: note = Table B: HLA-DRB1*04:03L HLA-DRB1*13:03L HLA-DRB1*01:03L HLA-DRB1*04:02L HLA-DRB1*04:05L HLA-DRB4*03:01NL HLA-DRB1*14:54L HLA-DRB1*14:17L HLA-DRB1*16:01L
  source 1..11: note = Severe acute respiratory syndrome coronavirus 2
GNYKLNTDHSS

SEQ ID NO: 13913 - protein, 10 aa, Severe acute respiratory syndrome-related coronavirus
  REGION 1..10: note = Table B: HLA-DRB1*04:03L HLA-DRB1*01:03L HLA-DRB1*04:02L HLA-DRB4*03:01NL HLA-DRB1*14:54L HLA-DRB1*14:17L HLA-DRB1*16:01L
  source 1..10: note = Severe acute respiratory syndrome coronavirus 2
YKLNTDHSSS

SEQ ID NO: 13914 - protein, 10 aa, Severe acute respiratory syndrome-related coronavirus
  REGION 1..10: note = Table B: HLA-DRB1*04:03L HLA-DQA1*03:01-B1*03:02L
  source 1..10: note = Severe acute respiratory syndrome coronavirus 2
NTDHSSSSDN

SEQ ID NO: 13915 - protein, 14 aa, Severe acute respiratory syndrome-related coronavirus
  REGION 1..14: note = Table B: HLA-DRB1*04:03L HLA-DQA1*01:02-B1*06:02L HLA-DPA1*01:03-B1*03:01L HLA-DQA1*01:01-B1*05:01L HLA-DQA1*05:05-B1*03:19L HLA-DPA1*02:01-B1*13:01L HLA-DQA1*05:05-B1*03:01L
  source 1..14: note = Severe acute respiratory syndrome coronavirus 2
DHSSSSDNIALLVQ

SEQ ID NO: 13916 - protein, 13 aa, Severe acute respiratory syndrome-related coronavirus
  REGION 1..13: note = Table B: HLA-DRB1*04:03L HLA-DRB1*13:02L HLA-DRB1*01:02L HLA-DRB1*14:01L HLA-DRB1*16:01L HLA-DQA1*01:03-B1*06:01L
  source 1..13: note = Severe acute respiratory syndrome coronavirus 2
IAEILLIIMRTFK

SEQ ID NO: 13917 - protein, 10 aa, Severe acute respiratory syndrome-related coronavirus
  REGION 1..10: note = Table B: HLA-DRB1*04:03L HLA-DRB1*01:02L HLA-DRB1*14:01L HLA-DRB1*12:01L HLA-DPA1*01:02-B1*04:01L HLA-DRB1*16:01L HLA-DRB1*15:03L
  source 1..10: note = Severe acute respiratory syndrome coronavirus 2
LIIMRTFKVS

SEQ ID NO: 13918 - protein, 12 aa, Severe acute respiratory syndrome-related coronavirus
  REGION 1..12: note = Table B: HLA-DRB1*04:03L HLA-DRB1*13:02L HLA-DRB1*01:03L HLA-DRB1*04:05L HLA-DQA1*01:02-B1*06:02L HLA-DRB1*01:02L HLA-DRB1*08:04L HLA-DPA1*01:03-B1*03:01L HLA-DPA1*03:01-B1*04:02L HLA-DRB1*14:01L HLA-DRB1*12:01L
  REGION 1..12: note = CONT. FROM ABOVE: HLA-DPA1*02:01-B1*13:01L HLA-DPA1*03:01-B1*105 :01L HLA-DPA1*01:03-B1*104:01L HLA-DPA1*01:02-B1*04:01L HLA-DRB1 *16:01L HLA-DRB1*04:08L HLA-DRB1*15:03L
  source 1..12: note = Severe acute respiratory syndrome coronavirus 2
IIMRTFKVSIWN

SEQ ID NO: 13919 - protein, 11 aa, Severe acute respiratory syndrome-related coronavirus
  REGION 1..11: note = Table B: HLA-DRB1*04:03L
  source 1..11: note = Severe acute respiratory syndrome coronavirus 2
YIINLIIKNLS

SEQ ID NO: 13920 - protein, 10 aa, Severe acute respiratory syndrome-related coronavirus
  REGION 1..10: note = Table B: HLA-DRB1*04:03L HLA-DRB1*04:02L HLA-DRB1*14:17L
  source 1..10: note = Severe acute respiratory syndrome coronavirus 2
INLIIKNLSK

SEQ ID NO: 13921 - protein, 11 aa, Severe acute respiratory syndrome-related coronavirus
  REGION 1..11: note = Table B: HLA-DRB1*04:03L HLA-DRB1*04:02L HLA-DRB1*12:01L HLA-DRB1*14:17L HLA-DPA1*01:02-B1*04:01L HLA-DRB1*16:01L
  source 1..11: note = Severe acute respiratory syndrome coronavirus 2
LIIKNLSKSLT

SEQ ID NO: 13922 - protein, 11 aa, Severe acute respiratory syndrome-related coronavirus
  REGION 1..11: note = Table B: HLA-DRB1*04:03L HLA-DRB1*13:02L HLA-DRB1*13:03L HLA-DRB1*01:03L HLA-DRB1*04:02L HLA-DRB1*01:02L HLA-DRB4*03:01NL HLA-DRB1*08:04L HLA-DRB1*12:01L HLA-DRB1*14:54L HLA-DRB1*14:17L HLA-DRB1*16:01L HLA-DRB1*04:08L HLA-DRB1*15:03L
  source 1..11: note = Severe acute respiratory syndrome coronavirus 2
IIKNLSKSLTE

SEQ ID NO: 13923 - protein, 14 aa, Severe acute respiratory syndrome-related coronavirus
  REGION 1..14: note = Table B: HLA-DRB1*04:03L HLA-DRB1*04:05L HLA-DRB1*04:08L
  source 1..14: note = Severe acute respiratory syndrome coronavirus 2
IKNLSKSLTENKYS

SEQ ID NO: 13924 - protein, 14 aa, Severe acute respiratory syndrome-related coronavirus
  REGION 1..14: note = Table B: HLA-DRB1*04:03L HLA-DRB1*13:02L HLA-DRB1*04:05L HLA-DRB1*01:02L HLA-DPA1*02:01-B1*13:01L HLA-DRB1*04:08L
  source 1..14: note = Severe acute respiratory syndrome coronavirus 2
LSKSLTENKYSQLD

SEQ ID NO: 13925 - protein, 14 aa, Severe acute respiratory syndrome-related coronavirus
  REGION 1..14: note = Table B: HLA-DRB1*04:03L HLA-DRB1*01:03L HLA-DRB1*04:02L HLA-DRB1*04:05L HLA-DRB1*01:02L HLA-DRB1*08:04L HLA-DRB1*08:01L HLA-DRB1*04:08L
  source 1..14: note = Severe acute respiratory syndrome coronavirus 2
SKSLTENKYSQLDE

SEQ ID NO: 13926 - protein, 11 aa, Severe acute respiratory syndrome-related coronavirus
  REGION 1..11: note = Table B: HLA-DRB1*04:03L HLA-DRB1*16:01L HLA-DQA1*02:01-B1*03:03L
  source 1..11: note = Severe acute respiratory syndrome coronavirus 2
YSQLDEEQPME

SEQ ID NO: 13927 - protein, 12 aa, Severe acute respiratory syndrome-related coronavirus
  REGION 1..12: note = Table B: HLA-DRB1*04:03L HLA-DQA1*01:02-B1*06:02L HLA-DQA1*01:01-B1*05:01L HLA-DRB1*12:01L HLA-DPA1*02:01-B1*13:01L HLA-DPA1*03:01-B1*105:01L HLA-DRB1*16:01L HLA-DQA1*01:03-B1*06:01L
  source 1..12: note = Severe acute respiratory syndrome coronavirus 2
SQLDEEQPMEID

SEQ ID NO: 13928 - protein, 13 aa, Severe acute respiratory syndrome-related coronavirus
  REGION 1..13: note = Table B: HLA-DRB1*04:03L
  source 1..13: note = Severe acute respiratory syndrome coronavirus 2
LALITLATCELYH

SEQ ID NO: 13929 - protein, 14 aa, Severe acute respiratory syndrome-related coronavirus
  REGION 1..14: note = Table B: HLA-DRB1*04:03L HLA-DRB1*01:02L
  source 1..14: note = Severe acute respiratory syndrome coronavirus 2
TVLLKEPCSSGTYE

SEQ ID NO: 13930 - protein, 13 aa, Severe acute respiratory syndrome-related coronavirus
  REGION 1..13: note = Table B: HLA-DRB1*04:03L HLA-DRB1*04:02L HLA-DQA1*01:01-B1*05:01L HLA-DPA1*03:01-B1*105:01L
  source 1..13: note = Severe acute respiratory syndrome coronavirus 2
YEGNSPFHPLADN

SEQ ID NO: 13931 - protein, 10 aa, Severe acute respiratory syndrome-related coronavirus
  REGION 1..10: note = Table B: HLA-DRB1*04:03L HLA-DRB1*13:03L HLA-DRB1*01:03L HLA-DRB1*04:02L HLA-DRB4*03:01NL HLA-DQA1*01-B1*05L HLA-DQA1*03:01-B1*03:02L HLA-DRB1*14:17L HLA-DRB1*16:01L HLA-DQA1*02:01-B1*03:03L
  source 1..10: note = Severe acute respiratory syndrome coronavirus 2
SPFHPLADNK

SEQ ID NO: 13932 - protein, 10 aa, Severe acute respiratory syndrome-related coronavirus
  REGION 1..10: note = Table B: HLA-DRB1*04:03L HLA-DRB1*01:02L HLA-DRB1*12:01L HLA-DRB1*16:01L HLA-DRB1*15:03L
  source 1..10: note = Severe acute respiratory syndrome coronavirus 2
FHPLADNKFA

SEQ ID NO: 13933 - protein, 11 aa, Severe acute respiratory syndrome-related coronavirus
  REGION 1..11: note = Table B: HLA-DRB1*04:03L
  source 1..11: note = Severe acute respiratory syndrome coronavirus 2
HPLADNKFALT

SEQ ID NO: 13934 - protein, 13 aa, Severe acute respiratory syndrome-related coronavirus
  REGION 1..13: note = Table B: HLA-DRB1*04:03L HLA-DRB1*01:03L HLA-DRB1*04:05L HLA-DRB1*01:02L HLA-DRB1*08:04L HLA-DQA1*01-B1*05L HLA-DQA1*05:01-B1*02:01L HLA-DPA1*01:03-B1*04:01L HLA-DPA1*01:03-B1*02:01L HLA-DPA1*01:03-B1*104:01L
  REGION 1..13: note = CONT. FROM ABOVE: HLA-DRB1*15:03L
  source 1..13: note = Severe acute respiratory syndrome coronavirus 2
ADNKFALTCFSTQ

SEQ ID NO: 13935 - protein, 14 aa, Severe acute respiratory syndrome-related coronavirus
  REGION 1..14: note = Table B: HLA-DRB1*04:03L HLA-DRB1*13:02L HLA-DRB1*01:03L HLA-DRB1*04:05L HLA-DRB1*01:02L HLA-DRB1*08:04L HLA-DRB1*14:02L HLA-DRB1*11:01L HLA-DQA1*05:01-B1*02:01L HLA-DPA1*01:03-B1*04:01L HLA-DPA1*01:03-B1*02:01L
  REGION 1..14: note = CONT. FROM ABOVE: HLA-DPA1*01:03-B1*104:01L
  source 1..14: note = Severe acute respiratory syndrome coronavirus 2
DNKFALTCFSTQFA

SEQ ID NO: 13936 - protein, 14 aa, Severe acute respiratory syndrome-related coronavirus
  REGION 1..14: note = Table B: HLA-DRB1*04:03L HLA-DQA1*01:02-B1*06:02L HLA-DRB1*01:02L HLA-DRB1*15:03L
  source 1..14: note = Severe acute respiratory syndrome coronavirus 2
KFALTCFSTQFAFA

SEQ ID NO: 13937 - protein, 12 aa, Severe acute respiratory syndrome-related coronavirus
  REGION 1..12: note = Table B: HLA-DRB1*04:03L HLA-DQA1*01:02-B1*06:02L HLA-DQA1*05:05-B1*03:19L HLA-DPA1*03:01-B1*105:01L HLA-DQA1*03:01-B1*03:02L HLA-DQA1*05:05-B1*03:01L HLA-DQA1*01:03-B1*06:01L HLA-DQA1*02:01-B1*03:03L
  source 1..12: note = Severe acute respiratory syndrome coronavirus 2
FSTQFAFACPDG

SEQ ID NO: 13938 - protein, 13 aa, Severe acute respiratory syndrome-related coronavirus
  REGION 1..13: note = Table B: HLA-DRB1*04:03L HLA-DRB1*13:02L HLA-DRB1*13:03L HLA-DRB1*01:03L HLA-DRB1*04:02L HLA-DRB1*04:05L HLA-DRB4*03:01NL HLA-DRB1*08:04L HLA-DRB1*08:77L HLA-DRB3*02:01L HLA-DPA1*01:03-B1*03:01L HLA-DPA1*03:01-B1*04:02L
  REGION 1..13: note = CONT. FROM ABOVE: HLA-DRB1*14:01L HLA-DQA1*01:01-B1*05:01L HLA-D RB1*08:01L HLA-DQA1*01-B1*05L HLA-DPA1*01:03-B1*04:01L HLA-DRB1* 04:10L HLA-DRB1*09:01L HLA-DPA1*01:03-B1*04:02L HLA-DRB1*12:02L HLA-DPA1*02:01-B1*13:01L HLA-DPA1*01:03-B1*104:01L
  REGION 1..13: note = CONT. FROM ABOVE: HLA-DRB1*14:17L HLA-DPA1*01:02-B1*04:01L HLA-D RB1*07:01L HLA-DRB1*10:01L
  source 1..13: note = Severe acute respiratory syndrome coronavirus 2
STQFAFACPDGVK

SEQ ID NO: 13939 - protein, 13 aa, Severe acute respiratory syndrome-related coronavirus
  REGION 1..13: note = Table B: HLA-DRB1*04:03L HLA-DRB1*04:02L HLA-DRB1*04:05L HLA-DRB1*01:01L HLA-DRB1*08:01L HLA-DRB1*10:01L
  source 1..13: note = Severe acute respiratory syndrome coronavirus 2
TQFAFACPDGVKH

SEQ ID NO: 13940 - protein, 15 aa, Severe acute respiratory syndrome-related coronavirus
  REGION 1..15: note = Table B: HLA-DRB1*04:03L HLA-DRB1*04:04L HLA-DPA1*01:03-B1*03:01L HLA-DPA1*03:01-B1*04:02L HLA-DRB1*03:01L HLA-DRB1*11:02L HLA-DRB1*13:01L HLA-DRB1*14:54L HLA-DQA1*05:05-B1*03:01L HLA-DRB1*15:01L
  source 1..15: note = Severe acute respiratory syndrome coronavirus 2
VKHVYQLRARSVSPK

SEQ ID NO: 13941 - protein, 11 aa, Severe acute respiratory syndrome-related coronavirus
  REGION 1..11: note = Table B: HLA-DRB1*04:03L HLA-DRB1*13:02L HLA-DRB1*11:02L HLA-DRB4*01:01L HLA-DPA1*02:01-B1*13:01L HLA-DRB1*10:01L
  source 1..11: note = Severe acute respiratory syndrome coronavirus 2
FIRQEEVQELY

SEQ ID NO: 13942 - protein, 12 aa, Severe acute respiratory syndrome-related coronavirus
  REGION 1..12: note = Table B: HLA-DRB1*04:03L HLA-DRB1*01:02L HLA-DQA1*03:01-B1*03:02L
  source 1..12: note = Severe acute respiratory syndrome coronavirus 2
IRQEEVQELYSP

SEQ ID NO: 13943 - protein, 13 aa, Severe acute respiratory syndrome-related coronavirus
  REGION 1..13: note = Table B: HLA-DRB1*04:03L HLA-DRB1*13:02L HLA-DRB1*04:05L HLA-DQA1*05:05-B1*03:01L
  source 1..13: note = Severe acute respiratory syndrome coronavirus 2
RQEEVQELYSPIF

SEQ ID NO: 13944 - protein, 13 aa, Severe acute respiratory syndrome-related coronavirus
  REGION 1..13: note = Table B: HLA-DRB1*04:03L
  source 1..13: note = Severe acute respiratory syndrome coronavirus 2
QEEVQELYSPIFL

SEQ ID NO: 13945 - protein, 12 aa, Severe acute respiratory syndrome-related coronavirus
  REGION 1..12: note = Table B: HLA-DRB1*04:03L HLA-DRB1*13:02L HLA-DRB1*01:03L HLA-DRB1*04:05L HLA-DQA1*01:02-B1*06:02L HLA-DRB1*14:01L HLA-DRB1*11:04L HLA-DRB1*08:01L HLA-DRB1*11:01L HLA-DRB1*12:01L HLA-DRB3*01:01L HLA-DPA1*02:01-B1*13:01L
  REGION 1..12: note = CONT. FROM ABOVE: HLA-DPA1*03:01-B1*105:01L HLA-DPA1*01:02-B1*04 :01L HLA-DQA1*01:03-B1*06:01L HLA-DRB1*04:08L HLA-DQA1*02:01-B1* 03:03L HLA-DRB1*15:03L
  source 1..12: note = Severe acute respiratory syndrome coronavirus 2
ITLCFTLKRKTE

SEQ ID NO: 13946 - protein, 10 aa, Severe acute respiratory syndrome-related coronavirus
  REGION 1..10: note = Table B: HLA-DRB1*04:03L HLA-DQA1*03:01-B1*03:02L
  source 1..10: note = Severe acute respiratory syndrome coronavirus 2
SLELQDHNET

SEQ ID NO: 13947 - protein, 10 aa, Severe acute respiratory syndrome-related coronavirus
  REGION 1..10: note = Table B: HLA-DRB1*04:03L HLA-DRB1*04:02L HLA-DQA1*03:01-B1*03:02L HLA-DRB1*14:17L
  source 1..10: note = Severe acute respiratory syndrome coronavirus 2
GIITTVAAFH

SEQ ID NO: 13948 - protein, 10 aa, Severe acute respiratory syndrome-related coronavirus
  REGION 1..10: note = Table B: HLA-DRB1*04:03L HLA-DRB1*04:02L HLA-DRB1*04:05L HLA-DRB4*03:01NL HLA-DRB1*04:10L HLA-DRB1*12:01L HLA-DQA1*03:01-B1*03:02L HLA-DRB1*14:54L HLA-DRB1*14:17L HLA-DRB1*16:01L HLA-DQA1*02:01-B1*03:03L
  source 1..10: note = Severe acute respiratory syndrome coronavirus 2
IITTVAAFHQ

SEQ ID NO: 13949 - protein, 12 aa, Severe acute respiratory syndrome-related coronavirus
  REGION 1..12: note = Table B: HLA-DRB1*04:03L HLA-DRB1*04:02L HLA-DRB1*04:05L HLA-DRB1*12:01L HLA-DRB1*14:17L HLA-DRB1*16:01L
  source 1..12: note = Severe acute respiratory syndrome coronavirus 2
VAAFHQECSLQS

SEQ ID NO: 13950 - protein, 12 aa, Severe acute respiratory syndrome-related coronavirus
  REGION 1..12: note = Table B: HLA-DRB1*04:03L HLA-DRB1*13:02L HLA-DRB1*13:03L HLA-DRB1*01:03L HLA-DRB1*04:02L HLA-DRB1*04:05L HLA-DRB1*08:04L HLA-DRB1*14:01L HLA-DQA1*05:01-B1*02:01L HLA-DRB1*12:01L HLA-DRB3*01:01L HLA-DQA1*03:01-B1*03:02L HLA-DRB1*14:54L
  REGION 1..12: note = CONT. FROM ABOVE: HLA-DRB1*14:17L HLA-DRB1*16:01L
  source 1..12: note = Severe acute respiratory syndrome coronavirus 2
HQPYVVDDPCPI

SEQ ID NO: 13951 - protein, 10 aa, Severe acute respiratory syndrome-related coronavirus
  REGION 1..10: note = Table B: HLA-DRB1*04:03L HLA-DRB1*13:02L HLA-DRB1*13:03L HLA-DRB1*01:03L HLA-DRB1*04:02L HLA-DRB1*04:05L HLA-DRB1*01:02L HLA-DRB4*03:01NL HLA-DRB1*08:04L HLA-DRB1*08:77L HLA-DRB3*02:01L HLA-DPA1*01:03-B1*03:01L HLA-DPA1*03:01-B1*04:02L
  REGION 1..10: note = CONT. FROM ABOVE: HLA-DRB1*14:01L HLA-DRB1*11:03L HLA-DRB1*11:04 L HLA-DRB1*14:02L HLA-DQA1*01-B1*05L HLA-DQA1*05:01-B1*02:01L HL A-DRB1*12:01L HLA-DRB1*12:02L HLA-DRB3*01:01L HLA-DPA1*03:01-B1* 105:01L HLA-DQA1*03:01-B1*03:02L HLA-DRB1*14:54L HLA-DRB1*14:17L
  REGION 1..10: note = CONT. FROM ABOVE: HLA-DPA1*01:02-B1*04:01L HLA-DRB1*16:01L HLA-D RB1*04:08L HLA-DQA1*02:01-B1*03:03L HLA-DRB1*15:03L
  source 1..10: note = Severe acute respiratory syndrome coronavirus 2
YVVDDPCPIH

SEQ ID NO: 13952 - protein, 12 aa, Severe acute respiratory syndrome-related coronavirus
  REGION 1..12: note = Table B: HLA-DRB1*04:03L HLA-DRB1*04:05L HLA-DRB1*04:10L HLA-DRB1*14:17L
  source 1..12: note = Severe acute respiratory syndrome coronavirus 2
APLIELCVDEAG

SEQ ID NO: 13953 - protein, 11 aa, Severe acute respiratory syndrome-related coronavirus
  REGION 1..11: note = Table B: HLA-DRB1*04:03L HLA-DRB1*04:02L HLA-DQA1*01:02-B1*06:02L HLA-DRB1*14:17L
  source 1..11: note = Severe acute respiratory syndrome coronavirus 2
IELCVDEAGSK

SEQ ID NO: 13954 - protein, 11 aa, Severe acute respiratory syndrome-related coronavirus
  REGION 1..11: note = Table B: HLA-DRB1*04:03L HLA-DRB1*13:03L HLA-DRB1*01:03L HLA-DRB1*04:02L HLA-DRB1*04:05L HLA-DQA1*01:02-B1*06:02L HLA-DRB4*03:01NL HLA-DPA1*01:03-B1*03:01L HLA-DQA1*01:01-B1*05:01L HLA-DQA1*01-B1*05L
  REGION 1..11: note = CONT. FROM ABOVE: HLA-DQA1*05:05-B1*03:116L HLA-DPA1*01:03-B1*04 :02L HLA-DRB1*12:01L HLA-DPA1*03:01-B1*105:01L HLA-DRB1*14:54L H LA-DRB1*14:17L HLA-DRB1*16:01L HLA-DQA1*01:03-B1*06:01L HLA-DRB1 *04:08L
  source 1..11: note = Severe acute respiratory syndrome coronavirus 2
VDEAGSKSPIQ

SEQ ID NO: 13955 - protein, 10 aa, Severe acute respiratory syndrome-related coronavirus
  REGION 1..10: note = Table B: HLA-DRB1*04:03L HLA-DRB1*14:17L
  source 1..10: note = Severe acute respiratory syndrome coronavirus 2
YIDIGNYTVS

SEQ ID NO: 13956 - protein, 14 aa, Severe acute respiratory syndrome-related coronavirus
  REGION 1..14: note = Table B: HLA-DRB1*04:03L HLA-DRB1*01:02L HLA-DQA1*01-B1*05L HLA-DPA1*01:03-B1*04:02L HLA-DRB1*12:01L HLA-DPA1*02:01-B1*13:01L HLA-DPA1*01:03-B1*104:01L HLA-DRB1*15:03L
  source 1..14: note = Severe acute respiratory syndrome coronavirus 2
IDIGNYTVSCLPFT

SEQ ID NO: 13957 - protein, 14 aa, Severe acute respiratory syndrome-related coronavirus
  REGION 1..14: note = Table B: HLA-DRB1*04:03L HLA-DRB1*13:02L HLA-DRB1*01:03L HLA-DRB1*04:05L HLA-DRB1*01:02L HLA-DRB1*08:04L HLA-DRB3*02:01L HLA-DRB1*14:02L HLA-DRB1*08:01L HLA-DQA1*01-B1*05L HLA-DPA1*01:03-B1*04:01L HLA-DRB1*12:01L
  REGION 1..14: note = CONT. FROM ABOVE: HLA-DPA1*02:01-B1*13:01L HLA-DPA1*01:03-B1*104 :01L HLA-DPA1*01:02-B1*04:01L HLA-DRB1*16:01L HLA-DRB1*04:08L
  source 1..14: note = Severe acute respiratory syndrome coronavirus 2
IGNYTVSCLPFTIN

SEQ ID NO: 13958 - protein, 11 aa, Severe acute respiratory syndrome-related coronavirus
  REGION 1..11: note = Table B: HLA-DRB1*04:03L
  source 1..11: note = Severe acute respiratory syndrome coronavirus 2
QEPKLGSLVVR

SEQ ID NO: 13959 - protein, 11 aa, Severe acute respiratory syndrome-related coronavirus
  REGION 1..11: note = Table B: HLA-DRB1*04:03L HLA-DQA1*03:01-B1*03:02L HLA-DQA1*02:01-B1*03:03L
  source 1..11: note = Severe acute respiratory syndrome coronavirus 2
APRITFGGPSD

SEQ ID NO: 13960 - protein, 11 aa, Severe acute respiratory syndrome-related coronavirus
  REGION 1..11: note = Table B: HLA-DRB1*04:03L
  source 1..11: note = Severe acute respiratory syndrome coronavirus 2
RPQGLPNNTAS

SEQ ID NO: 13961 - protein, 10 aa, Severe acute respiratory syndrome-related coronavirus
  REGION 1..10: note = Table B: HLA-DRB1*04:03L
  source 1..10: note = Severe acute respiratory syndrome coronavirus 2
VPINTNSSPD

SEQ ID NO: 13962 - protein, 14 aa, Severe acute respiratory syndrome-related coronavirus
  REGION 1..14: note = Table B: HLA-DRB1*04:03L HLA-DRB1*01:03L HLA-DRB1*04:02L HLA-DRB1*01:02L HLA-DPA1*01:03-B1*03:01L HLA-DPA1*01:03-B1*04:02L HLA-DRB1*12:01L HLA-DRB1*04:08L HLA-DRB1*15:03L
  source 1..14: note = Severe acute respiratory syndrome coronavirus 2
YYLGTGPEAGLPYG

SEQ ID NO: 13963 - protein, 12 aa, Severe acute respiratory syndrome-related coronavirus
  REGION 1..12: note = Table B: HLA-DRB1*04:03L HLA-DRB1*01:03L HLA-DRB1*04:02L HLA-DQA1*01:01-B1*05:01L HLA-DRB1*08:01L HLA-DRB1*11:01L HLA-DPA1*01:03-B1*04:02L HLA-DPA1*03:01-B1*105:01L
  source 1..12: note = Severe acute respiratory syndrome coronavirus 2
GPEAGLPYGANK

SEQ ID NO: 13964 - protein, 10 aa, Severe acute respiratory syndrome-related coronavirus
  REGION 1..10: note = Table B: HLA-DRB1*04:03L HLA-DQA1*03:01-B1*03:02L HLA-DQA1*02:01-B1*03:03L
  source 1..10: note = Severe acute respiratory syndrome coronavirus 2
GLPYGANKDG

SEQ ID NO: 13965 - protein, 12 aa, Severe acute respiratory syndrome-related coronavirus
  REGION 1..12: note = Table B: HLA-DRB1*04:03L HLA-DRB1*13:02L HLA-DRB1*01:03L HLA-DRB1*08:77L HLA-DRB3*02:01L HLA-DPA1*01:03-B1*03:01L HLA-DRB1*14:02L HLA-DRB4*01:01L HLA-DPA1*01:03-B1*04:01L HLA-DPA1*01:03-B1*04:02L HLA-DRB1*12:01L
  REGION 1..12: note = CONT. FROM ABOVE: HLA-DPA1*01:03-B1*104:01L HLA-DQA1*05:05-B1*03 :01L
  source 1..12: note = Severe acute respiratory syndrome coronavirus 2
LPYGANKDGIIW

SEQ ID NO: 13966 - protein, 14 aa, Severe acute respiratory syndrome-related coronavirus
  REGION 1..14: note = Table B: HLA-DRB1*04:03L HLA-DRB1*13:02L HLA-DRB1*01:03L HLA-DRB1*04:05L HLA-DRB1*01:02L HLA-DPA1*01:03-B1*03:01L HLA-DQA1*01:01-B1*05:01L HLA-DRB1*08:01L HLA-DRB1*11:01L HLA-DQA1*05:01-B1*02:01L HLA-DPA1*01:03-B1*04:02L
  REGION 1..14: note = CONT. FROM ABOVE: HLA-DRB1*12:01L HLA-DPA1*02:01-B1*13:01L HLA-D PA1*01:03-B1*104:01L HLA-DRB1*16:01L HLA-DRB1*04:08L HLA-DRB1*15 :03L
  source 1..14: note = Severe acute respiratory syndrome coronavirus 2
GANKDGIIWVATEG

SEQ ID NO: 13967 - protein, 12 aa, Severe acute respiratory syndrome-related coronavirus
  REGION 1..12: note = Table B: HLA-DRB1*04:03L HLA-DRB1*14:17L
  source 1..12: note = Severe acute respiratory syndrome coronavirus 2
KDGIIWVATEGA

SEQ ID NO: 13968 - protein, 12 aa, Severe acute respiratory syndrome-related coronavirus
  REGION 1..12: note = Table B: HLA-DRB1*04:03L HLA-DQA1*01:02-B1*06:02L HLA-DQA1*05:01-B1*02:01L HLA-DQA1*03:01-B1*03:02L HLA-DRB1*14:17L
  source 1..12: note = Severe acute respiratory syndrome coronavirus 2
DGIIWVATEGAL

SEQ ID NO: 13969 - protein, 11 aa, Severe acute respiratory syndrome-related coronavirus
  REGION 1..11: note = Table B: HLA-DRB1*04:03L HLA-DRB1*04:02L HLA-DRB1*04:04L HLA-DRB1*04:05L HLA-DQA1*01:02-B1*06:02L HLA-DRB1*01:02L HLA-DRB4*03:01NL HLA-DQA1*05:05-B1*03:19L HLA-DQA1*05:01-B1*02:01L HLA-DRB1*04:10L HLA-DRB1*12:01L
  REGION 1..11: note = CONT. FROM ABOVE: HLA-DQA1*03:01-B1*03:02L HLA-DRB1*14:54L HLA-D QA1*05:05-B1*03:01L HLA-DRB1*14:17L HLA-DRB1*16:01L HLA-DRB1*04: 08L HLA-DQA1*02:01-B1*03:03L
  source 1..11: note = Severe acute respiratory syndrome coronavirus 2
IIWVATEGALN

SEQ ID NO: 13970 - protein, 11 aa, Severe acute respiratory syndrome-related coronavirus
  REGION 1..11: note = Table B: HLA-DRB1*04:03L HLA-DRB1*01:03L HLA-DRB1*14:54L HLA-DQA1*05:05-B1*03:01L HLA-DRB1*16:01L HLA-DQA1*01:03-B1*06:01L HLA-DQA1*02:01-B1*03:03L
  source 1..11: note = Severe acute respiratory syndrome coronavirus 2
VATEGALNTPK

SEQ ID NO: 13971 - protein, 11 aa, Severe acute respiratory syndrome-related coronavirus
  REGION 1..11: note = Table B: HLA-DRB1*04:03L HLA-DQA1*05:01-B1*02:01L HLA-DQA1*01:03-B1*06:01L
  source 1..11: note = Severe acute respiratory syndrome coronavirus 2
ATEGALNTPKD

SEQ ID NO: 13972 - protein, 10 aa, Severe acute respiratory syndrome-related coronavirus
  REGION 1..10: note = Table B: HLA-DRB1*04:03L HLA-DQA1*03:01-B1*03:02L
  source 1..10: note = Severe acute respiratory syndrome coronavirus 2
ALNTPKDHIG

SEQ ID NO: 13973 - protein, 10 aa, Severe acute respiratory syndrome-related coronavirus
  REGION 1..10: note = Table B: HLA-DRB1*04:03L HLA-DRB1*13:03L HLA-DRB1*01:03L HLA-DRB1*04:02L HLA-DRB1*04:05L HLA-DRB4*03:01NL HLA-DQA1*01-B1*05L HLA-DQA1*03:01-B1*03:02L HLA-DRB1*14:17L HLA-DRB1*16:01L
  source 1..10: note = Severe acute respiratory syndrome coronavirus 2
GTRNPANNAA

SEQ ID NO: 13974 - protein, 11 aa, Severe acute respiratory syndrome-related coronavirus
  REGION 1..11: note = Table B: HLA-DRB1*04:03L
  source 1..11: note = Severe acute respiratory syndrome coronavirus 2
TRNPANNAAIV

SEQ ID NO: 13975 - protein, 10 aa, Severe acute respiratory syndrome-related coronavirus
  REGION 1..10: note = Table B: HLA-DRB1*04:03L HLA-DRB1*13:03L HLA-DRB1*04:02L HLA-DRB4*03:01NL HLA-DRB1*12:01L HLA-DQA1*03:01-B1*03:02L HLA-DQA1*05:05-B1*03:01L HLA-DRB1*14:17L HLA-DQA1*02:01-B1*03:03L
  source 1..10: note = Severe acute respiratory syndrome coronavirus 2
QLPQGTTLPK

SEQ ID NO: 13976 - protein, 10 aa, Severe acute respiratory syndrome-related coronavirus
  REGION 1..10: note = Table B: HLA-DRB1*04:03L HLA-DRB1*13:03L HLA-DQA1*03:01-B1*03:02L HLA-DQA1*02:01-B1*03:03L
  source 1..10: note = Severe acute respiratory syndrome coronavirus 2
LPQGTTLPKG

SEQ ID NO: 13977 - protein, 10 aa, Severe acute respiratory syndrome-related coronavirus
  REGION 1..10: note = Table B: HLA-DRB1*04:03L HLA-DRB1*13:03L HLA-DRB1*01:03L HLA-DRB1*04:02L HLA-DQA1*03:01-B1*03:02L HLA-DRB1*14:17L
  source 1..10: note = Severe acute respiratory syndrome coronavirus 2
YAEGSRGGSQ

SEQ ID NO: 13978 - protein, 11 aa, Severe acute respiratory syndrome-related coronavirus
  REGION 1..11: note = Table B: HLA-DRB1*04:03L HLA-DRB1*01:03L HLA-DRB1*04:02L HLA-DRB4*03:01NL HLA-DQA1*03:01-B1*03:02L HLA-DRB1*14:17L HLA-DRB1*16:01L
  source 1..11: note = Severe acute respiratory syndrome coronavirus 2
TPGSSRGTSPA

SEQ ID NO: 13979 - protein, 11 aa, Severe acute respiratory syndrome-related coronavirus
  REGION 1..11: note = Table B: HLA-DRB1*04:03L HLA-DQA1*03:01-B1*03:02L
  source 1..11: note = Severe acute respiratory syndrome coronavirus 2
SPARMAGNGGD

SEQ ID NO: 13980 - protein, 10 aa, Severe acute respiratory syndrome-related coronavirus
  REGION 1..10: note = Table B: HLA-DRB1*04:03L HLA-DRB1*14:01L
  source 1..10: note = Severe acute respiratory syndrome coronavirus 2
ALLLLDRLNQ

SEQ ID NO: 13981 - protein, 10 aa, Severe acute respiratory syndrome-related coronavirus
  REGION 1..10: note = Table B: HLA-DRB1*04:03L HLA-DPA1*03:01-B1*04:02L HLA-DRB1*14:01L HLA-DPA1*03:01-B1*105:01L HLA-DPA1*01:02-B1*04:01L
  source 1..10: note = Severe acute respiratory syndrome coronavirus 2
LLLDRLNQLE

SEQ ID NO: 13982 - protein, 12 aa, Severe acute respiratory syndrome-related coronavirus
  REGION 1..12: note = Table B: HLA-DRB1*04:03L HLA-DRB1*01:02L HLA-DRB1*14:17L
  source 1..12: note = Severe acute respiratory syndrome coronavirus 2
DRLNQLESKMSG

SEQ ID NO: 13983 - protein, 14 aa, Severe acute respiratory syndrome-related coronavirus
  REGION 1..14: note = Table B: HLA-DRB1*04:03L HLA-DRB1*13:03L HLA-DRB1*01:03L HLA-DRB1*04:05L HLA-DRB1*01:02L HLA-DRB1*08:04L HLA-DRB1*14:01L HLA-DRB1*11:04L HLA-DRB1*11:01L HLA-DRB1*16:01L HLA-DRB1*04:08L HLA-DRB1*08:03L
  source 1..14: note = Severe acute respiratory syndrome coronavirus 2
LNQLESKMSGKGQQ

SEQ ID NO: 13984 - protein, 11 aa, Severe acute respiratory syndrome-related coronavirus
  REGION 1..11: note = Table B: HLA-DRB1*04:03L HLA-DQA1*03:01-B1*03:02L
  source 1..11: note = Severe acute respiratory syndrome coronavirus 2
SGKGQQQQGQT

SEQ ID NO: 13985 - protein, 11 aa, Severe acute respiratory syndrome-related coronavirus
  REGION 1..11: note = Table B: HLA-DRB1*04:03L HLA-DQA1*03:01-B1*03:02L HLA-DRB1*14:17L
  source 1..11: note = Severe acute respiratory syndrome coronavirus 2
GQTVTKKSAAE

SEQ ID NO: 13986 - protein, 14 aa, Severe acute respiratory syndrome-related coronavirus
  REGION 1..14: note = Table B: HLA-DRB1*04:03L HLA-DQA1*01:01-B1*05:01L HLA-DPA1*02:01-B1*13:01L HLA-DRB1*15:03L
  source 1..14: note = Severe acute respiratory syndrome coronavirus 2
TVTKKSAAEASKKP

SEQ ID NO: 13987 - protein, 11 aa, Severe acute respiratory syndrome-related coronavirus
  REGION 1..11: note = Table B: HLA-DRB1*04:03L HLA-DQA1*03:01-B1*03:02L HLA-DRB1*14:17L
  source 1..11: note = Severe acute respiratory syndrome coronavirus 2
TKAYNVTQAFG

SEQ ID NO: 13988 - protein, 13 aa, Severe acute respiratory syndrome-related coronavirus
  REGION 1..13: note = Table B: HLA-DRB1*04:03L HLA-DRB1*14:01L
  source 1..13: note = Severe acute respiratory syndrome coronavirus 2
YNVTQAFGRRGPE

SEQ ID NO: 13989 - protein, 13 aa, Severe acute respiratory syndrome-related coronavirus
  REGION 1..13: note = Table B: HLA-DRB1*04:03L HLA-DQA1*01:01-B1*05:01L HLA-DQA1*01-B1*05L HLA-DQA1*05:05-B1*03:01L HLA-DRB1*16:01L HLA-DQA1*01:03-B1*06:01L HLA-DQA1*02:01-B1*03:03L
  source 1..13: note = Severe acute respiratory syndrome coronavirus 2
GPEQTQGNFGDQE

SEQ ID NO: 13990 - protein, 12 aa, Severe acute respiratory syndrome-related coronavirus
  REGION 1..12: note = Table B: HLA-DRB1*04:03L HLA-DRB1*04:02L HLA-DRB1*04:05L HLA-DQA1*01:01-B1*05:01L HLA-DRB1*12:01L HLA-DPA1*02:01-B1*13:01L HLA-DPA1*03:01-B1*105:01L HLA-DRB1*15:03L
  source 1..12: note = Severe acute respiratory syndrome coronavirus 2
TQGNFGDQELIR

SEQ ID NO: 13991 - protein, 12 aa, Severe acute respiratory syndrome-related coronavirus
  REGION 1..12: note = Table B: HLA-DRB1*04:03L HLA-DRB1*16:01L
  source 1..12: note = Severe acute respiratory syndrome coronavirus 2
QGNFGDQELIRQ

SEQ ID NO: 13992 - protein, 10 aa, Severe acute respiratory syndrome-related coronavirus
  REGION 1..10: note = Table B: HLA-DRB1*04:03L HLA-DQA1*01-B1*05L HLA-DQA1*05:01-B1*02:01L HLA-DQA1*03:01-B1*03:02L HLA-DRB1*16:01L HLA-DQA1*02:01-B1*03:03L
  source 1..10: note = Severe acute respiratory syndrome coronavirus 2
FGDQELIRQG

SEQ ID NO: 13993 - protein, 12 aa, Severe acute respiratory syndrome-related coronavirus
  REGION 1..12: note = Table B: HLA-DRB1*04:03L HLA-DRB1*04:02L HLA-DQA1*01:03-B1*06:01L
  source 1..12: note = Severe acute respiratory syndrome coronavirus 2
DQELIRQGTDYK

SEQ ID NO: 13994 - protein, 12 aa, Severe acute respiratory syndrome-related coronavirus
  REGION 1..12: note = Table B: HLA-DRB1*04:03L HLA-DRB1*01:03L HLA-DRB1*04:05L HLA-DQA1*01:02-B1*06:02L HLA-DRB1*01:02L HLA-DRB1*08:01L HLA-DRB1*12:01L HLA-DQA1*03:01-B1*03:02L HLA-DPA1*01:02-B1*04:01L HLA-DRB1*16:01L HLA-DRB1*04:08L
  REGION 1..12: note = CONT. FROM ABOVE: HLA-DQA1*02:01-B1*03:03L
  source 1..12: note = Severe acute respiratory syndrome coronavirus 2
IRQGTDYKHWPQ

SEQ ID NO: 13995 - protein, 11 aa, Severe acute respiratory syndrome-related coronavirus
  REGION 1..11: note = Table B: HLA-DRB1*04:03L HLA-DRB1*13:03L HLA-DRB1*04:02L HLA-DRB1*04:05L HLA-DQA1*01-B1*05L HLA-DQA1*03:01-B1*03:02L HLA-DRB1*14:17L HLA-DPA1*01:02-B1*04:01L HLA-DRB1*16:01L HLA-DRB1*04:08L
  source 1..11: note = Severe acute respiratory syndrome coronavirus 2
TDYKHWPQIAQ

SEQ ID NO: 13996 - protein, 13 aa, Severe acute respiratory syndrome-related coronavirus
  REGION 1..13: note = Table B: HLA-DRB1*04:03L HLA-DRB1*01:02L HLA-DQA1*03:01-B1*03:02L
  source 1..13: note = Severe acute respiratory syndrome coronavirus 2
YKHWPQIAQFAPS

SEQ ID NO: 13997 - protein, 12 aa, Severe acute respiratory syndrome-related coronavirus
  REGION 1..12: note = Table B: HLA-DRB1*04:03L HLA-DRB1*14:17L
  source 1..12: note = Severe acute respiratory syndrome coronavirus 2
PQIAQFAPSASA

SEQ ID NO: 13998 - protein, 10 aa, Severe acute respiratory syndrome-related coronavirus
  REGION 1..10: note = Table B: HLA-DRB1*04:03L HLA-DRB1*01:03L HLA-DRB1*04:05L HLA-DQA1*01:02-B1*06:02L HLA-DRB1*01:01L HLA-DRB1*08:77L HLA-DPA1*02:01-B1*13:01M HLA-DPA1*03:01-B1*105:01L HLA-DRB1*16:01L HLA-DQA1*01:03-B1*06:01M
  REGION 1..10: note = CONT. FROM ABOVE: HLA-DQA1*02:01-B1*03:03L HLA-DRB1*15:03L
  source 1..10: note = Severe acute respiratory syndrome coronavirus 2
QFAPSASAFF

SEQ ID NO: 13999 - protein, 10 aa, Severe acute respiratory syndrome-related coronavirus
  REGION 1..10: note = Table B: HLA-DRB1*04:03L HLA-DRB1*04:05L HLA-DQA1*03:01-B1*03:02L HLA-DRB1*14:17L
  source 1..10: note = Severe acute respiratory syndrome coronavirus 2
RIGMEVTPSG

SEQ ID NO: 14000 - protein, 14 aa, Severe acute respiratory syndrome-related coronavirus
  REGION 1..14: note = Table B: HLA-DRB1*04:03L HLA-DRB1*04:02L HLA-DRB1*01:02L HLA-DQA1*05:05-B1*03:01L
  source 1..14: note = Severe acute respiratory syndrome coronavirus 2
MEVTPSGTWLTYTG

SEQ ID NO: 14001 - protein, 10 aa, Severe acute respiratory syndrome-related coronavirus
  REGION 1..10: note = Table B: HLA-DRB1*04:03L HLA-DRB1*13:03L HLA-DRB1*01:03L HLA-DRB1*04:02L HLA-DRB1*04:05L HLA-DRB4*03:01NL HLA-DQA1*01-B1*05L HLA-DQA1*03:01-B1*03:02L HLA-DRB1*14:54L HLA-DRB1*14:17L HLA-DRB1*16:01L HLA-DQA1*02:01-B1*03:03L
  source 1..10: note = Severe acute respiratory syndrome coronavirus 2
AIKLDDKDPN

SEQ ID NO: 14002 - protein, 11 aa, Severe acute respiratory syndrome-related coronavirus
  REGION 1..11: note = Table B: HLA-DRB1*04:03L HLA-DRB1*13:02L HLA-DRB1*13:03L HLA-DRB1*01:03L HLA-DRB1*04:02L HLA-DRB1*04:05L HLA-DRB1*01:02L HLA-DRB4*03:01NL HLA-DRB1*08:04L HLA-DRB1*03:01L HLA-DRB1*14:01L HLA-DRB1*11:04L HLA-DRB1*08:01L HLA-DRB1*12:01L HLA-DRB3*01:01L
  REGION 1..11: note = CONT. FROM ABOVE: HLA-DRB1*14:54L HLA-DRB1*14:17L HLA-DRB1*16:01 L HLA-DRB1*04:08L HLA-DRB1*15:03L
  source 1..11: note = Severe acute respiratory syndrome coronavirus 2
IKLDDKDPNFK

SEQ ID NO: 14003 - protein, 13 aa, Severe acute respiratory syndrome-related coronavirus
  REGION 1..13: note = Table B: HLA-DRB1*04:03L HLA-DRB1*01:03L HLA-DRB1*04:02L HLA-DRB1*04:04L HLA-DRB1*04:05L HLA-DQA1*01:02-B1*06:02L HLA-DRB1*01:02L HLA-DRB1*08:04L HLA-DPA1*01:03-B1*03:01L HLA-DPA1*03:01-B1*04:02L HLA-DRB1*08:01L HLA-DRB1*11:01L
  REGION 1..13: note = CONT. FROM ABOVE: HLA-DPA1*01:03-B1*04:02L HLA-DRB1*12:01L HLA-D PA1*02:01-B1*13:01L HLA-DPA1*03:01-B1*105:01L HLA-DRB1*14:54L HL A-DPA1*01:03-B1*02:01L HLA-DRB1*14:17L HLA-DRB1*16:01L HLA-DQA1* 01:03-B1*06:01L HLA-DRB1*04:08L HLA-DQA1*02:01-B1*03:03L
  REGION 1..13: note = CONT. FROM ABOVE: HLA-DRB1*15:03L
  source 1..13: note = Severe acute respiratory syndrome coronavirus 2
DPNFKDQVILLNK

SEQ ID NO: 14004 - protein, 10 aa, Severe acute respiratory syndrome-related coronavirus
  REGION 1..10: note = Table B: HLA-DRB1*04:03L HLA-DRB1*13:03L HLA-DRB1*01:03L HLA-DRB1*04:02L HLA-DRB1*04:05L HLA-DQA1*01:02-B1*06:02L HLA-DRB4*03:01NL HLA-DRB1*08:04L HLA-DRB1*14:01L HLA-DRB1*11:04L HLA-DRB1*08:01L HLA-DRB1*04:10L HLA-DRB1*12:01L
  REGION 1..10: note = CONT. FROM ABOVE: HLA-DQA1*03:01-B1*03:02L HLA-DRB1*14:54L HLA-D RB1*14:17L HLA-DRB1*16:01L HLA-DRB1*04:08L HLA-DRB1*08:03L HLA-D QA1*02:01-B1*03:03L
  source 1..10: note = Severe acute respiratory syndrome coronavirus 2
VILLNKHIDA

SEQ ID NO: 14005 - protein, 10 aa, Severe acute respiratory syndrome-related coronavirus
  REGION 1..10: note = Table B: HLA-DRB1*04:03L HLA-DRB1*04:02L HLA-DQA1*01-B1*05L
  source 1..10: note = Severe acute respiratory syndrome coronavirus 2
IDAYKTFPPT

SEQ ID NO: 14006 - protein, 11 aa, Severe acute respiratory syndrome-related coronavirus
  REGION 1..11: note = Table B: HLA-DRB1*04:03L HLA-DRB1*04:05L HLA-DRB1*01:02L HLA-DRB1*08:77L HLA-DPA1*01:03-B1*03:01L HLA-DQA1*01:01-B1*05:01L HLA-DQA1*05:05-B1*03:19L HLA-DRB4*02:01NL HLA-DPA1*01:02-B1*04:01L HLA-DRB1*04:08L
  REGION 1..11: note = CONT. FROM ABOVE: HLA-DRB1*15:03L
  source 1..11: note = Severe acute respiratory syndrome coronavirus 2
DETQALPQRQK

SEQ ID NO: 14007 - protein, 12 aa, Severe acute respiratory syndrome-related coronavirus
  REGION 1..12: note = Table B: HLA-DRB1*04:03L HLA-DQA1*05:01-B1*02:01L HLA-DRB1*12:01L
  source 1..12: note = Severe acute respiratory syndrome coronavirus 2
QQTVTLLPAADL

SEQ ID NO: 14008 - protein, 11 aa, Severe acute respiratory syndrome-related coronavirus
  REGION 1..11: note = Table B: HLA-DRB1*04:03L HLA-DQA1*03:01-B1*03:02L
  source 1..11: note = Severe acute respiratory syndrome coronavirus 2
LLPAADLDDFS

SEQ ID NO: 14009 - protein, 11 aa, Severe acute respiratory syndrome-related coronavirus
  REGION 1..11: note = Table B: HLA-DRB1*04:03L HLA-DQA1*05:01-B1*02:01L HLA-DQA1*03:01-B1*03:02L HLA-DQA1*02:01-B1*03:03L
  source 1..11: note = Severe acute respiratory syndrome coronavirus 2
LPAADLDDFSK

SEQ ID NO: 14010 - protein, 12 aa, Severe acute respiratory syndrome-related coronavirus
  REGION 1..12: note = Table B: HLA-DRB1*04:03L HLA-DRB1*04:02L
  source 1..12: note = Severe acute respiratory syndrome coronavirus 2
ADLDDFSKQLQQ

SEQ ID NO: 14011 - protein, 11 aa, Severe acute respiratory syndrome-related coronavirus
  REGION 1..11: note = Table B: HLA-DRB1*04:03L HLA-DRB1*04:02L HLA-DRB1*14:17L HLA-DPA1*01:02-B1*04:01L
  source 1..11: note = Severe acute respiratory syndrome coronavirus 2
LDDFSKQLQQS

SEQ ID NO: 14012 - protein, 13 aa, Severe acute respiratory syndrome-related coronavirus
  REGION 1..13: note = Table B: HLA-DRB1*04:03L
  source 1..13: note = Severe acute respiratory syndrome coronavirus 2
DDFSKQLQQSMSS

SEQ ID NO: 14013 - protein, 12 aa, Severe acute respiratory syndrome-related coronavirus
  REGION 1..12: note = Table B: HLA-DRB1*04:03L HLA-DRB1*14:17L
  source 1..12: note = Severe acute respiratory syndrome coronavirus 2
SKQLQQSMSSAD

SEQ ID NO: 14014 - protein, 13 aa, Severe acute respiratory syndrome-related coronavirus
  REGION 1..13: note = Table B: HLA-DRB1*04:03L HLA-DRB1*04:02L HLA-DRB1*04:05L HLA-DRB1*04:10L HLA-DQA1*03:01-B1*03:02L HLA-DRB1*14:17L
  source 1..13: note = Severe acute respiratory syndrome coronavirus 2
KQLQQSMSSADST

SEQ ID NO: 14015 - protein, 10 aa, Severe acute respiratory syndrome-related coronavirus
  REGION 1..10: note = Table B: HLA-DRB1*04:03L HLA-DQA1*05:01-B1*02:01L HLA-DRB1*12:01L HLA-DRB1*15:03L
  source 1..10: note = Severe acute respiratory syndrome coronavirus 2
YINVFAFPFT

SEQ ID NO: 14016 - protein, 12 aa, Severe acute respiratory syndrome-related coronavirus
  REGION 1..12: note = Table B: HLA-DRB1*04:03L HLA-DRB1*01:02L HLA-DQA1*03:01-B1*03:02L
  source 1..12: note = Severe acute respiratory syndrome coronavirus 2
INVFAFPFTIYS

SEQ ID NO: 14017 - protein, 11 aa, Severe acute respiratory syndrome-related coronavirus
  REGION 1..11: note = Table B: HLA-DRB1*04:03L HLA-DRB1*04:02L HLA-DRB4*03:01NL HLA-DQA1*01-B1*05L HLA-DRB1*12:01L HLA-DRB1*14:17L
  source 1..11: note = Severe acute respiratory syndrome coronavirus 2
AQVDVVNFNLT

SEQ ID NO: 14018 - protein, 10 aa, Severe acute respiratory syndrome-related coronavirus
  REGION 1..10: note = Table B: HLA-DRB1*13:02L HLA-DRB1*13:03L HLA-DRB1*04:02L HLA-DQA1*01:02-B1*06:02L HLA-DRB1*01:01L HLA-DRB4*03:01NL HLA-DRB3*02:01L HLA-DRB1*14:01L HLA-DRB1*11:04L HLA-DRB1*08:01L HLA-DRB5*01:01L HLA-DPA1*01:03-B1*04:02L HLA-DRB1*12:01M
  REGION 1..10: note = CONT. FROM ABOVE: HLA-DRB1*12:02L HLA-DPA1*03:01-B1*105:01L HLA- DQA1*03:01-B1*03:02M HLA-DQA1*05:05-B1*03:01M HLA-DRB1*14:17L HL A-DRB1*16:01L HLA-DQA1*01:03-B1*06:01L HLA-DQA1*02:01-B1*03:03L
  source 1..10: note = Severe acute respiratory syndrome coronavirus 2
ESLVPGFNEK

SEQ ID NO: 14019 - protein, 16 aa, Severe acute respiratory syndrome-related coronavirus
  REGION 1..16: note = Table B: HLA-DRB1*13:02L HLA-DRB1*01:02L HLA-DRB1*11:01L HLA-DPA1*02:01-B1*13:01L HLA-DQA1*05:05-B1*03:01L HLA-DRB1*15:03L
  source 1..16: note = Severe acute respiratory syndrome coronavirus 2
VPGFNEKTHVQLSLPV

SEQ ID NO: 14020 - protein, 13 aa, Severe acute respiratory syndrome-related coronavirus
  REGION 1..13: note = Table B: HLA-DRB1*13:02L HLA-DRB1*04:04L HLA-DRB1*01:01L HLA-DRB1*11:03L HLA-DRB1*11:04L HLA-DRB3*01:01L HLA-DRB1*07:01L HLA-DQA1*01:03-B1*06:01L HLA-DRB1*15:01L
  source 1..13: note = Severe acute respiratory syndrome coronavirus 2
LPVLQVRDVLVRG

SEQ ID NO: 14021 - protein, 13 aa, Severe acute respiratory syndrome-related coronavirus
  REGION 1..13: note = Table B: HLA-DRB1*13:02L HLA-DRB1*08:04L HLA-DRB1*14:01L HLA-DRB1*11:04L HLA-DQA1*05:05-B1*03:19L HLA-DPA1*01:03-B1*04:01L HLA-DRB1*12:02L HLA-DRB1*14:54L HLA-DPA1*01:03-B1*104:01L HLA-DRB1*10:01L HLA-DRB1*08:03L
  REGION 1..13: note = CONT. FROM ABOVE: HLA-DRB1*15:01L
  source 1..13: note = Severe acute respiratory syndrome coronavirus 2
DVLVRGFGDSVEE

SEQ ID NO: 14022 - protein, 14 aa, Severe acute respiratory syndrome-related coronavirus
  REGION 1..14: note = Table B: HLA-DRB1*13:02L HLA-DPA1*01:03-B1*03:01L HLA-DPA1*01:03-B1*104:01L
  source 1..14: note = Severe acute respiratory syndrome coronavirus 2
VLVRGFGDSVEEVL

SEQ ID NO: 14023 - protein, 10 aa, Severe acute respiratory syndrome-related coronavirus
  REGION 1..10: note = Table B: HLA-DRB1*13:02L HLA-DRB1*13:03L HLA-DRB4*03:01NL HLA-DRB5*01:01L HLA-DRB1*12:01L HLA-DQA1*03:01-B1*03:02L HLA-DQA1*05:05-B1*03:01L HLA-DQA1*02:01-B1*03:03L
  source 1..10: note = Severe acute respiratory syndrome coronavirus 2
SVEEVLSEAR

SEQ ID NO: 14024 - protein, 12 aa, Severe acute respiratory syndrome-related coronavirus
  REGION 1..12: note = Table B: HLA-DRB1*13:02L HLA-DRB1*12:02L HLA-DRB1*14:54L HLA-DRB1*16:01L
  source 1..12: note = Severe acute respiratory syndrome coronavirus 2
VEEVLSEARQHL

SEQ ID NO: 14025 - protein, 11 aa, Severe acute respiratory syndrome-related coronavirus
  REGION 1..11: note = Table B: HLA-DRB1*13:02L HLA-DRB1*01:03L HLA-DRB1*16:01L
  source 1..11: note = Severe acute respiratory syndrome coronavirus 2
EVLSEARQHLK

SEQ ID NO: 14026 - protein, 12 aa, Severe acute respiratory syndrome-related coronavirus
  REGION 1..12: note = Table B: HLA-DRB1*13:02L HLA-DRB1*04:02L HLA-DRB1*04:05L HLA-DQA1*01:02-B1*06:02L HLA-DRB1*01:02L HLA-DRB1*08:04L HLA-DRB1*11:03L HLA-DRB1*12:01L HLA-DRB3*01:01L HLA-DRB1*08:03L
  source 1..12: note = Severe acute respiratory syndrome coronavirus 2
QPYVFIKRSDAR

SEQ ID NO: 14027 - protein, 16 aa, Severe acute respiratory syndrome-related coronavirus
  REGION 1..16: note = Table B: HLA-DRB1*13:02L HLA-DRB1*01:03L HLA-DRB1*04:04L HLA-DRB1*08:04L HLA-DQA1*05:05-B1*03:19L HLA-DPA1*01:03-B1*04:02L HLA-DPA1*01:03-B1*02:01L HLA-DQA1*05:05-B1*03:01L HLA-DRB1*04:08L
  REGION 1..16: note = CONT. FROM ABOVE: HLA-DQA1*02:01-B1*03:03L
  source 1..16: note = Severe acute respiratory syndrome coronavirus 2
APHGHVMVELVAELEG

SEQ ID NO: 14028 - protein, 13 aa, Severe acute respiratory syndrome-related coronavirus
  REGION 1..13: note = Table B: HLA-DRB1*13:02L HLA-DRB1*04:02L HLA-DRB1*04:04L HLA-DRB1*04:05L HLA-DRB1*01:02L HLA-DRB3*02:01L HLA-DRB1*04:10L HLA-DRB1*12:02L HLA-DQA1*03:01-B1*03:02L HLA-DRB1*14:54L HLA-DQA1*05:05-B1*03:01L
  source 1..13: note = Severe acute respiratory syndrome coronavirus 2
VELVAELEGIQYG

SEQ ID NO: 14029 - protein, 13 aa, Severe acute respiratory syndrome-related coronavirus
  REGION 1..13: note = Table B: HLA-DRB1*13:02L HLA-DRB1*01:03L HLA-DRB4*03:01NL HLA-DRB1*08:01L HLA-DPA1*01:03-B1*04:02L HLA-DRB1*12:02L HLA-DRB1*14:54L HLA-DRB1*14:17L
  source 1..13: note = Severe acute respiratory syndrome coronavirus 2
SGETLGVLVPHVG

SEQ ID NO: 14030 - protein, 13 aa, Severe acute respiratory syndrome-related coronavirus
  REGION 1..13: note = Table B: HLA-DRB1*13:02L HLA-DRB1*01:03L HLA-DRB1*04:04L HLA-DQA1*01:02-B1*06:02L HLA-DRB1*01:02L HLA-DRB4*03:01NL HLA-DPA1*01:03-B1*03:01L HLA-DQA1*05:05-B1*03:19L HLA-DQA1*05:01-B1*02:01L HLA-DRB1*04:10L HLA-DRB1*12:01L
  REGION 1..13: note = CONT. FROM ABOVE: HLA-DPA1*03:01-B1*105:01L HLA-DRB1*14:54L HLA- DQA1*05:05-B1*03:01L HLA-DQA1*01:03-B1*06:01L HLA-DRB1*04:08L HL A-DRB1*15:03L
  source 1..13: note = Severe acute respiratory syndrome coronavirus 2
GVLVPHVGEIPVA

SEQ ID NO: 14031 - protein, 10 aa, Severe acute respiratory syndrome-related coronavirus
  REGION 1..10: note = Table B: HLA-DRB1*13:02L HLA-DRB1*13:03L HLA-DRB1*01:01L HLA-DRB4*03:01NL HLA-DRB1*11:04L HLA-DRB1*08:01L HLA-DRB5*01:01L HLA-DRB1*12:01L HLA-DQA1*03:01-B1*03:02L HLA-DQA1*05:05-B1*03:01L HLA-DQA1*02:01-B1*03:03L
  source 1..10: note = Severe acute respiratory syndrome coronavirus 2
HVGEIPVAYR

SEQ ID NO: 14032 - protein, 13 aa, Severe acute respiratory syndrome-related coronavirus
  REGION 1..13: note = Table B: HLA-DRB1*13:02L HLA-DRB1*04:05L HLA-DRB1*14:01L HLA-DRB1*08:01L HLA-DRB1*12:01L HLA-DRB3*01:01L HLA-DPA1*01:02-B1*04:01L HLA-DRB1*15:03L
  source 1..13: note = Severe acute respiratory syndrome coronavirus 2
IPVAYRKVLLRKN

SEQ ID NO: 14033 - protein, 15 aa, Severe acute respiratory syndrome-related coronavirus
  REGION 1..15: note = Table B: HLA-DRB1*13:02L HLA-DRB1*08:77L HLA-DRB4*01:01L HLA-DRB1*09:01L HLA-DRB3*01:01L HLA-DRB1*14:54L HLA-DPA1*01:03-B1*104:01L HLA-DRB1*14:17L HLA-DRB1*10:01L HLA-DRB1*08:03L
  source 1..15: note = Severe acute respiratory syndrome coronavirus 2
GDELGTDPYEDFQEN

SEQ ID NO: 14034 - protein, 15 aa, Severe acute respiratory syndrome-related coronavirus
  REGION 1..15: note = Table B: HLA-DRB1*13:02L HLA-DRB1*08:04L HLA-DPA1*01:03-B1*03:01L HLA-DRB1*14:01L HLA-DQA1*01:01-B1*05:01L HLA-DRB1*12:01L HLA-DRB3*01:01L HLA-DQA1*05:05-B1*03:01L HLA-DPA1*01:02-B1*04:01L
  source 1..15: note = Severe acute respiratory syndrome coronavirus 2
DPYEDFQENWNTKHS

SEQ ID NO: 14035 - protein, 14 aa, Severe acute respiratory syndrome-related coronavirus
  REGION 1..14: note = Table B: HLA-DRB1*13:02L HLA-DRB1*11:04L HLA-DQA1*05:01-B1*02:01L HLA-DRB1*12:01L HLA-DRB3*01:01L HLA-DPA1*02:01-B1*13:01L HLA-DPA1*03:01-B1*105:01L HLA-DQA1*05:05-B1*03:01L HLA-DQA1*01:03-B1*06:01L
  REGION 1..14: note = CONT. FROM ABOVE: HLA-DRB1*08:03L HLA-DRB1*15:03L
  source 1..14: note = Severe acute respiratory syndrome coronavirus 2
EDFQENWNTKHSSG

SEQ ID NO: 14036 - protein, 14 aa, Severe acute respiratory syndrome-related coronavirus
  REGION 1..14: note = Table B: HLA-DRB1*13:02L HLA-DRB1*04:05L HLA-DRB1*01:02L HLA-DRB1*08:04L HLA-DPA1*01:03-B1*03:01L HLA-DRB1*14:01L HLA-DQA1*01:01-B1*05:01L HLA-DRB1*11:01L HLA-DQA1*01-B1*05L HLA-DQA1*05:05-B1*03:19L HLA-DQA1*05:01-B1*02:01L
  REGION 1..14: note = CONT. FROM ABOVE: HLA-DPA1*01:03-B1*04:02L HLA-DRB1*12:01L HLA-D PA1*02:01-B1*13:01L HLA-DPA1*03:01-B1*105:01L HLA-DPA1*01:02-B1* 04:01L HLA-DRB1*04:08L HLA-DRB1*08:03L HLA-DRB1*15:03L
  source 1..14: note = Severe acute respiratory syndrome coronavirus 2
FQENWNTKHSSGVT

SEQ ID NO: 14037 - protein, 10 aa, Severe acute respiratory syndrome-related coronavirus
  REGION 1..10: note = Table B: HLA-DRB1*13:02M HLA-DRB1*13:03L HLA-DRB1*01:01L HLA-DRB4*03:01NL HLA-DRB1*14:01L HLA-DRB1*11:04L HLA-DRB1*08:01M HLA-DRB5*01:01L HLA-DRB1*12:01L HLA-DRB3*01:01L HLA-DQA1*03:01-B1*03:02M HLA-DQA1*05:05-B1*03:01L
  REGION 1..10: note = CONT. FROM ABOVE: HLA-DRB1*14:17L HLA-DRB1*16:01L HLA-DRB1*15:01 L
  source 1..10: note = Severe acute respiratory syndrome coronavirus 2
NTKHSSGVTR

SEQ ID NO: 14038 - protein, 16 aa, Severe acute respiratory syndrome-related coronavirus
  REGION 1..16: note = Table B: HLA-DRB1*13:02L HLA-DRB1*04:04L HLA-DRB1*14:02L HLA-DRB1*15:01L
  source 1..16: note = Severe acute respiratory syndrome coronavirus 2
GGAYTRYVDNNFCGPD

SEQ ID NO: 14039 - protein, 15 aa, Severe acute respiratory syndrome-related coronavirus
  REGION 1..15: note = Table B: HLA-DRB1*13:02L HLA-DRB1*04:04L HLA-DRB1*11:01L HLA-DRB1*07:01L
  source 1..15: note = Severe acute respiratory syndrome coronavirus 2
LLARAGKASCTLSEQ

SEQ ID NO: 14040 - protein, 10 aa, Severe acute respiratory syndrome-related coronavirus
  REGION 1..10: note = Table B: HLA-DRB1*13:02L HLA-DRB1*13:03L HLA-DRB4*03:01NL HLA-DRB1*08:01L HLA-DRB5*01:01L HLA-DRB1*12:01L HLA-DQA1*03:01-B1*03:02L HLA-DQA1*05:05-B1*03:01L
  source 1..10: note = Severe acute respiratory syndrome coronavirus 2
EQLDFIDTKR

SEQ ID NO: 14041 - protein, 14 aa, Severe acute respiratory syndrome-related coronavirus
  REGION 1..14: note = Table B: HLA-DRB1*13:02L HLA-DPA1*01:03-B1*03:01L HLA-DRB1*04:08L HLA-DQA1*02:01-B1*03:03L
  source 1..14: note = Severe acute respiratory syndrome coronavirus 2
IDTKRGVYCCREHE

SEQ ID NO: 14042 - protein, 14 aa, Severe acute respiratory syndrome-related coronavirus
  REGION 1..14: note = Table B: HLA-DRB1*13:02L HLA-DRB3*01:01L HLA-DPA1*01:02-B1*04:01L
  source 1..14: note = Severe acute respiratory syndrome coronavirus 2
HEHEIAWYTERSEK

SEQ ID NO: 14043 - protein, 13 aa, Severe acute respiratory syndrome-related coronavirus
  REGION 1..13: note = Table B: HLA-DRB1*13:02L HLA-DRB1*08:04L HLA-DRB3*02:01L
  source 1..13: note = Severe acute respiratory syndrome coronavirus 2
EIAWYTERSEKSY

SEQ ID NO: 14044 - protein, 13 aa, Severe acute respiratory syndrome-related coronavirus
  REGION 1..13: note = Table B: HLA-DRB1*13:02L HLA-DRB1*13:03L HLA-DRB1*01:03L HLA-DRB1*04:04L HLA-DRB1*01:02L HLA-DRB1*08:01L HLA-DRB1*04:10L HLA-DRB1*12:01L HLA-DPA1*01:03-B1*104:01L HLA-DPA1*01:02-B1*04:01L HLA-DRB1*07:01L HLA-DRB1*04:08L
  REGION 1..13: note = CONT. FROM ABOVE: HLA-DRB1*15:03L
  source 1..13: note = Severe acute respiratory syndrome coronavirus 2
RSEKSYELQTPFE

SEQ ID NO: 14045 - protein, 12 aa, Severe acute respiratory syndrome-related coronavirus
  REGION 1..12: note = Table B: HLA-DRB1*13:02L HLA-DRB1*04:05L HLA-DRB1*01:02L HLA-DRB1*04:08L
  source 1..12: note = Severe acute respiratory syndrome coronavirus 2
TPFEIKLAKKFD

SEQ ID NO: 14046 - protein, 14 aa, Severe acute respiratory syndrome-related coronavirus
  REGION 1..14: note = Table B: HLA-DRB1*13:02L HLA-DRB1*01:03L HLA-DRB1*01:02L HLA-DRB1*11:04L HLA-DRB1*11:01L HLA-DRB1*16:01L HLA-DRB1*04:08L HLA-DRB1*15:03L
  source 1..14: note = Severe acute respiratory syndrome coronavirus 2
PFEIKLAKKFDTFN

SEQ ID NO: 14047 - protein, 14 aa, Severe acute respiratory syndrome-related coronavirus
  REGION 1..14: note = Table B: HLA-DRB1*13:02L HLA-DRB1*04:05L HLA-DRB1*01:02L HLA-DRB3*01:01L HLA-DPA1*03:01-B1*105:01L HLA-DRB1*15:03L
  source 1..14: note = Severe acute respiratory syndrome coronavirus 2
EIKLAKKFDTFNGE

SEQ ID NO: 14048 - protein, 14 aa, Severe acute respiratory syndrome-related coronavirus
  REGION 1..14: note = Table B: HLA-DRB1*13:02L HLA-DRB1*01:03L HLA-DRB1*04:04L HLA-DQA1*01:02-B1*06:02L HLA-DRB1*01:02L HLA-DPA1*01:03-B1*03:01L HLA-DRB1*12:01L HLA-DPA1*02:01-B1*13:01L HLA-DPA1*03:01-B1*105:01L
  REGION 1..14: note = CONT. FROM ABOVE: HLA-DPA1*01:03-B1*104:01L HLA-DRB1*07:01L HLA- DRB1*04:08L HLA-DRB1*15:03L
  source 1..14: note = Severe acute respiratory syndrome coronavirus 2
LAKKFDTFNGECPN

SEQ ID NO: 14049 - protein, 10 aa, Severe acute respiratory syndrome-related coronavirus
  REGION 1..10: note = Table B: HLA-DRB1*13:02L HLA-DRB1*13:03L HLA-DRB1*04:02L HLA-DRB4*03:01NL HLA-DRB1*08:01L HLA-DRB1*12:01L HLA-DQA1*03:01-B1*03:02L HLA-DQA1*05:05-B1*03:01L HLA-DRB1*14:17L HLA-DQA1*01:03-B1*06:01L
  REGION 1..10: note = CONT. FROM ABOVE: HLA-DQA1*02:01-B1*03:03L
  source 1..10: note = Severe acute respiratory syndrome coronavirus 2
NSIIKTIQPR

SEQ ID NO: 14050 - protein, 10 aa, Severe acute respiratory syndrome-related coronavirus
  REGION 1..10: note = Table B: HLA-DRB1*13:02L HLA-DRB1*13:03L HLA-DRB1*08:01L HLA-DRB1*12:01L HLA-DQA1*03:01-B1*03:02L
  source 1..10: note = Severe acute respiratory syndrome coronavirus 2
KTIQPRVEKK

SEQ ID NO: 14051 - protein, 11 aa, Severe acute respiratory syndrome-related coronavirus
  REGION 1..11: note = Table B: HLA-DRB1*13:02L HLA-DQA1*01:02-B1*06:02L HLA-DQA1*01:01-B1*05:01L HLA-DQA1*01-B1*05L HLA-DRB1*12:01L HLA-DRB1*14:17L HLA-DRB1*16:01L
  source 1..11: note = Severe acute respiratory syndrome coronavirus 2
ETSWQTGDFVK

SEQ ID NO: 14052 - protein, 16 aa, Severe acute respiratory syndrome-related coronavirus
  REGION 1..16: note = Table B: HLA-DRB1*13:02L HLA-DRB1*04:04L HLA-DRB1*01:01L HLA-DRB1*08:04L HLA-DRB1*11:04L HLA-DRB1*08:01L HLA-DRB1*11:01L HLA-DPA1*01:03-B1*04:02L HLA-DRB3*01:01L HLA-DPA1*01:03-B1*104:01L HLA-DPA1*01:02-B1*04:01L
  source 1..16: note = Severe acute respiratory syndrome coronavirus 2
LPQNAVVKIYCPACHN

SEQ ID NO: 14053 - protein, 14 aa, Severe acute respiratory syndrome-related coronavirus
  REGION 1..14: note = Table B: HLA-DRB1*13:02L HLA-DRB1*01:03L HLA-DRB1*04:04L HLA-DRB1*11:01L HLA-DPA1*01:03-B1*104:01L HLA-DPA1*01:02-B1*04:01L HLA-DRB1*07:01L HLA-DRB1*16:01L HLA-DRB1*04:08L HLA-DQA1*02:01-B1*03:03L
  source 1..14: note = Severe acute respiratory syndrome coronavirus 2
AVVKIYCPACHNSE

SEQ ID NO: 14054 - protein, 15 aa, Severe acute respiratory syndrome-related coronavirus
  REGION 1..15: note = Table B: HLA-DRB1*13:02L
  source 1..15: note = Severe acute respiratory syndrome coronavirus 2
VGPEHSLAEYHNESG

SEQ ID NO: 14055 - protein, 13 aa, Severe acute respiratory syndrome-related coronavirus
  REGION 1..13: note = Table B: HLA-DRB1*13:02L HLA-DRB1*13:03L HLA-DRB1*04:02L HLA-DRB1*08:04L HLA-DRB1*11:03L HLA-DRB1*12:01L HLA-DRB3*01:01L HLA-DRB1*16:01L
  source 1..13: note = Severe acute respiratory syndrome coronavirus 2
SGLKTILRKGGRT

SEQ ID NO: 14056 - protein, 15 aa, Severe acute respiratory syndrome-related coronavirus
  REGION 1..15: note = Table B: HLA-DRB1*13:02L HLA-DRB1*11:04L HLA-DRB1*08:01L HLA-DRB1*11:01L HLA-DRB3*01:01L
  source 1..15: note = Severe acute respiratory syndrome coronavirus 2
LKTILRKGGRTIAFG

SEQ ID NO: 14057 - protein, 16 aa, Severe acute respiratory syndrome-related coronavirus
  REGION 1..16: note = Table B: HLA-DRB1*13:02L HLA-DRB1*01:03L HLA-DRB1*14:01L HLA-DRB1*13:01L HLA-DRB1*12:01L HLA-DRB3*01:01L HLA-DRB1*16:01L HLA-DRB1*04:08L HLA-DRB1*15:03L
  source 1..16: note = Severe acute respiratory syndrome coronavirus 2
FSYVGCHNKCAYWVPR

SEQ ID NO: 14058 - protein, 11 aa, Severe acute respiratory syndrome-related coronavirus
  REGION 1..11: note = Table B: HLA-DRB1*13:02L HLA-DRB1*04:05L HLA-DQA1*01:02-B1*06:02L HLA-DRB1*01:02L HLA-DRB1*08:01L HLA-DRB1*12:01L HLA-DPA1*03:01-B1*105:01L HLA-DRB1*14:54L HLA-DQA1*01:03-B1*06:01L HLA-DRB1*04:08L HLA-DRB1*15:03L
  source 1..11: note = Severe acute respiratory syndrome coronavirus 2
YWVPRASANIG

SEQ ID NO: 14059 - protein, 13 aa, Severe acute respiratory syndrome-related coronavirus
  REGION 1..13: note = Table B: HLA-DRB1*13:02L HLA-DRB1*04:04L HLA-DPA1*02:01-B1*13:01L HLA-DPA1*01:03-B1*104:01L HLA-DRB1*04:08L
  source 1..13: note = Severe acute respiratory syndrome coronavirus 2
WVPRASANIGCNH

SEQ ID NO: 14060 - protein, 17 aa, Severe acute respiratory syndrome-related coronavirus
  REGION 1..17: note = Table B: HLA-DRB1*13:02L
  source 1..17: note = Severe acute respiratory syndrome coronavirus 2
GSEGLNDNLLEILQKEK

SEQ ID NO: 14061 - protein, 12 aa, Severe acute respiratory syndrome-related coronavirus
  REGION 1..12: note = Table B: HLA-DRB1*13:02L HLA-DRB1*01:03L HLA-DRB1*04:05L HLA-DQA1*01:02-B1*06:02L HLA-DRB1*01:02L HLA-DRB1*11:03L HLA-DRB1*11:04L HLA-DRB1*11:01L HLA-DQA1*05:01-B1*02:01L HLA-DRB1*12:01L HLA-DRB3*01:01L HLA-DRB1*04:08L HLA-DRB1*15:03L
  source 1..12: note = Severe acute respiratory syndrome coronavirus 2
LEILQKEKVNIN

SEQ ID NO: 14062 - protein, 13 aa, Severe acute respiratory syndrome-related coronavirus
  REGION 1..13: note = Table B: HLA-DRB1*13:02L HLA-DRB1*01:03L HLA-DRB1*04:04L HLA-DRB1*01:02L HLA-DPA1*01:03-B1*03:01L HLA-DRB1*14:01L HLA-DRB1*08:01L HLA-DRB1*04:10L HLA-DPA1*03:01-B1*105:01L HLA-DPA1*01:02-B1*04:01L HLA-DRB1*16:01L HLA-DRB1*04:08L
  REGION 1..13: note = CONT. FROM ABOVE: HLA-DRB1*15:03L
  source 1..13: note = Severe acute respiratory syndrome coronavirus 2
KEKVNINIVGDFK

SEQ ID NO: 14063 - protein, 14 aa, Severe acute respiratory syndrome-related coronavirus
  REGION 1..14: note = Table B: HLA-DRB1*13:02L HLA-DPA1*01:03-B1*03:01L
  source 1..14: note = Severe acute respiratory syndrome coronavirus 2
EKVNINIVGDFKLN

SEQ ID NO: 14064 - protein, 12 aa, Severe acute respiratory syndrome-related coronavirus
  REGION 1..12: note = Table B: HLA-DRB1*13:02L HLA-DPA1*03:01-B1*04:02L HLA-DRB1*14:01L HLA-DQA1*05:01-B1*02:01L HLA-DRB1*12:01L HLA-DRB1*16:01L HLA-DRB1*15:03L
  source 1..12: note = Severe acute respiratory syndrome coronavirus 2
VGDFKLNEEIAI

SEQ ID NO: 14065 - protein, 12 aa, Severe acute respiratory syndrome-related coronavirus
  REGION 1..12: note = Table B: HLA-DRB1*13:02L HLA-DRB3*02:01L HLA-DPA1*03:01-B1*04:02L HLA-DRB1*14:01L HLA-DQA1*05:01-B1*02:01L HLA-DRB1*12:01L HLA-DRB1*16:01L
  source 1..12: note = Severe acute respiratory syndrome coronavirus 2
GDFKLNEEIAII

SEQ ID NO: 14066 - protein, 12 aa, Severe acute respiratory syndrome-related coronavirus
  REGION 1..12: note = Table B: HLA-DRB1*13:02L HLA-DRB1*14:01L HLA-DRB1*12:01L HLA-DPA1*03:01-B1*105:01L
  source 1..12: note = Severe acute respiratory syndrome coronavirus 2
DFKLNEEIAIIL

SEQ ID NO: 14067 - protein, 14 aa, Severe acute respiratory syndrome-related coronavirus
  REGION 1..14: note = Table B: HLA-DRB1*13:02L HLA-DRB3*01:01L
  source 1..14: note = Severe acute respiratory syndrome coronavirus 2
TVKGLDYKAFKQIV

SEQ ID NO: 14068 - protein, 12 aa, Severe acute respiratory syndrome-related coronavirus
  REGION 1..12: note = Table B: HLA-DRB1*13:02L HLA-DRB1*04:04L HLA-DRB1*08:04L HLA-DPA1*01:03-B1*03:01L HLA-DRB3*01:01L HLA-DPA1*02:01-B1*13:01L HLA-DRB1*14:17L HLA-DRB1*08:03L
  source 1..12: note = Severe acute respiratory syndrome coronavirus 2
GLDYKAFKQIVE

SEQ ID NO: 14069 - protein, 14 aa, Severe acute respiratory syndrome-related coronavirus
  REGION 1..14: note = Table B: HLA-DRB1*13:02L HLA-DRB1*01:03L HLA-DRB1*04:04L HLA-DRB1*01:01L HLA-DRB1*08:01L HLA-DRB1*11:01L HLA-DQA1*03:01-B1*03:02L HLA-DPA1*01:03-B1*104:01L HLA-DPA1*01:02-B1*04:01L HLA-DRB1*07:01L HLA-DRB1*16:01L
  REGION 1..14: note = CONT. FROM ABOVE: HLA-DRB1*04:08L HLA-DQA1*02:01-B1*03:03L HLA-D RB1*15:03L
  source 1..14: note = Severe acute respiratory syndrome coronavirus 2
KAFKQIVESCGNFK

SEQ ID NO: 14070 - protein, 15 aa, Severe acute respiratory syndrome-related coronavirus
  REGION 1..15: note = Table B: HLA-DRB1*13:02L HLA-DRB1*04:02L HLA-DRB1*01:01L HLA-DRB1*08:01L HLA-DRB3*01:01L HLA-DQA1*03:01-B1*03:02L
  source 1..15: note = Severe acute respiratory syndrome coronavirus 2
KQIVESCGNFKVTKG

SEQ ID NO: 14071 - protein, 14 aa, Severe acute respiratory syndrome-related coronavirus
  REGION 1..14: note = Table B: HLA-DRB1*13:02L HLA-DRB1*01:03L HLA-DRB1*04:04L HLA-DRB1*04:05L HLA-DRB1*08:04L HLA-DPA1*01:03-B1*03:01L HLA-DRB1*04:10L HLA-DRB1*04:08L
  source 1..14: note = Severe acute respiratory syndrome coronavirus 2
AWNIGEQKSILSPL

SEQ ID NO: 14072 - protein, 14 aa, Severe acute respiratory syndrome-related coronavirus
  REGION 1..14: note = Table B: HLA-DRB1*13:02L HLA-DRB1*04:04L HLA-DRB3*01:01L HLA-DPA1*02:01-B1*13:01L HLA-DPA1*03:01-B1*105:01L
  source 1..14: note = Severe acute respiratory syndrome coronavirus 2
AARVVRSIFSRTLE

SEQ ID NO: 14073 - protein, 14 aa, Severe acute respiratory syndrome-related coronavirus
  REGION 1..14: note = Table B: HLA-DRB1*13:02L HLA-DRB1*04:02L HLA-DRB1*04:04L HLA-DRB1*01:01L HLA-DRB3*01:01L HLA-DRB1*07:01L HLA-DRB1*15:01L
  source 1..14: note = Severe acute respiratory syndrome coronavirus 2
ARVVRSIFSRTLET

SEQ ID NO: 14074 - protein, 15 aa, Severe acute respiratory syndrome-related coronavirus
  REGION 1..15: note = Table B: HLA-DRB1*13:02L HLA-DRB1*11:04L HLA-DRB1*11:01L HLA-DRB3*01:01L HLA-DPA1*01:03-B1*104:01L HLA-DRB1*08:03L
  source 1..15: note = Severe acute respiratory syndrome coronavirus 2
VVRSIFSRTLETAQN

SEQ ID NO: 14075 - protein, 13 aa, Severe acute respiratory syndrome-related coronavirus
  REGION 1..13: note = Table B: HLA-DRB1*13:02L HLA-DRB1*04:04L HLA-DRB1*04:10L HLA-DQA1*05:05-B1*03:01L HLA-DRB1*07:01L
  source 1..13: note = Severe acute respiratory syndrome coronavirus 2
IFSRTLETAQNSV

SEQ ID NO: 14076 - protein, 10 aa, Severe acute respiratory syndrome-related coronavirus
  REGION 1..10: note = Table B: HLA-DRB1*13:02L HLA-DRB1*13:03L HLA-DRB4*03:01NL HLA-DRB1*08:01L HLA-DRB1*12:01L HLA-DQA1*03:01-B1*03:02L HLA-DQA1*05:05-B1*03:01L HLA-DRB1*14:17L HLA-DQA1*02:01-B1*03:03L
  source 1..10: note = Severe acute respiratory syndrome coronavirus 2
AQNSVRVLQK

SEQ ID NO: 14077 - protein, 14 aa, Severe acute respiratory syndrome-related coronavirus
  REGION 1..14: note = Table B: HLA-DRB1*13:02L
  source 1..14: note = Severe acute respiratory syndrome coronavirus 2
YSLRLIDAMMFTSD

SEQ ID NO: 14078 - protein, 14 aa, Severe acute respiratory syndrome-related coronavirus
  REGION 1..14: note = Table B: HLA-DRB1*13:02L HLA-DRB1*13:03L HLA-DRB1*01:03L HLA-DRB1*04:04L HLA-DRB1*01:02L HLA-DRB1*08:77L HLA-DRB3*02:01L HLA-DPA1*01:03-B1*03:01L HLA-DRB1*14:01L HLA-DRB1*14:02L HLA-DQA1*01:01-B1*05:01L HLA-DPA1*01:03-B1*04:02L
  REGION 1..14: note = CONT. FROM ABOVE: HLA-DPA1*02:01-B1*13:01L HLA-DPA1*01:03-B1*104 :01L
  source 1..14: note = Severe acute respiratory syndrome coronavirus 2
IDAMMFTSDLATNN

SEQ ID NO: 14079 - protein, 13 aa, Severe acute respiratory syndrome-related coronavirus
  REGION 1..13: note = Table B: HLA-DRB1*13:02L HLA-DRB1*04:08L
  source 1..13: note = Severe acute respiratory syndrome coronavirus 2
AMMFTSDLATNNL

SEQ ID NO: 14080 - protein, 12 aa, Severe acute respiratory syndrome-related coronavirus
  REGION 1..12: note = Table B: HLA-DRB1*13:02L HLA-DRB1*14:54L HLA-DRB1*14:17L
  source 1..12: note = Severe acute respiratory syndrome coronavirus 2
FTSDLATNNLVV

SEQ ID NO: 14081 - protein, 12 aa, Severe acute respiratory syndrome-related coronavirus
  REGION 1..12: note = Table B: HLA-DRB1*13:02L HLA-DRB1*08:77L HLA-DRB3*02:01L HLA-DPA1*01:03-B1*03:01L HLA-DPA1*03:01-B1*04:02L HLA-DRB1*14:01L HLA-DQA1*05:05-B1*03:01L HLA-DPA1*01:02-B1*04:01L
  source 1..12: note = Severe acute respiratory syndrome coronavirus 2
TSDLATNNLVVM

SEQ ID NO: 14082 - protein, 11 aa, Severe acute respiratory syndrome-related coronavirus
  REGION 1..11: note = Table B: HLA-DRB1*13:02L HLA-DRB1*04:02L HLA-DRB1*01:02L HLA-DRB4*03:01NL HLA-DRB1*08:77L HLA-DQA1*01-B1*05L HLA-DQA1*05:05-B1*03:19L HLA-DRB1*12:01L HLA-DPA1*03:01-B1*105:01L HLA-DQA1*05:05-B1*03:01L
  REGION 1..11: note = CONT. FROM ABOVE: HLA-DRB1*14:17L HLA-DRB1*07:01L HLA-DRB1*16:01 L HLA-DQA1*01:03-B1*06:01L HLA-DRB1*15:03L
  source 1..11: note = Severe acute respiratory syndrome coronavirus 2
VMAYITGGVVQ

SEQ ID NO: 14083 - protein, 13 aa, Severe acute respiratory syndrome-related coronavirus
  REGION 1..13: note = Table B: HLA-DRB1*13:02L HLA-DRB1*04:04L HLA-DRB1*04:05L HLA-DRB4*03:01NL HLA-DRB1*08:77L HLA-DRB3*02:01L HLA-DRB1*14:01L HLA-DRB1*11:03L HLA-DQA1*01-B1*05L HLA-DQA1*03:01-B1*03:02L HLA-DRB1*14:54L HLA-DRB1*07:01L
  source 1..13: note = Severe acute respiratory syndrome coronavirus 2
GGVVQLTSQWLTN

SEQ ID NO: 14084 - protein, 14 aa, Severe acute respiratory syndrome-related coronavirus
  REGION 1..14: note = Table B: HLA-DRB1*13:02L HLA-DRB1*04:04L HLA-DRB1*04:05L HLA-DRB1*08:04L HLA-DRB1*11:04L HLA-DRB1*08:01L HLA-DRB1*11:01L HLA-DRB3*01:01L
  source 1..14: note = Severe acute respiratory syndrome coronavirus 2
SQWLTNIFGTVYEK

SEQ ID NO: 14085 - protein, 15 aa, Severe acute respiratory syndrome-related coronavirus
  REGION 1..15: note = Table B: HLA-DRB1*13:02L
  source 1..15: note = Severe acute respiratory syndrome coronavirus 2
EKLKPVLDWLEEKFK

SEQ ID NO: 14086 - protein, 15 aa, Severe acute respiratory syndrome-related coronavirus
  REGION 1..15: note = Table B: HLA-DRB1*13:02L
  source 1..15: note = Severe acute respiratory syndrome coronavirus 2
PVLDWLEEKFKEGVE

SEQ ID NO: 14087 - protein, 12 aa, Severe acute respiratory syndrome-related coronavirus
  REGION 1..12: note = Table B: HLA-DRB1*13:02L HLA-DRB1*04:05L HLA-DRB1*01:02L HLA-DPA1*01:03-B1*03:01L HLA-DRB1*12:01L HLA-DPA1*02:01-B1*13:01L HLA-DPA1*01:02-B1*04:01L HLA-DRB1*16:01L HLA-DRB1*04:08L
  source 1..12: note = Severe acute respiratory syndrome coronavirus 2
KFKEGVEFLRDG

SEQ ID NO: 14088 - protein, 11 aa, Severe acute respiratory syndrome-related coronavirus
  REGION 1..11: note = Table B: HLA-DRB1*13:02L HLA-DRB1*13:03L HLA-DRB1*12:01L
  source 1..11: note = Severe acute respiratory syndrome coronavirus 2
SVQTFFKLVNK

SEQ ID NO: 14089 - protein, 12 aa, Severe acute respiratory syndrome-related coronavirus
  REGION 1..12: note = Table B: HLA-DRB1*13:02L HLA-DRB1*04:05L HLA-DRB1*01:02L HLA-DRB1*08:04L HLA-DPA1*01:03-B1*03:01L HLA-DPA1*03:01-B1*04:02L HLA-DRB1*14:01L HLA-DQA1*01-B1*05L HLA-DPA1*01:03-B1*04:02L HLA-DRB1*12:01L
  source 1..12: note = Severe acute respiratory syndrome coronavirus 2
VQTFFKLVNKFL

SEQ ID NO: 14090 - protein, 12 aa, Severe acute respiratory syndrome-related coronavirus
  REGION 1..12: note = Table B: HLA-DRB1*13:02L HLA-DRB1*04:05L HLA-DRB1*08:03L
  source 1..12: note = Severe acute respiratory syndrome coronavirus 2
TFFKLVNKFLAL

SEQ ID NO: 14091 - protein, 12 aa, Severe acute respiratory syndrome-related coronavirus
  REGION 1..12: note = Table B: HLA-DRB1*13:02L HLA-DRB1*04:04L HLA-DRB1*08:04L HLA-DPA1*01:03-B1*03:01L HLA-DRB1*11:04L HLA-DRB1*08:01L HLA-DRB1*11:01L HLA-DPA1*01:03-B1*02:01L
  source 1..12: note = Severe acute respiratory syndrome coronavirus 2
IIIGGAKLKALN

SEQ ID NO: 14092 - protein, 14 aa, Severe acute respiratory syndrome-related coronavirus
  REGION 1..14: note = Table B: HLA-DRB1*13:02L HLA-DPA1*01:03-B1*03:01L HLA-DQA1*05:01-B1*02:01L HLA-DRB1*12:01L HLA-DPA1*02:01-B1*13:01L HLA-DRB1*15:03L
  source 1..14: note = Severe acute respiratory syndrome coronavirus 2
ALNLGETFVTHSKG

SEQ ID NO: 14093 - protein, 10 aa, Severe acute respiratory syndrome-related coronavirus
  REGION 1..10: note = Table B: HLA-DRB1*13:02L HLA-DRB1*13:03L HLA-DRB1*01:03L HLA-DRB1*01:01L HLA-DRB1*01:02L HLA-DRB4*03:01NL HLA-DRB1*14:01L HLA-DRB1*11:04L HLA-DRB1*08:01L HLA-DRB1*11:01L HLA-DRB1*12:01L HLA-DRB3*01:01L HLA-DQA1*03:01-B1*03:02L HLA-DRB1*14:17L
  REGION 1..10: note = CONT. FROM ABOVE: HLA-DRB1*16:01L HLA-DQA1*02:01-B1*03:03L
  source 1..10: note = Severe acute respiratory syndrome coronavirus 2
VTHSKGLYRK

SEQ ID NO: 14094 - protein, 14 aa, Severe acute respiratory syndrome-related coronavirus
  REGION 1..14: note = Table B: HLA-DRB1*13:02L HLA-DQA1*01:02-B1*06:02L HLA-DRB1*14:01L HLA-DRB1*12:01L HLA-DRB3*01:01L
  source 1..14: note = Severe acute respiratory syndrome coronavirus 2
KGLYRKCVKSREET

SEQ ID NO: 14095 - protein, 14 aa, Severe acute respiratory syndrome-related coronavirus
  REGION 1..14: note = Table B: HLA-DRB1*13:02L HLA-DRB1*01:02L HLA-DRB1*14:01L HLA-DRB1*11:02L HLA-DRB1*12:01L HLA-DRB3*01:01L HLA-DPA1*02:01-B1*13:01L HLA-DRB1*08:02L
  source 1..14: note = Severe acute respiratory syndrome coronavirus 2
GLYRKCVKSREETG

SEQ ID NO: 14096 - protein, 14 aa, Severe acute respiratory syndrome-related coronavirus
  REGION 1..14: note = Table B: HLA-DRB1*13:02L HLA-DRB1*08:04L HLA-DQA1*05:05-B1*03:01L
  source 1..14: note = Severe acute respiratory syndrome coronavirus 2
GLLMPLKAPKEIIF

SEQ ID NO: 14097 - protein, 16 aa, Severe acute respiratory syndrome-related coronavirus
  REGION 1..16: note = Table B: HLA-DRB1*13:02L HLA-DRB1*04:05L HLA-DRB1*01:02L HLA-DRB1*12:01L
  source 1..16: note = Severe acute respiratory syndrome coronavirus 2
MPLKAPKEIIFLEGET

SEQ ID NO: 14098 - protein, 10 aa, Severe acute respiratory syndrome-related coronavirus
  REGION 1..10: note = Table B: HLA-DRB1*13:02M HLA-DRB1*13:03M HLA-DRB1*04:02L HLA-DQA1*01:02-B1*06:02L HLA-DRB1*01:01L HLA-DRB4*03:01NL HLA-DRB3*02:01L HLA-DRB1*14:01L HLA-DRB1*11:04L HLA-DRB1*14:02L HLA-DRB1*08:01M HLA-DRB5*01:01L HLA-DPA1*01:03-B1*04:02L
  REGION 1..10: note = CONT. FROM ABOVE: HLA-DRB1*12:01M HLA-DRB1*12:02L HLA-DPA1*03:01 -B1*105:01L HLA-DQA1*03:01-B1*03:02L HLA-DQA1*05:05-B1*03:01M HL A-DRB1*14:17L HLA-DRB1*16:01L HLA-DQA1*01:03-B1*06:01L HLA-DQA1* 02:01-B1*03:03L HLA-DRB1*15:01L
  source 1..10: note = Severe acute respiratory syndrome coronavirus 2
EVLTEEVVLK

SEQ ID NO: 14099 - protein, 14 aa, Severe acute respiratory syndrome-related coronavirus
  REGION 1..14: note = Table B: HLA-DRB1*13:02L HLA-DPA1*02:01-B1*13:01L
  source 1..14: note = Severe acute respiratory syndrome coronavirus 2
EEVVLKTGDLQPLE

SEQ ID NO: 14100 - protein, 14 aa, Severe acute respiratory syndrome-related coronavirus
  REGION 1..14: note = Table B: HLA-DRB1*13:02L HLA-DRB1*08:01L HLA-DPA1*01:03-B1*04:01L HLA-DPA1*02:01-B1*13:01L HLA-DPA1*01:03-B1*104:01L
  source 1..14: note = Severe acute respiratory syndrome coronavirus 2
VVLKTGDLQPLEQP

SEQ ID NO: 14101 - protein, 15 aa, Severe acute respiratory syndrome-related coronavirus
  REGION 1..15: note = Table B: HLA-DRB1*13:02L HLA-DPA1*01:03-B1*104:01L
  source 1..15: note = Severe acute respiratory syndrome coronavirus 2
GDLQPLEQPTSEAVE

SEQ ID NO: 14102 - protein, 13 aa, Severe acute respiratory syndrome-related coronavirus
  REGION 1..13: note = Table B: HLA-DRB1*13:02L HLA-DPA1*01:03-B1*02:01L
  source 1..13: note = Severe acute respiratory syndrome coronavirus 2
EAPLVGTPVCING

SEQ ID NO: 14103 - protein, 14 aa, Severe acute respiratory syndrome-related coronavirus
  REGION 1..14: note = Table B: HLA-DRB1*13:02L HLA-DRB1*04:04L HLA-DRB1*08:04L HLA-DRB1*14:01L HLA-DRB1*11:04L HLA-DRB1*11:01L HLA-DQA1*05:01-B1*02:01L HLA-DPA1*01:03-B1*04:01L HLA-DRB3*01:01L HLA-DPA1*01:03-B1*02:01L
  REGION 1..14: note = CONT. FROM ABOVE: HLA-DPA1*01:03-B1*104:01L HLA-DQA1*05:05-B1*03 :01L HLA-DRB1*07:01L HLA-DRB1*15:03L
  source 1..14: note = Severe acute respiratory syndrome coronavirus 2
EIKDTEKYCALAPN

SEQ ID NO: 14104 - protein, 13 aa, Severe acute respiratory syndrome-related coronavirus
  REGION 1..13: note = Table B: HLA-DRB1*13:02L HLA-DRB1*01:02L HLA-DRB1*08:04L HLA-DRB1*08:77L HLA-DRB3*02:01L HLA-DPA1*03:01-B1*04:02L HLA-DRB1*11:03L HLA-DRB1*11:04L HLA-DRB1*14:02L HLA-DPA1*01:03-B1*04:01L HLA-DRB1*09:01L HLA-DRB1*07:01L
  source 1..13: note = Severe acute respiratory syndrome coronavirus 2
APNMMVTNNTFTL

SEQ ID NO: 14105 - protein, 15 aa, Severe acute respiratory syndrome-related coronavirus
  REGION 1..15: note = Table B: HLA-DRB1*13:02L HLA-DRB1*08:04L HLA-DPA1*03:01-B1*04:02L
  source 1..15: note = Severe acute respiratory syndrome coronavirus 2
VTFGDDTVIEVQGYK

SEQ ID NO: 14106 - protein, 13 aa, Severe acute respiratory syndrome-related coronavirus
  REGION 1..13: note = Table B: HLA-DRB1*13:02L HLA-DPA1*02:01-B1*13:01L HLA-DPA1*01:02-B1*04:01L
  source 1..13: note = Severe acute respiratory syndrome coronavirus 2
GDDTVIEVQGYKS

SEQ ID NO: 14107 - protein, 12 aa, Severe acute respiratory syndrome-related coronavirus
  REGION 1..12: note = Table B: HLA-DRB1*13:02L HLA-DRB1*08:04L HLA-DRB3*02:01L HLA-DPA1*01:03-B1*04:01L HLA-DPA1*02:01-B1*13:01L HLA-DRB1*10:01L
  source 1..12: note = Severe acute respiratory syndrome coronavirus 2
TVIEVQGYKSVN

SEQ ID NO: 14108 - protein, 13 aa, Severe acute respiratory syndrome-related coronavirus
  REGION 1..13: note = Table B: HLA-DRB1*13:02L HLA-DRB1*04:04L HLA-DRB1*04:10L HLA-DRB3*01:01L
  source 1..13: note = Severe acute respiratory syndrome coronavirus 2
VNITFELDERIDK

SEQ ID NO: 14109 - protein, 10 aa, Severe acute respiratory syndrome-related coronavirus
  REGION 1..10: note = Table B: HLA-DRB1*13:02L HLA-DRB1*13:03L HLA-DRB1*01:03L HLA-DRB1*04:02L HLA-DRB1*01:01L HLA-DRB4*03:01NL HLA-DRB1*11:04L HLA-DRB1*08:01L HLA-DRB1*12:01L HLA-DQA1*03:01-B1*03:02M HLA-DQA1*05:05-B1*03:01L HLA-DRB1*14:17L HLA-DRB1*16:01L
  REGION 1..10: note = CONT. FROM ABOVE: HLA-DQA1*02:01-B1*03:03L
  source 1..10: note = Severe acute respiratory syndrome coronavirus 2
ERIDKVLNEK

SEQ ID NO: 14110 - protein, 13 aa, Severe acute respiratory syndrome-related coronavirus
  REGION 1..13: note = Table B: HLA-DRB1*13:02L HLA-DRB1*13:03L HLA-DRB1*01:03L HLA-DRB1*04:02L HLA-DRB1*04:04L HLA-DRB1*04:05L HLA-DRB1*01:01L HLA-DRB4*03:01NL HLA-DRB1*08:77L HLA-DRB1*11:03L HLA-DRB1*14:02L HLA-DRB1*14:54L HLA-DRB1*04:08L
  source 1..13: note = Severe acute respiratory syndrome coronavirus 2
SAYTVELGTEVNE

SEQ ID NO: 14111 - protein, 13 aa, Severe acute respiratory syndrome-related coronavirus
  REGION 1..13: note = Table B: HLA-DRB1*13:02L HLA-DRB1*08:77L HLA-DRB1*14:01L HLA-DRB1*11:03L HLA-DRB1*14:02L HLA-DRB4*01:01L HLA-DRB3*01:01L HLA-DPA1*02:01-B1*13:01L HLA-DRB1*08:03L
  source 1..13: note = Severe acute respiratory syndrome coronavirus 2
YEYGTEDDYQGKP

SEQ ID NO: 14112 - protein, 13 aa, Severe acute respiratory syndrome-related coronavirus
  REGION 1..13: note = Table B: HLA-DRB1*13:02L
  source 1..13: note = Severe acute respiratory syndrome coronavirus 2
EYGTEDDYQGKPL

SEQ ID NO: 14113 - protein, 11 aa, Severe acute respiratory syndrome-related coronavirus
  REGION 1..11: note = Table B: HLA-DRB1*13:02L HLA-DRB1*01:03L HLA-DRB1*04:05L HLA-DQA1*01:02-B1*06:02L HLA-DRB4*03:01NL HLA-DPA1*01:03-B1*03:01L HLA-DPA1*03:01-B1*04:02L HLA-DRB1*14:02L HLA-DQA1*01:01-B1*05:01L HLA-DRB1*12:01L
  REGION 1..11: note = CONT. FROM ABOVE: HLA-DPA1*03:01-B1*105:01L HLA-DQA1*05:05-B1*03 :01L HLA-DRB1*14:17L HLA-DRB1*15:03L
  source 1..11: note = Severe acute respiratory syndrome coronavirus 2
TEDDYQGKPLE

SEQ ID NO: 14114 - protein, 14 aa, Severe acute respiratory syndrome-related coronavirus
  REGION 1..14: note = Table B: HLA-DRB1*13:02L HLA-DRB1*01:02L HLA-DRB1*11:01L HLA-DPA1*01:03-B1*104:01L HLA-DRB1*08:03L
  source 1..14: note = Severe acute respiratory syndrome coronavirus 2
EDDYQGKPLEFGAT

SEQ ID NO: 14115 - protein, 14 aa, Severe acute respiratory syndrome-related coronavirus
  REGION 1..14: note = Table B: HLA-DRB1*13:02L HLA-DRB1*01:02L HLA-DPA1*01:03-B1*03:01L HLA-DRB1*11:04L HLA-DRB1*11:01L HLA-DRB1*12:01L
  source 1..14: note = Severe acute respiratory syndrome coronavirus 2
DDYQGKPLEFGATS

SEQ ID NO: 14116 - protein, 14 aa, Severe acute respiratory syndrome-related coronavirus
  REGION 1..14: note = Table B: HLA-DRB1*13:02L HLA-DRB1*01:03L HLA-DRB1*04:04L HLA-DRB1*01:02L HLA-DRB4*03:01NL HLA-DRB1*08:04L HLA-DRB1*08:77L HLA-DPA1*01:03-B1*03:01L HLA-DQA1*05:01-B1*02:01L HLA-DRB1*04:10L HLA-DRB1*12:01L HLA-DRB1*12:02L
  REGION 1..14: note = CONT. FROM ABOVE: HLA-DPA1*02:01-B1*13:01L HLA-DPA1*03:01-B1*105 :01L HLA-DRB1*14:54L HLA-DPA1*01:03-B1*104:01L HLA-DRB1*10:01L H LA-DRB1*04:08L HLA-DRB1*15:03L
  source 1..14: note = Severe acute respiratory syndrome coronavirus 2
KPLEFGATSAALQP

SEQ ID NO: 14117 - protein, 14 aa, Severe acute respiratory syndrome-related coronavirus
  REGION 1..14: note = Table B: HLA-DRB1*13:02L HLA-DRB1*13:03L HLA-DRB1*01:02L HLA-DRB1*14:02L HLA-DRB1*11:01L HLA-DRB4*02:01NL HLA-DQA1*05:05-B1*03:116L HLA-DRB3*01:01L HLA-DPA1*02:01-B1*13:01L HLA-DPA1*01:03-B1*104:01L
  REGION 1..14: note = CONT. FROM ABOVE: HLA-DRB1*14:17L HLA-DRB1*15:03L
  source 1..14: note = Severe acute respiratory syndrome coronavirus 2
FGATSAALQPEEEQ

SEQ ID NO: 14118 - protein, 15 aa, Severe acute respiratory syndrome-related coronavirus
  REGION 1..15: note = Table B: HLA-DRB1*13:02L HLA-DPA1*01:03-B1*104:01L HLA-DRB1*15:03L
  source 1..15: note = Severe acute respiratory syndrome coronavirus 2
GATSAALQPEEEQEE

SEQ ID NO: 14119 - protein, 13 aa, Severe acute respiratory syndrome-related coronavirus
  REGION 1..13: note = Table B: HLA-DRB1*13:02L HLA-DRB1*13:03L HLA-DRB1*01:03L HLA-DRB1*04:02L HLA-DRB4*03:01NL HLA-DRB1*08:04L HLA-DRB1*08:77L HLA-DRB3*01:01L HLA-DRB1*14:54L HLA-DRB1*14:17L
  source 1..13: note = Severe acute respiratory syndrome coronavirus 2
EDWLDDDSQQTVG

SEQ ID NO: 14120 - protein, 15 aa, Severe acute respiratory syndrome-related coronavirus
  REGION 1..15: note = Table B: HLA-DRB1*13:02L HLA-DRB1*13:03L HLA-DRB4*03:01NL HLA-DRB1*11:01L HLA-DQA1*01-B1*05L HLA-DQA1*05:05-B1*03:116L HLA-DRB3*01:01L HLA-DPA1*02:01-B1*13:01L HLA-DPA1*01:03-B1*104:01L
  source 1..15: note = Severe acute respiratory syndrome coronavirus 2
GSEDNQTTTIQTIVE

SEQ ID NO: 14121 - protein, 16 aa, Severe acute respiratory syndrome-related coronavirus
  REGION 1..16: note = Table B: HLA-DRB1*13:02L HLA-DRB1*13:03L HLA-DPA1*01:03-B1*03:01L HLA-DPA1*03:01-B1*04:02L HLA-DRB1*14:01L HLA-DPA1*02:01-B1*13:01L HLA-DPA1*01:03-B1*104:01L HLA-DPA1*01:02-B1*04:01L
  source 1..16: note = Severe acute respiratory syndrome coronavirus 2
DNQTTTIQTIVEVQPQ

SEQ ID NO: 14122 - protein, 12 aa, Severe acute respiratory syndrome-related coronavirus
  REGION 1..12: note = Table B: HLA-DRB1*13:02L HLA-DRB1*01:03L HLA-DRB1*04:02L HLA-DRB1*04:05L HLA-DRB1*01:02L HLA-DRB4*03:01NL HLA-DRB3*02:01L HLA-DPA1*01:03-B1*03:01L HLA-DRB1*11:03L HLA-DQA1*01-B1*05L HLA-DRB1*04:10L HLA-DRB1*09:01L HLA-DRB1*12:02L HLA-DRB1*14:54L
  REGION 1..12: note = CONT. FROM ABOVE: HLA-DQA1*05:05-B1*03:01L HLA-DRB1*14:17L HLA-D RB1*07:01L HLA-DRB1*04:08L
  source 1..12: note = Severe acute respiratory syndrome coronavirus 2
TPVVQTIEVNSF

SEQ ID NO: 14123 - protein, 13 aa, Severe acute respiratory syndrome-related coronavirus
  REGION 1..13: note = Table B: HLA-DRB1*13:02L HLA-DRB1*01:03L HLA-DRB1*04:04L HLA-DRB1*04:05L HLA-DRB4*03:01NL HLA-DRB3*02:01L HLA-DPA1*01:03-B1*03:01L HLA-DRB1*04:10L HLA-DRB1*12:02L HLA-DRB1*14:54L HLA-DRB1*04:08L
  source 1..13: note = Severe acute respiratory syndrome coronavirus 2
PVVQTIEVNSFSG

SEQ ID NO: 14124 - protein, 10 aa, Severe acute respiratory syndrome-related coronavirus
  REGION 1..10: note = Table B: HLA-DRB1*13:02L HLA-DRB1*13:03M HLA-DQA1*01:02-B1*06:02L HLA-DRB1*01:01L HLA-DRB4*03:01NL HLA-DRB3*02:01L HLA-DRB1*14:01L HLA-DRB1*11:04L HLA-DRB1*08:01M HLA-DRB5*01:01L HLA-DPA1*01:03-B1*04:02L HLA-DRB1*12:01M
  REGION 1..10: note = CONT. FROM ABOVE: HLA-DRB1*12:02L HLA-DPA1*03:01-B1*105:01L HLA- DQA1*03:01-B1*03:02M HLA-DQA1*05:05-B1*03:01M HLA-DRB1*14:17L HL A-DQA1*01:03-B1*06:01L HLA-DQA1*02:01-B1*03:03L HLA-DRB1*15:01L
  source 1..10: note = Severe acute respiratory syndrome coronavirus 2
EVNSFSGYLK

SEQ ID NO: 14125 - protein, 12 aa, Severe acute respiratory syndrome-related coronavirus
  REGION 1..12: note = Table B: HLA-DRB1*13:02L HLA-DQA1*01:02-B1*06:02L HLA-DRB1*08:04L HLA-DRB1*08:77L HLA-DRB3*02:01L HLA-DPA1*01:03-B1*03:01L HLA-DPA1*03:01-B1*04:02L HLA-DRB1*11:04L HLA-DRB1*14:02L HLA-DQA1*05:05-B1*03:19L
  REGION 1..12: note = CONT. FROM ABOVE: HLA-DRB1*12:02L HLA-DQA1*05:05-B1*03:01L HLA-D RB1*10:01L HLA-DRB1*08:03L
  source 1..12: note = Severe acute respiratory syndrome coronavirus 2
NVYIKNADIVEE

SEQ ID NO: 14126 - protein, 12 aa, Severe acute respiratory syndrome-related coronavirus
  REGION 1..12: note = Table B: HLA-DRB1*13:02L HLA-DQA1*01:02-B1*06:02L HLA-DRB1*08:04L HLA-DPA1*01:03-B1*03:01L HLA-DPA1*03:01-B1*04:02L HLA-DRB1*08:01L HLA-DQA1*05:05-B1*03:19L HLA-DQA1*05:05-B1*03:01L
  source 1..12: note = Severe acute respiratory syndrome coronavirus 2
VYIKNADIVEEA

SEQ ID NO: 14127 - protein, 12 aa, Severe acute respiratory syndrome-related coronavirus
  REGION 1..12: note = Table B: HLA-DRB1*13:02L HLA-DRB1*13:03L HLA-DRB1*01:03L HLA-DRB1*04:04L HLA-DRB1*04:05L HLA-DRB1*01:02L HLA-DRB4*03:01NL HLA-DPA1*01:03-B1*03:01L HLA-DRB1*08:01L HLA-DQA1*05:05-B1*03:19L HLA-DRB1*04:10L HLA-DRB1*12:01L
  REGION 1..12: note = CONT. FROM ABOVE: HLA-DPA1*02:01-B1*13:01L HLA-DPA1*01:02-B1*04: 01L HLA-DRB1*04:08L HLA-DRB1*15:03L
  source 1..12: note = Severe acute respiratory syndrome coronavirus 2
YIKNADIVEEAK

SEQ ID NO: 14128 - protein, 12 aa, Severe acute respiratory syndrome-related coronavirus
  REGION 1..12: note = Table B: HLA-DRB1*13:02L HLA-DRB1*08:04L HLA-DRB1*11:01L HLA-DRB3*01:01L HLA-DQA1*01:03-B1*06:01L HLA-DRB1*15:03L
  source 1..12: note = Severe acute respiratory syndrome coronavirus 2
DIVEEAKKVKPT

SEQ ID NO: 14129 - protein, 12 aa, Severe acute respiratory syndrome-related coronavirus
  REGION 1..12: note = Table B: HLA-DRB1*13:02L HLA-DRB1*04:05L HLA-DQA1*01:02-B1*06:02L HLA-DRB1*01:01L HLA-DRB1*08:77L HLA-DRB1*11:03L HLA-DRB1*11:04L HLA-DRB1*08:01L HLA-DQA1*05:01-B1*02:01L HLA-DRB1*12:02L
  REGION 1..12: note = CONT. FROM ABOVE: HLA-DPA1*03:01-B1*105:01L HLA-DRB1*14:54L HLA- DRB1*07:01L HLA-DRB1*04:08L HLA-DRB1*15:03L
  source 1..12: note = Severe acute respiratory syndrome coronavirus 2
NVYLKHGGGVAG

SEQ ID NO: 14130 - protein, 14 aa, Severe acute respiratory syndrome-related coronavirus
  REGION 1..14: note = Table B: HLA-DRB1*13:02L HLA-DRB1*04:05L HLA-DRB1*01:01L HLA-DRB1*08:04L HLA-DRB1*14:02L HLA-DQA1*05:01-B1*02:01L HLA-DPA1*02:01-B1*13:01L HLA-DPA1*01:03-B1*104:01L
  source 1..14: note = Severe acute respiratory syndrome coronavirus 2
VYLKHGGGVAGALN

SEQ ID NO: 14131 - protein, 12 aa, Severe acute respiratory syndrome-related coronavirus
  REGION 1..12: note = Table B: HLA-DRB1*13:02L HLA-DRB1*04:05L HLA-DRB1*01:02L HLA-DPA1*01:03-B1*03:01L HLA-DQA1*01:01-B1*05:01L HLA-DRB1*08:01L HLA-DPA1*01:03-B1*04:02L HLA-DRB1*15:03L
  source 1..12: note = Severe acute respiratory syndrome coronavirus 2
GGVAGALNKATN

SEQ ID NO: 14132 - protein, 14 aa, Severe acute respiratory syndrome-related coronavirus
  REGION 1..14: note = Table B: HLA-DRB1*13:02L HLA-DRB1*01:02L HLA-DRB1*04:10L HLA-DPA1*02:01-B1*13:01L
  source 1..14: note = Severe acute respiratory syndrome coronavirus 2
KATNNAMQVESDDY

SEQ ID NO: 14133 - protein, 15 aa, Severe acute respiratory syndrome-related coronavirus
  REGION 1..15: note = Table B: HLA-DRB1*13:02L HLA-DRB1*14:01L HLA-DRB1*14:02L HLA-DQA1*05:05-B1*03:01L
  source 1..15: note = Severe acute respiratory syndrome coronavirus 2
NNAMQVESDDYIATN

SEQ ID NO: 14134 - protein, 12 aa, Severe acute respiratory syndrome-related coronavirus
  REGION 1..12: note = Table B: HLA-DRB1*13:02L HLA-DRB1*01:03L HLA-DRB1*04:05L HLA-DQA1*01:02-B1*06:02L HLA-DPA1*01:03-B1*03:01L HLA-DRB1*12:01L HLA-DPA1*03:01-B1*105:01L
  source 1..12: note = Severe acute respiratory syndrome coronavirus 2
VGPNVNKGEDIQ

SEQ ID NO: 14135 - protein, 12 aa, Severe acute respiratory syndrome-related coronavirus
  REGION 1..12: note = Table B: HLA-DRB1*13:02L HLA-DRB1*04:04L HLA-DRB1*01:02L HLA-DRB1*08:04L HLA-DRB3*02:01L HLA-DRB1*14:01L HLA-DRB1*11:03L HLA-DRB1*11:04L HLA-DQA1*01:01-B1*05:01L HLA-DRB1*08:01L HLA-DRB1*12:02L HLA-DPA1*02:01-B1*13:01L
  REGION 1..12: note = CONT. FROM ABOVE: HLA-DPA1*03:01-B1*105:01L HLA-DQA1*05:05-B1*03 :01L HLA-DQA1*01:03-B1*06:01L HLA-DRB1*08:03L
  source 1..12: note = Severe acute respiratory syndrome coronavirus 2
EDIQLLKSAYEN

SEQ ID NO: 14136 - protein, 12 aa, Severe acute respiratory syndrome-related coronavirus
  REGION 1..12: note = Table B: HLA-DRB1*13:02L HLA-DRB1*01:03L HLA-DRB1*08:04L HLA-DRB3*02:01L HLA-DPA1*01:03-B1*03:01L HLA-DQA1*01:01-B1*05:01L HLA-DRB1*08:01L HLA-DQA1*05:05-B1*03:01L HLA-DRB1*07:01L HLA-DRB1*04:08L
  source 1..12: note = Severe acute respiratory syndrome coronavirus 2
SAYENFNQHEVL

SEQ ID NO: 14137 - protein, 13 aa, Severe acute respiratory syndrome-related coronavirus
  REGION 1..13: note = Table B: HLA-DRB1*13:02L HLA-DRB1*13:03L HLA-DRB1*01:03L HLA-DRB1*04:02L HLA-DRB1*01:02L HLA-DRB1*08:04L HLA-DPA1*01:03-B1*03:01L HLA-DRB1*08:01L HLA-DPA1*01:03-B1*04:01L HLA-DPA1*01:03-B1*04:02L
  REGION 1..13: note = CONT. FROM ABOVE: HLA-DRB1*12:01L HLA-DQA1*05:05-B1*03:01L HLA-D RB1*04:08L
  source 1..13: note = Severe acute respiratory syndrome coronavirus 2
ENFNQHEVLLAPL

SEQ ID NO: 14138 - protein, 14 aa, Severe acute respiratory syndrome-related coronavirus
  REGION 1..14: note = Table B: HLA-DRB1*13:02L HLA-DRB1*01:03L HLA-DRB1*08:04L HLA-DPA1*01:03-B1*03:01L HLA-DRB1*14:01L HLA-DQA1*01:01-B1*05:01L HLA-DRB1*08:01L HLA-DQA1*05:05-B1*03:19L HLA-DQA1*05:01-B1*02:01L
  REGION 1..14: note = CONT. FROM ABOVE: HLA-DPA1*02:01-B1*13:01L HLA-DPA1*01:03-B1*104 :01L HLA-DRB1*10:01L HLA-DRB1*04:08L
  source 1..14: note = Severe acute respiratory syndrome coronavirus 2
NQHEVLLAPLLSAG

SEQ ID NO: 14139 - protein, 14 aa, Severe acute respiratory syndrome-related coronavirus
  REGION 1..14: note = Table B: HLA-DRB1*13:02L HLA-DRB1*04:04L HLA-DRB1*08:04L HLA-DRB1*14:01L HLA-DRB1*08:01L HLA-DQA1*05:05-B1*03:19L HLA-DPA1*01:03-B1*04:01L HLA-DPA1*01:03-B1*04:02L HLA-DPA1*01:03-B1*104:01L
  source 1..14: note = Severe acute respiratory syndrome coronavirus 2
TVRTNVYLAVFDKN

SEQ ID NO: 14140 - protein, 12 aa, Severe acute respiratory syndrome-related coronavirus
  REGION 1..12: note = Table B: HLA-DRB1*13:02L HLA-DRB1*08:04L HLA-DRB3*02:01L HLA-DRB1*08:01L HLA-DRB1*04:08L
  source 1..12: note = Severe acute respiratory syndrome coronavirus 2
VYLAVFDKNLYD

SEQ ID NO: 14141 - protein, 12 aa, Severe acute respiratory syndrome-related coronavirus
  REGION 1..12: note = Table B: HLA-DRB1*13:02L HLA-DRB1*04:05L HLA-DQA1*01:02-B1*06:02L HLA-DRB1*01:02L HLA-DPA1*02:01-B1*13:01L HLA-DPA1*01:03-B1*104:01L HLA-DRB1*15:03L
  source 1..12: note = Severe acute respiratory syndrome coronavirus 2
YDKLVSSFLEMK

SEQ ID NO: 14142 - protein, 13 aa, Severe acute respiratory syndrome-related coronavirus
  REGION 1..13: note = Table B: HLA-DRB1*13:02L HLA-DQA1*05:05-B1*03:19L HLA-DRB1*08:02L
  source 1..13: note = Severe acute respiratory syndrome coronavirus 2
SSFLEMKSEKQVE

SEQ ID NO: 14143 - protein, 11 aa, Severe acute respiratory syndrome-related coronavirus
  REGION 1..11: note = Table B: HLA-DRB1*13:02L HLA-DRB1*13:03L HLA-DRB1*01:03L HLA-DRB1*08:01L HLA-DRB1*12:01L HLA-DRB1*14:17L HLA-DQA1*02:01-B1*03:03L
  source 1..11: note = Severe acute respiratory syndrome coronavirus 2
EMKSEKQVEQK

SEQ ID NO: 14144 - protein, 13 aa, Severe acute respiratory syndrome-related coronavirus
  REGION 1..13: note = Table B: HLA-DRB1*13:02L HLA-DRB1*01:03L HLA-DRB1*04:02L HLA-DRB1*04:05L HLA-DRB1*08:04L HLA-DRB1*11:03L HLA-DRB1*11:04L HLA-DRB1*11:01L HLA-DRB3*01:01L HLA-DRB1*04:08L HLA-DRB1*08:03L
  source 1..13: note = Severe acute respiratory syndrome coronavirus 2
EQKIAEIPKEEVK

SEQ ID NO: 14145 - protein, 12 aa, Severe acute respiratory syndrome-related coronavirus
  REGION 1..12: note = Table B: HLA-DRB1*13:02L HLA-DRB1*04:05L HLA-DRB1*08:04L HLA-DRB1*11:04L HLA-DRB1*08:01L HLA-DRB1*11:01L HLA-DRB1*12:01L HLA-DRB3*01:01L HLA-DRB1*04:08L
  source 1..12: note = Severe acute respiratory syndrome coronavirus 2
KIAEIPKEEVKP

SEQ ID NO: 14146 - protein, 11 aa, Severe acute respiratory syndrome-related coronavirus
  REGION 1..11: note = Table B: HLA-DRB1*13:02L HLA-DRB4*03:01NL HLA-DRB1*08:77L HLA-DPA1*03:01-B1*04:02L HLA-DRB1*03:01L HLA-DQA1*01-B1*05L HLA-DRB4*01:01L HLA-DQA1*05:05-B1*03:116L HLA-DPA1*01:03-B1*04:02L HLA-DRB1*12:01L
  REGION 1..11: note = CONT. FROM ABOVE: HLA-DPA1*02:01-B1*13:01L HLA-DPA1*01:03-B1*104 :01L HLA-DRB1*10:01L HLA-DRB1*08:02L
  source 1..11: note = Severe acute respiratory syndrome coronavirus 2
AEIPKEEVKPF

SEQ ID NO: 14147 - protein, 10 aa, Severe acute respiratory syndrome-related coronavirus
  REGION 1..10: note = Table B: HLA-DRB1*13:02L HLA-DRB1*13:03L HLA-DRB1*08:01L HLA-DRB1*12:01L HLA-DQA1*03:01-B1*03:02L HLA-DQA1*05:05-B1*03:01L
  source 1..10: note = Severe acute respiratory syndrome coronavirus 2
EVKPFITESK

SEQ ID NO: 14148 - protein, 10 aa, Severe acute respiratory syndrome-related coronavirus
  REGION 1..10: note = Table B: HLA-DRB1*13:02L HLA-DRB1*13:03L HLA-DRB1*01:01L HLA-DRB4*03:01NL HLA-DRB3*02:01L HLA-DRB1*11:04L HLA-DRB1*08:01L HLA-DRB5*01:01L HLA-DPA1*01:03-B1*04:02L HLA-DRB1*12:01L HLA-DQA1*03:01-B1*03:02L HLA-DQA1*05:05-B1*03:01L
  REGION 1..10: note = CONT. FROM ABOVE: HLA-DRB1*14:17L
  source 1..10: note = Severe acute respiratory syndrome coronavirus 2
TESKPSVEQR

SEQ ID NO: 14149 - protein, 10 aa, Severe acute respiratory syndrome-related coronavirus
  REGION 1..10: note = Table B: HLA-DRB1*13:02L HLA-DRB1*13:03L HLA-DRB4*03:01NL HLA-DRB1*08:01L HLA-DRB1*12:01L HLA-DQA1*03:01-B1*03:02L HLA-DQA1*05:05-B1*03:01L
  source 1..10: note = Severe acute respiratory syndrome coronavirus 2
ESKPSVEQRK

SEQ ID NO: 14150 - protein, 13 aa, Severe acute respiratory syndrome-related coronavirus
  REGION 1..13: note = Table B: HLA-DRB1*13:02L HLA-DRB1*08:04L HLA-DRB1*11:04L HLA-DRB1*11:01L
  source 1..13: note = Severe acute respiratory syndrome coronavirus 2
VTTTLEETKFLTE

SEQ ID NO: 14151 - protein, 12 aa, Severe acute respiratory syndrome-related coronavirus
  REGION 1..12: note = Table B: HLA-DRB1*13:02L HLA-DRB1*13:03L HLA-DRB1*04:02L HLA-DRB1*04:04L HLA-DRB1*04:05L HLA-DRB4*03:01NL HLA-DRB1*08:77L HLA-DRB3*02:01L HLA-DRB1*11:03L HLA-DRB1*14:02L HLA-DQA1*05:05-B1*03:19L HLA-DRB3*01:01L HLA-DRB1*14:54L
  REGION 1..12: note = CONT. FROM ABOVE: HLA-DRB1*14:17L HLA-DRB1*07:01L HLA-DRB1*10:01 L HLA-DRB1*08:03L
  source 1..12: note = Severe acute respiratory syndrome coronavirus 2
TTLEETKFLTEN

SEQ ID NO: 14152 - protein, 11 aa, Severe acute respiratory syndrome-related coronavirus
  REGION 1..11: note = Table B: HLA-DRB1*13:02L
  source 1..11: note = Severe acute respiratory syndrome coronavirus 2
NLHPDSATLVS

SEQ ID NO: 14153 - protein, 13 aa, Severe acute respiratory syndrome-related coronavirus
  REGION 1..13: note = Table B: HLA-DRB1*13:02L HLA-DRB1*01:03L HLA-DRB1*04:02L HLA-DRB1*04:05L HLA-DRB1*01:02L HLA-DRB4*03:01NL HLA-DRB1*08:04L HLA-DRB1*08:77L HLA-DRB3*02:01L HLA-DPA1*03:01-B1*04:02L HLA-DRB1*03:01L HLA-DRB1*14:02L HLA-DRB1*08:01L HLA-DRB4*01:01L
  REGION 1..13: note = CONT. FROM ABOVE: HLA-DQA1*05:05-B1*03:116L HLA-DPA1*01:03-B1*04 :02L HLA-DRB1*12:01L HLA-DRB3*01:01L HLA-DPA1*02:01-B1*13:01L HL A-DPA1*01:03-B1*104:01L HLA-DPA1*01:02-B1*04:01L HLA-DRB1*04:08L HLA-DRB1*15:03L
  source 1..13: note = Severe acute respiratory syndrome coronavirus 2
LHPDSATLVSDID

SEQ ID NO: 14154 - protein, 14 aa, Severe acute respiratory syndrome-related coronavirus
  REGION 1..14: note = Table B: HLA-DRB1*13:02L HLA-DRB1*04:05L HLA-DRB1*01:02L
  source 1..14: note = Severe acute respiratory syndrome coronavirus 2
IDITFLKKDAPYIV

SEQ ID NO: 14155 - protein, 18 aa, Severe acute respiratory syndrome-related coronavirus
  REGION 1..18: note = Table B: HLA-DRB1*13:02L
  source 1..18: note = Severe acute respiratory syndrome coronavirus 2
IVGDVVQEGVLTAVVIPT

SEQ ID NO: 14156 - protein, 15 aa, Severe acute respiratory syndrome-related coronavirus
  REGION 1..15: note = Table B: HLA-DRB1*13:02L HLA-DRB1*04:05L HLA-DRB1*11:04L HLA-DRB3*01:01L
  source 1..15: note = Severe acute respiratory syndrome coronavirus 2
GTTEMLAKALRKVPT

SEQ ID NO: 14157 - protein, 15 aa, Severe acute respiratory syndrome-related coronavirus
  REGION 1..15: note = Table B: HLA-DRB1*13:02L HLA-DRB1*11:01L HLA-DPA1*03:01-B1*105:01L HLA-DRB1*16:01L HLA-DRB1*15:03L
  source 1..15: note = Severe acute respiratory syndrome coronavirus 2
TEMLAKALRKVPTDN

SEQ ID NO: 14158 - protein, 14 aa, Severe acute respiratory syndrome-related coronavirus
  REGION 1..14: note = Table B: HLA-DRB1*13:02L HLA-DRB1*01:03L HLA-DRB1*04:04L HLA-DRB1*01:02L HLA-DRB1*08:04L HLA-DRB1*08:77L HLA-DRB3*02:01L HLA-DPA1*01:03-B1*03:01L HLA-DPA1*03:01-B1*04:02L HLA-DRB1*14:01L HLA-DRB1*11:03L HLA-DRB1*11:04L HLA-DRB1*14:02L
  REGION 1..14: note = CONT. FROM ABOVE: HLA-DQA1*01:01-B1*05:01L HLA-DRB1*08:01L HLA-D RB1*11:01L HLA-DPA1*01:03-B1*04:01L HLA-DQA1*05:05-B1*03:116L HL A-DRB1*09:01L HLA-DPA1*01:03-B1*04:02L HLA-DRB1*12:02L HLA-DPA1* 02:01-B1*13:01L HLA-DPA1*01:03-B1*104:01L
  REGION 1..14: note = CONT. FROM ABOVE: HLA-DPA1*01:02-B1*04:01L HLA-DRB1*07:01L HLA-D RB1*10:01L HLA-DRB1*08:03L HLA-DRB1*15:03L
  source 1..14: note = Severe acute respiratory syndrome coronavirus 2
VPTDNYITTYPGQG

SEQ ID NO: 14159 - protein, 12 aa, Severe acute respiratory syndrome-related coronavirus
  REGION 1..12: note = Table B: HLA-DRB1*13:02L HLA-DRB1*08:77L HLA-DRB1*14:01L HLA-DPA1*01:03-B1*04:01L HLA-DRB1*09:01L HLA-DRB1*12:02L HLA-DRB1*07:01L
  source 1..12: note = Severe acute respiratory syndrome coronavirus 2
DNYITTYPGQGL

SEQ ID NO: 14160 - protein, 11 aa, Severe acute respiratory syndrome-related coronavirus
  REGION 1..11: note = Table B: HLA-DRB1*13:02L HLA-DRB1*04:04L HLA-DRB1*04:05L HLA-DRB4*03:01NL HLA-DRB1*08:77L HLA-DRB1*11:03L HLA-DRB1*14:02L HLA-DRB1*08:01L HLA-DRB1*09:01L HLA-DRB1*12:02L HLA-DRB1*14:54L HLA-DRB1*07:01L
  source 1..11: note = Severe acute respiratory syndrome coronavirus 2
YITTYPGQGLN

SEQ ID NO: 14161 - protein, 15 aa, Severe acute respiratory syndrome-related coronavirus
  REGION 1..15: note = Table B: HLA-DRB1*13:02L HLA-DRB1*13:03L HLA-DRB1*01:03L HLA-DRB1*04:04L HLA-DRB1*01:02L HLA-DRB4*03:01NL HLA-DPA1*01:03-B1*03:01L HLA-DPA1*03:01-B1*04:02L HLA-DQA1*01:01-B1*05:01L HLA-DRB1*08:01L
  REGION 1..15: note = CONT. FROM ABOVE: HLA-DPA1*01:03-B1*04:02L HLA-DRB1*12:01L HLA-D PA1*02:01-B1*13:01L HLA-DPA1*03:01-B1*105:01L HLA-DRB1*14:54L HL A-DPA1*01:03-B1*104:01L HLA-DPA1*01:02-B1*04:01L HLA-DRB1*04:08L HLA-DRB1*15:03L
  source 1..15: note = Severe acute respiratory syndrome coronavirus 2
YPGQGLNGYTVEEAK

SEQ ID NO: 14162 - protein, 12 aa, Severe acute respiratory syndrome-related coronavirus
  REGION 1..12: note = Table B: HLA-DRB1*13:02L HLA-DRB1*13:03L HLA-DRB1*01:03L HLA-DRB1*01:02L HLA-DRB1*08:77L HLA-DRB3*02:01L HLA-DPA1*01:03-B1*03:01L HLA-DPA1*03:01-B1*04:02L HLA-DRB1*14:01L HLA-DPA1*01:03-B1*04:01L HLA-DRB1*12:02L
  REGION 1..12: note = CONT. FROM ABOVE: HLA-DRB1*14:54L HLA-DQA1*05:05-B1*03:01L HLA-D PA1*01:02-B1*04:01L HLA-DRB1*04:08L
  source 1..12: note = Severe acute respiratory syndrome coronavirus 2
LNGYTVEEAKTV

SEQ ID NO: 14163 - protein, 10 aa, Severe acute respiratory syndrome-related coronavirus
  REGION 1..10: note = Table B: HLA-DRB1*13:02L HLA-DRB1*13:03L HLA-DRB1*01:03L HLA-DRB1*04:02L HLA-DRB1*01:01L HLA-DRB4*03:01NL HLA-DRB1*08:01L HLA-DRB5*01:01L HLA-DRB1*12:01L HLA-DQA1*03:01-B1*03:02L HLA-DQA1*05:05-B1*03:01L HLA-DRB1*14:17L HLA-DRB1*16:01L
  REGION 1..10: note = CONT. FROM ABOVE: HLA-DQA1*02:01-B1*03:03L
  source 1..10: note = Severe acute respiratory syndrome coronavirus 2
TVEEAKTVLK

SEQ ID NO: 14164 - protein, 15 aa, Severe acute respiratory syndrome-related coronavirus
  REGION 1..15: note = Table B: HLA-DRB1*13:02L HLA-DRB1*04:05L HLA-DPA1*01:03-B1*03:01L HLA-DRB1*12:01L HLA-DPA1*02:01-B1*13:01L HLA-DPA1*03:01-B1*105:01L HLA-DRB1*16:01L
  source 1..15: note = Severe acute respiratory syndrome coronavirus 2
TVLKKCKSAFYILPS

SEQ ID NO: 14165 - protein, 12 aa, Severe acute respiratory syndrome-related coronavirus
  REGION 1..12: note = Table B: HLA-DRB1*13:02L HLA-DRB1*13:03L HLA-DRB1*08:04L HLA-DRB1*12:01L HLA-DRB1*12:02L HLA-DRB1*14:54L HLA-DRB1*16:01L
  source 1..12: note = Severe acute respiratory syndrome coronavirus 2
LPSIISNEKQEI

SEQ ID NO: 14166 - protein, 12 aa, Severe acute respiratory syndrome-related coronavirus
  REGION 1..12: note = Table B: HLA-DRB1*13:02L HLA-DRB1*13:03L HLA-DQA1*01:02-B1*06:02L HLA-DRB1*08:04L HLA-DRB1*08:77L HLA-DRB1*14:02L HLA-DRB1*12:02L
  source 1..12: note = Severe acute respiratory syndrome coronavirus 2
PSIISNEKQEIL

SEQ ID NO: 14167 - protein, 11 aa, Severe acute respiratory syndrome-related coronavirus
  REGION 1..11: note = Table B: HLA-DRB1*13:02L HLA-DRB1*13:03L HLA-DRB1*01:03L HLA-DRB1*04:05L HLA-DQA1*01:02-B1*06:02L HLA-DRB1*01:02L HLA-DRB4*03:01NL HLA-DRB1*08:04L HLA-DRB1*08:77L HLA-DPA1*01:03-B1*03:01L HLA-DRB1*03:01L HLA-DRB1*11:03L
  REGION 1..11: note = CONT. FROM ABOVE: HLA-DRB1*11:04L HLA-DRB1*14:02L HLA-DRB1*11:01 L HLA-DQA1*05:05-B1*03:19L HLA-DRB1*04:10L HLA-DRB1*12:02L HLA-D RB3*01:01L HLA-DPA1*03:01-B1*105:01L HLA-DQA1*05:05-B1*03:01L HL A-DRB1*14:17L HLA-DRB1*10:01L HLA-DQA1*01:03-B1*06:01L
  REGION 1..11: note = CONT. FROM ABOVE: HLA-DRB1*04:08L HLA-DRB1*08:03L
  source 1..11: note = Severe acute respiratory syndrome coronavirus 2
IISNEKQEILG

SEQ ID NO: 14168 - protein, 12 aa, Severe acute respiratory syndrome-related coronavirus
  REGION 1..12: note = Table B: HLA-DRB1*13:02L HLA-DRB3*02:01L HLA-DPA1*03:01-B1*04:02L HLA-DRB1*12:01L HLA-DRB1*07:01L HLA-DRB1*16:01L
  source 1..12: note = Severe acute respiratory syndrome coronavirus 2
KQEILGTVSWNL

SEQ ID NO: 14169 - protein, 11 aa, Severe acute respiratory syndrome-related coronavirus
  REGION 1..11: note = Table B: HLA-DRB1*13:02L HLA-DRB1*13:03L HLA-DRB1*01:03L HLA-DRB1*04:02L HLA-DRB1*04:05L HLA-DRB4*03:01NL HLA-DRB1*08:77L HLA-DRB3*02:01L HLA-DPA1*03:01-B1*04:02L HLA-DRB1*14:01L HLA-DRB1*11:03L HLA-DQA1*05:05-B1*03:19L
  REGION 1..11: note = CONT. FROM ABOVE: HLA-DPA1*01:03-B1*04:01L HLA-DRB1*12:02L HLA-D RB1*14:17L HLA-DRB1*07:01L HLA-DRB1*04:08L
  source 1..11: note = Severe acute respiratory syndrome coronavirus 2
EILGTVSWNLR

SEQ ID NO: 14170 - protein, 13 aa, Severe acute respiratory syndrome-related coronavirus
  REGION 1..13: note = Table B: HLA-DRB1*13:02L HLA-DRB1*01:03L HLA-DRB1*01:02L HLA-DRB3*01:01L HLA-DRB1*16:01L HLA-DRB1*15:03L
  source 1..13: note = Severe acute respiratory syndrome coronavirus 2
GTVSWNLREMLAH

SEQ ID NO: 14171 - protein, 10 aa, Severe acute respiratory syndrome-related coronavirus
  REGION 1..10: note = Table B: HLA-DRB1*13:02L HLA-DRB1*13:03L HLA-DRB1*01:01L HLA-DRB4*03:01NL HLA-DRB1*11:04L HLA-DRB1*08:01L HLA-DRB5*01:01L HLA-DRB1*12:01L HLA-DQA1*03:01-B1*03:02M HLA-DQA1*05:05-B1*03:01L HLA-DRB1*14:17L
  REGION 1..10: note = CONT. FROM ABOVE: HLA-DQA1*01:03-B1*06:01L HLA-DQA1*02:01-B1*03: 03L
  source 1..10: note = Severe acute respiratory syndrome coronavirus 2
EMLAHAEETR

SEQ ID NO: 14172 - protein, 13 aa, Severe acute respiratory syndrome-related coronavirus
  REGION 1..13: note = Table B: HLA-DRB1*13:02L HLA-DRB1*04:04L HLA-DRB1*07:01L
  source 1..13: note = Severe acute respiratory syndrome coronavirus 2
ETRKLMPVCVETK

SEQ ID NO: 14173 - protein, 11 aa, Severe acute respiratory syndrome-related coronavirus
  REGION 1..11: note = Table B: HLA-DRB1*13:02M HLA-DRB1*01:01L HLA-DRB4*03:01NL HLA-DRB1*14:01L HLA-DRB1*11:04L HLA-DRB5*01:01L HLA-DRB1*12:01M HLA-DRB1*12:02L HLA-DQA1*05:05-B1*03:01M HLA-DRB1*15:01L
  source 1..11: note = Severe acute respiratory syndrome coronavirus 2
ETKAIVSTIQR

SEQ ID NO: 14174 - protein, 14 aa, Severe acute respiratory syndrome-related coronavirus
  REGION 1..14: note = Table B: HLA-DRB1*13:02L HLA-DRB1*01:03L HLA-DRB1*08:01L HLA-DRB3*01:01L HLA-DRB1*04:08L
  source 1..14: note = Severe acute respiratory syndrome coronavirus 2
VSTIQRKYKGIKIQ

SEQ ID NO: 14175 - protein, 14 aa, Severe acute respiratory syndrome-related coronavirus
  REGION 1..14: note = Table B: HLA-DRB1*13:02L HLA-DRB3*01:01L HLA-DRB1*07:01L
  source 1..14: note = Severe acute respiratory syndrome coronavirus 2
TIQRKYKGIKIQEG

SEQ ID NO: 14176 - protein, 12 aa, Severe acute respiratory syndrome-related coronavirus
  REGION 1..12: note = Table B: HLA-DRB1*13:02L HLA-DRB1*13:03L HLA-DRB1*04:04L HLA-DRB1*08:04L HLA-DPA1*01:03-B1*03:01L HLA-DRB1*11:04L HLA-DRB1*08:01L HLA-DPA1*01:03-B1*04:02L HLA-DRB1*12:02L HLA-DPA1*02:01-B1*13:01L HLA-DPA1*01:03-B1*104:01L
  REGION 1..12: note = CONT. FROM ABOVE: HLA-DPA1*01:02-B1*04:01L HLA-DRB1*10:01L HLA-D RB1*08:03L
  source 1..12: note = Severe acute respiratory syndrome coronavirus 2
YKGIKIQEGVVD

SEQ ID NO: 14177 - protein, 12 aa, Severe acute respiratory syndrome-related coronavirus
  REGION 1..12: note = Table B: HLA-DRB1*13:02L HLA-DRB1*04:04L HLA-DRB3*02:01L HLA-DPA1*03:01-B1*04:02L HLA-DPA1*02:01-B1*13:01L HLA-DRB1*10:01L
  source 1..12: note = Severe acute respiratory syndrome coronavirus 2
GIKIQEGVVDYG

SEQ ID NO: 14178 - protein, 13 aa, Severe acute respiratory syndrome-related coronavirus
  REGION 1..13: note = Table B: HLA-DRB1*13:02L HLA-DRB1*04:04L HLA-DRB1*01:01L HLA-DRB1*11:03L HLA-DRB1*11:04L HLA-DRB1*14:02L HLA-DRB1*11:01L HLA-DRB3*01:01L HLA-DRB1*07:01L HLA-DRB1*15:01L
  source 1..13: note = Severe acute respiratory syndrome coronavirus 2
ARFYFYTSKTTVA

SEQ ID NO: 14179 - protein, 12 aa, Severe acute respiratory syndrome-related coronavirus
  REGION 1..12: note = Table B: HLA-DRB1*13:02L HLA-DRB1*04:04L HLA-DRB1*01:01L HLA-DRB1*08:04L HLA-DRB1*08:77L HLA-DPA1*01:03-B1*03:01L HLA-DRB1*11:03L HLA-DRB1*11:04L HLA-DRB1*14:02L HLA-DQA1*01:01-B1*05:01L HLA-DRB1*11:01L
  REGION 1..12: note = CONT. FROM ABOVE: HLA-DPA1*01:03-B1*04:01L HLA-DRB1*09:01L HLA-D PA1*01:03-B1*04:02L HLA-DRB1*12:02L HLA-DRB3*01:01L HLA-DRB1*07: 01L HLA-DRB1*10:01L HLA-DRB1*08:03L HLA-DRB1*15:01L
  source 1..12: note = Severe acute respiratory syndrome coronavirus 2
FYFYTSKTTVAS

SEQ ID NO: 14180 - protein, 14 aa, Severe acute respiratory syndrome-related coronavirus
  REGION 1..14: note = Table B: HLA-DRB1*13:02L HLA-DRB1*01:03L HLA-DPA1*02:01-B1*13:01L HLA-DPA1*01:03-B1*104:01L
  source 1..14: note = Severe acute respiratory syndrome coronavirus 2
SKTTVASLINTLND

SEQ ID NO: 14181 - protein, 15 aa, Severe acute respiratory syndrome-related coronavirus
  REGION 1..15: note = Table B: HLA-DRB1*13:02L HLA-DRB1*11:04L HLA-DRB1*08:01L
  source 1..15: note = Severe acute respiratory syndrome coronavirus 2
NETLVTMPLGYVTHG

SEQ ID NO: 14182 - protein, 14 aa, Severe acute respiratory syndrome-related coronavirus
  REGION 1..14: note = Table B: HLA-DRB1*13:02L HLA-DPA1*01:03-B1*04:02L HLA-DPA1*01:03-B1*104:01L
  source 1..14: note = Severe acute respiratory syndrome coronavirus 2
LVTMPLGYVTHGLN

SEQ ID NO: 14183 - protein, 15 aa, Severe acute respiratory syndrome-related coronavirus
  REGION 1..15: note = Table B: HLA-DRB1*13:02L HLA-DQA1*05:05-B1*03:19L HLA-DRB1*04:10L HLA-DQA1*05:05-B1*03:01L
  source 1..15: note = Severe acute respiratory syndrome coronavirus 2
MPLGYVTHGLNLEEA

SEQ ID NO: 14184 - protein, 11 aa, Severe acute respiratory syndrome-related coronavirus
  REGION 1..11: note = Table B: HLA-DRB1*13:02L HLA-DRB1*04:05L HLA-DQA1*01:02-B1*06:02L HLA-DRB1*11:04L HLA-DRB1*11:01L HLA-DRB1*15:03L
  source 1..11: note = Severe acute respiratory syndrome coronavirus 2
RYMRSLKVPAT

SEQ ID NO: 14185 - protein, 14 aa, Severe acute respiratory syndrome-related coronavirus
  REGION 1..14: note = Table B: HLA-DRB1*13:02L HLA-DRB1*01:03L HLA-DRB1*04:05L HLA-DRB4*03:01NL HLA-DPA1*01:03-B1*03:01L HLA-DQA1*05:01-B1*02:01L HLA-DRB1*04:10L HLA-DRB1*12:01L HLA-DPA1*01:03-B1*104:01L HLA-DRB1*04:08L
  source 1..14: note = Severe acute respiratory syndrome coronavirus 2
SLKVPATVSVSSPD

SEQ ID NO: 14186 - protein, 14 aa, Severe acute respiratory syndrome-related coronavirus
  REGION 1..14: note = Table B: HLA-DRB1*13:02L HLA-DRB1*13:03L HLA-DRB1*01:03L HLA-DRB1*04:02L HLA-DRB1*04:05L HLA-DQA1*01:02-B1*06:02L HLA-DRB1*01:02L HLA-DRB4*03:01NL HLA-DRB1*08:77L HLA-DPA1*01:03-B1*03:01L HLA-DRB1*04:10L HLA-DRB1*12:01L
  REGION 1..14: note = CONT. FROM ABOVE: HLA-DRB1*12:02L HLA-DPA1*02:01-B1*13:01L HLA-D PA1*03:01-B1*105:01L HLA-DRB1*14:54L HLA-DRB1*14:17L HLA-DRB1*07 :01L HLA-DRB1*16:01L HLA-DQA1*01:03-B1*06:01L HLA-DRB1*04:08L HL A-DRB1*15:03L
  source 1..14: note = Severe acute respiratory syndrome coronavirus 2
VPATVSVSSPDAVT

SEQ ID NO: 14187 - protein, 11 aa, Severe acute respiratory syndrome-related coronavirus
  REGION 1..11: note = Table B: HLA-DRB1*13:02L HLA-DRB5*01:01L
  source 1..11: note = Severe acute respiratory syndrome coronavirus 2
SVSSPDAVTAY

SEQ ID NO: 14188 - protein, 15 aa, Severe acute respiratory syndrome-related coronavirus
  REGION 1..15: note = Table B: HLA-DRB1*13:02L HLA-DRB1*11:02L HLA-DRB1*11:03L HLA-DRB1*11:04L HLA-DRB1*08:01L HLA-DRB1*08:03L
  source 1..15: note = Severe acute respiratory syndrome coronavirus 2
SPDAVTAYNGYLTSS

SEQ ID NO: 14189 - protein, 10 aa, Severe acute respiratory syndrome-related coronavirus
  REGION 1..10: note = Table B: HLA-DRB1*13:02L HLA-DRB1*13:03L HLA-DQA1*01:02-B1*06:02L HLA-DRB1*01:01L HLA-DRB4*03:01NL HLA-DRB3*02:01L HLA-DRB1*14:01L HLA-DRB1*11:04L HLA-DRB1*08:01L HLA-DRB5*01:01L HLA-DPA1*01:03-B1*04:02L HLA-DRB1*12:01L
  REGION 1..10: note = CONT. FROM ABOVE: HLA-DRB1*12:02L HLA-DPA1*03:01-B1*105:01L HLA- DQA1*03:01-B1*03:02L HLA-DQA1*05:05-B1*03:01M HLA-DRB1*14:17L HL A-DQA1*01:03-B1*06:01L HLA-DQA1*02:01-B1*03:03L HLA-DRB1*15:01L
  source 1..10: note = Severe acute respiratory syndrome coronavirus 2
ETISLAGSYK

SEQ ID NO: 14190 - protein, 14 aa, Severe acute respiratory syndrome-related coronavirus
  REGION 1..14: note = Table B: HLA-DRB1*13:02L HLA-DRB1*01:03L HLA-DRB1*08:04L HLA-DRB1*14:02L HLA-DRB1*08:01L HLA-DPA1*01:03-B1*04:02L
  source 1..14: note = Severe acute respiratory syndrome coronavirus 2
TISLAGSYKDWSYS

SEQ ID NO: 14191 - protein, 16 aa, Severe acute respiratory syndrome-related coronavirus
  REGION 1..16: note = Table B: HLA-DRB1*13:02L HLA-DRB1*14:02L
  source 1..16: note = Severe acute respiratory syndrome coronavirus 2
ISLAGSYKDWSYSGQS

SEQ ID NO: 14192 - protein, 14 aa, Severe acute respiratory syndrome-related coronavirus
  REGION 1..14: note = Table B: HLA-DRB1*13:02L HLA-DRB1*01:03L HLA-DRB1*04:04L HLA-DRB1*01:02L HLA-DRB1*08:04L HLA-DPA1*03:01-B1*04:02L HLA-DRB1*14:02L HLA-DQA1*01:01-B1*05:01L HLA-DPA1*01:03-B1*04:01L HLA-DPA1*01:03-B1*04:02L
  REGION 1..14: note = CONT. FROM ABOVE: HLA-DRB1*12:01L HLA-DPA1*01:03-B1*02:01L HLA-D PA1*01:03-B1*104:01L HLA-DPA1*01:02-B1*04:01L HLA-DRB1*07:01L HL A-DRB1*10:01L HLA-DRB1*15:03L
  source 1..14: note = Severe acute respiratory syndrome coronavirus 2
GSYKDWSYSGQSTQ

SEQ ID NO: 14193 - protein, 14 aa, Severe acute respiratory syndrome-related coronavirus
  REGION 1..14: note = Table B: HLA-DRB1*13:02L HLA-DRB1*04:05L HLA-DRB1*08:04L HLA-DRB1*12:01L HLA-DRB3*01:01L HLA-DPA1*02:01-B1*13:01L HLA-DRB1*15:03L
  source 1..14: note = Severe acute respiratory syndrome coronavirus 2
TQLGIEFLKRGDKS

SEQ ID NO: 14194 - protein, 17 aa, Severe acute respiratory syndrome-related coronavirus
  REGION 1..17: note = Table B: HLA-DRB1*13:02L HLA-DRB1*04:05L HLA-DRB1*12:01L HLA-DPA1*02:01-B1*13:01L
  source 1..17: note = Severe acute respiratory syndrome coronavirus 2
IEFLKRGDKSVYYTSNP

SEQ ID NO: 14195 - protein, 12 aa, Severe acute respiratory syndrome-related coronavirus
  REGION 1..12: note = Table B: HLA-DRB1*13:02L HLA-DRB1*04:02L HLA-DRB3*02:01L HLA-DRB1*12:02L HLA-DQA1*03:01-B1*03:02L HLA-DRB1*14:54L
  source 1..12: note = Severe acute respiratory syndrome coronavirus 2
KSVYYTSNPTTF

SEQ ID NO: 14196 - protein, 12 aa, Severe acute respiratory syndrome-related coronavirus
  REGION 1..12: note = Table B: HLA-DRB1*13:02L HLA-DQA1*01-B1*05L HLA-DQA1*05:05-B1*03:01L HLA-DRB1*14:17L
  source 1..12: note = Severe acute respiratory syndrome coronavirus 2
FHLDGEVITFDN

SEQ ID NO: 14197 - protein, 11 aa, Severe acute respiratory syndrome-related coronavirus
  REGION 1..11: note = Table B: HLA-DRB1*13:02L HLA-DRB1*13:03L HLA-DRB1*01:03L HLA-DRB1*04:05L HLA-DQA1*01:02-B1*06:02L HLA-DRB1*01:02L HLA-DRB4*03:01NL HLA-DRB1*08:77L HLA-DRB3*02:01L HLA-DPA1*01:03-B1*03:01L HLA-DRB1*14:02L HLA-DRB1*08:01L
  REGION 1..11: note = CONT. FROM ABOVE: HLA-DQA1*05:05-B1*03:19L HLA-DRB4*01:01L HLA-D PA1*01:03-B1*04:01L HLA-DQA1*05:05-B1*03:116L HLA-DRB1*09:01L HL A-DPA1*01:03-B1*04:02L HLA-DPA1*02:01-B1*13:01L HLA-DPA1*01:03-B 1*104:01L HLA-DQA1*05:05-B1*03:01L HLA-DRB1*07:01L
  REGION 1..11: note = CONT. FROM ABOVE: HLA-DRB1*10:01L HLA-DRB1*04:08L HLA-DRB1*08:03 L
  source 1..11: note = Severe acute respiratory syndrome coronavirus 2
EVITFDNLKTL

SEQ ID NO: 14198 - protein, 12 aa, Severe acute respiratory syndrome-related coronavirus
  REGION 1..12: note = Table B: HLA-DRB1*13:02L HLA-DRB1*01:03L HLA-DRB1*04:04L HLA-DRB1*04:05L HLA-DRB1*01:02L HLA-DRB1*08:04L HLA-DPA1*01:03-B1*03:01L HLA-DRB1*04:10L HLA-DRB1*14:54L HLA-DRB1*04:08L
  source 1..12: note = Severe acute respiratory syndrome coronavirus 2
VITFDNLKTLLS

SEQ ID NO: 14199 - protein, 15 aa, Severe acute respiratory syndrome-related coronavirus
  REGION 1..15: note = Table B: HLA-DRB1*13:02L
  source 1..15: note = Severe acute respiratory syndrome coronavirus 2
FDNLKTLLSLREVRT

SEQ ID NO: 14200 - protein, 13 aa, Severe acute respiratory syndrome-related coronavirus
  REGION 1..13: note = Table B: HLA-DRB1*13:02L HLA-DRB1*13:03L HLA-DRB1*08:04L HLA-DRB3*02:01L HLA-DPA1*03:01-B1*04:02L HLA-DPA1*01:03-B1*04:02L HLA-DRB1*12:02L HLA-DPA1*02:01-B1*13:01L HLA-DPA1*01:03-B1*104:01L
  REGION 1..13: note = CONT. FROM ABOVE: HLA-DPA1*01:02-B1*04:01L HLA-DRB1*10:01L HLA-D RB1*08:03L
  source 1..13: note = Severe acute respiratory syndrome coronavirus 2
EVRTIKVFTTVDN

SEQ ID NO: 14201 - protein, 13 aa, Severe acute respiratory syndrome-related coronavirus
  REGION 1..13: note = Table B: HLA-DRB1*13:02L HLA-DRB1*04:04L HLA-DRB1*08:04L HLA-DRB1*08:01L HLA-DRB1*10:01L HLA-DRB1*08:03L
  source 1..13: note = Severe acute respiratory syndrome coronavirus 2
RTIKVFTTVDNIN

SEQ ID NO: 14202 - protein, 12 aa, Severe acute respiratory syndrome-related coronavirus
  REGION 1..12: note = Table B: HLA-DRB1*13:02L HLA-DRB1*13:03L HLA-DRB1*01:03L HLA-DRB1*04:05L HLA-DRB4*03:01NL HLA-DPA1*01:03-B1*03:01L HLA-DRB1*14:01L HLA-DRB1*11:03L HLA-DPA1*01:03-B1*04:01L HLA-DRB1*04:10L HLA-DRB1*12:02L HLA-DPA1*02:01-B1*13:01L
  REGION 1..12: note = CONT. FROM ABOVE: HLA-DRB1*14:54L HLA-DPA1*01:02-B1*04:01L HLA-D RB1*07:01L HLA-DRB1*04:08L
  source 1..12: note = Severe acute respiratory syndrome coronavirus 2
IKVFTTVDNINL

SEQ ID NO: 14203 - protein, 12 aa, Severe acute respiratory syndrome-related coronavirus
  REGION 1..12: note = Table B: HLA-DRB1*13:02L HLA-DRB1*01:02L HLA-DRB1*08:04L HLA-DPA1*01:03-B1*03:01L HLA-DRB1*08:01L HLA-DRB1*04:10L HLA-DRB1*12:02L HLA-DPA1*02:01-B1*13:01L HLA-DRB1*04:08L HLA-DRB1*15:03L
  source 1..12: note = Severe acute respiratory syndrome coronavirus 2
VDNINLHTQVVD

SEQ ID NO: 14204 - protein, 13 aa, Severe acute respiratory syndrome-related coronavirus
  REGION 1..13: note = Table B: HLA-DRB1*13:02L HLA-DRB1*08:77L HLA-DRB3*02:01L HLA-DRB1*12:02L HLA-DRB1*16:01L HLA-DQA1*02:01-B1*03:03L
  source 1..13: note = Severe acute respiratory syndrome coronavirus 2
VVDMSMTYGQQFG

SEQ ID NO: 14205 - protein, 11 aa, Severe acute respiratory syndrome-related coronavirus
  REGION 1..11: note = Table B: HLA-DRB1*13:02L HLA-DRB1*11:02L HLA-DQA1*05:05-B1*03:01L
  source 1..11: note = Severe acute respiratory syndrome coronavirus 2
MTYGQQFGPTY

SEQ ID NO: 14206 - protein, 10 aa, Severe acute respiratory syndrome-related coronavirus
  REGION 1..10: note = Table B: HLA-DRB1*13:02L HLA-DRB1*13:03L HLA-DRB4*03:01NL HLA-DRB1*08:01L HLA-DRB1*12:01L HLA-DQA1*03:01-B1*03:02L HLA-DQA1*05:05-B1*03:01L
  source 1..10: note = Severe acute respiratory syndrome coronavirus 2
TYLDGADVTK

SEQ ID NO: 14207 - protein, 14 aa, Severe acute respiratory syndrome-related coronavirus
  REGION 1..14: note = Table B: HLA-DRB1*13:02L
  source 1..14: note = Severe acute respiratory syndrome coronavirus 2
DVTKIKPHNSHEGK

SEQ ID NO: 14208 - protein, 18 aa, Severe acute respiratory syndrome-related coronavirus
  REGION 1..18: note = Table B: HLA-DRB1*13:02L HLA-DQA1*05:05-B1*03:19L HLA-DPA1*01:03-B1*04:02L HLA-DRB1*12:01L HLA-DPA1*01:03-B1*104:01L HLA-DPA1*01:02-B1*04:01L HLA-DRB1*15:03L
  source 1..18: note = Severe acute respiratory syndrome coronavirus 2
KPHNSHEGKTFYVLPNDD

SEQ ID NO: 14209 - protein, 13 aa, Severe acute respiratory syndrome-related coronavirus
  REGION 1..13: note = Table B: HLA-DRB1*13:02L HLA-DRB1*08:04L HLA-DPA1*03:01-B1*04:02L HLA-DQA1*05:05-B1*03:19L HLA-DPA1*01:02-B1*04:01L
  source 1..13: note = Severe acute respiratory syndrome coronavirus 2
EGKTFYVLPNDDT

SEQ ID NO: 14210 - protein, 13 aa, Severe acute respiratory syndrome-related coronavirus
  REGION 1..13: note = Table B: HLA-DRB1*13:02L HLA-DRB1*08:04L HLA-DRB1*08:77L HLA-DRB3*02:01L HLA-DRB1*14:01L HLA-DRB1*11:03L HLA-DPA1*01:03-B1*04:01L HLA-DPA1*01:03-B1*104:01L
  source 1..13: note = Severe acute respiratory syndrome coronavirus 2
GKTFYVLPNDDTL

SEQ ID NO: 14211 - protein, 14 aa, Severe acute respiratory syndrome-related coronavirus
  REGION 1..14: note = Table B: HLA-DRB1*13:02L HLA-DRB1*08:04L
  source 1..14: note = Severe acute respiratory syndrome coronavirus 2
DTLRVEAFEYYHTT

SEQ ID NO: 14212 - protein, 14 aa, Severe acute respiratory syndrome-related coronavirus
  REGION 1..14: note = Table B: HLA-DRB1*13:02L HLA-DRB1*04:04L HLA-DRB3*01:01L HLA-DPA1*01:03-B1*02:01L
  source 1..14: note = Severe acute respiratory syndrome coronavirus 2
RVEAFEYYHTTDPS

SEQ ID NO: 14213 - protein, 10 aa, Severe acute respiratory syndrome-related coronavirus
  REGION 1..10: note = Table B: HLA-DRB1*13:02L HLA-DRB1*13:03L HLA-DRB1*08:01L HLA-DRB1*12:01L HLA-DQA1*03:01-B1*03:02L HLA-DRB1*16:01L
  source 1..10: note = Severe acute respiratory syndrome coronavirus 2
RYMSALNHTK

SEQ ID NO: 14214 - protein, 13 aa, Severe acute respiratory syndrome-related coronavirus
  REGION 1..13: note = Table B: HLA-DRB1*13:02L HLA-DRB1*01:03L HLA-DQA1*01:02-B1*06:02L HLA-DRB1*08:04L HLA-DRB1*03:01L HLA-DRB1*11:03L HLA-DRB1*11:04L HLA-DRB1*08:01L HLA-DRB1*11:01L HLA-DRB1*13:01L HLA-DRB1*14:54L HLA-DRB1*04:08L HLA-DRB1*15:03L
  source 1..13: note = Severe acute respiratory syndrome coronavirus 2
SALNHTKKWKYPQ

SEQ ID NO: 14215 - protein, 12 aa, Severe acute respiratory syndrome-related coronavirus
  REGION 1..12: note = Table B: HLA-DRB1*13:02L HLA-DRB1*04:04L HLA-DRB1*04:05L HLA-DRB1*01:02L HLA-DPA1*01:03-B1*03:01L HLA-DRB1*12:01L HLA-DPA1*02:01-B1*13:01L HLA-DPA1*01:02-B1*04:01L HLA-DRB1*16:01L HLA-DRB1*04:08L
  source 1..12: note = Severe acute respiratory syndrome coronavirus 2
NHTKKWKYPQVN

SEQ ID NO: 14216 - protein, 12 aa, Severe acute respiratory syndrome-related coronavirus
  REGION 1..12: note = Table B: HLA-DRB1*13:02L HLA-DRB1*04:04L HLA-DRB1*04:05L HLA-DRB1*01:02L HLA-DRB1*12:01L HLA-DPA1*02:01-B1*13:01L HLA-DPA1*01:02-B1*04:01L HLA-DRB1*07:01L
  source 1..12: note = Severe acute respiratory syndrome coronavirus 2
HTKKWKYPQVNG

SEQ ID NO: 14217 - protein, 12 aa, Severe acute respiratory syndrome-related coronavirus
  REGION 1..12: note = Table B: HLA-DRB1*13:02L HLA-DRB1*04:05L HLA-DRB1*01:02L HLA-DRB3*02:01L HLA-DPA1*01:03-B1*03:01L HLA-DPA1*03:01-B1*04:02L HLA-DRB1*14:01L HLA-DRB1*11:03L HLA-DRB1*09:01L HLA-DRB1*12:02L HLA-DRB1*14:54L HLA-DRB1*07:01L
  REGION 1..12: note = CONT. FROM ABOVE: HLA-DRB1*16:01L
  source 1..12: note = Severe acute respiratory syndrome coronavirus 2
YPQVNGLTSIKW

SEQ ID NO: 14218 - protein, 12 aa, Severe acute respiratory syndrome-related coronavirus
  REGION 1..12: note = Table B: HLA-DRB1*13:02L HLA-DRB1*04:02L HLA-DRB1*04:05L HLA-DRB3*02:01L HLA-DRB1*14:01L HLA-DRB1*12:02L HLA-DQA1*05:05-B1*03:01L HLA-DRB1*14:17L HLA-DRB1*04:08L
  source 1..12: note = Severe acute respiratory syndrome coronavirus 2
TALLTLQQIELK

SEQ ID NO: 14219 - protein, 12 aa, Severe acute respiratory syndrome-related coronavirus
  REGION 1..12: note = Table B: HLA-DRB1*13:02L HLA-DRB1*01:03L HLA-DRB1*04:04L HLA-DRB1*04:05L HLA-DQA1*01:02-B1*06:02L HLA-DRB1*01:02L HLA-DRB4*03:01NL HLA-DRB1*08:04L HLA-DRB1*08:77L HLA-DRB3*02:01L HLA-DPA1*01:03-B1*03:01L HLA-DRB1*11:03L HLA-DRB1*11:04L
  REGION 1..12: note = CONT. FROM ABOVE: HLA-DRB1*14:02L HLA-DRB1*08:01L HLA-DQA1*01-B1 *05L HLA-DQA1*05:01-B1*02:01L HLA-DRB1*04:10L HLA-DRB1*12:01L HL A-DRB1*12:02L HLA-DRB3*01:01L HLA-DPA1*02:01-B1*13:01L HLA-DPA1* 03:01-B1*105:01L HLA-DRB1*14:54L HLA-DQA1*05:05-B1*03:01L
  REGION 1..12: note = CONT. FROM ABOVE: HLA-DRB1*04:08L HLA-DRB1*15:03L
  source 1..12: note = Severe acute respiratory syndrome coronavirus 2
IELKFNPPALQD

SEQ ID NO: 14220 - protein, 12 aa, Severe acute respiratory syndrome-related coronavirus
  REGION 1..12: note = Table B: HLA-DRB1*13:02L HLA-DRB1*14:01L HLA-DRB1*12:01L HLA-DRB1*15:03L
  source 1..12: note = Severe acute respiratory syndrome coronavirus 2
ELKFNPPALQDA

SEQ ID NO: 14221 - protein, 14 aa, Severe acute respiratory syndrome-related coronavirus
  REGION 1..14: note = Table B: HLA-DRB1*13:02L HLA-DRB1*08:04L HLA-DQA1*05:05-B1*03:19L HLA-DRB1*04:08L
  source 1..14: note = Severe acute respiratory syndrome coronavirus 2
ALILAYCNKTVGEL

SEQ ID NO: 14222 - protein, 10 aa, Severe acute respiratory syndrome-related coronavirus
  REGION 1..10: note = Table B: HLA-DRB1*13:02L HLA-DRB1*13:03L HLA-DRB1*04:02L HLA-DRB1*01:01L HLA-DRB4*03:01NL HLA-DRB1*11:04L HLA-DRB1*08:01L HLA-DRB5*01:01L HLA-DRB1*12:01L HLA-DQA1*03:01-B1*03:02M HLA-DQA1*05:05-B1*03:01L HLA-DRB1*14:17L HLA-DRB1*16:01L
  REGION 1..10: note = CONT. FROM ABOVE: HLA-DQA1*01:03-B1*06:01L HLA-DQA1*02:01-B1*03: 03L
  source 1..10: note = Severe acute respiratory syndrome coronavirus 2
KTVGELGDVR

SEQ ID NO: 14223 - protein, 13 aa, Severe acute respiratory syndrome-related coronavirus
  REGION 1..13: note = Table B: HLA-DRB1*13:02L HLA-DPA1*01:03-B1*03:01L HLA-DRB1*14:01L HLA-DRB1*11:04L HLA-DQA1*01:01-B1*05:01L HLA-DRB1*11:01L HLA-DPA1*01:03-B1*04:02L HLA-DRB1*12:02L HLA-DRB3*01:01L
  source 1..13: note = Severe acute respiratory syndrome coronavirus 2
TMSYLFQHANLDS

SEQ ID NO: 14224 - protein, 14 aa, Severe acute respiratory syndrome-related coronavirus
  REGION 1..14: note = Table B: HLA-DRB1*13:02L HLA-DQA1*01:03-B1*06:01L
  source 1..14: note = Severe acute respiratory syndrome coronavirus 2
GVEAVMYMGTLSYE

SEQ ID NO: 14225 - protein, 14 aa, Severe acute respiratory syndrome-related coronavirus
  REGION 1..14: note = Table B: HLA-DRB1*13:02L HLA-DRB1*04:04L HLA-DRB3*02:01L HLA-DRB1*08:01L HLA-DRB1*09:01L HLA-DRB1*07:01L HLA-DRB1*08:03L
  source 1..14: note = Severe acute respiratory syndrome coronavirus 2
AVMYMGTLSYEQFK

SEQ ID NO: 14226 - protein, 13 aa, Severe acute respiratory syndrome-related coronavirus
  REGION 1..13: note = Table B: HLA-DRB1*13:02L HLA-DRB1*14:02L HLA-DPA1*02:01-B1*13:01L HLA-DRB1*08:02L HLA-DRB1*08:03L HLA-DRB1*15:03L
  source 1..13: note = Severe acute respiratory syndrome coronavirus 2
LSYEQFKKGVQIP

SEQ ID NO: 14227 - protein, 12 aa, Severe acute respiratory syndrome-related coronavirus
  REGION 1..12: note = Table B: HLA-DRB1*13:02L HLA-DRB1*13:03L HLA-DRB4*03:01NL HLA-DRB1*08:04L HLA-DRB3*02:01L HLA-DPA1*01:03-B1*03:01L HLA-DRB1*14:01L HLA-DRB1*14:02L HLA-DRB1*08:01L HLA-DRB1*04:10L HLA-DRB1*09:01L HLA-DRB1*12:02L HLA-DRB1*14:54L
  REGION 1..12: note = CONT. FROM ABOVE: HLA-DPA1*01:03-B1*104:01L HLA-DRB1*14:17L HLA- DRB1*07:01L HLA-DRB1*04:08L HLA-DRB1*08:03L
  source 1..12: note = Severe acute respiratory syndrome coronavirus 2
ATKYLVQQESPF

SEQ ID NO: 14228 - protein, 12 aa, Severe acute respiratory syndrome-related coronavirus
  REGION 1..12: note = Table B: HLA-DRB1*13:02L HLA-DRB1*13:03L HLA-DRB4*03:01NL HLA-DRB1*08:04L HLA-DRB3*02:01L HLA-DPA1*01:03-B1*03:01L HLA-DRB1*08:01L HLA-DRB1*04:10L HLA-DRB1*12:02L HLA-DRB1*14:54L HLA-DRB1*14:17L HLA-DRB1*07:01L HLA-DRB1*04:08L
  source 1..12: note = Severe acute respiratory syndrome coronavirus 2
TKYLVQQESPFV

SEQ ID NO: 14229 - protein, 11 aa, Severe acute respiratory syndrome-related coronavirus
  REGION 1..11: note = Table B: HLA-DRB1*13:02L HLA-DRB1*04:02L HLA-DRB1*04:05L HLA-DRB3*02:01L HLA-DPA1*01:03-B1*03:01L HLA-DQA1*05:05-B1*03:01L HLA-DRB1*14:17L
  source 1..11: note = Severe acute respiratory syndrome coronavirus 2
YLVQQESPFVM

SEQ ID NO: 14230 - protein, 14 aa, Severe acute respiratory syndrome-related coronavirus
  REGION 1..14: note = Table B: HLA-DRB1*13:02L HLA-DRB1*04:05L HLA-DRB1*11:04L HLA-DRB3*01:01L HLA-DQA1*02:01-B1*03:03L
  source 1..14: note = Severe acute respiratory syndrome coronavirus 2
GNYQCGHYKHITSK

SEQ ID NO: 14231 - protein, 10 aa, Severe acute respiratory syndrome-related coronavirus
  REGION 1..10: note = Table B: HLA-DRB1*13:02L HLA-DRB1*13:03L HLA-DRB1*01:03L HLA-DRB4*03:01NL HLA-DRB1*14:01L HLA-DRB1*12:01L HLA-DPA1*03:01-B1*105:01L HLA-DQA1*03:01-B1*03:02L HLA-DQA1*05:05-B1*03:01L HLA-DRB1*16:01L
  REGION 1..10: note = CONT. FROM ABOVE: HLA-DQA1*02:01-B1*03:03L
  source 1..10: note = Severe acute respiratory syndrome coronavirus 2
YCIDGALLTK

SEQ ID NO: 14232 - protein, 15 aa, Severe acute respiratory syndrome-related coronavirus
  REGION 1..15: note = Table B: HLA-DRB1*13:02L HLA-DRB1*13:03L HLA-DRB1*08:04L HLA-DPA1*02:01-B1*13:01L HLA-DRB1*14:17L
  source 1..15: note = Severe acute respiratory syndrome coronavirus 2
IDGALLTKSSEYKGP

SEQ ID NO: 14233 - protein, 16 aa, Severe acute respiratory syndrome-related coronavirus
  REGION 1..16: note = Table B: HLA-DRB1*13:02L HLA-DPA1*01:03-B1*03:01L HLA-DRB3*01:01L
  source 1..16: note = Severe acute respiratory syndrome coronavirus 2
DGALLTKSSEYKGPIT

SEQ ID NO: 14234 - protein, 15 aa, Severe acute respiratory syndrome-related coronavirus
  REGION 1..15: note = Table B: HLA-DRB1*13:02L HLA-DRB1*13:03L HLA-DRB1*14:01L HLA-DRB1*04:10L HLA-DRB1*08:03L
  source 1..15: note = Severe acute respiratory syndrome coronavirus 2
GPITDVFYKENSYTT

SEQ ID NO: 14235 - protein, 17 aa, Severe acute respiratory syndrome-related coronavirus
  REGION 1..17: note = Table B: HLA-DRB1*13:02L HLA-DRB1*04:05L HLA-DQA1*05:05-B1*03:19L HLA-DPA1*01:03-B1*04:02L HLA-DRB1*16:01L HLA-DRB1*15:03L
  source 1..17: note = Severe acute respiratory syndrome coronavirus 2
PVTYKLDGVVCTEIDPK

SEQ ID NO: 14236 - protein, 13 aa, Severe acute respiratory syndrome-related coronavirus
  REGION 1..13: note = Table B: HLA-DRB1*13:02L HLA-DRB1*13:03L HLA-DRB1*01:03L HLA-DRB1*04:05L HLA-DQA1*01:02-B1*06:02L HLA-DRB1*01:02L HLA-DRB1*14:01L HLA-DQA1*01:01-B1*05:01L HLA-DRB1*12:01L HLA-DPA1*02:01-B1*13:01L HLA-DPA1*01:02-B1*04:01L
  REGION 1..13: note = CONT. FROM ABOVE: HLA-DRB1*16:01L HLA-DQA1*01:03-B1*06:01L HLA-D RB1*04:08L HLA-DQA1*02:01-B1*03:03L HLA-DRB1*15:03L
  source 1..13: note = Severe acute respiratory syndrome coronavirus 2
IDPKLDNYYKKDN

SEQ ID NO: 14237 - protein, 13 aa, Severe acute respiratory syndrome-related coronavirus
  REGION 1..13: note = Table B: HLA-DRB1*13:02L HLA-DRB1*01:02L HLA-DQA1*01-B1*05L
  source 1..13: note = Severe acute respiratory syndrome coronavirus 2
LDNYYKKDNSYFT

SEQ ID NO: 14238 - protein, 13 aa, Severe acute respiratory syndrome-related coronavirus
  REGION 1..13: note = Table B: HLA-DRB1*13:02L HLA-DRB1*01:02L HLA-DRB3*01:01L HLA-DRB1*14:17L
  source 1..13: note = Severe acute respiratory syndrome coronavirus 2
DNYYKKDNSYFTE

SEQ ID NO: 14239 - protein, 16 aa, Severe acute respiratory syndrome-related coronavirus
  REGION 1..16: note = Table B: HLA-DRB1*13:02L HLA-DRB1*08:04L HLA-DPA1*01:03-B1*03:01L HLA-DPA1*03:01-B1*04:02L HLA-DRB1*14:02L HLA-DRB1*08:01L HLA-DPA1*01:03-B1*04:02L
  source 1..16: note = Severe acute respiratory syndrome coronavirus 2
NYYKKDNSYFTEQPID

SEQ ID NO: 14240 - protein, 11 aa, Severe acute respiratory syndrome-related coronavirus
  REGION 1..11: note = Table B: HLA-DRB1*13:02L HLA-DRB1*01:03L HLA-DRB1*04:05L HLA-DQA1*01:02-B1*06:02L HLA-DRB1*01:02L HLA-DRB1*08:04L HLA-DRB1*08:77L HLA-DRB1*11:03L HLA-DRB1*11:04L HLA-DRB1*14:02L HLA-DQA1*05:05-B1*03:19L HLA-DQA1*05:01-B1*02:01L
  REGION 1..11: note = CONT. FROM ABOVE: HLA-DRB1*04:10L HLA-DRB1*12:02L HLA-DRB1*14:54 L HLA-DQA1*05:05-B1*03:01L HLA-DRB1*04:08L HLA-DRB1*15:03L
  source 1..11: note = Severe acute respiratory syndrome coronavirus 2
LVPNQPYPNAS

SEQ ID NO: 14241 - protein, 13 aa, Severe acute respiratory syndrome-related coronavirus
  REGION 1..13: note = Table B: HLA-DRB1*13:02L HLA-DRB1*01:02L HLA-DRB1*11:04L HLA-DQA1*01:01-B1*05:01L HLA-DRB1*11:01L HLA-DRB1*04:10L HLA-DRB1*12:01L HLA-DRB1*12:02L HLA-DRB3*01:01L HLA-DRB1*14:54L HLA-DPA1*01:03-B1*104:01L HLA-DRB1*07:01L HLA-DRB1*04:08L
  REGION 1..13: note = CONT. FROM ABOVE: HLA-DRB1*08:03L
  source 1..13: note = Severe acute respiratory syndrome coronavirus 2
VPNQPYPNASFDN

SEQ ID NO: 14242 - protein, 19 aa, Severe acute respiratory syndrome-related coronavirus
  REGION 1..19: note = Table B: HLA-DRB1*13:02L HLA-DPA1*01:03-B1*03:01L HLA-DPA1*01:03-B1*104:01L
  source 1..19: note = Severe acute respiratory syndrome coronavirus 2
QPYPNASFDNFKFVCDNIK

SEQ ID NO: 14243 - protein, 14 aa, Severe acute respiratory syndrome-related coronavirus
  REGION 1..14: note = Table B: HLA-DRB1*13:02L HLA-DRB1*01:03L HLA-DRB1*04:05L HLA-DRB1*14:01L HLA-DRB1*08:01L HLA-DRB1*12:01L HLA-DPA1*02:01-B1*13:01L HLA-DRB1*04:08L
  source 1..14: note = Severe acute respiratory syndrome coronavirus 2
NFKFVCDNIKFADD

SEQ ID NO: 14244 - protein, 12 aa, Severe acute respiratory syndrome-related coronavirus
  REGION 1..12: note = Table B: HLA-DRB1*13:02L HLA-DQA1*01:02-B1*06:02L HLA-DRB1*01:02L HLA-DRB1*08:04L HLA-DPA1*01:03-B1*03:01L HLA-DRB1*08:01L HLA-DRB1*12:02L HLA-DQA1*05:05-B1*03:01L HLA-DRB1*10:01L HLA-DQA1*01:03-B1*06:01L
  source 1..12: note = Severe acute respiratory syndrome coronavirus 2
DNIKFADDLNQL

SEQ ID NO: 14245 - protein, 13 aa, Severe acute respiratory syndrome-related coronavirus
  REGION 1..13: note = Table B: HLA-DRB1*13:02L HLA-DRB1*04:05L HLA-DQA1*01:02-B1*06:02L HLA-DPA1*03:01-B1*105:01L HLA-DRB1*14:54L HLA-DQA1*01:03-B1*06:01L
  source 1..13: note = Severe acute respiratory syndrome coronavirus 2
ADDLNQLTGYKKP

SEQ ID NO: 14246 - protein, 13 aa, Severe acute respiratory syndrome-related coronavirus
  REGION 1..13: note = Table B: HLA-DRB1*13:02L HLA-DRB1*04:04L HLA-DRB1*04:05L HLA-DQA1*01:02-B1*06:02L HLA-DRB1*01:01L HLA-DRB1*11:03L HLA-DRB1*08:01L HLA-DQA1*01-B1*05L HLA-DPA1*03:01-B1*105:01L HLA-DRB1*14:54L HLA-DRB1*10:01L HLA-DQA1*01:03-B1*06:01L
  REGION 1..13: note = CONT. FROM ABOVE: HLA-DRB1*15:01L
  source 1..13: note = Severe acute respiratory syndrome coronavirus 2
DDLNQLTGYKKPA

SEQ ID NO: 14247 - protein, 13 aa, Severe acute respiratory syndrome-related coronavirus
  REGION 1..13: note = Table B: HLA-DRB1*13:02L HLA-DQA1*01:03-B1*06:01L
  source 1..13: note = Severe acute respiratory syndrome coronavirus 2
DLNQLTGYKKPAS

SEQ ID NO: 14248 - protein, 12 aa, Severe acute respiratory syndrome-related coronavirus
  REGION 1..12: note = Table B: HLA-DRB1*13:02L HLA-DRB1*04:04L HLA-DRB1*04:05L HLA-DQA1*01:02-B1*06:02L HLA-DRB1*01:02L HLA-DRB1*08:04L HLA-DRB1*11:03L HLA-DRB1*11:04L HLA-DRB1*11:01L HLA-DRB1*04:10L HLA-DRB1*12:01L HLA-DRB3*01:01L HLA-DRB1*14:54L
  REGION 1..12: note = CONT. FROM ABOVE: HLA-DPA1*01:02-B1*04:01L HLA-DRB1*04:08L HLA-D RB1*08:03L HLA-DRB1*15:03L
  source 1..12: note = Severe acute respiratory syndrome coronavirus 2
NQLTGYKKPASR

SEQ ID NO: 14249 - protein, 14 aa, Severe acute respiratory syndrome-related coronavirus
  REGION 1..14: note = Table B: HLA-DRB1*13:02L HLA-DRB1*11:01L HLA-DRB3*01:01L
  source 1..14: note = Severe acute respiratory syndrome coronavirus 2
QLTGYKKPASRELK

SEQ ID NO: 14250 - protein, 14 aa, Severe acute respiratory syndrome-related coronavirus
  REGION 1..14: note = Table B: HLA-DRB1*13:02L HLA-DRB1*13:03L HLA-DRB1*08:04L HLA-DPA1*01:03-B1*03:01L HLA-DRB1*11:04L HLA-DRB1*08:01L HLA-DRB4*01:01L HLA-DRB3*01:01L HLA-DPA1*01:03-B1*02:01L HLA-DPA1*01:03-B1*104:01L HLA-DQA1*05:05-B1*03:01L
  REGION 1..14: note = CONT. FROM ABOVE: HLA-DRB1*10:01L HLA-DRB1*08:03L
  source 1..14: note = Severe acute respiratory syndrome coronavirus 2
ELKVTFFPDLNGDV

SEQ ID NO: 14251 - protein, 12 aa, Severe acute respiratory syndrome-related coronavirus
  REGION 1..12: note = Table B: HLA-DRB1*13:02L HLA-DRB1*04:05L HLA-DQA1*01:02-B1*06:02L HLA-DRB1*01:02L HLA-DRB1*14:01L HLA-DRB1*11:04L HLA-DRB1*12:01L HLA-DRB3*01:01L HLA-DPA1*01:02-B1*04:01L
  source 1..12: note = Severe acute respiratory syndrome coronavirus 2
KHYTPSFKKGAK

SEQ ID NO: 14252 - protein, 14 aa, Severe acute respiratory syndrome-related coronavirus
  REGION 1..14: note = Table B: HLA-DRB1*13:02L HLA-DRB1*13:03L HLA-DRB1*04:05L HLA-DQA1*01:02-B1*06:02L HLA-DRB1*08:04L HLA-DRB1*14:01L HLA-DRB1*11:03L HLA-DRB1*12:01L HLA-DRB3*01:01L HLA-DQA1*02:01-B1*03:03L HLA-DRB1*15:03L
  source 1..14: note = Severe acute respiratory syndrome coronavirus 2
TPSFKKGAKLLHKP

SEQ ID NO: 14253 - protein, 15 aa, Severe acute respiratory syndrome-related coronavirus
  REGION 1..15: note = Table B: HLA-DRB1*13:02L
  source 1..15: note = Severe acute respiratory syndrome coronavirus 2
KGAKLLHKPIVWHVN

SEQ ID NO: 14254 - protein, 15 aa, Severe acute respiratory syndrome-related coronavirus
  REGION 1..15: note = Table B: HLA-DRB1*13:02L HLA-DRB1*01:03L HLA-DRB1*14:01L HLA-DQA1*02:01-B1*03:03L
  source 1..15: note = Severe acute respiratory syndrome coronavirus 2
GAKLLHKPIVWHVNN

SEQ ID NO: 14255 - protein, 13 aa, Severe acute respiratory syndrome-related coronavirus
  REGION 1..13: note = Table B: HLA-DRB1*13:02L HLA-DRB1*04:02L HLA-DRB1*04:05L HLA-DPA1*01:03-B1*03:01L HLA-DQA1*01:01-B1*05:01L HLA-DPA1*02:01-B1*13:01L HLA-DRB1*15:03L
  source 1..13: note = Severe acute respiratory syndrome coronavirus 2
TKPVETSNSFDVL

SEQ ID NO: 14256 - protein, 10 aa, Severe acute respiratory syndrome-related coronavirus
  REGION 1..10: note = Table B: HLA-DRB1*13:02L HLA-DRB1*13:03L HLA-DQA1*01:02-B1*06:02L HLA-DRB1*01:01L HLA-DRB4*03:01NL HLA-DRB3*02:01L HLA-DRB1*14:01L HLA-DRB1*11:04L HLA-DRB1*08:01L HLA-DRB5*01:01L HLA-DPA1*01:03-B1*04:02L HLA-DRB1*12:01M
  REGION 1..10: note = CONT. FROM ABOVE: HLA-DRB1*12:02L HLA-DPA1*03:01-B1*105:01L HLA- DQA1*03:01-B1*03:02L HLA-DQA1*05:05-B1*03:01M HLA-DRB1*14:17L HL A-DQA1*01:03-B1*06:01L HLA-DQA1*02:01-B1*03:03L HLA-DRB1*15:01L
  source 1..10: note = Severe acute respiratory syndrome coronavirus 2
ETSNSFDVLK

SEQ ID NO: 14257 - protein, 10 aa, Severe acute respiratory syndrome-related coronavirus
  REGION 1..10: note = Table B: HLA-DRB1*13:02L HLA-DRB1*13:03L HLA-DRB4*03:01NL HLA-DRB1*12:01L HLA-DQA1*03:01-B1*03:02L HLA-DQA1*05:05-B1*03:01L
  source 1..10: note = Severe acute respiratory syndrome coronavirus 2
TEVVGDIILK

SEQ ID NO: 14258 - protein, 13 aa, Severe acute respiratory syndrome-related coronavirus
  REGION 1..13: note = Table B: HLA-DRB1*13:02L HLA-DRB1*13:03L HLA-DRB1*01:03L HLA-DRB1*04:04L HLA-DRB4*03:01NL HLA-DPA1*01:03-B1*03:01L HLA-DQA1*01:01-B1*05:01L HLA-DRB1*08:01L HLA-DQA1*05:05-B1*03:19L HLA-DRB1*04:10L HLA-DRB1*14:54L
  REGION 1..13: note = CONT. FROM ABOVE: HLA-DQA1*05:05-B1*03:01L HLA-DPA1*01:02-B1*04: 01L HLA-DRB1*07:01L HLA-DRB1*04:08L
  source 1..13: note = Severe acute respiratory syndrome coronavirus 2
NSLKITEEVGHTD

SEQ ID NO: 14259 - protein, 14 aa, Severe acute respiratory syndrome-related coronavirus
  REGION 1..14: note = Table B: HLA-DRB1*13:02L
  source 1..14: note = Severe acute respiratory syndrome coronavirus 2
EVGHTDLMAAYVDN

SEQ ID NO: 14260 - protein, 12 aa, Severe acute respiratory syndrome-related coronavirus
  REGION 1..12: note = Table B: HLA-DRB1*13:02L HLA-DRB1*13:03L HLA-DRB1*01:03L HLA-DRB1*04:05L HLA-DRB1*01:02L HLA-DRB1*08:04L HLA-DRB1*08:77L HLA-DRB3*02:01L HLA-DPA1*01:03-B1*03:01L HLA-DPA1*03:01-B1*04:02L HLA-DRB1*08:01L
  REGION 1..12: note = CONT. FROM ABOVE: HLA-DQA1*05:01-B1*02:01L HLA-DPA1*01:03-B1*04: 01L HLA-DRB1*12:02L HLA-DPA1*02:01-B1*13:01L HLA-DPA1*03:01-B1*1 05:01L HLA-DRB1*14:54L HLA-DQA1*05:05-B1*03:01L HLA-DRB1*07:01L HLA-DRB1*04:08L HLA-DRB1*15:03L
  source 1..12: note = Severe acute respiratory syndrome coronavirus 2
NSSLTIKKPNEL

SEQ ID NO: 14261 - protein, 10 aa, Severe acute respiratory syndrome-related coronavirus
  REGION 1..10: note = Table B: HLA-DRB1*13:02L HLA-DRB1*13:03L HLA-DRB1*01:03L HLA-DRB1*01:01L HLA-DRB4*03:01NL HLA-DRB1*11:04L HLA-DRB1*08:01L HLA-DRB1*12:01L HLA-DQA1*03:01-B1*03:02M HLA-DQA1*05:05-B1*03:01L HLA-DRB1*14:17L HLA-DRB1*16:01L
  source 1..10: note = Severe acute respiratory syndrome coronavirus 2
TIKKPNELSR

SEQ ID NO: 14262 - protein, 14 aa, Severe acute respiratory syndrome-related coronavirus
  REGION 1..14: note = Table B: HLA-DRB1*13:02L HLA-DRB1*13:03L HLA-DRB1*01:01L HLA-DRB1*11:03L HLA-DPA1*02:01-B1*13:01L HLA-DPA1*03:01-B1*105:01L HLA-DQA1*05:05-B1*03:01L HLA-DRB1*07:01L HLA-DRB1*10:01L HLA-DRB1*08:03L
  source 1..14: note = Severe acute respiratory syndrome coronavirus 2
LSRVLGLKTLATHG

SEQ ID NO: 14263 - protein, 12 aa, Severe acute respiratory syndrome-related coronavirus
  REGION 1..12: note = Table B: HLA-DRB1*13:02L HLA-DPA1*01:03-B1*03:01L HLA-DPA1*03:01-B1*04:02L HLA-DQA1*05:01-B1*02:01L HLA-DRB1*12:02L HLA-DPA1*03:01-B1*105:01L HLA-DQA1*01:03-B1*06:01L HLA-DRB1*15:03L
  source 1..12: note = Severe acute respiratory syndrome coronavirus 2
VLGLKTLATHGL

SEQ ID NO: 14264 - protein, 14 aa, Severe acute respiratory syndrome-related coronavirus
  REGION 1..14: note = Table B: HLA-DRB1*13:02L HLA-DRB1*04:05L
  source 1..14: note = Severe acute respiratory syndrome coronavirus 2
GLKTLATHGLAAVN

SEQ ID NO: 14265 - protein, 13 aa, Severe acute respiratory syndrome-related coronavirus
  REGION 1..13: note = Table B: HLA-DRB1*13:02L HLA-DRB1*13:03L HLA-DRB1*04:04L HLA-DRB4*03:01NL HLA-DRB1*08:04L HLA-DRB3*02:01L HLA-DRB1*14:01L HLA-DRB1*08:01L HLA-DRB1*14:54L HLA-DPA1*01:03-B1*02:01L
  source 1..13: note = Severe acute respiratory syndrome coronavirus 2
AAVNSVPWDTIAN

SEQ ID NO: 14266 - protein, 15 aa, Severe acute respiratory syndrome-related coronavirus
  REGION 1..15: note = Table B: HLA-DRB1*13:02L HLA-DRB1*08:04L HLA-DRB3*01:01L
  source 1..15: note = Severe acute respiratory syndrome coronavirus 2
VNSVPWDTIANYAKP

SEQ ID NO: 14267 - protein, 13 aa, Severe acute respiratory syndrome-related coronavirus
  REGION 1..13: note = Table B: HLA-DRB1*13:02L HLA-DRB1*08:04L HLA-DRB3*02:01L HLA-DRB1*08:01L HLA-DRB1*04:10L HLA-DPA1*01:03-B1*04:02L HLA-DRB1*12:02L HLA-DRB1*14:54L HLA-DPA1*01:03-B1*104:01L
  source 1..13: note = Severe acute respiratory syndrome coronavirus 2
VPWDTIANYAKPF

SEQ ID NO: 14268 - protein, 12 aa, Severe acute respiratory syndrome-related coronavirus
  REGION 1..12: note = Table B: HLA-DRB1*13:02L HLA-DRB1*04:05L HLA-DRB1*01:02L HLA-DRB1*08:04L HLA-DRB3*02:01L HLA-DRB1*08:01L HLA-DRB1*12:02L HLA-DRB1*14:54L HLA-DRB1*04:08L
  source 1..12: note = Severe acute respiratory syndrome coronavirus 2
DTIANYAKPFLN

SEQ ID NO: 14269 - protein, 14 aa, Severe acute respiratory syndrome-related coronavirus
  REGION 1..14: note = Table B: HLA-DRB1*13:02L HLA-DPA1*01:03-B1*03:01L HLA-DPA1*03:01-B1*04:02L HLA-DRB1*11:04L HLA-DRB1*14:02L HLA-DQA1*01:01-B1*05:01L HLA-DRB1*11:01L HLA-DQA1*05:01-B1*02:01L HLA-DPA1*01:03-B1*04:02L
  REGION 1..14: note = CONT. FROM ABOVE: HLA-DRB1*14:54L HLA-DPA1*01:03-B1*104:01L HLA- DRB1*10:01L
  source 1..14: note = Severe acute respiratory syndrome coronavirus 2
AKPFLNKVVSTTTN

SEQ ID NO: 14270 - protein, 14 aa, Severe acute respiratory syndrome-related coronavirus
  REGION 1..14: note = Table B: HLA-DRB1*13:02L HLA-DRB1*01:02L HLA-DPA1*03:01-B1*105:01L HLA-DPA1*01:03-B1*104:01L HLA-DRB1*15:03L
  source 1..14: note = Severe acute respiratory syndrome coronavirus 2
LNRVCTNYMPYFFT

SEQ ID NO: 14271 - protein, 10 aa, Severe acute respiratory syndrome-related coronavirus
  REGION 1..10: note = Table B: HLA-DRB1*13:02L HLA-DRB1*13:03L HLA-DRB4*03:01NL HLA-DRB1*08:01L HLA-DRB1*12:01L HLA-DQA1*03:01-B1*03:02L HLA-DQA1*05:05-B1*03:01L
  source 1..10: note = Severe acute respiratory syndrome coronavirus 2
KASMPTTIAK

SEQ ID NO: 14272 - protein, 11 aa, Severe acute respiratory syndrome-related coronavirus
  REGION 1..11: note = Table B: HLA-DRB1*13:02L HLA-DRB3*02:01L HLA-DRB1*11:04L HLA-DRB1*14:02L HLA-DQA1*01:01-B1*05:01L HLA-DRB5*01:01L HLA-DPA1*01:03-B1*04:02L HLA-DRB1*12:01L HLA-DRB1*12:02L HLA-DRB1*14:54L
  source 1..11: note = Severe acute respiratory syndrome coronavirus 2
MPTTIAKNTVK

SEQ ID NO: 14273 - protein, 15 aa, Severe acute respiratory syndrome-related coronavirus
  REGION 1..15: note = Table B: HLA-DRB1*13:02L HLA-DRB1*04:05L
  source 1..15: note = Severe acute respiratory syndrome coronavirus 2
SVGKFCLEASFNYLK

SEQ ID NO: 14274 - protein, 17 aa, Severe acute respiratory syndrome-related coronavirus
  REGION 1..17: note = Table B: HLA-DRB1*13:02L HLA-DPA1*01:03-B1*03:01L HLA-DPA1*01:03-B1*104:01L
  source 1..17: note = Severe acute respiratory syndrome coronavirus 2
VGKFCLEASFNYLKSPN

SEQ ID NO: 14275 - protein, 11 aa, Severe acute respiratory syndrome-related coronavirus
  REGION 1..11: note = Table B: HLA-DRB1*13:02L HLA-DRB1*01:03L HLA-DRB3*02:01L HLA-DPA1*01:03-B1*03:01L HLA-DRB1*14:01L HLA-DRB1*14:02L HLA-DPA1*01:03-B1*04:01L HLA-DRB1*09:01L HLA-DRB1*12:02L HLA-DQA1*05:05-B1*03:01L HLA-DRB1*07:01L
  source 1..11: note = Severe acute respiratory syndrome coronavirus 2
ASFNYLKSPNF

SEQ ID NO: 14276 - protein, 11 aa, Severe acute respiratory syndrome-related coronavirus
  REGION 1..11: note = Table B: HLA-DRB1*13:02L HLA-DRB1*12:02L
  source 1..11: note = Severe acute respiratory syndrome coronavirus 2
SFNYLKSPNFS

SEQ ID NO: 14277 - protein, 11 aa, Severe acute respiratory syndrome-related coronavirus
  REGION 1..11: note = Table B: HLA-DRB1*13:02L HLA-DRB1*04:08L
  source 1..11: note = Severe acute respiratory syndrome coronavirus 2
FNYLKSPNFSK

SEQ ID NO: 14278 - protein, 12 aa, Severe acute respiratory syndrome-related coronavirus
  REGION 1..12: note = Table B: HLA-DRB1*13:02L HLA-DRB1*01:03L HLA-DRB1*04:02L HLA-DRB1*04:05L HLA-DRB4*03:01NL HLA-DRB1*11:03L HLA-DPA1*01:03-B1*04:01L HLA-DPA1*01:03-B1*104:01L HLA-DRB1*14:17L HLA-DRB1*04:08L
  source 1..12: note = Severe acute respiratory syndrome coronavirus 2
SLIYSTAALGVL

SEQ ID NO: 14279 - protein, 14 aa, Severe acute respiratory syndrome-related coronavirus
  REGION 1..14: note = Table B: HLA-DRB1*13:02L HLA-DRB1*13:03L HLA-DRB1*04:04L HLA-DRB1*08:04L HLA-DRB3*02:01L HLA-DRB1*14:01L HLA-DRB1*11:04L HLA-DRB1*14:02L HLA-DQA1*01:01-B1*05:01L HLA-DRB1*08:01L HLA-DRB1*11:01L HLA-DPA1*01:03-B1*04:01L HLA-DRB1*04:10L
  REGION 1..14: note = CONT. FROM ABOVE: HLA-DRB3*01:01L HLA-DPA1*01:03-B1*02:01L HLA-D RB1*07:01L HLA-DRB1*10:01L HLA-DRB1*08:03L
  source 1..14: note = Severe acute respiratory syndrome coronavirus 2
TGYREGYLNSTNVT

SEQ ID NO: 14280 - protein, 12 aa, Severe acute respiratory syndrome-related coronavirus
  REGION 1..12: note = Table B: HLA-DRB1*13:02L HLA-DRB1*04:02L HLA-DRB3*02:01L HLA-DQA1*05:01-B1*02:01L HLA-DRB1*12:01L
  source 1..12: note = Severe acute respiratory syndrome coronavirus 2
REGYLNSTNVTI

SEQ ID NO: 14281 - protein, 12 aa, Severe acute respiratory syndrome-related coronavirus
  REGION 1..12: note = Table B: HLA-DRB1*13:02L HLA-DRB1*13:03L HLA-DRB1*04:02L HLA-DRB4*03:01NL HLA-DRB3*02:01L HLA-DPA1*01:03-B1*03:01L HLA-DRB1*11:03L HLA-DRB1*11:04L HLA-DQA1*01-B1*05L HLA-DQA1*05:01-B1*02:01L HLA-DPA1*01:03-B1*04:01L
  REGION 1..12: note = CONT. FROM ABOVE: HLA-DRB1*12:02L HLA-DRB1*14:54L HLA-DQA1*05:05 -B1*03:01L HLA-DRB1*07:01L HLA-DRB1*04:08L
  source 1..12: note = Severe acute respiratory syndrome coronavirus 2
EGYLNSTNVTIA

SEQ ID NO: 14282 - protein, 11 aa, Severe acute respiratory syndrome-related coronavirus
  REGION 1..11: note = Table B: HLA-DRB1*13:02L HLA-DRB1*13:03L HLA-DRB1*04:02L HLA-DRB4*03:01NL HLA-DRB1*08:77L HLA-DRB1*14:01L HLA-DRB1*12:01L HLA-DRB1*14:54L HLA-DRB1*16:01L HLA-DQA1*02:01-B1*03:03L
  source 1..11: note = Severe acute respiratory syndrome coronavirus 2
YLNSTNVTIAT

SEQ ID NO: 14283 - protein, 14 aa, Severe acute respiratory syndrome-related coronavirus
  REGION 1..14: note = Table B: HLA-DRB1*13:02L HLA-DRB1*08:04L HLA-DPA1*01:03-B1*03:01L HLA-DRB1*11:02L HLA-DRB1*11:03L HLA-DRB1*14:02L HLA-DRB1*08:01L HLA-DPA1*01:03-B1*04:01L HLA-DRB1*09:01L HLA-DPA1*01:03-B1*04:02L HLA-DRB1*12:02L
  REGION 1..14: note = CONT. FROM ABOVE: HLA-DPA1*01:02-B1*04:01L HLA-DRB1*07:01L HLA-D RB1*10:01L HLA-DRB1*08:03L
  source 1..14: note = Severe acute respiratory syndrome coronavirus 2
LDSLDTYPSLETIQ

SEQ ID NO: 14284 - protein, 15 aa, Severe acute respiratory syndrome-related coronavirus
  REGION 1..15: note = Table B: HLA-DRB1*13:02L HLA-DPA1*01:03-B1*03:01L HLA-DRB1*14:02L
  source 1..15: note = Severe acute respiratory syndrome coronavirus 2
DSLDTYPSLETIQIT

SEQ ID NO: 14285 - protein, 11 aa, Severe acute respiratory syndrome-related coronavirus
  REGION 1..11: note = Table B: HLA-DRB1*13:02L HLA-DQA1*03:01-B1*03:02L HLA-DRB1*14:17L
  source 1..11: note = Severe acute respiratory syndrome coronavirus 2
ETIQITISSFK

SEQ ID NO: 14286 - protein, 14 aa, Severe acute respiratory syndrome-related coronavirus
  REGION 1..14: note = Table B: HLA-DRB1*13:02L HLA-DRB1*01:03L HLA-DRB1*04:05L HLA-DRB1*08:04L HLA-DPA1*01:03-B1*03:01L
  source 1..14: note = Severe acute respiratory syndrome coronavirus 2
TIQITISSFKWDLT

SEQ ID NO: 14287 - protein, 14 aa, Severe acute respiratory syndrome-related coronavirus
  REGION 1..14: note = Table B: HLA-DRB1*13:02L HLA-DRB1*01:03L HLA-DRB1*08:04L HLA-DPA1*01:03-B1*03:01L
  source 1..14: note = Severe acute respiratory syndrome coronavirus 2
IQITISSFKWDLTA

SEQ ID NO: 14288 - protein, 14 aa, Severe acute respiratory syndrome-related coronavirus
  REGION 1..14: note = Table B: HLA-DRB1*13:02L HLA-DRB1*11:04L
  source 1..14: note = Severe acute respiratory syndrome coronavirus 2
SSFKWDLTAFGLVA

SEQ ID NO: 14289 - protein, 14 aa, Severe acute respiratory syndrome-related coronavirus
  REGION 1..14: note = Table B: HLA-DRB1*13:02L HLA-DRB3*01:01L
  source 1..14: note = Severe acute respiratory syndrome coronavirus 2
SFKWDLTAFGLVAE

SEQ ID NO: 14290 - protein, 14 aa, Severe acute respiratory syndrome-related coronavirus
  REGION 1..14: note = Table B: HLA-DRB1*13:02L HLA-DRB1*01:02L HLA-DRB1*08:04L HLA-DRB1*14:01L
  source 1..14: note = Severe acute respiratory syndrome coronavirus 2
LAYILFTRFFYVLG

SEQ ID NO: 14291 - protein, 14 aa, Severe acute respiratory syndrome-related coronavirus
  REGION 1..14: note = Table B: HLA-DRB1*13:02L
  source 1..14: note = Severe acute respiratory syndrome coronavirus 2
FSYFAVHFISNSWL

SEQ ID NO: 14292 - protein, 12 aa, Severe acute respiratory syndrome-related coronavirus
  REGION 1..12: note = Table B: HLA-DRB1*13:02L HLA-DRB1*04:04L HLA-DRB3*02:01L HLA-DPA1*01:03-B1*03:01L HLA-DPA1*03:01-B1*04:02L HLA-DQA1*05:05-B1*03:19L HLA-DRB1*12:02L HLA-DRB1*14:54L HLA-DPA1*01:02-B1*04:01L
  source 1..12: note = Severe acute respiratory syndrome coronavirus 2
LIINLVQMAPIS

SEQ ID NO: 14293 - protein, 10 aa, Severe acute respiratory syndrome-related coronavirus
  REGION 1..10: note = Table B: HLA-DRB1*13:02L HLA-DRB1*13:03L HLA-DRB4*03:01NL HLA-DRB1*08:01L HLA-DRB5*01:01L HLA-DRB1*12:01L HLA-DQA1*03:01-B1*03:02L HLA-DQA1*05:05-B1*03:01L HLA-DQA1*01:03-B1*06:01L HLA-DQA1*02:01-B1*03:03L
  source 1..10: note = Severe acute respiratory syndrome coronavirus 2
QMAPISAMVR

SEQ ID NO: 14294 - protein, 10 aa, Severe acute respiratory syndrome-related coronavirus
  REGION 1..10: note = Table B: HLA-DRB1*13:02L HLA-DRB1*01:03L HLA-DRB1*01:02L HLA-DRB1*14:01L HLA-DRB1*12:01L HLA-DPA1*01:02-B1*04:01L HLA-DRB1*16:01L HLA-DRB1*04:08L HLA-DQA1*02:01-B1*03:03L HLA-DRB1*15:03L
  source 1..10: note = Severe acute respiratory syndrome coronavirus 2
YKRNRATRVE

SEQ ID NO: 14295 - protein, 15 aa, Severe acute respiratory syndrome-related coronavirus
  REGION 1..15: note = Table B: HLA-DRB1*13:02L HLA-DRB1*11:01L HLA-DPA1*01:03-B1*104:01L
  source 1..15: note = Severe acute respiratory syndrome coronavirus 2
RATRVECTTIVNGVR

SEQ ID NO: 14296 - protein, 15 aa, Severe acute respiratory syndrome-related coronavirus
  REGION 1..15: note = Table B: HLA-DRB1*13:02L HLA-DRB1*04:04L HLA-DQA1*01:02-B1*06:02L HLA-DPA1*01:03-B1*03:01L HLA-DQA1*03:01-B1*03:02L HLA-DRB1*16:01L HLA-DRB1*04:08L HLA-DQA1*02:01-B1*03:03L
  source 1..15: note = Severe acute respiratory syndrome coronavirus 2
VNGVRRSFYVYANGG

SEQ ID NO: 14297 - protein, 14 aa, Severe acute respiratory syndrome-related coronavirus
  REGION 1..14: note = Table B: HLA-DRB1*13:02L HLA-DRB1*04:04L HLA-DQA1*01:02-B1*06:02L HLA-DPA1*01:03-B1*03:01L HLA-DRB1*08:01L HLA-DRB1*12:01L HLA-DPA1*02:01-B1*13:01L HLA-DPA1*01:02-B1*04:01L HLA-DRB1*07:01L HLA-DRB1*15:03L
  source 1..14: note = Severe acute respiratory syndrome coronavirus 2
GVRRSFYVYANGGK

SEQ ID NO: 14298 - protein, 10 aa, Severe acute respiratory syndrome-related coronavirus
  REGION 1..10: note = Table B: HLA-DRB1*13:02L HLA-DRB1*13:03L HLA-DRB1*04:02L HLA-DRB1*01:01L HLA-DRB4*03:01NL HLA-DRB3*02:01L HLA-DRB1*14:01L HLA-DRB1*11:04L HLA-DRB1*08:01L HLA-DRB5*01:01L HLA-DQA1*01-B1*05L HLA-DPA1*01:03-B1*04:02L HLA-DRB1*12:01L
  REGION 1..10: note = CONT. FROM ABOVE: HLA-DRB1*12:02L HLA-DQA1*03:01-B1*03:02M HLA-D QA1*05:05-B1*03:01L HLA-DRB1*14:17L HLA-DRB1*16:01L HLA-DQA1*01: 03-B1*06:01L HLA-DQA1*02:01-B1*03:03L
  source 1..10: note = Severe acute respiratory syndrome coronavirus 2
STFISDEVAR

SEQ ID NO: 14299 - protein, 14 aa, Severe acute respiratory syndrome-related coronavirus
  REGION 1..14: note = Table B: HLA-DRB1*13:02L HLA-DRB1*13:03L HLA-DRB1*01:03L HLA-DRB1*04:05L HLA-DRB1*01:02L HLA-DRB1*08:04L HLA-DRB1*11:03L HLA-DRB1*11:04L HLA-DRB1*11:01L HLA-DRB1*13:01L HLA-DRB1*12:01L HLA-DRB3*01:01L HLA-DRB1*14:54L HLA-DRB1*04:08L HLA-DRB1*15:03L
  source 1..14: note = Severe acute respiratory syndrome coronavirus 2
RDLSLQFKRPINPT

SEQ ID NO: 14300 - protein, 15 aa, Severe acute respiratory syndrome-related coronavirus
  REGION 1..15: note = Table B: HLA-DRB1*13:02L HLA-DRB1*11:04L HLA-DRB1*11:01L HLA-DQA1*05:05-B1*03:19L HLA-DQA1*05:01-B1*02:01L HLA-DRB3*01:01L HLA-DQA1*05:05-B1*03:01L HLA-DQA1*01:03-B1*06:01L HLA-DRB1*08:02L
  source 1..15: note = Severe acute respiratory syndrome coronavirus 2
DLSLQFKRPINPTDQ

SEQ ID NO: 14301 - protein, 13 aa, Severe acute respiratory syndrome-related coronavirus
  REGION 1..13: note = Table B: HLA-DRB1*13:02L HLA-DRB1*13:03L HLA-DRB1*11:04L HLA-DRB1*11:01L HLA-DRB3*01:01L HLA-DPA1*03:01-B1*105:01L HLA-DQA1*01:03-B1*06:01L
  source 1..13: note = Severe acute respiratory syndrome coronavirus 2
GSIHLYFDKAGQK

SEQ ID NO: 14302 - protein, 12 aa, Severe acute respiratory syndrome-related coronavirus
  REGION 1..12: note = Table B: HLA-DRB1*13:02L HLA-DRB1*04:04L HLA-DQA1*01:02-B1*06:02L HLA-DRB1*14:01L HLA-DRB1*08:01L HLA-DRB3*01:01L HLA-DPA1*02:01-B1*13:01L
  source 1..12: note = Severe acute respiratory syndrome coronavirus 2
IHLYFDKAGQKT

SEQ ID NO: 14303 - protein, 10 aa, Severe acute respiratory syndrome-related coronavirus
  REGION 1..10: note = Table B: HLA-DRB1*13:02L HLA-DRB1*13:03L HLA-DRB1*01:03L HLA-DRB1*08:01L HLA-DRB1*12:01L HLA-DQA1*03:01-B1*03:02L HLA-DRB1*16:01L
  source 1..10: note = Severe acute respiratory syndrome coronavirus 2
KTYERHSLSH

SEQ ID NO: 14304 - protein, 14 aa, Severe acute respiratory syndrome-related coronavirus
  REGION 1..14: note = Table B: HLA-DRB1*13:02L HLA-DPA1*01:03-B1*03:01L
  source 1..14: note = Severe acute respiratory syndrome coronavirus 2
YERHSLSHFVNLDN

SEQ ID NO: 14305 - protein, 15 aa, Severe acute respiratory syndrome-related coronavirus
  REGION 1..15: note = Table B: HLA-DRB1*13:02L HLA-DRB1*04:05L HLA-DRB1*08:04L HLA-DRB3*02:01L HLA-DPA1*01:03-B1*03:01L HLA-DRB1*03:01L HLA-DRB1*11:03L HLA-DRB1*11:04L HLA-DRB1*14:02L HLA-DRB1*08:01L HLA-DQA1*05:05-B1*03:19L HLA-DRB1*12:02L HLA-DRB3*01:01L
  REGION 1..15: note = CONT. FROM ABOVE: HLA-DPA1*02:01-B1*13:01L HLA-DPA1*03:01-B1*105 :01L HLA-DRB1*14:54L HLA-DRB1*04:08L HLA-DRB1*15:03L
  source 1..15: note = Severe acute respiratory syndrome coronavirus 2
DNLRANNTKGSLPIN

SEQ ID NO: 14306 - protein, 16 aa, Severe acute respiratory syndrome-related coronavirus
  REGION 1..16: note = Table B: HLA-DRB1*13:02L HLA-DRB1*04:05L HLA-DRB1*12:01L
  source 1..16: note = Severe acute respiratory syndrome coronavirus 2
NNTKGSLPINVIVFDG

SEQ ID NO: 14307 - protein, 12 aa, Severe acute respiratory syndrome-related coronavirus
  REGION 1..12: note = Table B: HLA-DRB1*13:02L HLA-DRB1*13:03L HLA-DRB1*01:03L HLA-DRB1*01:02L HLA-DRB1*08:04L HLA-DRB1*08:77L HLA-DPA1*01:03-B1*03:01L HLA-DRB1*11:03L HLA-DRB1*11:04L HLA-DRB1*14:02L HLA-DRB1*12:01L HLA-DRB1*14:54L HLA-DRB1*04:08L
  REGION 1..12: note = CONT. FROM ABOVE: HLA-DRB1*15:03L
  source 1..12: note = Severe acute respiratory syndrome coronavirus 2
NVIVFDGKSKCE

SEQ ID NO: 14308 - protein, 12 aa, Severe acute respiratory syndrome-related coronavirus
  REGION 1..12: note = Table B: HLA-DRB1*13:02L HLA-DRB1*01:02L HLA-DRB1*08:04L HLA-DPA1*01:03-B1*03:01L HLA-DRB3*01:01L HLA-DRB1*04:08L HLA-DRB1*15:03L
  source 1..12: note = Severe acute respiratory syndrome coronavirus 2
IVFDGKSKCEES

SEQ ID NO: 14309 - protein, 13 aa, Severe acute respiratory syndrome-related coronavirus
  REGION 1..13: note = Table B: HLA-DRB1*13:02L HLA-DRB1*13:03L HLA-DRB3*02:01L HLA-DPA1*01:03-B1*03:01L HLA-DPA1*03:01-B1*04:02L HLA-DRB1*14:02L HLA-DRB1*08:01L HLA-DRB1*04:10L HLA-DRB1*12:02L HLA-DPA1*01:02-B1*04:01L HLA-DRB1*07:01L
  source 1..13: note = Severe acute respiratory syndrome coronavirus 2
KTLVATAEAELAK

SEQ ID NO: 14310 - protein, 11 aa, Severe acute respiratory syndrome-related coronavirus
  REGION 1..11: note = Table B: HLA-DRB1*13:02L HLA-DRB1*13:03L HLA-DRB1*04:04L HLA-DRB1*04:05L HLA-DRB1*01:02L HLA-DRB1*08:77L HLA-DRB3*02:01L HLA-DPA1*01:03-B1*03:01L HLA-DPA1*03:01-B1*04:02L HLA-DRB1*14:01L HLA-DRB1*11:04L HLA-DRB1*14:02L HLA-DRB1*08:01L
  REGION 1..11: note = CONT. FROM ABOVE: HLA-DRB1*11:01L HLA-DQA1*01-B1*05L HLA-DPA1*01 :03-B1*04:01L HLA-DQA1*05:05-B1*03:116L HLA-DRB1*04:10L HLA-DRB1 *12:02L HLA-DPA1*02:01-B1*13:01L HLA-DRB1*14:54L HLA-DPA1*01:03- B1*02:01L HLA-DPA1*01:03-B1*104:01L HLA-DRB1*07:01L
  REGION 1..11: note = CONT. FROM ABOVE: HLA-DRB1*08:03L HLA-DRB1*15:03L
  source 1..11: note = Severe acute respiratory syndrome coronavirus 2
VATAEAELAKN

SEQ ID NO: 14311 - protein, 11 aa, Severe acute respiratory syndrome-related coronavirus
  REGION 1..11: note = Table B: HLA-DRB1*13:02L HLA-DRB1*13:03L HLA-DRB1*01:03L HLA-DQA1*01:02-B1*06:02L HLA-DRB1*08:77L HLA-DPA1*03:01-B1*04:02L HLA-DRB1*03:01L HLA-DRB1*14:01L HLA-DRB1*11:02L HLA-DRB1*14:02L HLA-DRB1*08:01L
  REGION 1..11: note = CONT. FROM ABOVE: HLA-DQA1*01-B1*05L HLA-DRB4*01:01L HLA-DPA1*01 :03-B1*04:01L HLA-DQA1*05:05-B1*03:116M HLA-DRB1*09:01M HLA-DPA1 *01:03-B1*04:02M HLA-DRB1*12:01L HLA-DPA1*03:01-B1*105:01L HLA-D PA1*01:03-B1*104:01L HLA-DPA1*01:02-B1*04:01L HLA-DRB1*10:01L
  REGION 1..11: note = CONT. FROM ABOVE: HLA-DRB1*16:01L HLA-DQA1*01:03-B1*06:01L HLA-D QA1*02:01-B1*03:03L HLA-DRB1*15:03L
  source 1..11: note = Severe acute respiratory syndrome coronavirus 2
AEAELAKNVSL

SEQ ID NO: 14312 - protein, 12 aa, Severe acute respiratory syndrome-related coronavirus
  REGION 1..12: note = Table B: HLA-DRB1*13:02L HLA-DQA1*01:02-B1*06:02L HLA-DRB1*08:04L HLA-DRB1*14:01L HLA-DQA1*01:01-B1*05:01L HLA-DRB1*08:01L HLA-DRB1*04:10L HLA-DRB1*12:02L
  source 1..12: note = Severe acute respiratory syndrome coronavirus 2
EAELAKNVSLDN

SEQ ID NO: 14313 - protein, 13 aa, Severe acute respiratory syndrome-related coronavirus
  REGION 1..13: note = Table B: HLA-DRB1*13:02L HLA-DRB1*01:02L HLA-DRB1*08:04L HLA-DRB3*02:01L HLA-DPA1*01:03-B1*03:01L HLA-DPA1*03:01-B1*04:02L HLA-DQA1*05:05-B1*03:19L HLA-DPA1*02:01-B1*13:01L HLA-DPA1*01:02-B1*04:01L
  REGION 1..13: note = CONT. FROM ABOVE: HLA-DRB1*04:08L
  source 1..13: note = Severe acute respiratory syndrome coronavirus 2
AELAKNVSLDNVL

SEQ ID NO: 14314 - protein, 13 aa, Severe acute respiratory syndrome-related coronavirus
  REGION 1..13: note = Table B: HLA-DRB1*13:02L HLA-DRB1*13:03L HLA-DRB1*01:03L HLA-DRB1*04:04L HLA-DQA1*01:02-B1*06:02L HLA-DRB1*01:02L HLA-DRB1*14:01L HLA-DPA1*02:01-B1*13:01L HLA-DPA1*03:01-B1*105:01L HLA-DRB1*04:08L HLA-DRB1*15:03L
  source 1..13: note = Severe acute respiratory syndrome coronavirus 2
LAKNVSLDNVLST

SEQ ID NO: 14315 - protein, 13 aa, Severe acute respiratory syndrome-related coronavirus
  REGION 1..13: note = Table B: HLA-DRB1*13:02L HLA-DRB1*01:02L HLA-DRB1*08:04L HLA-DPA1*01:03-B1*03:01L
  source 1..13: note = Severe acute respiratory syndrome coronavirus 2
AKNVSLDNVLSTF

SEQ ID NO: 14316 - protein, 14 aa, Severe acute respiratory syndrome-related coronavirus
  REGION 1..14: note = Table B: HLA-DRB1*13:02L HLA-DRB1*01:02L HLA-DRB1*08:04L HLA-DPA1*01:03-B1*03:01L HLA-DRB1*03:01L
  source 1..14: note = Severe acute respiratory syndrome coronavirus 2
KNVSLDNVLSTFIS

SEQ ID NO: 14317 - protein, 13 aa, Severe acute respiratory syndrome-related coronavirus
  REGION 1..13: note = Table B: HLA-DRB1*13:02L HLA-DRB1*04:04L HLA-DRB3*02:01L HLA-DPA1*01:03-B1*03:01L HLA-DPA1*03:01-B1*04:02L HLA-DRB1*14:01L HLA-DRB1*08:01L HLA-DRB1*04:10L HLA-DPA1*01:03-B1*04:02L HLA-DPA1*02:01-B1*13:01L
  REGION 1..13: note = CONT. FROM ABOVE: HLA-DRB1*14:54L HLA-DPA1*01:02-B1*04:01L
  source 1..13: note = Severe acute respiratory syndrome coronavirus 2
DNVLSTFISAARQ

SEQ ID NO: 14318 - protein, 13 aa, Severe acute respiratory syndrome-related coronavirus
  REGION 1..13: note = Table B: HLA-DRB1*13:02L HLA-DRB1*04:04L HLA-DRB1*08:04L HLA-DRB3*02:01L HLA-DPA1*03:01-B1*04:02L HLA-DRB1*14:01L HLA-DRB1*04:10L HLA-DPA1*01:03-B1*04:02L HLA-DPA1*02:01-B1*13:01L HLA-DRB1*14:54L HLA-DRB1*08:03L
  REGION 1..13: note = CONT. FROM ABOVE: HLA-DRB1*15:01L
  source 1..13: note = Severe acute respiratory syndrome coronavirus 2
NVLSTFISAARQG

SEQ ID NO: 14319 - protein, 12 aa, Severe acute respiratory syndrome-related coronavirus
  REGION 1..12: note = Table B: HLA-DRB1*13:02L HLA-DRB1*08:04L HLA-DRB3*02:01L HLA-DPA1*01:03-B1*03:01L HLA-DRB1*08:01L HLA-DRB1*12:02L HLA-DRB1*14:54L
  source 1..12: note = Severe acute respiratory syndrome coronavirus 2
STFISAARQGFV

SEQ ID NO: 14320 - protein, 11 aa, Severe acute respiratory syndrome-related coronavirus
  REGION 1..11: note = Table B: HLA-DRB1*13:02L HLA-DRB1*13:03L HLA-DRB1*01:03L HLA-DRB1*04:05L HLA-DRB1*01:02L HLA-DRB1*08:04L HLA-DRB1*08:77L HLA-DRB3*02:01L HLA-DPA1*01:03-B1*03:01L HLA-DPA1*03:01-B1*04:02L HLA-DRB1*11:03L HLA-DRB1*11:04L
  REGION 1..11: note = CONT. FROM ABOVE: HLA-DRB1*14:02L HLA-DRB1*08:01L HLA-DPA1*01:03 -B1*04:02L HLA-DRB1*12:01L HLA-DRB1*12:02L HLA-DRB1*14:54L HLA-D PA1*01:02-B1*04:01L HLA-DRB1*16:01L HLA-DRB1*04:08L
  source 1..11: note = Severe acute respiratory syndrome coronavirus 2
FISAARQGFVD

SEQ ID NO: 14321 - protein, 14 aa, Severe acute respiratory syndrome-related coronavirus
  REGION 1..14: note = Table B: HLA-DRB1*13:02L HLA-DRB1*13:03L HLA-DRB3*02:01L HLA-DRB1*14:02L HLA-DRB1*08:01L HLA-DPA1*01:03-B1*04:01L HLA-DRB1*04:10L HLA-DPA1*01:03-B1*04:02L HLA-DPA1*01:03-B1*104:01L HLA-DPA1*01:02-B1*04:01L
  REGION 1..14: note = CONT. FROM ABOVE: HLA-DRB1*08:03L
  source 1..14: note = Severe acute respiratory syndrome coronavirus 2
ISAARQGFVDSDVE

SEQ ID NO: 14322 - protein, 15 aa, Severe acute respiratory syndrome-related coronavirus
  REGION 1..15: note = Table B: HLA-DRB1*13:02L HLA-DRB1*04:04L HLA-DPA1*01:03-B1*03:01L HLA-DRB3*01:01L HLA-DPA1*01:03-B1*104:01L HLA-DPA1*01:02-B1*04:01L HLA-DRB1*16:01L HLA-DRB1*15:03L
  source 1..15: note = Severe acute respiratory syndrome coronavirus 2
VETKDVVECLKLSHQ

SEQ ID NO: 14323 - protein, 14 aa, Severe acute respiratory syndrome-related coronavirus
  REGION 1..14: note = Table B: HLA-DRB1*13:02L HLA-DRB1*01:03L HLA-DRB1*04:02L HLA-DRB1*04:05L HLA-DRB1*01:02L HLA-DRB1*12:01L HLA-DRB3*01:01L HLA-DRB1*16:01L HLA-DRB1*15:03L
  source 1..14: note = Severe acute respiratory syndrome coronavirus 2
KDVVECLKLSHQSD

SEQ ID NO: 14324 - protein, 15 aa, Severe acute respiratory syndrome-related coronavirus
  REGION 1..15: note = Table B: HLA-DRB1*13:02L HLA-DRB1*04:04L HLA-DRB1*08:01L HLA-DPA1*02:01-B1*13:01L HLA-DPA1*01:03-B1*104:01L
  source 1..15: note = Severe acute respiratory syndrome coronavirus 2
LKLSHQSDIEVTGDS

SEQ ID NO: 14325 - protein, 13 aa, Severe acute respiratory syndrome-related coronavirus
  REGION 1..13: note = Table B: HLA-DRB1*13:02L
  source 1..13: note = Severe acute respiratory syndrome coronavirus 2
NNYMLTYNKVENM

SEQ ID NO: 14326 - protein, 14 aa, Severe acute respiratory syndrome-related coronavirus
  REGION 1..14: note = Table B: HLA-DRB1*13:02L HLA-DRB1*04:05L HLA-DRB1*14:02L HLA-DRB1*08:01L HLA-DQA1*05:05-B1*03:19L HLA-DQA1*05:05-B1*03:01L
  source 1..14: note = Severe acute respiratory syndrome coronavirus 2
NYMLTYNKVENMTP

SEQ ID NO: 14327 - protein, 13 aa, Severe acute respiratory syndrome-related coronavirus
  REGION 1..13: note = Table B: HLA-DRB1*13:02L HLA-DPA1*01:03-B1*03:01L HLA-DQA1*05:05-B1*03:01L
  source 1..13: note = Severe acute respiratory syndrome coronavirus 2
TYNKVENMTPRDL

SEQ ID NO: 14328 - protein, 13 aa, Severe acute respiratory syndrome-related coronavirus
  REGION 1..13: note = Table B: HLA-DRB1*13:02L HLA-DRB1*04:04L HLA-DRB1*08:04L HLA-DRB1*08:77L HLA-DRB3*02:01L HLA-DPA1*01:03-B1*03:01L HLA-DPA1*03:01-B1*04:02L HLA-DRB1*14:02L HLA-DQA1*01:01-B1*05:01L HLA-DRB1*08:01L HLA-DRB1*04:10L
  REGION 1..13: note = CONT. FROM ABOVE: HLA-DRB1*12:02L HLA-DPA1*01:03-B1*104:01L HLA- DRB1*07:01L HLA-DRB1*10:01L HLA-DRB1*04:08L HLA-DRB1*08:03L
  source 1..13: note = Severe acute respiratory syndrome coronavirus 2
YNKVENMTPRDLG

SEQ ID NO: 14329 - protein, 14 aa, Severe acute respiratory syndrome-related coronavirus
  REGION 1..14: note = Table B: HLA-DRB1*13:02L HLA-DRB1*01:01L HLA-DPA1*01:03-B1*03:01L HLA-DRB1*11:04L HLA-DRB1*11:01L HLA-DRB1*04:10L HLA-DRB3*01:01L HLA-DPA1*01:03-B1*104:01L HLA-DRB1*07:01L
  source 1..14: note = Severe acute respiratory syndrome coronavirus 2
SARHINAQVAKSHN

SEQ ID NO: 14330 - protein, 13 aa, Severe acute respiratory syndrome-related coronavirus
  REGION 1..13: note = Table B: HLA-DRB1*13:02L HLA-DRB3*02:01L HLA-DRB4*01:01L HLA-DPA1*01:03-B1*04:02L HLA-DRB1*12:02L HLA-DPA1*01:03-B1*104:01L HLA-DRB1*10:01L HLA-DRB1*08:03L
  source 1..13: note = Severe acute respiratory syndrome coronavirus 2
SHNIALIWNVKDF

SEQ ID NO: 14331 - protein, 14 aa, Severe acute respiratory syndrome-related coronavirus
  REGION 1..14: note = Table B: HLA-DRB1*13:02L HLA-DRB1*04:04L HLA-DPA1*01:03-B1*104:01L
  source 1..14: note = Severe acute respiratory syndrome coronavirus 2
IALIWNVKDFMSLS

SEQ ID NO: 14332 - protein, 13 aa, Severe acute respiratory syndrome-related coronavirus
  REGION 1..13: note = Table B: HLA-DRB1*13:02L HLA-DRB1*13:03L HLA-DRB1*04:04L HLA-DRB1*01:01L HLA-DRB1*14:01L HLA-DRB1*08:01L HLA-DRB3*01:01L HLA-DPA1*01:02-B1*04:01L HLA-DRB1*07:01L
  source 1..13: note = Severe acute respiratory syndrome coronavirus 2
VKDFMSLSEQLRK

SEQ ID NO: 14333 - protein, 12 aa, Severe acute respiratory syndrome-related coronavirus
  REGION 1..12: note = Table B: HLA-DRB1*13:02L HLA-DRB1*04:05L HLA-DQA1*01:02-B1*06:02L HLA-DRB1*01:01L HLA-DRB1*14:01L HLA-DQA1*01-B1*05L HLA-DPA1*03:01-B1*105:01L HLA-DRB1*07:01L HLA-DRB1*04:08L
  source 1..12: note = Severe acute respiratory syndrome coronavirus 2
DFMSLSEQLRKQ

SEQ ID NO: 14334 - protein, 15 aa, Severe acute respiratory syndrome-related coronavirus
  REGION 1..15: note = Table B: HLA-DRB1*13:02L HLA-DPA1*02:01-B1*13:01L HLA-DRB1*07:01L HLA-DQA1*02:01-B1*03:03L
  source 1..15: note = Severe acute respiratory syndrome coronavirus 2
EQLRKQIRSAAKKNN

SEQ ID NO: 14335 - protein, 14 aa, Severe acute respiratory syndrome-related coronavirus
  REGION 1..14: note = Table B: HLA-DRB1*13:02L HLA-DRB1*13:03L HLA-DRB1*01:03L HLA-DRB1*04:02L HLA-DRB1*04:05L HLA-DRB1*01:02L HLA-DRB1*08:04L HLA-DRB1*11:03L HLA-DRB1*11:04L HLA-DRB1*11:01L HLA-DRB1*12:01L HLA-DRB3*01:01L HLA-DRB1*16:01L HLA-DRB1*04:08L HLA-DRB1*15:03L
  source 1..14: note = Severe acute respiratory syndrome coronavirus 2
KQIRSAAKKNNLPF

SEQ ID NO: 14336 - protein, 10 aa, Severe acute respiratory syndrome-related coronavirus
  REGION 1..10: note = Table B: HLA-DRB1*13:02L HLA-DRB1*13:03L HLA-DRB4*03:01NL HLA-DRB1*08:01L HLA-DRB1*12:01L HLA-DQA1*03:01-B1*03:02M HLA-DQA1*05:05-B1*03:01L HLA-DRB1*14:17L
  source 1..10: note = Severe acute respiratory syndrome coronavirus 2
RQVVNVVTTK

SEQ ID NO: 14337 - protein, 14 aa, Severe acute respiratory syndrome-related coronavirus
  REGION 1..14: note = Table B: HLA-DRB1*13:02L HLA-DRB1*13:03L HLA-DRB1*04:04L HLA-DRB1*11:04L HLA-DRB1*11:01L HLA-DRB3*01:01L HLA-DPA1*02:01-B1*13:01L HLA-DQA1*05:05-B1*03:01L
  source 1..14: note = Severe acute respiratory syndrome coronavirus 2
VNVVTTKIALKGGK

SEQ ID NO: 14338 - protein, 13 aa, Severe acute respiratory syndrome-related coronavirus
  REGION 1..13: note = Table B: HLA-DRB1*13:02L HLA-DPA1*01:03-B1*03:01L HLA-DPA1*03:01-B1*105:01L
  source 1..13: note = Severe acute respiratory syndrome coronavirus 2
KGGKIVNNWLKQL

SEQ ID NO: 14339 - protein, 12 aa, Severe acute respiratory syndrome-related coronavirus
  REGION 1..12: note = Table B: HLA-DRB1*13:02L HLA-DRB1*01:03L HLA-DRB1*04:05L HLA-DRB1*01:02L HLA-DRB1*08:01L HLA-DRB1*12:01L HLA-DRB3*01:01L HLA-DRB1*04:08L
  source 1..12: note = Severe acute respiratory syndrome coronavirus 2
KIVNNWLKQLIK

SEQ ID NO: 14340 - protein, 12 aa, Severe acute respiratory syndrome-related coronavirus
  REGION 1..12: note = Table B: HLA-DRB1*13:02L HLA-DRB1*04:02L HLA-DRB3*02:01L HLA-DPA1*01:03-B1*03:01L HLA-DRB1*14:54L HLA-DRB1*14:17L HLA-DRB1*04:08L
  source 1..12: note = Severe acute respiratory syndrome coronavirus 2
AAIFYLITPVHV

SEQ ID NO: 14341 - protein, 11 aa, Severe acute respiratory syndrome-related coronavirus
  REGION 1..11: note = Table B: HLA-DRB1*13:02L HLA-DPA1*01:03-B1*03:01L HLA-DRB4*01:01L HLA-DRB1*04:08L
  source 1..11: note = Severe acute respiratory syndrome coronavirus 2
IFYLITPVHVM

SEQ ID NO: 14342 - protein, 13 aa, Severe acute respiratory syndrome-related coronavirus
  REGION 1..13: note = Table B: HLA-DRB1*13:02L HLA-DRB1*04:05L HLA-DRB1*01:02L HLA-DRB1*11:02L HLA-DRB1*11:03L HLA-DQA1*05:05-B1*03:116L HLA-DRB1*12:01L HLA-DRB3*01:01L HLA-DRB1*14:54L HLA-DRB1*08:02L HLA-DRB1*08:03L HLA-DRB1*15:03L
  source 1..13: note = Severe acute respiratory syndrome coronavirus 2
TPVHVMSKHTDFS

SEQ ID NO: 14343 - protein, 12 aa, Severe acute respiratory syndrome-related coronavirus
  REGION 1..12: note = Table B: HLA-DRB1*13:02L HLA-DRB1*04:04L HLA-DQA1*01:02-B1*06:02L HLA-DRB1*01:01L HLA-DRB1*01:02L HLA-DRB1*08:04L HLA-DRB1*08:77L HLA-DRB3*02:01L HLA-DPA1*01:03-B1*03:01L HLA-DPA1*03:01-B1*04:02L
  REGION 1..12: note = CONT. FROM ABOVE: HLA-DRB1*14:01L HLA-DRB1*11:03L HLA-DRB1*11:04 L HLA-DRB1*14:02L HLA-DQA1*01:01-B1*05:01L HLA-DRB1*08:01L HLA-D RB1*11:01L HLA-DQA1*05:05-B1*03:19L HLA-DPA1*01:03-B1*04:01L HLA -DRB1*09:01L HLA-DPA1*01:03-B1*04:02L HLA-DRB1*12:02L
  REGION 1..12: note = CONT. FROM ABOVE: HLA-DRB3*01:01L HLA-DPA1*02:01-B1*13:01L HLA-D PA1*03:01-B1*105:01L HLA-DPA1*01:03-B1*104:01L HLA-DQA1*05:05-B1 *03:01L HLA-DPA1*01:02-B1*04:01L HLA-DRB1*07:01L HLA-DRB1*10:01L HLA-DQA1*01:03-B1*06:01L HLA-DRB1*08:03L HLA-DRB1*15:01L
  REGION 1..12: note = CONT. FROM ABOVE: HLA-DRB1*15:03M
  source 1..12: note = Severe acute respiratory syndrome coronavirus 2
IIGYKAIDGGVT

SEQ ID NO: 14344 - protein, 12 aa, Severe acute respiratory syndrome-related coronavirus
  REGION 1..12: note = Table B: HLA-DRB1*13:02L HLA-DRB1*04:05L HLA-DRB1*08:01L HLA-DRB1*14:54L HLA-DRB1*04:08L
  source 1..12: note = Severe acute respiratory syndrome coronavirus 2
AIDGGVTRDIAS

SEQ ID NO: 14345 - protein, 13 aa, Severe acute respiratory syndrome-related coronavirus
  REGION 1..13: note = Table B: HLA-DRB1*13:02L HLA-DPA1*01:03-B1*03:01L HLA-DRB1*12:01L HLA-DPA1*02:01-B1*13:01L HLA-DPA1*03:01-B1*105:01L HLA-DRB1*04:08L
  source 1..13: note = Severe acute respiratory syndrome coronavirus 2
DGGVTRDIASTDT

SEQ ID NO: 14346 - protein, 11 aa, Severe acute respiratory syndrome-related coronavirus
  REGION 1..11: note = Table B: HLA-DRB1*13:02L HLA-DRB1*01:03L HLA-DRB1*04:02L HLA-DRB4*03:01NL HLA-DRB1*08:01L HLA-DRB5*01:01L HLA-DRB1*12:01L
  source 1..11: note = Severe acute respiratory syndrome coronavirus 2
VVPGLPGTILR

SEQ ID NO: 14347 - protein, 12 aa, Severe acute respiratory syndrome-related coronavirus
  REGION 1..12: note = Table B: HLA-DRB1*13:02L HLA-DRB1*04:02L HLA-DRB4*03:01NL HLA-DRB1*09:01L HLA-DRB1*12:02L HLA-DRB1*14:54L
  source 1..12: note = Severe acute respiratory syndrome coronavirus 2
GTILRTTNGDFL

SEQ ID NO: 14348 - protein, 12 aa, Severe acute respiratory syndrome-related coronavirus
  REGION 1..12: note = Table B: HLA-DRB1*13:02L HLA-DRB1*04:05L HLA-DQA1*01:02-B1*06:02L HLA-DPA1*03:01-B1*105:01L HLA-DRB1*14:17L HLA-DRB1*04:08L
  source 1..12: note = Severe acute respiratory syndrome coronavirus 2
TILRTTNGDFLH

SEQ ID NO: 14349 - protein, 13 aa, Severe acute respiratory syndrome-related coronavirus
  REGION 1..13: note = Table B: HLA-DRB1*13:02L HLA-DRB1*13:03L HLA-DRB1*04:02L HLA-DRB3*01:01L
  source 1..13: note = Severe acute respiratory syndrome coronavirus 2
GDFLHFLPRVFSA

SEQ ID NO: 14350 - protein, 14 aa, Severe acute respiratory syndrome-related coronavirus
  REGION 1..14: note = Table B: HLA-DRB1*13:02L
  source 1..14: note = Severe acute respiratory syndrome coronavirus 2
FLHFLPRVFSAVGN

SEQ ID NO: 14351 - protein, 14 aa, Severe acute respiratory syndrome-related coronavirus
  REGION 1..14: note = Table B: HLA-DRB1*13:02L HLA-DRB1*13:03L HLA-DRB1*04:04L HLA-DRB3*02:01L HLA-DRB1*14:02L HLA-DRB1*11:01L HLA-DRB4*02:01NL HLA-DPA1*01:03-B1*04:01L HLA-DQA1*05:05-B1*03:116L HLA-DPA1*02:01-B1*13:01L HLA-DRB1*14:54L
  REGION 1..14: note = CONT. FROM ABOVE: HLA-DPA1*01:03-B1*104:01L HLA-DRB1*07:01L HLA- DRB1*08:03L HLA-DRB1*15:03L
  source 1..14: note = Severe acute respiratory syndrome coronavirus 2
VLEGSVAYESLRPD

SEQ ID NO: 14352 - protein, 13 aa, Severe acute respiratory syndrome-related coronavirus
  REGION 1..13: note = Table B: HLA-DRB1*13:02L HLA-DRB1*04:04L HLA-DRB1*01:02L HLA-DRB1*08:04L HLA-DPA1*01:03-B1*03:01L HLA-DRB1*14:01L HLA-DRB1*11:04L HLA-DPA1*01:03-B1*04:01L HLA-DRB1*12:02L HLA-DPA1*02:01-B1*13:01L HLA-DRB1*14:54L
  REGION 1..13: note = CONT. FROM ABOVE: HLA-DPA1*01:03-B1*02:01L HLA-DPA1*01:03-B1*104 :01L HLA-DRB1*08:03L HLA-DRB1*15:03L
  source 1..13: note = Severe acute respiratory syndrome coronavirus 2
EGSVAYESLRPDT

SEQ ID NO: 14353 - protein, 13 aa, Severe acute respiratory syndrome-related coronavirus
  REGION 1..13: note = Table B: HLA-DRB1*13:02L HLA-DPA1*01:03-B1*03:01L HLA-DRB1*11:04L HLA-DQA1*05:05-B1*03:19L HLA-DRB3*01:01L HLA-DPA1*01:03-B1*02:01L HLA-DRB1*08:03L
  source 1..13: note = Severe acute respiratory syndrome coronavirus 2
GSVAYESLRPDTR

SEQ ID NO: 14354 - protein, 13 aa, Severe acute respiratory syndrome-related coronavirus
  REGION 1..13: note = Table B: HLA-DRB1*13:02L
  source 1..13: note = Severe acute respiratory syndrome coronavirus 2
SVAYESLRPDTRY

SEQ ID NO: 14355 - protein, 11 aa, Severe acute respiratory syndrome-related coronavirus
  REGION 1..11: note = Table B: HLA-DRB1*13:02L HLA-DRB3*01:01L
  source 1..11: note = Severe acute respiratory syndrome coronavirus 2
ESLRPDTRYVL

SEQ ID NO: 14356 - protein, 12 aa, Severe acute respiratory syndrome-related coronavirus
  REGION 1..12: note = Table B: HLA-DRB1*13:02L HLA-DRB1*01:03L HLA-DRB1*01:02L HLA-DRB1*03:01L HLA-DRB1*14:01L HLA-DRB3*01:01L HLA-DRB1*16:01L
  source 1..12: note = Severe acute respiratory syndrome coronavirus 2
LRPDTRYVLMDG

SEQ ID NO: 14357 - protein, 12 aa, Severe acute respiratory syndrome-related coronavirus
  REGION 1..12: note = Table B: HLA-DRB1*13:02L HLA-DRB1*08:04L HLA-DRB1*11:03L HLA-DRB1*11:04L HLA-DRB1*08:01L HLA-DRB1*07:01L HLA-DRB1*08:03L
  source 1..12: note = Severe acute respiratory syndrome coronavirus 2
DGSIIQFPNTYL

SEQ ID NO: 14358 - protein, 12 aa, Severe acute respiratory syndrome-related coronavirus
  REGION 1..12: note = Table B: HLA-DRB1*13:02L HLA-DRB1*11:03L HLA-DRB1*11:04L HLA-DRB1*08:01L HLA-DQA1*05:05-B1*03:01L HLA-DRB1*08:03L
  source 1..12: note = Severe acute respiratory syndrome coronavirus 2
GSIIQFPNTYLE

SEQ ID NO: 14359 - protein, 11 aa, Severe acute respiratory syndrome-related coronavirus
  REGION 1..11: note = Table B: HLA-DRB1*13:02L HLA-DRB1*01:03L HLA-DRB1*04:05L HLA-DRB4*03:01NL HLA-DQA1*01:01-B1*05:01L HLA-DRB1*08:01L HLA-DRB5*01:01L HLA-DQA1*05:05-B1*03:19L HLA-DPA1*01:03-B1*04:02L HLA-DRB1*12:01L
  REGION 1..11: note = CONT. FROM ABOVE: HLA-DPA1*03:01-B1*105:01L HLA-DRB1*14:54L HLA- DRB1*04:08L HLA-DRB1*15:03L
  source 1..11: note = Severe acute respiratory syndrome coronavirus 2
FPNTYLEGSVR

SEQ ID NO: 14360 - protein, 13 aa, Severe acute respiratory syndrome-related coronavirus
  REGION 1..13: note = Table B: HLA-DRB1*13:02L HLA-DRB4*03:01NL HLA-DRB1*08:04L HLA-DRB1*08:77L HLA-DRB1*11:03L HLA-DRB1*11:04L HLA-DRB3*01:01L HLA-DRB1*14:54L HLA-DRB1*15:03L
  source 1..13: note = Severe acute respiratory syndrome coronavirus 2
SGRWVLNNDYYRS

SEQ ID NO: 14361 - protein, 14 aa, Severe acute respiratory syndrome-related coronavirus
  REGION 1..14: note = Table B: HLA-DRB1*13:02L HLA-DRB1*08:04L HLA-DRB1*14:02L HLA-DRB1*08:01L HLA-DQA1*01-B1*05L HLA-DRB1*12:01L HLA-DRB3*01:01L HLA-DPA1*02:01-B1*13:01L
  source 1..14: note = Severe acute respiratory syndrome coronavirus 2
GRWVLNNDYYRSLP

SEQ ID NO: 14362 - protein, 12 aa, Severe acute respiratory syndrome-related coronavirus
  REGION 1..12: note = Table B: HLA-DRB1*13:02L HLA-DRB3*02:01L
  source 1..12: note = Severe acute respiratory syndrome coronavirus 2
NNDYYRSLPGVF

SEQ ID NO: 14363 - protein, 13 aa, Severe acute respiratory syndrome-related coronavirus
  REGION 1..13: note = Table B: HLA-DRB1*13:02L
  source 1..13: note = Severe acute respiratory syndrome coronavirus 2
NDYYRSLPGVFCG

SEQ ID NO: 14364 - protein, 14 aa, Severe acute respiratory syndrome-related coronavirus
  REGION 1..14: note = Table B: HLA-DRB1*13:02L
  source 1..14: note = Severe acute respiratory syndrome coronavirus 2
DYYRSLPGVFCGVD

SEQ ID NO: 14365 - protein, 16 aa, Severe acute respiratory syndrome-related coronavirus
  REGION 1..16: note = Table B: HLA-DRB1*13:02L HLA-DRB1*01:03L HLA-DRB1*14:01L HLA-DRB1*14:02L HLA-DPA1*01:03-B1*104:01L HLA-DRB1*10:01L HLA-DRB1*04:08L
  source 1..16: note = Severe acute respiratory syndrome coronavirus 2
LPGVFCGVDAVNLLTN

SEQ ID NO: 14366 - protein, 12 aa, Severe acute respiratory syndrome-related coronavirus
  REGION 1..12: note = Table B: HLA-DRB1*13:02L HLA-DRB1*04:04L HLA-DRB1*08:77L HLA-DRB3*02:01L HLA-DPA1*01:03-B1*03:01L HLA-DRB1*11:03L HLA-DRB1*11:04L HLA-DRB1*14:02L HLA-DQA1*01:01-B1*05:01L HLA-DRB1*11:01L HLA-DPA1*01:03-B1*04:01L HLA-DRB1*09:01L
  REGION 1..12: note = CONT. FROM ABOVE: HLA-DRB1*12:02L HLA-DPA1*01:03-B1*02:01L HLA-D PA1*01:03-B1*104:01L HLA-DRB1*07:01L HLA-DRB1*10:01L
  source 1..12: note = Severe acute respiratory syndrome coronavirus 2
TNMFTPLIQPIG

SEQ ID NO: 14367 - protein, 17 aa, Severe acute respiratory syndrome-related coronavirus
  REGION 1..17: note = Table B: HLA-DRB1*13:02L HLA-DRB1*04:04L HLA-DRB1*16:01L HLA-DRB1*04:08L
  source 1..17: note = Severe acute respiratory syndrome coronavirus 2
QPIGALDISASIVAGGI

SEQ ID NO: 14368 - protein, 14 aa, Severe acute respiratory syndrome-related coronavirus
  REGION 1..14: note = Table B: HLA-DRB1*13:02L HLA-DRB1*08:04L HLA-DPA1*01:03-B1*04:02L HLA-DRB1*15:03L
  source 1..14: note = Severe acute respiratory syndrome coronavirus 2
AYYFMRFRRAFGEY

SEQ ID NO: 14369 - protein, 14 aa, Severe acute respiratory syndrome-related coronavirus
  REGION 1..14: note = Table B: HLA-DRB1*13:02L HLA-DRB1*04:04L HLA-DRB1*01:01L HLA-DRB1*11:01L HLA-DRB1*07:01L
  source 1..14: note = Severe acute respiratory syndrome coronavirus 2
RFRRAFGEYSHVVA

SEQ ID NO: 14370 - protein, 15 aa, Severe acute respiratory syndrome-related coronavirus
  REGION 1..15: note = Table B: HLA-DRB1*13:02L HLA-DRB1*08:04L HLA-DRB1*14:01L
  source 1..15: note = Severe acute respiratory syndrome coronavirus 2
FRRAFGEYSHVVAFN

SEQ ID NO: 14371 - protein, 11 aa, Severe acute respiratory syndrome-related coronavirus
  REGION 1..11: note = Table B: HLA-DRB1*13:02L HLA-DRB1*01:03L HLA-DRB4*03:01NL HLA-DRB1*08:77L HLA-DQA1*01:01-B1*05:01L HLA-DRB1*09:01L HLA-DPA1*01:03-B1*104:01L HLA-DRB1*07:01L HLA-DRB1*10:01L HLA-DRB1*04:08L HLA-DRB1*08:03L
  source 1..11: note = Severe acute respiratory syndrome coronavirus 2
EYSHVVAFNTL

SEQ ID NO: 14372 - protein, 12 aa, Severe acute respiratory syndrome-related coronavirus
  REGION 1..12: note = Table B: HLA-DRB1*13:02L HLA-DPA1*01:03-B1*03:01L
  source 1..12: note = Severe acute respiratory syndrome coronavirus 2
SHVVAFNTLLFL

SEQ ID NO: 14373 - protein, 11 aa, Severe acute respiratory syndrome-related coronavirus
  REGION 1..11: note = Table B: HLA-DRB1*13:02L HLA-DRB1*04:05L HLA-DRB1*08:02L
  source 1..11: note = Severe acute respiratory syndrome coronavirus 2
SFLPGVYSVIY

SEQ ID NO: 14374 - protein, 12 aa, Severe acute respiratory syndrome-related coronavirus
  REGION 1..12: note = Table B: HLA-DRB1*13:02L HLA-DRB1*01:02L HLA-DRB1*08:04L HLA-DRB3*02:01L HLA-DRB1*12:02L HLA-DRB1*14:54L
  source 1..12: note = Severe acute respiratory syndrome coronavirus 2
TNDVSFLAHIQW

SEQ ID NO: 14375 - protein, 13 aa, Severe acute respiratory syndrome-related coronavirus
  REGION 1..13: note = Table B: HLA-DRB1*13:02L HLA-DRB1*14:01L HLA-DRB3*01:01L
  source 1..13: note = Severe acute respiratory syndrome coronavirus 2
HFYWFFSNYLKRR

SEQ ID NO: 14376 - protein, 14 aa, Severe acute respiratory syndrome-related coronavirus
  REGION 1..14: note = Table B: HLA-DRB1*13:02L HLA-DPA1*03:01-B1*04:02L
  source 1..14: note = Severe acute respiratory syndrome coronavirus 2
FYWFFSNYLKRRVV

SEQ ID NO: 14377 - protein, 15 aa, Severe acute respiratory syndrome-related coronavirus
  REGION 1..15: note = Table B: HLA-DRB1*13:02L HLA-DRB3*01:01L
  source 1..15: note = Severe acute respiratory syndrome coronavirus 2
YWFFSNYLKRRVVFN

SEQ ID NO: 14378 - protein, 15 aa, Severe acute respiratory syndrome-related coronavirus
  REGION 1..15: note = Table B: HLA-DRB1*13:02L HLA-DRB3*01:01L
  source 1..15: note = Severe acute respiratory syndrome coronavirus 2
WFFSNYLKRRVVFNG

SEQ ID NO: 14379 - protein, 14 aa, Severe acute respiratory syndrome-related coronavirus
  REGION 1..14: note = Table B: HLA-DRB1*13:02L HLA-DRB1*04:04L HLA-DPA1*01:03-B1*03:01L HLA-DPA1*02:01-B1*13:01L HLA-DRB1*15:03L
  source 1..14: note = Severe acute respiratory syndrome coronavirus 2
LKRRVVFNGVSFST

SEQ ID NO: 14380 - protein, 13 aa, Severe acute respiratory syndrome-related coronavirus
  REGION 1..13: note = Table B: HLA-DRB1*13:02L HLA-DRB1*08:04L HLA-DRB1*11:04L HLA-DRB1*08:01L HLA-DRB1*11:01L HLA-DPA1*01:03-B1*02:01L
  source 1..13: note = Severe acute respiratory syndrome coronavirus 2
RVVFNGVSFSTFE

SEQ ID NO: 14381 - protein, 14 aa, Severe acute respiratory syndrome-related coronavirus
  REGION 1..14: note = Table B: HLA-DRB1*13:02L HLA-DRB1*08:04L HLA-DRB1*14:01L
  source 1..14: note = Severe acute respiratory syndrome coronavirus 2
VVFNGVSFSTFEEA

SEQ ID NO: 14382 - protein, 13 aa, Severe acute respiratory syndrome-related coronavirus
  REGION 1..13: note = Table B: HLA-DRB1*13:02L HLA-DRB1*04:02L HLA-DRB1*08:04L HLA-DRB3*02:01L HLA-DRB1*14:01L HLA-DRB1*14:02L HLA-DRB1*08:01L HLA-DPA1*01:03-B1*104:01L
  source 1..13: note = Severe acute respiratory syndrome coronavirus 2
NGVSFSTFEEAAL

SEQ ID NO: 14383 - protein, 13 aa, Severe acute respiratory syndrome-related coronavirus
  REGION 1..13: note = Table B: HLA-DRB1*13:02L HLA-DRB1*04:05L HLA-DPA1*01:03-B1*03:01L HLA-DRB1*14:01L HLA-DRB1*08:01L HLA-DPA1*01:03-B1*04:01L HLA-DRB3*01:01L HLA-DPA1*02:01-B1*13:01L HLA-DQA1*03:01-B1*03:02L
  REGION 1..13: note = CONT. FROM ABOVE: HLA-DPA1*01:03-B1*02:01L HLA-DRB1*15:03L
  source 1..13: note = Severe acute respiratory syndrome coronavirus 2
LKLRSDVLLPLTQ

SEQ ID NO: 14384 - protein, 14 aa, Severe acute respiratory syndrome-related coronavirus
  REGION 1..14: note = Table B: HLA-DRB1*13:02L HLA-DPA1*02:01-B1*13:01L
  source 1..14: note = Severe acute respiratory syndrome coronavirus 2
KLRSDVLLPLTQYN

SEQ ID NO: 14385 - protein, 10 aa, Severe acute respiratory syndrome-related coronavirus
  REGION 1..10: note = Table B: HLA-DRB1*13:02L HLA-DRB1*13:03L HLA-DRB4*03:01NL HLA-DRB1*08:01L HLA-DRB1*12:01L HLA-DQA1*03:01-B1*03:02L HLA-DQA1*05:05-B1*03:01L
  source 1..10: note = Severe acute respiratory syndrome coronavirus 2
VLLPLTQYNR

SEQ ID NO: 14386 - protein, 12 aa, Severe acute respiratory syndrome-related coronavirus
  REGION 1..12: note = Table B: HLA-DRB1*13:02L HLA-DRB3*01:01L HLA-DRB1*04:08L
  source 1..12: note = Severe acute respiratory syndrome coronavirus 2
YLALYNKYKYFS

SEQ ID NO: 14387 - protein, 12 aa, Severe acute respiratory syndrome-related coronavirus
  REGION 1..12: note = Table B: HLA-DRB1*13:02L HLA-DRB1*01:03L HLA-DRB1*04:02L HLA-DRB1*04:05L HLA-DQA1*01:02-B1*06:02L HLA-DRB1*01:02L HLA-DRB1*08:04L HLA-DPA1*03:01-B1*04:02L HLA-DRB1*11:03L HLA-DRB1*11:04L HLA-DRB1*08:01L HLA-DRB1*11:01L HLA-DRB1*12:01L
  REGION 1..12: note = CONT. FROM ABOVE: HLA-DRB3*01:01L HLA-DPA1*03:01-B1*105:01L HLA- DPA1*01:02-B1*04:01L HLA-DRB1*16:01L HLA-DRB1*04:08L
  source 1..12: note = Severe acute respiratory syndrome coronavirus 2
LALYNKYKYFSG

SEQ ID NO: 14388 - protein, 14 aa, Severe acute respiratory syndrome-related coronavirus
  REGION 1..14: note = Table B: HLA-DRB1*13:02L HLA-DRB1*01:03L HLA-DQA1*01:02-B1*06:02L HLA-DRB1*01:02L HLA-DPA1*01:03-B1*03:01L HLA-DQA1*01:01-B1*05:01L HLA-DPA1*02:01-B1*13:01L HLA-DPA1*03:01-B1*105:01L
  REGION 1..14: note = CONT. FROM ABOVE: HLA-DQA1*05:05-B1*03:01L HLA-DQA1*01:03-B1*06: 01L
  source 1..14: note = Severe acute respiratory syndrome coronavirus 2
LAKALNDFSNSGSD

SEQ ID NO: 14389 - protein, 13 aa, Severe acute respiratory syndrome-related coronavirus
  REGION 1..13: note = Table B: HLA-DRB1*13:02L HLA-DRB3*02:01L HLA-DPA1*01:03-B1*03:01L HLA-DRB1*04:10L HLA-DRB1*12:02L HLA-DRB1*14:54L HLA-DRB1*04:08L
  source 1..13: note = Severe acute respiratory syndrome coronavirus 2
SDVLYQPPQTSIT

SEQ ID NO: 14390 - protein, 12 aa, Severe acute respiratory syndrome-related coronavirus
  REGION 1..12: note = Table B: HLA-DRB1*13:02L HLA-DRB1*13:03L HLA-DRB1*04:04L HLA-DRB1*14:02L HLA-DRB1*11:01L HLA-DRB1*04:10L HLA-DPA1*01:03-B1*02:01L HLA-DPA1*01:03-B1*104:01L
  source 1..12: note = Severe acute respiratory syndrome coronavirus 2
SITSAVLQSGFR

SEQ ID NO: 14391 - protein, 16 aa, Severe acute respiratory syndrome-related coronavirus
  REGION 1..16: note = Table B: HLA-DRB1*13:02L HLA-DRB1*11:02L HLA-DQA1*05:05-B1*03:19L HLA-DPA1*01:03-B1*04:02L HLA-DRB1*12:01L HLA-DPA1*03:01-B1*105:01L HLA-DRB1*15:03L
  source 1..16: note = Severe acute respiratory syndrome coronavirus 2
SAVLQSGFRKMAFPSG

SEQ ID NO: 14392 - protein, 12 aa, Severe acute respiratory syndrome-related coronavirus
  REGION 1..12: note = Table B: HLA-DRB1*13:02L HLA-DRB1*01:03L HLA-DRB1*01:02L HLA-DRB1*08:04L HLA-DPA1*03:01-B1*04:02L HLA-DRB1*03:01L HLA-DRB1*14:01L HLA-DQA1*05:01-B1*02:01L HLA-DRB3*01:01L HLA-DRB1*16:01L HLA-DRB1*04:08L HLA-DRB1*15:03L
  source 1..12: note = Severe acute respiratory syndrome coronavirus 2
GLWLDDVVYCPR

SEQ ID NO: 14393 - protein, 14 aa, Severe acute respiratory syndrome-related coronavirus
  REGION 1..14: note = Table B: HLA-DRB1*13:02L HLA-DRB1*01:03L HLA-DRB1*01:02L HLA-DRB1*08:01L HLA-DRB3*01:01L HLA-DRB1*04:08L
  source 1..14: note = Severe acute respiratory syndrome coronavirus 2
LDDVVYCPRHVICT

SEQ ID NO: 14394 - protein, 16 aa, Severe acute respiratory syndrome-related coronavirus
  REGION 1..16: note = Table B: HLA-DRB1*13:02L HLA-DRB1*01:03L HLA-DRB1*01:02L HLA-DRB1*11:02L HLA-DRB1*14:02L HLA-DPA1*01:03-B1*04:02L HLA-DRB1*12:01L HLA-DPA1*03:01-B1*105:01L HLA-DRB1*16:01L HLA-DRB1*15:03L
  source 1..16: note = Severe acute respiratory syndrome coronavirus 2
DDVVYCPRHVICTSED

SEQ ID NO: 14395 - protein, 15 aa, Severe acute respiratory syndrome-related coronavirus
  REGION 1..15: note = Table B: HLA-DRB1*13:02L HLA-DRB1*01:03L HLA-DRB1*14:02L
  source 1..15: note = Severe acute respiratory syndrome coronavirus 2
SEDMLNPNYEDLLIR

SEQ ID NO: 14396 - protein, 12 aa, Severe acute respiratory syndrome-related coronavirus
  REGION 1..12: note = Table B: HLA-DRB1*13:02L HLA-DRB1*01:03L HLA-DRB1*04:02L HLA-DRB1*04:05L HLA-DRB1*01:02L HLA-DRB1*08:04L HLA-DRB1*08:01L HLA-DRB1*12:01L HLA-DRB1*14:54L HLA-DRB1*16:01L HLA-DRB1*04:08L HLA-DRB1*15:03L
  source 1..12: note = Severe acute respiratory syndrome coronavirus 2
DLLIRKSNHNFL

SEQ ID NO: 14397 - protein, 13 aa, Severe acute respiratory syndrome-related coronavirus
  REGION 1..13: note = Table B: HLA-DRB1*13:02L HLA-DRB1*16:01L
  source 1..13: note = Severe acute respiratory syndrome coronavirus 2
LLIRKSNHNFLVQ

SEQ ID NO: 14398 - protein, 14 aa, Severe acute respiratory syndrome-related coronavirus
  REGION 1..14: note = Table B: HLA-DRB1*13:02L HLA-DRB1*04:05L HLA-DPA1*02:01-B1*13:01L
  source 1..14: note = Severe acute respiratory syndrome coronavirus 2
LIRKSNHNFLVQAG

SEQ ID NO: 14399 - protein, 12 aa, Severe acute respiratory syndrome-related coronavirus
  REGION 1..12: note = Table B: HLA-DRB1*13:02L HLA-DRB1*04:04L HLA-DRB1*01:02L HLA-DRB1*08:04L HLA-DPA1*03:01-B1*04:02L HLA-DRB1*14:01L HLA-DRB1*12:02L HLA-DPA1*02:01-B1*13:01L HLA-DPA1*01:02-B1*04:01L HLA-DRB1*10:01L HLA-DRB1*08:03L
  REGION 1..12: note = CONT. FROM ABOVE: HLA-DRB1*15:03L
  source 1..12: note = Severe acute respiratory syndrome coronavirus 2
NHNFLVQAGNVQ

SEQ ID NO: 14400 - protein, 12 aa, Severe acute respiratory syndrome-related coronavirus
  REGION 1..12: note = Table B: HLA-DRB1*13:02L HLA-DRB1*13:03L HLA-DRB1*01:03L HLA-DRB1*04:02L HLA-DRB1*04:04L HLA-DRB1*04:05L HLA-DRB1*01:02L HLA-DRB4*03:01NL HLA-DRB1*14:01L HLA-DRB1*08:01L HLA-DRB1*04:10L HLA-DRB1*12:01L HLA-DRB3*01:01L HLA-DRB1*14:54L HLA-DRB1*16:01L
  REGION 1..12: note = CONT. FROM ABOVE: HLA-DRB1*04:08L HLA-DQA1*02:01-B1*03:03L HLA-D RB1*15:03L
  source 1..12: note = Severe acute respiratory syndrome coronavirus 2
VLKLKVDTANPK

SEQ ID NO: 14401 - protein, 12 aa, Severe acute respiratory syndrome-related coronavirus
  REGION 1..12: note = Table B: HLA-DRB1*13:02L HLA-DRB1*01:03L HLA-DRB1*01:02L HLA-DRB1*03:01L HLA-DQA1*05:01-B1*02:01L HLA-DRB1*12:01L HLA-DRB3*01:01L HLA-DRB1*15:03L
  source 1..12: note = Severe acute respiratory syndrome coronavirus 2
KLKVDTANPKTP

SEQ ID NO: 14402 - protein, 10 aa, Severe acute respiratory syndrome-related coronavirus
  REGION 1..10: note = Table B: HLA-DRB1*13:02L HLA-DRB1*13:03L HLA-DRB1*01:03L HLA-DRB1*04:02L HLA-DRB1*01:01L HLA-DRB4*03:01NL HLA-DRB1*14:01L HLA-DRB1*11:04L HLA-DRB1*08:01L HLA-DRB1*12:01L HLA-DRB3*01:01L HLA-DQA1*03:01-B1*03:02L HLA-DQA1*05:05-B1*03:01L
  REGION 1..10: note = CONT. FROM ABOVE: HLA-DRB1*14:17L HLA-DRB1*16:01L HLA-DQA1*02:01 -B1*03:03L
  source 1..10: note = Severe acute respiratory syndrome coronavirus 2
TANPKTPKYK

SEQ ID NO: 14403 - protein, 15 aa, Severe acute respiratory syndrome-related coronavirus
  REGION 1..15: note = Table B: HLA-DRB1*13:02L HLA-DRB1*04:04L HLA-DRB1*01:01L HLA-DRB3*02:01L HLA-DRB1*03:01L HLA-DRB1*11:02L HLA-DRB1*11:03L HLA-DRB1*11:04L HLA-DRB1*14:02L HLA-DQA1*05:01-B1*02:01L HLA-DPA1*01:03-B1*04:01L HLA-DQA1*05:05-B1*03:116L
  REGION 1..15: note = CONT. FROM ABOVE: HLA-DRB1*04:10L HLA-DRB3*01:01L HLA-DRB1*14:54 L HLA-DPA1*01:03-B1*02:01L HLA-DPA1*01:03-B1*104:01L HLA-DRB1*14 :17L HLA-DRB1*07:01L HLA-DRB1*10:01L HLA-DRB1*08:02L HLA-DRB1*08 :03L
  source 1..15: note = Severe acute respiratory syndrome coronavirus 2
SPSGVYQCAMRPNFT

SEQ ID NO: 14404 - protein, 13 aa, Severe acute respiratory syndrome-related coronavirus
  REGION 1..13: note = Table B: HLA-DRB1*13:02L HLA-DRB4*03:01NL HLA-DRB1*11:03L HLA-DRB1*11:04L HLA-DRB1*14:02L HLA-DRB1*11:01L HLA-DRB1*04:10L HLA-DRB3*01:01L HLA-DPA1*02:01-B1*13:01L HLA-DRB1*14:54L HLA-DPA1*01:02-B1*04:01L HLA-DRB1*10:01L HLA-DRB1*08:02L
  REGION 1..13: note = CONT. FROM ABOVE: HLA-DRB1*15:03L
  source 1..13: note = Severe acute respiratory syndrome coronavirus 2
RPNFTIKGSFLNG

SEQ ID NO: 14405 - protein, 14 aa, Severe acute respiratory syndrome-related coronavirus
  REGION 1..14: note = Table B: HLA-DRB1*13:02L HLA-DRB1*04:04L HLA-DRB1*01:02L HLA-DRB1*08:77L HLA-DRB1*14:02L HLA-DRB1*08:01L HLA-DQA1*05:05-B1*03:116L HLA-DPA1*01:03-B1*04:02L HLA-DRB3*01:01L HLA-DPA1*02:01-B1*13:01L
  REGION 1..14: note = CONT. FROM ABOVE: HLA-DPA1*03:01-B1*105:01L HLA-DRB1*14:54L HLA- DPA1*01:03-B1*104:01L HLA-DRB1*07:01L HLA-DRB1*15:03L
  source 1..14: note = Severe acute respiratory syndrome coronavirus 2
LPTGVHAGTDLEGN

SEQ ID NO: 14406 - protein, 12 aa, Severe acute respiratory syndrome-related coronavirus
  REGION 1..12: note = Table B: HLA-DRB1*13:02L HLA-DRB3*02:01L HLA-DPA1*03:01-B1*04:02L HLA-DRB4*01:01L HLA-DQA1*05:05-B1*03:116L HLA-DPA1*02:01-B1*13:01L HLA-DQA1*05:05-B1*03:01L HLA-DPA1*01:02-B1*04:01L
  source 1..12: note = Severe acute respiratory syndrome coronavirus 2
VHAGTDLEGNFY

SEQ ID NO: 14407 - protein, 15 aa, Severe acute respiratory syndrome-related coronavirus
  REGION 1..15: note = Table B: HLA-DRB1*13:02L HLA-DRB1*08:04L HLA-DPA1*01:03-B1*03:01L HLA-DRB1*14:01L
  source 1..15: note = Severe acute respiratory syndrome coronavirus 2
GTDLEGNFYGPFVDR

SEQ ID NO: 14408 - protein, 14 aa, Severe acute respiratory syndrome-related coronavirus
  REGION 1..14: note = Table B: HLA-DRB1*13:02L HLA-DRB1*04:04L HLA-DQA1*01:01-B1*05:01L HLA-DRB1*04:10L HLA-DPA1*01:03-B1*04:02L
  source 1..14: note = Severe acute respiratory syndrome coronavirus 2
GNFYGPFVDRQTAQ

SEQ ID NO: 14409 - protein, 14 aa, Severe acute respiratory syndrome-related coronavirus
  REGION 1..14: note = Table B: HLA-DRB1*13:02L HLA-DRB1*13:03L HLA-DRB1*01:03L HLA-DRB1*04:02L HLA-DRB1*04:05L HLA-DRB4*03:01NL HLA-DPA1*01:03-B1*03:01L HLA-DRB1*12:01L HLA-DPA1*03:01-B1*105:01L HLA-DRB1*14:17L HLA-DRB1*04:08L
  source 1..14: note = Severe acute respiratory syndrome coronavirus 2
TAQAAGTDTTITVN

SEQ ID NO: 14410 - protein, 14 aa, Severe acute respiratory syndrome-related coronavirus
  REGION 1..14: note = Table B: HLA-DRB1*13:02L HLA-DRB1*04:04L HLA-DRB1*08:04L HLA-DPA1*03:01-B1*04:02L HLA-DRB1*14:02L HLA-DQA1*01-B1*05L HLA-DPA1*02:01-B1*13:01L HLA-DPA1*01:03-B1*104:01L
  source 1..14: note = Severe acute respiratory syndrome coronavirus 2
VLAWLYAAVINGDR

SEQ ID NO: 14411 - protein, 14 aa, Severe acute respiratory syndrome-related coronavirus
  REGION 1..14: note = Table B: HLA-DRB1*13:02L
  source 1..14: note = Severe acute respiratory syndrome coronavirus 2
AWLYAAVINGDRWF

SEQ ID NO: 14412 - protein, 14 aa, Severe acute respiratory syndrome-related coronavirus
  REGION 1..14: note = Table B: HLA-DRB1*13:02L HLA-DRB1*04:05L HLA-DRB1*08:01L HLA-DRB3*01:01L
  source 1..14: note = Severe acute respiratory syndrome coronavirus 2
AVINGDRWFLNRFT

SEQ ID NO: 14413 - protein, 14 aa, Severe acute respiratory syndrome-related coronavirus
  REGION 1..14: note = Table B: HLA-DRB1*13:02L HLA-DRB1*13:03L HLA-DRB1*04:04L HLA-DPA1*01:03-B1*03:01L HLA-DRB1*11:04L HLA-DRB1*14:02L HLA-DRB3*01:01L HLA-DPA1*01:03-B1*104:01L HLA-DRB1*08:03L
  source 1..14: note = Severe acute respiratory syndrome coronavirus 2
GDRWFLNRFTTTLN

SEQ ID NO: 14414 - protein, 14 aa, Severe acute respiratory syndrome-related coronavirus
  REGION 1..14: note = Table B: HLA-DRB1*13:02L HLA-DRB1*04:04L HLA-DRB1*04:05L HLA-DPA1*01:03-B1*03:01L HLA-DRB1*14:01L HLA-DRB1*11:04L HLA-DRB3*01:01L
  source 1..14: note = Severe acute respiratory syndrome coronavirus 2
DRWFLNRFTTTLND

SEQ ID NO: 14415 - protein, 14 aa, Severe acute respiratory syndrome-related coronavirus
  REGION 1..14: note = Table B: HLA-DRB1*13:02L HLA-DRB1*04:04L HLA-DRB1*11:04L HLA-DRB1*14:02L HLA-DRB1*11:01L HLA-DPA1*01:03-B1*104:01L HLA-DRB1*14:17L HLA-DRB1*08:03L
  source 1..14: note = Severe acute respiratory syndrome coronavirus 2
DFNLVAMKYNYEPL

SEQ ID NO: 14416 - protein, 12 aa, Severe acute respiratory syndrome-related coronavirus
  REGION 1..12: note = Table B: HLA-DRB1*13:02L HLA-DRB1*01:02L HLA-DRB1*08:04L HLA-DRB3*02:01L HLA-DPA1*01:03-B1*03:01L HLA-DPA1*03:01-B1*04:02L HLA-DRB1*14:01L HLA-DRB1*14:02L HLA-DQA1*01:01-B1*05:01L HLA-DRB1*08:01L
  REGION 1..12: note = CONT. FROM ABOVE: HLA-DPA1*01:03-B1*04:01L HLA-DRB1*09:01L HLA-D PA1*01:03-B1*04:02L HLA-DPA1*02:01-B1*13:01L HLA-DRB1*14:54L HLA -DPA1*01:03-B1*104:01L HLA-DQA1*05:05-B1*03:01L HLA-DRB1*10:01L HLA-DRB1*08:03L
  source 1..12: note = Severe acute respiratory syndrome coronavirus 2
YNYEPLTQDHVD

SEQ ID NO: 14417 - protein, 14 aa, Severe acute respiratory syndrome-related coronavirus
  REGION 1..14: note = Table B: HLA-DRB1*13:02L HLA-DRB1*01:01L HLA-DRB1*14:02L HLA-DPA1*01:03-B1*04:02L HLA-DPA1*02:01-B1*13:01L HLA-DPA1*01:03-B1*104:01L HLA-DRB1*15:03L
  source 1..14: note = Severe acute respiratory syndrome coronavirus 2
VDILGPLSAQTGIA

SEQ ID NO: 14418 - protein, 10 aa, Severe acute respiratory syndrome-related coronavirus
  REGION 1..10: note = Table B: HLA-DRB1*13:02L HLA-DRB1*13:03M HLA-DRB1*01:01L HLA-DRB4*03:01NL HLA-DRB3*02:01L HLA-DRB1*11:04L HLA-DRB1*08:01M HLA-DRB5*01:01L HLA-DRB1*12:01M HLA-DRB1*12:02L HLA-DQA1*03:01-B1*03:02M HLA-DQA1*05:05-B1*03:01M
  REGION 1..10: note = CONT. FROM ABOVE: HLA-DRB1*14:17L HLA-DRB1*08:02L
  source 1..10: note = Severe acute respiratory syndrome coronavirus 2
ELLQNGMNGR

SEQ ID NO: 14419 - protein, 13 aa, Severe acute respiratory syndrome-related coronavirus
  REGION 1..13: note = Table B: HLA-DRB1*13:02L HLA-DRB1*13:03L HLA-DRB1*04:02L HLA-DRB1*04:05L HLA-DRB4*03:01NL HLA-DRB1*08:04L HLA-DRB1*14:01L HLA-DQA1*05:05-B1*03:19L HLA-DRB1*04:10L HLA-DPA1*02:01-B1*13:01L HLA-DPA1*01:03-B1*02:01L
  REGION 1..13: note = CONT. FROM ABOVE: HLA-DPA1*01:03-B1*104:01L HLA-DRB1*14:17L
  source 1..13: note = Severe acute respiratory syndrome coronavirus 2
GRTILGSALLEDE

SEQ ID NO: 14420 - protein, 13 aa, Severe acute respiratory syndrome-related coronavirus
  REGION 1..13: note = Table B: HLA-DRB1*13:02L HLA-DRB1*04:02L HLA-DRB1*08:04L HLA-DRB1*11:03L HLA-DRB3*01:01L HLA-DPA1*03:01-B1*105:01L HLA-DRB1*14:54L HLA-DQA1*01:03-B1*06:01L HLA-DRB1*08:03L
  source 1..13: note = Severe acute respiratory syndrome coronavirus 2
GVTFQSAVKRTIK

SEQ ID NO: 14421 - protein, 13 aa, Severe acute respiratory syndrome-related coronavirus
  REGION 1..13: note = Table B: HLA-DRB1*13:02L HLA-DRB1*04:02L HLA-DRB1*11:03L HLA-DRB3*01:01L
  source 1..13: note = Severe acute respiratory syndrome coronavirus 2
VTFQSAVKRTIKG

SEQ ID NO: 14422 - protein, 10 aa, Severe acute respiratory syndrome-related coronavirus
  REGION 1..10: note = Table B: HLA-DRB1*13:02L HLA-DRB1*01:03L HLA-DRB1*08:01L HLA-DQA1*03:01-B1*03:02L HLA-DRB1*16:01L HLA-DQA1*02:01-B1*03:03L
  source 1..10: note = Severe acute respiratory syndrome coronavirus 2
RTIKGTHHWL

SEQ ID NO: 14423 - protein, 12 aa, Severe acute respiratory syndrome-related coronavirus
  REGION 1..12: note = Table B: HLA-DRB1*13:02L HLA-DRB1*01:03L HLA-DRB1*01:02L HLA-DRB1*08:04L HLA-DRB1*14:01L HLA-DRB1*11:04L HLA-DRB1*08:01L HLA-DRB1*11:01L HLA-DRB1*12:01L HLA-DRB3*01:01L HLA-DRB1*16:01L HLA-DRB1*04:08L HLA-DRB1*15:03L
  source 1..12: note = Severe acute respiratory syndrome coronavirus 2
AMMFVKHKHAFL

SEQ ID NO: 14424 - protein, 10 aa, Severe acute respiratory syndrome-related coronavirus
  REGION 1..10: note = Table B: HLA-DRB1*13:02L HLA-DRB1*13:03L HLA-DRB1*04:02L HLA-DRB1*01:01L HLA-DRB4*03:01NL HLA-DRB1*08:01L HLA-DRB1*12:01L HLA-DQA1*03:01-B1*03:02L HLA-DQA1*05:05-B1*03:01L HLA-DRB1*14:17L HLA-DRB1*16:01L HLA-DQA1*01:03-B1*06:01L
  REGION 1..10: note = CONT. FROM ABOVE: HLA-DQA1*02:01-B1*03:03L
  source 1..10: note = Severe acute respiratory syndrome coronavirus 2
VYMPASWVMR

SEQ ID NO: 14425 - protein, 10 aa, Severe acute respiratory syndrome-related coronavirus
  REGION 1..10: note = Table B: HLA-DRB1*13:02L HLA-DRB1*13:03L HLA-DRB4*03:01NL HLA-DRB1*08:01L HLA-DRB5*01:01L HLA-DRB1*12:01L HLA-DQA1*03:01-B1*03:02L HLA-DQA1*05:05-B1*03:01L HLA-DQA1*02:01-B1*03:03L
  source 1..10: note = Severe acute respiratory syndrome coronavirus 2
DTSLSGFKLK

SEQ ID NO: 14426 - protein, 10 aa, Severe acute respiratory syndrome-related coronavirus
  REGION 1..10: note = Table B: HLA-DRB1*13:02L HLA-DRB1*13:03L HLA-DRB1*01:03L HLA-DRB1*08:01L HLA-DRB1*12:01L HLA-DQA1*03:01-B1*03:02L HLA-DRB1*16:01L
  source 1..10: note = Severe acute respiratory syndrome coronavirus 2
RTVYDDGARR

SEQ ID NO: 14427 - protein, 13 aa, Severe acute respiratory syndrome-related coronavirus
  REGION 1..13: note = Table B: HLA-DRB1*13:02L HLA-DRB1*04:04L HLA-DRB1*01:02L HLA-DPA1*01:03-B1*03:01L HLA-DPA1*03:01-B1*105:01L HLA-DPA1*01:03-B1*104:01L HLA-DRB1*07:01L HLA-DRB1*16:01L HLA-DRB1*04:08L HLA-DRB1*15:03L
  source 1..13: note = Severe acute respiratory syndrome coronavirus 2
GARRVWTLMNVLT

SEQ ID NO: 14428 - protein, 14 aa, Severe acute respiratory syndrome-related coronavirus
  REGION 1..14: note = Table B: HLA-DRB1*13:02L HLA-DRB1*01:03L HLA-DRB1*01:01L HLA-DQA1*05:05-B1*03:01L HLA-DRB1*04:08L
  source 1..14: note = Severe acute respiratory syndrome coronavirus 2
RVWTLMNVLTLVYK

SEQ ID NO: 14429 - protein, 12 aa, Severe acute respiratory syndrome-related coronavirus
  REGION 1..12: note = Table B: HLA-DRB1*13:02L HLA-DRB1*08:04L HLA-DRB1*14:54L
  source 1..12: note = Severe acute respiratory syndrome coronavirus 2
NVLTLVYKVYYG

SEQ ID NO: 14430 - protein, 12 aa, Severe acute respiratory syndrome-related coronavirus
  REGION 1..12: note = Table B: HLA-DRB1*13:02L HLA-DRB1*01:03L HLA-DRB1*04:02L HLA-DRB1*04:05L HLA-DPA1*01:03-B1*03:01L HLA-DPA1*01:03-B1*04:01L HLA-DRB1*09:01L HLA-DPA1*02:01-B1*13:01L
  source 1..12: note = Severe acute respiratory syndrome coronavirus 2
TLVYKVYYGNAL

SEQ ID NO: 14431 - protein, 12 aa, Severe acute respiratory syndrome-related coronavirus
  REGION 1..12: note = Table B: HLA-DRB1*13:02L HLA-DRB1*01:03L HLA-DRB1*04:02L HLA-DRB1*04:05L HLA-DQA1*01:02-B1*06:02L HLA-DPA1*01:03-B1*03:01L HLA-DRB1*08:01L HLA-DQA1*05:05-B1*03:19L HLA-DPA1*01:03-B1*04:01L
  REGION 1..12: note = CONT. FROM ABOVE: HLA-DPA1*02:01-B1*13:01L HLA-DQA1*05:05-B1*03: 01L HLA-DRB1*14:17L HLA-DRB1*15:01L
  source 1..12: note = Severe acute respiratory syndrome coronavirus 2
LVYKVYYGNALD

SEQ ID NO: 14432 - protein, 12 aa, Severe acute respiratory syndrome-related coronavirus
  REGION 1..12: note = Table B: HLA-DRB1*13:02L HLA-DRB1*04:04L HLA-DQA1*01:02-B1*06:02L HLA-DRB1*01:01L HLA-DRB3*02:01L HLA-DPA1*01:03-B1*03:01L HLA-DPA1*03:01-B1*04:02L HLA-DRB1*11:03L HLA-DRB1*14:02L HLA-DRB1*08:01L
  REGION 1..12: note = CONT. FROM ABOVE: HLA-DQA1*05:05-B1*03:19L HLA-DRB1*04:10L HLA-D PA1*02:01-B1*13:01L HLA-DQA1*05:05-B1*03:01L HLA-DRB1*07:01L HLA -DRB1*08:03L
  source 1..12: note = Severe acute respiratory syndrome coronavirus 2
YKVYYGNALDQA

SEQ ID NO: 14433 - protein, 12 aa, Severe acute respiratory syndrome-related coronavirus
  REGION 1..12: note = Table B: HLA-DRB1*13:02L HLA-DRB1*01:02L HLA-DRB1*08:04L HLA-DRB1*14:01L HLA-DRB1*11:03L HLA-DQA1*01-B1*05L HLA-DRB1*12:02L HLA-DQA1*05:05-B1*03:01L
  source 1..12: note = Severe acute respiratory syndrome coronavirus 2
ALIISVTSNYSG

SEQ ID NO: 14434 - protein, 15 aa, Severe acute respiratory syndrome-related coronavirus
  REGION 1..15: note = Table B: HLA-DRB1*13:02L HLA-DPA1*02:01-B1*13:01L HLA-DPA1*01:03-B1*104:01L
  source 1..15: note = Severe acute respiratory syndrome coronavirus 2
SGVVTTVMFLARGIV

SEQ ID NO: 14435 - protein, 12 aa, Severe acute respiratory syndrome-related coronavirus
  REGION 1..12: note = Table B: HLA-DRB1*13:02L HLA-DRB1*13:03L HLA-DRB1*01:03L HLA-DRB1*04:05L HLA-DRB1*01:02L HLA-DRB4*03:01NL HLA-DRB1*08:04L HLA-DRB3*02:01L HLA-DPA1*01:03-B1*03:01L HLA-DRB1*14:01L HLA-DRB1*11:03L HLA-DRB1*11:04L HLA-DRB1*08:01L
  REGION 1..12: note = CONT. FROM ABOVE: HLA-DPA1*01:03-B1*04:01L HLA-DRB1*12:02L HLA-D RB3*01:01L HLA-DPA1*02:01-B1*13:01L HLA-DPA1*03:01-B1*105:01L HL A-DRB1*14:54L HLA-DQA1*01:03-B1*06:01L HLA-DRB1*04:08L
  source 1..12: note = Severe acute respiratory syndrome coronavirus 2
TQEFRYMNSQGL

SEQ ID NO: 14436 - protein, 13 aa, Severe acute respiratory syndrome-related coronavirus
  REGION 1..13: note = Table B: HLA-DRB1*13:02L HLA-DRB1*01:02L HLA-DRB1*11:02L HLA-DRB1*11:03L HLA-DRB1*14:02L HLA-DQA1*05:05-B1*03:116L HLA-DPA1*01:03-B1*04:02L HLA-DRB3*01:01L HLA-DRB1*04:08L HLA-DRB1*08:02L HLA-DRB1*15:03L
  source 1..13: note = Severe acute respiratory syndrome coronavirus 2
DAFKLNIKLLGVG

SEQ ID NO: 14437 - protein, 14 aa, Severe acute respiratory syndrome-related coronavirus
  REGION 1..14: note = Table B: HLA-DRB1*13:02L HLA-DRB1*04:05L HLA-DPA1*01:03-B1*03:01L HLA-DRB1*08:01L HLA-DRB3*01:01L HLA-DPA1*03:01-B1*105:01L HLA-DPA1*01:02-B1*04:01L
  source 1..14: note = Severe acute respiratory syndrome coronavirus 2
FKLNIKLLGVGGKP

SEQ ID NO: 14438 - protein, 14 aa, Severe acute respiratory syndrome-related coronavirus
  REGION 1..14: note = Table B: HLA-DRB1*13:02L HLA-DRB1*01:02L
  source 1..14: note = Severe acute respiratory syndrome coronavirus 2
VGGKPCIKVATVQS

SEQ ID NO: 14439 - protein, 13 aa, Severe acute respiratory syndrome-related coronavirus
  REGION 1..13: note = Table B: HLA-DRB1*13:02L HLA-DRB1*04:05L HLA-DQA1*01:02-B1*06:02L HLA-DRB1*01:02L HLA-DPA1*01:03-B1*03:01L HLA-DRB1*12:01L HLA-DPA1*02:01-B1*13:01L HLA-DPA1*01:03-B1*104:01L
  source 1..13: note = Severe acute respiratory syndrome coronavirus 2
SSSKLWAQCVQLH

SEQ ID NO: 14440 - protein, 13 aa, Severe acute respiratory syndrome-related coronavirus
  REGION 1..13: note = Table B: HLA-DRB1*13:02L HLA-DRB1*12:01L HLA-DPA1*03:01-B1*105:01L HLA-DQA1*03:01-B1*03:02L HLA-DPA1*01:03-B1*104:01L HLA-DRB1*16:01L HLA-DQA1*02:01-B1*03:03L
  source 1..13: note = Severe acute respiratory syndrome coronavirus 2
SSKLWAQCVQLHN

SEQ ID NO: 14441 - protein, 12 aa, Severe acute respiratory syndrome-related coronavirus
  REGION 1..12: note = Table B: HLA-DRB1*13:02L HLA-DRB1*08:04L HLA-DRB1*12:02L
  source 1..12: note = Severe acute respiratory syndrome coronavirus 2
DILLAKDTTEAF

SEQ ID NO: 14442 - protein, 12 aa, Severe acute respiratory syndrome-related coronavirus
  REGION 1..12: note = Table B: HLA-DRB1*13:02L HLA-DRB1*04:04L HLA-DRB1*01:02L HLA-DRB1*08:04L HLA-DRB3*02:01L HLA-DPA1*01:03-B1*03:01L HLA-DRB1*03:01L HLA-DRB4*01:01L HLA-DRB3*01:01L HLA-DRB1*10:01L HLA-DRB1*04:08L
  source 1..12: note = Severe acute respiratory syndrome coronavirus 2
ILLAKDTTEAFE

SEQ ID NO: 14443 - protein, 14 aa, Severe acute respiratory syndrome-related coronavirus
  REGION 1..14: note = Table B: HLA-DRB1*13:02L HLA-DRB3*02:01L HLA-DPA1*03:01-B1*04:02L HLA-DRB1*14:01L
  source 1..14: note = Severe acute respiratory syndrome coronavirus 2
AVDINKLCEEMLDN

SEQ ID NO: 14444 - protein, 13 aa, Severe acute respiratory syndrome-related coronavirus
  REGION 1..13: note = Table B: HLA-DRB1*13:02L HLA-DPA1*03:01-B1*105:01L HLA-DPA1*01:03-B1*104:01L
  source 1..13: note = Severe acute respiratory syndrome coronavirus 2
DINKLCEEMLDNR

SEQ ID NO: 14445 - protein, 12 aa, Severe acute respiratory syndrome-related coronavirus
  REGION 1..12: note = Table B: HLA-DRB1*13:02L HLA-DRB4*03:01NL HLA-DRB1*14:54L
  source 1..12: note = Severe acute respiratory syndrome coronavirus 2
EEMLDNRATLQA

SEQ ID NO: 14446 - protein, 13 aa, Severe acute respiratory syndrome-related coronavirus
  REGION 1..13: note = Table B: HLA-DRB1*13:02L
  source 1..13: note = Severe acute respiratory syndrome coronavirus 2
DNRATLQAIASEF

SEQ ID NO: 14447 - protein, 13 aa, Severe acute respiratory syndrome-related coronavirus
  REGION 1..13: note = Table B: HLA-DRB1*13:02L HLA-DRB1*01:03L HLA-DRB1*04:04L HLA-DRB1*01:02L HLA-DPA1*03:01-B1*04:02L HLA-DRB1*11:03L HLA-DRB1*11:04L HLA-DRB1*09:01L HLA-DRB1*12:02L HLA-DQA1*05:05-B1*03:01L HLA-DRB1*08:03L
  source 1..13: note = Severe acute respiratory syndrome coronavirus 2
IASEFSSLPSYAA

SEQ ID NO: 14448 - protein, 13 aa, Severe acute respiratory syndrome-related coronavirus
  REGION 1..13: note = Table B: HLA-DRB1*13:02L HLA-DRB1*08:04L HLA-DRB1*08:77L HLA-DRB1*11:04L HLA-DRB1*11:01L HLA-DRB1*09:01L HLA-DRB1*08:03L
  source 1..13: note = Severe acute respiratory syndrome coronavirus 2
SEFSSLPSYAAFA

SEQ ID NO: 14449 - protein, 12 aa, Severe acute respiratory syndrome-related coronavirus
  REGION 1..12: note = Table B: HLA-DRB1*13:02L HLA-DRB1*04:02L HLA-DRB1*04:04L HLA-DRB1*04:05L HLA-DRB1*01:02L HLA-DRB4*03:01NL HLA-DRB1*08:04L HLA-DRB3*02:01L HLA-DPA1*03:01-B1*04:02L HLA-DQA1*01:01-B1*05:01L HLA-DRB1*08:01L HLA-DQA1*01-B1*05L
  REGION 1..12: note = CONT. FROM ABOVE: HLA-DRB1*04:10L HLA-DRB1*12:01L HLA-DRB1*12:02 L HLA-DRB1*14:54L HLA-DPA1*01:03-B1*104:01L HLA-DRB1*14:17L HLA- DRB1*10:01L HLA-DRB1*04:08L HLA-DRB1*08:03L
  source 1..12: note = Severe acute respiratory syndrome coronavirus 2
YAAFATAQEAYE

SEQ ID NO: 14450 - protein, 12 aa, Severe acute respiratory syndrome-related coronavirus
  REGION 1..12: note = Table B: HLA-DRB1*13:02L HLA-DRB1*04:04L HLA-DQA1*01:02-B1*06:02L HLA-DRB1*01:02L HLA-DRB1*08:04L HLA-DRB1*08:77L HLA-DPA1*01:03-B1*03:01L HLA-DRB1*11:03L HLA-DRB1*11:04L HLA-DQA1*01:01-B1*05:01L HLA-DRB5*01:01L
  REGION 1..12: note = CONT. FROM ABOVE: HLA-DQA1*05:05-B1*03:19L HLA-DRB1*12:02L HLA-D PA1*03:01-B1*105:01L HLA-DQA1*01:03-B1*06:01L
  source 1..12: note = Severe acute respiratory syndrome coronavirus 2
AYEQAVANGDSE

SEQ ID NO: 14451 - protein, 13 aa, Severe acute respiratory syndrome-related coronavirus
  REGION 1..13: note = Table B: HLA-DRB1*13:02L HLA-DRB1*01:03L HLA-DRB1*08:77L HLA-DPA1*01:03-B1*03:01L HLA-DRB1*14:02L HLA-DQA1*01:01-B1*05:01L HLA-DPA1*02:01-B1*13:01L HLA-DPA1*03:01-B1*105:01L HLA-DRB1*04:08L HLA-DRB1*15:03L
  source 1..13: note = Severe acute respiratory syndrome coronavirus 2
YEQAVANGDSEVV

SEQ ID NO: 14452 - protein, 14 aa, Severe acute respiratory syndrome-related coronavirus
  REGION 1..14: note = Table B: HLA-DRB1*13:02L HLA-DRB1*04:05L HLA-DRB1*11:02L HLA-DRB1*11:03L HLA-DRB1*14:54L HLA-DRB1*08:02L HLA-DRB1*08:03L HLA-DRB1*15:03L
  source 1..14: note = Severe acute respiratory syndrome coronavirus 2
EVVLKKLKKSLNVA

SEQ ID NO: 14453 - protein, 14 aa, Severe acute respiratory syndrome-related coronavirus
  REGION 1..14: note = Table B: HLA-DRB1*13:02L HLA-DRB1*04:04L HLA-DRB1*04:05L HLA-DRB1*11:03L HLA-DPA1*02:01-B1*13:01L HLA-DRB1*07:01L HLA-DRB1*08:03L HLA-DRB1*15:03L
  source 1..14: note = Severe acute respiratory syndrome coronavirus 2
VVLKKLKKSLNVAK

SEQ ID NO: 14454 - protein, 13 aa, Severe acute respiratory syndrome-related coronavirus
  REGION 1..13: note = Table B: HLA-DRB1*13:02L HLA-DPA1*01:03-B1*03:01L HLA-DPA1*01:02-B1*04:01L HLA-DRB1*07:01L HLA-DQA1*02:01-B1*03:03L HLA-DRB1*15:03L
  source 1..13: note = Severe acute respiratory syndrome coronavirus 2
KKLKKSLNVAKSE

SEQ ID NO: 14455 - protein, 14 aa, Severe acute respiratory syndrome-related coronavirus
  REGION 1..14: note = Table B: HLA-DRB1*13:02L HLA-DPA1*01:03-B1*104:01L HLA-DRB1*07:01L HLA-DRB1*15:03L
  source 1..14: note = Severe acute respiratory syndrome coronavirus 2
KLKKSLNVAKSEFD

SEQ ID NO: 14456 - protein, 15 aa, Severe acute respiratory syndrome-related coronavirus
  REGION 1..15: note = Table B: HLA-DRB1*13:02L HLA-DPA1*01:03-B1*03:01L HLA-DRB1*11:01L
  source 1..15: note = Severe acute respiratory syndrome coronavirus 2
KKSLNVAKSEFDRDA

SEQ ID NO: 14457 - protein, 14 aa, Severe acute respiratory syndrome-related coronavirus
  REGION 1..14: note = Table B: HLA-DRB1*13:02L HLA-DRB1*04:04L HLA-DRB1*08:04L HLA-DPA1*01:03-B1*03:01L HLA-DRB1*11:04L HLA-DQA1*05:05-B1*03:19L HLA-DRB3*01:01L HLA-DRB1*08:03L
  source 1..14: note = Severe acute respiratory syndrome coronavirus 2
SLNVAKSEFDRDAA

SEQ ID NO: 14458 - protein, 10 aa, Severe acute respiratory syndrome-related coronavirus
  REGION 1..10: note = Table B: HLA-DRB1*13:02L HLA-DRB1*13:03L HLA-DRB4*03:01NL HLA-DRB1*08:01L HLA-DRB5*01:01L HLA-DRB1*12:01L HLA-DQA1*03:01-B1*03:02L HLA-DQA1*05:05-B1*03:01L HLA-DRB1*14:17L
  source 1..10: note = Severe acute respiratory syndrome coronavirus 2
EFDRDAAMQR

SEQ ID NO: 14459 - protein, 16 aa, Severe acute respiratory syndrome-related coronavirus
  REGION 1..16: note = Table B: HLA-DRB1*13:02L HLA-DRB1*04:05L HLA-DRB1*08:04L HLA-DRB1*12:01L HLA-DRB3*01:01L HLA-DPA1*02:01-B1*13:01L HLA-DRB1*15:03L
  source 1..16: note = Severe acute respiratory syndrome coronavirus 2
DRDAAMQRKLEKMADQ

SEQ ID NO: 14460 - protein, 14 aa, Severe acute respiratory syndrome-related coronavirus
  REGION 1..14: note = Table B: HLA-DRB1*13:02L HLA-DQA1*01:02-B1*06:02L
  source 1..14: note = Severe acute respiratory syndrome coronavirus 2
MQRKLEKMADQAMT

SEQ ID NO: 14461 - protein, 12 aa, Severe acute respiratory syndrome-related coronavirus
  REGION 1..12: note = Table B: HLA-DRB1*13:02L HLA-DRB1*13:03L HLA-DRB1*01:03L HLA-DRB1*04:04L HLA-DQA1*01:02-B1*06:02L HLA-DRB1*01:02L HLA-DPA1*01:03-B1*03:01L HLA-DRB1*14:01L HLA-DPA1*02:01-B1*13:01L HLA-DPA1*01:03-B1*104:01L
  REGION 1..12: note = CONT. FROM ABOVE: HLA-DRB1*07:01L HLA-DRB1*04:08L HLA-DRB1*15:03 L
  source 1..12: note = Severe acute respiratory syndrome coronavirus 2
KLEKMADQAMTQ

SEQ ID NO: 14462 - protein, 14 aa, Severe acute respiratory syndrome-related coronavirus
  REGION 1..14: note = Table B: HLA-DRB1*13:02L HLA-DRB1*04:05L HLA-DRB1*08:04L HLA-DRB1*03:01L HLA-DRB1*11:04L HLA-DRB1*08:01L HLA-DRB1*13:01L HLA-DRB3*01:01L HLA-DPA1*03:01-B1*105:01L HLA-DRB1*04:08L
  source 1..14: note = Severe acute respiratory syndrome coronavirus 2
QAMTQMYKQARSED

SEQ ID NO: 14463 - protein, 16 aa, Severe acute respiratory syndrome-related coronavirus
  REGION 1..16: note = Table B: HLA-DRB1*13:02L HLA-DPA1*01:03-B1*104:01L
  source 1..16: note = Severe acute respiratory syndrome coronavirus 2
DKRAKVTSAMQTMLFT

SEQ ID NO: 14464 - protein, 14 aa, Severe acute respiratory syndrome-related coronavirus
  REGION 1..14: note = Table B: HLA-DRB1*13:02L HLA-DPA1*02:01-B1*13:01L
  source 1..14: note = Severe acute respiratory syndrome coronavirus 2
MQTMLFTMLRKLDN

SEQ ID NO: 14465 - protein, 14 aa, Severe acute respiratory syndrome-related coronavirus
  REGION 1..14: note = Table B: HLA-DRB1*13:02L
  source 1..14: note = Severe acute respiratory syndrome coronavirus 2
QTMLFTMLRKLDND

SEQ ID NO: 14466 - protein, 14 aa, Severe acute respiratory syndrome-related coronavirus
  REGION 1..14: note = Table B: HLA-DRB1*13:02L HLA-DQA1*05:05-B1*03:116L HLA-DRB3*01:01L HLA-DPA1*02:01-B1*13:01L HLA-DPA1*01:03-B1*02:01L HLA-DRB1*08:02L
  source 1..14: note = Severe acute respiratory syndrome coronavirus 2
TMLFTMLRKLDNDA

SEQ ID NO: 14467 - protein, 13 aa, Severe acute respiratory syndrome-related coronavirus
  REGION 1..13: note = Table B: HLA-DRB1*13:02L HLA-DRB1*13:03L HLA-DRB1*01:03L HLA-DRB1*04:05L HLA-DRB1*01:02L HLA-DPA1*03:01-B1*04:02L HLA-DRB1*14:01L HLA-DQA1*01:01-B1*05:01L HLA-DRB1*08:01L HLA-DRB1*12:01L HLA-DRB3*01:01L HLA-DPA1*02:01-B1*13:01L
  REGION 1..13: note = CONT. FROM ABOVE: HLA-DQA1*05:05-B1*03:01L HLA-DPA1*01:02-B1*04: 01L HLA-DRB1*04:08L
  source 1..13: note = Severe acute respiratory syndrome coronavirus 2
RKLDNDALNNIIN

SEQ ID NO: 14468 - protein, 10 aa, Severe acute respiratory syndrome-related coronavirus
  REGION 1..10: note = Table B: HLA-DRB1*13:02L HLA-DRB1*13:03L HLA-DRB1*01:01L HLA-DRB4*03:01NL HLA-DRB3*02:01L HLA-DRB1*11:04L HLA-DRB1*08:01L HLA-DRB5*01:01L HLA-DPA1*01:03-B1*04:02L HLA-DRB1*12:01L HLA-DRB1*12:02L HLA-DQA1*03:01-B1*03:02M
  REGION 1..10: note = CONT. FROM ABOVE: HLA-DQA1*05:05-B1*03:01L HLA-DRB1*14:17L HLA-D QA1*02:01-B1*03:03L
  source 1..10: note = Severe acute respiratory syndrome coronavirus 2
ALNNIINNAR

SEQ ID NO: 14469 - protein, 13 aa, Severe acute respiratory syndrome-related coronavirus
  REGION 1..13: note = Table B: HLA-DRB1*13:02L HLA-DRB1*01:02L HLA-DRB1*08:04L HLA-DPA1*01:03-B1*03:01L HLA-DRB3*01:01L
  source 1..13: note = Severe acute respiratory syndrome coronavirus 2
NNIINNARDGCVP

SEQ ID NO: 14470 - protein, 14 aa, Severe acute respiratory syndrome-related coronavirus
  REGION 1..14: note = Table B: HLA-DRB1*13:02L HLA-DRB1*01:02L HLA-DRB1*08:04L HLA-DPA1*01:03-B1*03:01L HLA-DRB1*03:01L HLA-DRB1*14:02L HLA-DQA1*05:05-B1*03:19L HLA-DRB1*12:01L HLA-DPA1*03:01-B1*105:01L HLA-DQA1*05:05-B1*03:01L
  REGION 1..14: note = CONT. FROM ABOVE: HLA-DRB1*16:01L
  source 1..14: note = Severe acute respiratory syndrome coronavirus 2
NIINNARDGCVPLN

SEQ ID NO: 14471 - protein, 15 aa, Severe acute respiratory syndrome-related coronavirus
  REGION 1..15: note = Table B: HLA-DRB1*13:02L HLA-DRB1*04:05L HLA-DRB1*01:02L HLA-DRB1*12:01L
  source 1..15: note = Severe acute respiratory syndrome coronavirus 2
NNARDGCVPLNIIPL

SEQ ID NO: 14472 - protein, 11 aa, Severe acute respiratory syndrome-related coronavirus
  REGION 1..11: note = Table B: HLA-DRB1*13:02L
  source 1..11: note = Severe acute respiratory syndrome coronavirus 2
IIPLTTAAKLM

SEQ ID NO: 14473 - protein, 15 aa, Severe acute respiratory syndrome-related coronavirus
  REGION 1..15: note = Table B: HLA-DRB1*13:02L HLA-DRB1*01:03L HLA-DRB1*04:02L HLA-DRB1*04:05L HLA-DRB1*01:02L HLA-DRB1*08:04L HLA-DRB3*02:01L HLA-DPA1*01:03-B1*03:01L HLA-DPA1*03:01-B1*04:02L HLA-DRB1*14:02L HLA-DRB1*08:01L HLA-DPA1*01:03-B1*04:02L
  REGION 1..15: note = CONT. FROM ABOVE: HLA-DRB1*12:01L HLA-DPA1*02:01-B1*13:01L HLA-D RB1*14:54L HLA-DPA1*01:03-B1*104:01L HLA-DRB1*14:17L HLA-DPA1*01 :02-B1*04:01L HLA-DRB1*16:01L HLA-DRB1*04:08L HLA-DRB1*15:03L
  source 1..15: note = Severe acute respiratory syndrome coronavirus 2
IPLTTAAKLMVVIPD

SEQ ID NO: 14474 - protein, 14 aa, Severe acute respiratory syndrome-related coronavirus
  REGION 1..14: note = Table B: HLA-DRB1*13:02L HLA-DRB1*01:03L HLA-DRB1*04:02L HLA-DRB3*02:01L HLA-DRB1*04:10L HLA-DPA1*01:03-B1*04:02L HLA-DPA1*01:02-B1*04:01L HLA-DRB1*04:08L
  source 1..14: note = Severe acute respiratory syndrome coronavirus 2
TTAAKLMVVIPDYN

SEQ ID NO: 14475 - protein, 15 aa, Severe acute respiratory syndrome-related coronavirus
  REGION 1..15: note = Table B: HLA-DRB1*13:02L HLA-DRB3*02:01L HLA-DPA1*01:03-B1*03:01L HLA-DPA1*03:01-B1*04:02L HLA-DRB1*14:02L HLA-DQA1*01:01-B1*05:01L HLA-DQA1*05:05-B1*03:19L HLA-DPA1*01:03-B1*04:02L
  REGION 1..15: note = CONT. FROM ABOVE: HLA-DRB3*01:01L HLA-DPA1*01:03-B1*104:01L HLA- DQA1*05:05-B1*03:01L HLA-DPA1*01:02-B1*04:01L
  source 1..15: note = Severe acute respiratory syndrome coronavirus 2
IPDYNTYKNTCDGTT

SEQ ID NO: 14476 - protein, 16 aa, Severe acute respiratory syndrome-related coronavirus
  REGION 1..16: note = Table B: HLA-DRB1*13:02L HLA-DPA1*03:01-B1*04:02L
  source 1..16: note = Severe acute respiratory syndrome coronavirus 2
SPNLAWPLIVTALRAN

SEQ ID NO: 14477 - protein, 10 aa, Severe acute respiratory syndrome-related coronavirus
  REGION 1..10: note = Table B: HLA-DRB1*13:02L HLA-DRB1*14:01L HLA-DRB1*12:01L HLA-DRB1*16:01L HLA-DRB1*15:03L
  source 1..10: note = Severe acute respiratory syndrome coronavirus 2
LRANSAVKLQ

SEQ ID NO: 14478 - protein, 14 aa, Severe acute respiratory syndrome-related coronavirus
  REGION 1..14: note = Table B: HLA-DRB1*13:02L HLA-DRB3*02:01L HLA-DPA1*01:03-B1*03:01L HLA-DQA1*01:01-B1*05:01L HLA-DRB1*08:01L HLA-DRB1*12:02L HLA-DPA1*02:01-B1*13:01L HLA-DPA1*01:03-B1*104:01L
  source 1..14: note = Severe acute respiratory syndrome coronavirus 2
ANSAVKLQNNELSP

SEQ ID NO: 14479 - protein, 13 aa, Severe acute respiratory syndrome-related coronavirus
  REGION 1..13: note = Table B: HLA-DRB1*13:02L HLA-DRB1*08:04L HLA-DPA1*01:03-B1*03:01L HLA-DPA1*03:01-B1*04:02L HLA-DRB1*11:03L HLA-DQA1*01:01-B1*05:01L HLA-DQA1*05:05-B1*03:19L HLA-DPA1*02:01-B1*13:01L
  REGION 1..13: note = CONT. FROM ABOVE: HLA-DRB1*10:01L
  source 1..13: note = Severe acute respiratory syndrome coronavirus 2
DDNALAYYNTTKG

SEQ ID NO: 14480 - protein, 10 aa, Severe acute respiratory syndrome-related coronavirus
  REGION 1..10: note = Table B: HLA-DRB1*13:02L HLA-DRB1*13:03L HLA-DRB1*01:03L HLA-DRB1*04:02L HLA-DRB1*01:01L HLA-DRB4*03:01NL HLA-DRB1*11:04L HLA-DRB1*08:01L HLA-DRB5*01:01L HLA-DRB1*12:01L HLA-DQA1*03:01-B1*03:02M HLA-DQA1*05:05-B1*03:01L
  REGION 1..10: note = CONT. FROM ABOVE: HLA-DRB1*14:17L HLA-DRB1*16:01L HLA-DQA1*02:01 -B1*03:03L
  source 1..10: note = Severe acute respiratory syndrome coronavirus 2
AYYNTTKGGR

SEQ ID NO: 14481 - protein, 13 aa, Severe acute respiratory syndrome-related coronavirus
  REGION 1..13: note = Table B: HLA-DRB1*13:02L HLA-DRB1*04:05L HLA-DRB1*01:02L
  source 1..13: note = Severe acute respiratory syndrome coronavirus 2
KGGRFVLALLSDL

SEQ ID NO: 14482 - protein, 14 aa, Severe acute respiratory syndrome-related coronavirus
  REGION 1..14: note = Table B: HLA-DRB1*13:02L HLA-DRB1*04:05L HLA-DRB1*11:04L HLA-DRB1*11:01L HLA-DRB3*01:01L HLA-DQA1*03:01-B1*03:02L HLA-DPA1*01:03-B1*02:01L
  source 1..14: note = Severe acute respiratory syndrome coronavirus 2
LSDLQDLKWARFPK

SEQ ID NO: 14483 - protein, 17 aa, Severe acute respiratory syndrome-related coronavirus
  REGION 1..17: note = Table B: HLA-DRB1*13:02L HLA-DPA1*01:03-B1*04:02L
  source 1..17: note = Severe acute respiratory syndrome coronavirus 2
TPKGPKVKYLYFIKGLN

SEQ ID NO: 14484 - protein, 14 aa, Severe acute respiratory syndrome-related coronavirus
  REGION 1..14: note = Table B: HLA-DRB1*13:02L HLA-DRB1*04:05L HLA-DRB1*01:02L HLA-DRB1*11:03L HLA-DRB1*12:01L HLA-DRB3*01:01L HLA-DRB1*16:01L HLA-DRB1*04:08L HLA-DRB1*15:03L
  source 1..14: note = Severe acute respiratory syndrome coronavirus 2
IKGLNNLNRGMVLG

SEQ ID NO: 14485 - protein, 11 aa, Severe acute respiratory syndrome-related coronavirus
  REGION 1..11: note = Table B: HLA-DRB1*13:02L HLA-DRB1*04:05L HLA-DRB1*01:01L HLA-DRB3*02:01L HLA-DPA1*01:03-B1*03:01L HLA-DRB1*14:01L HLA-DRB1*12:02L
  source 1..11: note = Severe acute respiratory syndrome coronavirus 2
MVLGSLAATVR

SEQ ID NO: 14486 - protein, 14 aa, Severe acute respiratory syndrome-related coronavirus
  REGION 1..14: note = Table B: HLA-DRB1*13:02L HLA-DRB1*01:03L HLA-DRB1*04:05L HLA-DQA1*01:02-B1*06:02L HLA-DRB4*03:01NL HLA-DPA1*01:03-B1*03:01L HLA-DQA1*05:01-B1*02:01L HLA-DRB1*12:01L HLA-DPA1*03:01-B1*105:01L HLA-DRB1*16:01L
  REGION 1..14: note = CONT. FROM ABOVE: HLA-DRB1*04:08L
  source 1..14: note = Severe acute respiratory syndrome coronavirus 2
TVRLQAGNATEVPA

SEQ ID NO: 14487 - protein, 14 aa, Severe acute respiratory syndrome-related coronavirus
  REGION 1..14: note = Table B: HLA-DRB1*13:02L HLA-DRB1*13:03L HLA-DRB1*01:03L HLA-DRB1*04:05L HLA-DRB1*01:02L HLA-DRB4*03:01NL HLA-DRB1*08:04L HLA-DRB1*08:77L HLA-DPA1*01:03-B1*03:01L HLA-DRB1*14:02L HLA-DRB1*08:01L HLA-DRB1*11:01L HLA-DPA1*01:03-B1*04:02L
  REGION 1..14: note = CONT. FROM ABOVE: HLA-DRB1*12:01L HLA-DRB1*12:02L HLA-DPA1*02:01 -B1*13:01L HLA-DPA1*03:01-B1*105:01L HLA-DPA1*01:03-B1*104:01L H LA-DRB1*07:01L HLA-DRB1*16:01L HLA-DRB1*15:03L
  source 1..14: note = Severe acute respiratory syndrome coronavirus 2
VRLQAGNATEVPAN

SEQ ID NO: 14488 - protein, 13 aa, Severe acute respiratory syndrome-related coronavirus
  REGION 1..13: note = Table B: HLA-DRB1*13:02L HLA-DRB1*13:03L HLA-DQA1*01:02-B1*06:02L HLA-DPA1*01:03-B1*03:01L HLA-DPA1*03:01-B1*04:02L HLA-DPA1*03:01-B1*105:01L HLA-DRB1*04:08L HLA-DRB1*15:01L
  source 1..13: note = Severe acute respiratory syndrome coronavirus 2
DAAKAYKDYLASG

SEQ ID NO: 14489 - protein, 14 aa, Severe acute respiratory syndrome-related coronavirus
  REGION 1..14: note = Table B: HLA-DRB1*13:02L HLA-DPA1*01:03-B1*03:01L HLA-DPA1*01:03-B1*104:01L
  source 1..14: note = Severe acute respiratory syndrome coronavirus 2
AAKAYKDYLASGGQ

SEQ ID NO: 14490 - protein, 15 aa, Severe acute respiratory syndrome-related coronavirus
  REGION 1..15: note = Table B: HLA-DRB1*13:02L HLA-DRB1*11:02L HLA-DRB1*11:03L HLA-DRB1*15:03L
  source 1..15: note = Severe acute respiratory syndrome coronavirus 2
GQPITNCVKMLCTHT

SEQ ID NO: 14491 - protein, 12 aa, Severe acute respiratory syndrome-related coronavirus
  REGION 1..12: note = Table B: HLA-DRB1*13:02L HLA-DRB1*04:02L HLA-DRB4*03:01NL HLA-DRB1*08:77L HLA-DRB3*02:01L HLA-DRB1*14:01L HLA-DRB1*04:10L HLA-DRB1*12:01L HLA-DRB1*12:02L HLA-DRB1*14:54L HLA-DRB1*14:17L HLA-DRB1*07:01L HLA-DRB1*16:01L HLA-DRB1*15:03L
  source 1..12: note = Severe acute respiratory syndrome coronavirus 2
GQAITVTPEANM

SEQ ID NO: 14492 - protein, 13 aa, Severe acute respiratory syndrome-related coronavirus
  REGION 1..13: note = Table B: HLA-DRB1*13:02L HLA-DRB1*01:02L HLA-DRB1*15:03L
  source 1..13: note = Severe acute respiratory syndrome coronavirus 2
QAITVTPEANMDQ

SEQ ID NO: 14493 - protein, 16 aa, Severe acute respiratory syndrome-related coronavirus
  REGION 1..16: note = Table B: HLA-DRB1*13:02L HLA-DRB1*01:03L HLA-DRB1*04:05L HLA-DQA1*01:02-B1*06:02L HLA-DRB1*03:01L HLA-DRB1*11:04L HLA-DRB1*08:01L HLA-DRB1*11:01L HLA-DRB3*01:01L HLA-DPA1*02:01-B1*13:01L HLA-DQA1*03:01-B1*03:02L
  REGION 1..16: note = CONT. FROM ABOVE: HLA-DQA1*01:03-B1*06:01L HLA-DRB1*04:08L HLA-D QA1*02:01-B1*03:03L
  source 1..16: note = Severe acute respiratory syndrome coronavirus 2
HPNPKGFCDLKGKYVQ

SEQ ID NO: 14494 - protein, 13 aa, Severe acute respiratory syndrome-related coronavirus
  REGION 1..13: note = Table B: HLA-DRB1*13:02L HLA-DRB1*01:01L HLA-DPA1*01:03-B1*03:01L HLA-DRB1*14:01L HLA-DRB1*11:03L HLA-DRB1*14:02L HLA-DQA1*01-B1*05L HLA-DRB3*01:01L HLA-DPA1*02:01-B1*13:01L HLA-DPA1*03:01-B1*105:01L
  REGION 1..13: note = CONT. FROM ABOVE: HLA-DPA1*01:02-B1*04:01L
  source 1..13: note = Severe acute respiratory syndrome coronavirus 2
KGKYVQIPTTCAN

SEQ ID NO: 14495 - protein, 14 aa, Severe acute respiratory syndrome-related coronavirus
  REGION 1..14: note = Table B: HLA-DRB1*13:02L HLA-DRB1*13:03L HLA-DRB1*01:02L HLA-DRB1*08:04L HLA-DRB1*14:01L HLA-DRB1*08:01L HLA-DPA1*01:03-B1*104:01L HLA-DRB1*15:03L
  source 1..14: note = Severe acute respiratory syndrome coronavirus 2
YVQIPTTCANDPVG

SEQ ID NO: 14496 - protein, 10 aa, Severe acute respiratory syndrome-related coronavirus
  REGION 1..10: note = Table B: HLA-DRB1*13:02L HLA-DRB1*13:03L HLA-DRB4*03:01NL HLA-DRB1*12:01L HLA-DQA1*03:01-B1*03:02L HLA-DQA1*05:05-B1*03:01L
  source 1..10: note = Severe acute respiratory syndrome coronavirus 2
ANDPVGFTLK

SEQ ID NO: 14497 - protein, 16 aa, Severe acute respiratory syndrome-related coronavirus
  REGION 1..16: note = Table B: HLA-DRB1*13:02L HLA-DRB1*01:03L HLA-DRB1*01:02L HLA-DPA1*01:03-B1*03:01L HLA-DRB1*11:02L HLA-DRB1*11:04L HLA-DRB1*14:02L HLA-DRB1*11:01L HLA-DPA1*01:03-B1*04:02L HLA-DRB1*12:01L HLA-DPA1*01:03-B1*104:01L
  REGION 1..16: note = CONT. FROM ABOVE: HLA-DQA1*05:05-B1*03:01L HLA-DRB1*04:08L HLA-D RB1*08:02L
  source 1..16: note = Severe acute respiratory syndrome coronavirus 2
DPVGFTLKNTVCTVCG

SEQ ID NO: 14498 - protein, 16 aa, Severe acute respiratory syndrome-related coronavirus
  REGION 1..16: note = Table B: HLA-DRB1*13:02L HLA-DRB1*04:05L HLA-DRB1*01:01L HLA-DPA1*01:03-B1*03:01L HLA-DRB1*11:04L HLA-DRB1*08:01L HLA-DRB1*11:01L HLA-DPA1*02:01-B1*13:01L
  source 1..16: note = Severe acute respiratory syndrome coronavirus 2
DAQSFLNRVCGVSAAR

SEQ ID NO: 14499 - protein, 12 aa, Severe acute respiratory syndrome-related coronavirus
  REGION 1..12: note = Table B: HLA-DRB1*13:02L HLA-DRB1*04:04L HLA-DRB3*02:01L HLA-DRB1*14:01L HLA-DRB1*11:04L HLA-DQA1*01:01-B1*05:01L HLA-DRB1*08:01L HLA-DRB3*01:01L HLA-DRB1*10:01L HLA-DRB1*08:03L HLA-DRB1*15:01L
  source 1..12: note = Severe acute respiratory syndrome coronavirus 2
RAFDIYNDKVAG

SEQ ID NO: 14500 - protein, 10 aa, Severe acute respiratory syndrome-related coronavirus
  REGION 1..10: note = Table B: HLA-DRB1*13:02L HLA-DQA1*03:01-B1*03:02L
  source 1..10: note = Severe acute respiratory syndrome coronavirus 2
KVAGFAKFLK

SEQ ID NO: 14501 - protein, 16 aa, Severe acute respiratory syndrome-related coronavirus
  REGION 1..16: note = Table B: HLA-DRB1*13:02L
  source 1..16: note = Severe acute respiratory syndrome coronavirus 2
VAGFAKFLKTNCCRFQ

SEQ ID NO: 14502 - protein, 10 aa, Severe acute respiratory syndrome-related coronavirus
  REGION 1..10: note = Table B: HLA-DRB1*13:02L HLA-DRB1*13:03L HLA-DRB1*04:02L HLA-DRB4*03:01NL HLA-DRB1*14:01L HLA-DRB1*08:01L HLA-DRB1*12:01L HLA-DPA1*03:01-B1*105:01L HLA-DQA1*03:01-B1*03:02L HLA-DQA1*05:05-B1*03:01L HLA-DQA1*02:01-B1*03:03L
  source 1..10: note = Severe acute respiratory syndrome coronavirus 2
NLIDSYFVVK

SEQ ID NO: 14503 - protein, 12 aa, Severe acute respiratory syndrome-related coronavirus
  REGION 1..12: note = Table B: HLA-DRB1*13:02L HLA-DRB1*04:02L HLA-DRB1*08:04L HLA-DRB3*02:01L HLA-DRB1*11:03L HLA-DRB1*11:04L HLA-DRB3*01:01L HLA-DPA1*03:01-B1*105:01L HLA-DRB1*14:54L HLA-DRB1*08:03L
  source 1..12: note = Severe acute respiratory syndrome coronavirus 2
IDSYFVVKRHTF

SEQ ID NO: 14504 - protein, 12 aa, Severe acute respiratory syndrome-related coronavirus
  REGION 1..12: note = Table B: HLA-DRB1*13:02L HLA-DRB1*13:03L HLA-DRB1*04:02L HLA-DRB1*08:04L HLA-DRB1*11:03L HLA-DRB1*11:04L HLA-DRB3*01:01L HLA-DRB1*14:54L HLA-DRB1*08:03L
  source 1..12: note = Severe acute respiratory syndrome coronavirus 2
DSYFVVKRHTFS

SEQ ID NO: 14505 - protein, 12 aa, Severe acute respiratory syndrome-related coronavirus
  REGION 1..12: note = Table B: HLA-DRB1*13:02L HLA-DRB1*13:03L HLA-DRB1*08:04L HLA-DRB1*14:01L HLA-DRB1*11:04L HLA-DRB3*01:01L HLA-DRB1*04:08L HLA-DRB1*08:03L
  source 1..12: note = Severe acute respiratory syndrome coronavirus 2
SYFVVKRHTFSN

SEQ ID NO: 14506 - protein, 12 aa, Severe acute respiratory syndrome-related coronavirus
  REGION 1..12: note = Table B: HLA-DRB1*13:02L HLA-DRB1*01:02L HLA-DRB1*08:04L HLA-DRB1*14:01L HLA-DRB1*08:01L HLA-DRB1*12:01L HLA-DPA1*01:02-B1*04:01L HLA-DRB1*16:01L HLA-DRB1*04:08L HLA-DRB1*15:03L
  source 1..12: note = Severe acute respiratory syndrome coronavirus 2
FVVKRHTFSNYQ

SEQ ID NO: 14507 - protein, 14 aa, Severe acute respiratory syndrome-related coronavirus
  REGION 1..14: note = Table B: HLA-DRB1*13:02L
  source 1..14: note = Severe acute respiratory syndrome coronavirus 2
VVKRHTFSNYQHEE

SEQ ID NO: 14508 - protein, 14 aa, Severe acute respiratory syndrome-related coronavirus
  REGION 1..14: note = Table B: HLA-DRB1*13:02L
  source 1..14: note = Severe acute respiratory syndrome coronavirus 2
VKRHTFSNYQHEET

SEQ ID NO: 14509 - protein, 12 aa, Severe acute respiratory syndrome-related coronavirus
  REGION 1..12: note = Table B: HLA-DRB1*13:02L HLA-DRB1*04:04L HLA-DRB1*01:02L HLA-DRB1*08:04L HLA-DRB3*02:01L HLA-DPA1*03:01-B1*04:02L HLA-DRB1*14:01L HLA-DRB1*08:01L HLA-DRB1*09:01L HLA-DRB1*12:02L HLA-DQA1*05:05-B1*03:01L HLA-DRB1*08:03L
  source 1..12: note = Severe acute respiratory syndrome coronavirus 2
FSNYQHEETIYN

SEQ ID NO: 14510 - protein, 14 aa, Severe acute respiratory syndrome-related coronavirus
  REGION 1..14: note = Table B: HLA-DRB1*13:02L HLA-DPA1*01:03-B1*03:01L
  source 1..14: note = Severe acute respiratory syndrome coronavirus 2
LLKDCPAVAKHDFF

SEQ ID NO: 14511 - protein, 10 aa, Severe acute respiratory syndrome-related coronavirus
  REGION 1..10: note = Table B: HLA-DRB1*13:02L HLA-DRB1*13:03L HLA-DRB1*01:03L HLA-DRB1*01:01L HLA-DRB4*03:01NL HLA-DRB1*14:01L HLA-DRB1*11:04L HLA-DRB1*08:01L HLA-DRB5*01:01L HLA-DRB1*12:01L HLA-DQA1*03:01-B1*03:02M HLA-DQA1*05:05-B1*03:01L
  REGION 1..10: note = CONT. FROM ABOVE: HLA-DRB1*14:17L HLA-DRB1*16:01L HLA-DQA1*01:03 -B1*06:01L HLA-DQA1*02:01-B1*03:03L
  source 1..10: note = Severe acute respiratory syndrome coronavirus 2
DMVPHISRQR

SEQ ID NO: 14512 - protein, 16 aa, Severe acute respiratory syndrome-related coronavirus
  REGION 1..16: note = Table B: HLA-DRB1*13:02L HLA-DQA1*01:02-B1*06:02L HLA-DRB1*14:01L HLA-DRB1*12:01L HLA-DRB3*01:01L HLA-DRB1*04:08L HLA-DRB1*15:03L
  source 1..16: note = Severe acute respiratory syndrome coronavirus 2
VPHISRQRLTKYTMAD

SEQ ID NO: 14513 - protein, 15 aa, Severe acute respiratory syndrome-related coronavirus
  REGION 1..15: note = Table B: HLA-DRB1*13:02L HLA-DPA1*01:03-B1*03:01L HLA-DRB1*15:03L
  source 1..15: note = Severe acute respiratory syndrome coronavirus 2
ISRQRLTKYTMADLV

SEQ ID NO: 14514 - protein, 16 aa, Severe acute respiratory syndrome-related coronavirus
  REGION 1..16: note = Table B: HLA-DRB1*13:02L HLA-DPA1*01:03-B1*104:01L
  source 1..16: note = Severe acute respiratory syndrome coronavirus 2
SRQRLTKYTMADLVYA

SEQ ID NO: 14515 - protein, 10 aa, Severe acute respiratory syndrome-related coronavirus
  REGION 1..10: note = Table B: HLA-DRB1*13:02L HLA-DRB1*13:03L HLA-DRB4*03:01NL HLA-DRB1*08:01L HLA-DRB1*12:01L HLA-DQA1*03:01-B1*03:02L HLA-DQA1*05:05-B1*03:01L HLA-DQA1*01:03-B1*06:01L HLA-DQA1*02:01-B1*03:03L
  source 1..10: note = Severe acute respiratory syndrome coronavirus 2
TMADLVYALR

SEQ ID NO: 14516 - protein, 13 aa, Severe acute respiratory syndrome-related coronavirus
  REGION 1..13: note = Table B: HLA-DRB1*13:02L HLA-DRB1*01:03L HLA-DRB1*01:02L HLA-DRB1*11:03L HLA-DQA1*05:05-B1*03:116L HLA-DRB1*12:01L HLA-DRB3*01:01L HLA-DQA1*03:01-B1*03:02L HLA-DRB1*14:54L HLA-DPA1*01:02-B1*04:01L
  source 1..13: note = Severe acute respiratory syndrome coronavirus 2
ADLVYALRHFDEG

SEQ ID NO: 14517 - protein, 15 aa, Severe acute respiratory syndrome-related coronavirus
  REGION 1..15: note = Table B: HLA-DRB1*13:02L HLA-DPA1*01:03-B1*03:01L
  source 1..15: note = Severe acute respiratory syndrome coronavirus 2
YALRHFDEGNCDTLK

SEQ ID NO: 14518 - protein, 15 aa, Severe acute respiratory syndrome-related coronavirus
  REGION 1..15: note = Table B: HLA-DRB1*13:02L HLA-DRB1*04:02L HLA-DPA1*01:03-B1*04:01L HLA-DRB3*01:01L HLA-DQA1*05:05-B1*03:01L
  source 1..15: note = Severe acute respiratory syndrome coronavirus 2
DDDYFNKKDWYDFVE

SEQ ID NO: 14519 - protein, 14 aa, Severe acute respiratory syndrome-related coronavirus
  REGION 1..14: note = Table B: HLA-DRB1*13:02L HLA-DRB1*13:03L HLA-DRB1*01:03L HLA-DRB1*04:02L HLA-DRB1*01:02L HLA-DPA1*01:03-B1*03:01L HLA-DPA1*03:01-B1*04:02L HLA-DRB1*08:01L HLA-DRB1*12:01L
  source 1..14: note = Severe acute respiratory syndrome coronavirus 2
FNKKDWYDFVENPD

SEQ ID NO: 14520 - protein, 14 aa, Severe acute respiratory syndrome-related coronavirus
  REGION 1..14: note = Table B: HLA-DRB1*13:02L HLA-DRB1*13:03L HLA-DRB1*08:04L HLA-DRB1*14:01L HLA-DRB1*11:04L HLA-DPA1*02:01-B1*13:01L HLA-DPA1*01:03-B1*104:01L HLA-DRB1*08:03L
  source 1..14: note = Severe acute respiratory syndrome coronavirus 2
NAGIVGVLTLDNQD

SEQ ID NO: 14521 - protein, 16 aa, Severe acute respiratory syndrome-related coronavirus
  REGION 1..16: note = Table B: HLA-DRB1*13:02L HLA-DRB3*02:01L HLA-DRB1*14:02L HLA-DPA1*01:03-B1*04:01L HLA-DPA1*01:03-B1*104:01L
  source 1..16: note = Severe acute respiratory syndrome coronavirus 2
VPVVDSYYSLLMPILT

SEQ ID NO: 14522 - protein, 10 aa, Severe acute respiratory syndrome-related coronavirus
  REGION 1..10: note = Table B: HLA-DRB1*13:02L HLA-DRB1*12:01L HLA-DQA1*03:01-B1*03:02L HLA-DQA1*05:05-B1*03:01L
  source 1..10: note = Severe acute respiratory syndrome coronavirus 2
LLMPILTLTR

SEQ ID NO: 14523 - protein, 14 aa, Severe acute respiratory syndrome-related coronavirus
  REGION 1..14: note = Table B: HLA-DRB1*13:02L HLA-DPA1*01:03-B1*03:01L HLA-DRB1*15:03L
  source 1..14: note = Severe acute respiratory syndrome coronavirus 2
LTRALTAESHVDTD

SEQ ID NO: 14524 - protein, 15 aa, Severe acute respiratory syndrome-related coronavirus
  REGION 1..15: note = Table B: HLA-DRB1*13:02L HLA-DPA1*01:03-B1*03:01L
  source 1..15: note = Severe acute respiratory syndrome coronavirus 2
DLTKPYIKWDLLKYD

SEQ ID NO: 14525 - protein, 14 aa, Severe acute respiratory syndrome-related coronavirus
  REGION 1..14: note = Table B: HLA-DRB1*13:02L HLA-DRB1*08:04L HLA-DPA1*01:03-B1*03:01L HLA-DRB1*14:01L HLA-DPA1*01:03-B1*04:02L HLA-DRB3*01:01L HLA-DPA1*01:03-B1*02:01L
  source 1..14: note = Severe acute respiratory syndrome coronavirus 2
KPYIKWDLLKYDFT

SEQ ID NO: 14526 - protein, 14 aa, Severe acute respiratory syndrome-related coronavirus
  REGION 1..14: note = Table B: HLA-DRB1*13:02L HLA-DRB1*01:02L HLA-DRB1*12:01L HLA-DRB3*01:01L HLA-DRB1*04:08L HLA-DRB1*15:03L
  source 1..14: note = Severe acute respiratory syndrome coronavirus 2
ERLKLFDRYFKYWD

SEQ ID NO: 14527 - protein, 14 aa, Severe acute respiratory syndrome-related coronavirus
  REGION 1..14: note = Table B: HLA-DRB1*13:02L HLA-DRB1*01:02L HLA-DRB1*14:01L HLA-DRB1*12:01L HLA-DRB3*01:01L HLA-DPA1*01:02-B1*04:01L
  source 1..14: note = Severe acute respiratory syndrome coronavirus 2
RLKLFDRYFKYWDQ

SEQ ID NO: 14528 - protein, 14 aa, Severe acute respiratory syndrome-related coronavirus
  REGION 1..14: note = Table B: HLA-DRB1*13:02L HLA-DRB1*04:05L HLA-DRB1*01:02L HLA-DRB1*08:04L HLA-DPA1*03:01-B1*04:02L HLA-DRB1*11:01L HLA-DRB1*12:01L HLA-DRB3*01:01L HLA-DPA1*03:01-B1*105:01L HLA-DPA1*01:02-B1*04:01L HLA-DRB1*08:03L
  source 1..14: note = Severe acute respiratory syndrome coronavirus 2
LKLFDRYFKYWDQT

SEQ ID NO: 14529 - protein, 15 aa, Severe acute respiratory syndrome-related coronavirus
  REGION 1..15: note = Table B: HLA-DRB1*13:02L
  source 1..15: note = Severe acute respiratory syndrome coronavirus 2
LFDRYFKYWDQTYHP

SEQ ID NO: 14530 - protein, 13 aa, Severe acute respiratory syndrome-related coronavirus
  REGION 1..13: note = Table B: HLA-DRB1*13:02L HLA-DRB1*11:01L HLA-DRB3*01:01L HLA-DRB1*08:03L
  source 1..13: note = Severe acute respiratory syndrome coronavirus 2
RYFKYWDQTYHPN

SEQ ID NO: 14531 - protein, 14 aa, Severe acute respiratory syndrome-related coronavirus
  REGION 1..14: note = Table B: HLA-DRB1*13:02L HLA-DRB1*01:02L HLA-DRB1*08:04L HLA-DPA1*03:01-B1*04:02L HLA-DRB1*14:01L HLA-DRB1*14:02L HLA-DRB1*11:01L HLA-DQA1*05:05-B1*03:19L HLA-DPA1*01:03-B1*04:02L HLA-DRB1*12:01L
  REGION 1..14: note = CONT. FROM ABOVE: HLA-DPA1*02:01-B1*13:01L HLA-DRB1*15:03L
  source 1..14: note = Severe acute respiratory syndrome coronavirus 2
FKYWDQTYHPNCVN

SEQ ID NO: 14532 - protein, 16 aa, Severe acute respiratory syndrome-related coronavirus
  REGION 1..16: note = Table B: HLA-DRB1*13:02L HLA-DRB1*01:03L HLA-DRB1*04:04L HLA-DRB1*01:01L HLA-DRB3*02:01L HLA-DRB1*14:02L HLA-DRB1*08:01L HLA-DPA1*01:03-B1*04:01L HLA-DPA1*01:03-B1*02:01L HLA-DRB1*10:01L
  source 1..16: note = Severe acute respiratory syndrome coronavirus 2
NVLFSTVFPPTSFGPL

SEQ ID NO: 14533 - protein, 11 aa, Severe acute respiratory syndrome-related coronavirus
  REGION 1..11: note = Table B: HLA-DRB1*13:02L HLA-DRB1*13:03L HLA-DRB1*01:03L HLA-DRB1*04:02L HLA-DPA1*01:03-B1*03:01L HLA-DRB1*12:01L HLA-DRB1*14:17L
  source 1..11: note = Severe acute respiratory syndrome coronavirus 2
IFVDGVPFVVS

SEQ ID NO: 14534 - protein, 10 aa, Severe acute respiratory syndrome-related coronavirus
  REGION 1..10: note = Table B: HLA-DRB1*13:02L HLA-DRB1*01:02L HLA-DRB1*12:01L HLA-DRB1*16:01L
  source 1..10: note = Severe acute respiratory syndrome coronavirus 2
FVVSTGYHFR

SEQ ID NO: 14535 - protein, 14 aa, Severe acute respiratory syndrome-related coronavirus
  REGION 1..14: note = Table B: HLA-DRB1*13:02L HLA-DRB1*13:03L HLA-DRB1*14:02L HLA-DPA1*01:03-B1*04:02L HLA-DRB3*01:01L HLA-DPA1*01:03-B1*02:01L HLA-DQA1*05:05-B1*03:01L HLA-DRB1*07:01L
  source 1..14: note = Severe acute respiratory syndrome coronavirus 2
GYHFRELGVVHNQD

SEQ ID NO: 14536 - protein, 12 aa, Severe acute respiratory syndrome-related coronavirus
  REGION 1..12: note = Table B: HLA-DRB1*13:02L HLA-DRB1*01:02L HLA-DRB1*08:01L HLA-DPA1*02:01-B1*13:01L HLA-DRB1*04:08L HLA-DRB1*15:03L
  source 1..12: note = Severe acute respiratory syndrome coronavirus 2
RELGVVHNQDVN

SEQ ID NO: 14537 - protein, 11 aa, Severe acute respiratory syndrome-related coronavirus
  REGION 1..11: note = Table B: HLA-DRB1*13:02L HLA-DRB1*04:10L HLA-DRB1*04:08L
  source 1..11: note = Severe acute respiratory syndrome coronavirus 2
GVVHNQDVNLH

SEQ ID NO: 14538 - protein, 15 aa, Severe acute respiratory syndrome-related coronavirus
  REGION 1..15: note = Table B: HLA-DRB1*13:02L HLA-DRB1*01:01L HLA-DRB1*11:01L HLA-DRB1*07:01L
  source 1..15: note = Severe acute respiratory syndrome coronavirus 2
NQDVNLHSSRLSFKE

SEQ ID NO: 14539 - protein, 13 aa, Severe acute respiratory syndrome-related coronavirus
  REGION 1..13: note = Table B: HLA-DRB1*13:02L HLA-DRB1*01:03L HLA-DRB1*01:02L HLA-DRB1*08:04L HLA-DRB1*11:04L HLA-DRB1*12:01L HLA-DRB1*04:08L HLA-DRB1*15:03L
  source 1..13: note = Severe acute respiratory syndrome coronavirus 2
SGNLLLDKRTTCF

SEQ ID NO: 14540 - protein, 12 aa, Severe acute respiratory syndrome-related coronavirus
  REGION 1..12: note = Table B: HLA-DRB1*13:02L HLA-DRB1*01:02L HLA-DRB1*03:01L HLA-DRB1*14:01L HLA-DRB3*01:01L HLA-DRB1*16:01L HLA-DRB1*15:03L
  source 1..12: note = Severe acute respiratory syndrome coronavirus 2
NLLLDKRTTCFS

SEQ ID NO: 14541 - protein, 12 aa, Severe acute respiratory syndrome-related coronavirus
  REGION 1..12: note = Table B: HLA-DRB1*13:02L HLA-DPA1*01:03-B1*03:01L HLA-DRB1*09:01L
  source 1..12: note = Severe acute respiratory syndrome coronavirus 2
SVAALTNNVAFQ

SEQ ID NO: 14542 - protein, 12 aa, Severe acute respiratory syndrome-related coronavirus
  REGION 1..12: note = Table B: HLA-DRB1*13:02L
  source 1..12: note = Severe acute respiratory syndrome coronavirus 2
VAALTNNVAFQT

SEQ ID NO: 14543 - protein, 14 aa, Severe acute respiratory syndrome-related coronavirus
  REGION 1..14: note = Table B: HLA-DRB1*13:02L HLA-DRB1*12:02L
  source 1..14: note = Severe acute respiratory syndrome coronavirus 2
ALTNNVAFQTVKPG

SEQ ID NO: 14544 - protein, 10 aa, Severe acute respiratory syndrome-related coronavirus
  REGION 1..10: note = Table B: HLA-DRB1*13:02L HLA-DRB1*13:03L HLA-DRB1*01:01L HLA-DRB4*03:01NL HLA-DRB1*14:01L HLA-DRB1*11:04L HLA-DRB1*08:01L HLA-DRB5*01:01L HLA-DRB1*12:01L HLA-DQA1*03:01-B1*03:02M HLA-DQA1*05:05-B1*03:01L HLA-DRB1*14:17L HLA-DRB1*15:01L
  source 1..10: note = Severe acute respiratory syndrome coronavirus 2
QTVKPGNFNK

SEQ ID NO: 14545 - protein, 14 aa, Severe acute respiratory syndrome-related coronavirus
  REGION 1..14: note = Table B: HLA-DRB1*13:02L HLA-DPA1*01:03-B1*03:01L HLA-DPA1*01:03-B1*04:02L HLA-DPA1*01:03-B1*104:01L
  source 1..14: note = Severe acute respiratory syndrome coronavirus 2
NFNKDFYDFAVSKG

SEQ ID NO: 14546 - protein, 12 aa, Severe acute respiratory syndrome-related coronavirus
  REGION 1..12: note = Table B: HLA-DRB1*13:02L HLA-DRB1*08:04L HLA-DRB3*02:01L HLA-DRB1*08:01L HLA-DRB1*09:01L HLA-DRB1*07:01L HLA-DRB1*04:08L
  source 1..12: note = Severe acute respiratory syndrome coronavirus 2
KDFYDFAVSKGF

SEQ ID NO: 14547 - protein, 13 aa, Severe acute respiratory syndrome-related coronavirus
  REGION 1..13: note = Table B: HLA-DRB1*13:02L HLA-DRB1*08:01L HLA-DRB1*07:01L
  source 1..13: note = Severe acute respiratory syndrome coronavirus 2
DFYDFAVSKGFFK

SEQ ID NO: 14548 - protein, 14 aa, Severe acute respiratory syndrome-related coronavirus
  REGION 1..14: note = Table B: HLA-DRB1*13:02L HLA-DRB1*08:04L HLA-DRB1*11:04L HLA-DQA1*01:01-B1*05:01L HLA-DRB1*08:03L
  source 1..14: note = Severe acute respiratory syndrome coronavirus 2
SKGFFKEGSSVELK

SEQ ID NO: 14549 - protein, 16 aa, Severe acute respiratory syndrome-related coronavirus
  REGION 1..16: note = Table B: HLA-DRB1*13:02L HLA-DRB1*04:05L HLA-DRB3*01:01L HLA-DPA1*02:01-B1*13:01L
  source 1..16: note = Severe acute respiratory syndrome coronavirus 2
EGSSVELKHFFFAQDG

SEQ ID NO: 14550 - protein, 16 aa, Severe acute respiratory syndrome-related coronavirus
  REGION 1..16: note = Table B: HLA-DRB1*13:02L HLA-DPA1*01:03-B1*03:01L HLA-DPA1*01:03-B1*04:01L HLA-DRB3*01:01L HLA-DPA1*01:03-B1*02:01L HLA-DPA1*01:03-B1*104:01L
  source 1..16: note = Severe acute respiratory syndrome coronavirus 2
GSSVELKHFFFAQDGN

SEQ ID NO: 14551 - protein, 11 aa, Severe acute respiratory syndrome-related coronavirus
  REGION 1..11: note = Table B: HLA-DRB1*13:02L HLA-DRB1*13:03L HLA-DRB1*01:03L HLA-DRB1*04:02L HLA-DRB4*03:01NL HLA-DRB1*08:77L HLA-DRB1*14:01L HLA-DRB1*11:03L HLA-DRB1*14:02L HLA-DQA1*05:01-B1*02:01L HLA-DRB1*12:01L HLA-DRB1*14:54L HLA-DRB1*10:01L HLA-DRB1*16:01L
  REGION 1..11: note = CONT. FROM ABOVE: HLA-DRB1*04:08L
  source 1..11: note = Severe acute respiratory syndrome coronavirus 2
FFAQDGNAAIS

SEQ ID NO: 14552 - protein, 11 aa, Severe acute respiratory syndrome-related coronavirus
  REGION 1..11: note = Table B: HLA-DRB1*13:02L HLA-DRB1*13:03L HLA-DRB1*01:03L HLA-DRB1*04:02L HLA-DRB4*03:01NL HLA-DRB1*14:01L HLA-DQA1*05:01-B1*02:01L HLA-DRB1*12:01L HLA-DRB1*14:54L HLA-DRB1*16:01L
  source 1..11: note = Severe acute respiratory syndrome coronavirus 2
FAQDGNAAISD

SEQ ID NO: 14553 - protein, 11 aa, Severe acute respiratory syndrome-related coronavirus
  REGION 1..11: note = Table B: HLA-DRB1*13:02L HLA-DRB1*13:03L HLA-DRB1*01:03L HLA-DRB1*04:05L HLA-DRB1*01:02L HLA-DRB1*08:04L HLA-DRB1*14:54L HLA-DRB1*04:08L
  source 1..11: note = Severe acute respiratory syndrome coronavirus 2
FVVEVVDKYFD

SEQ ID NO: 14554 - protein, 15 aa, Severe acute respiratory syndrome-related coronavirus
  REGION 1..15: note = Table B: HLA-DRB1*13:02L HLA-DRB1*01:03L HLA-DRB1*04:05L HLA-DRB1*01:02L HLA-DRB1*08:01L HLA-DPA1*01:03-B1*04:02L HLA-DRB1*12:01L HLA-DRB1*04:08L
  source 1..15: note = Severe acute respiratory syndrome coronavirus 2
VVEVVDKYFDCYDGG

SEQ ID NO: 14555 - protein, 11 aa, Severe acute respiratory syndrome-related coronavirus
  REGION 1..11: note = Table B: HLA-DRB1*13:02L HLA-DRB1*14:01L HLA-DRB1*04:08L HLA-DRB1*15:03L
  source 1..11: note = Severe acute respiratory syndrome coronavirus 2
NQVIVNNLDKS

SEQ ID NO: 14556 - protein, 12 aa, Severe acute respiratory syndrome-related coronavirus
  REGION 1..12: note = Table B: HLA-DRB1*13:02L HLA-DRB1*01:03L HLA-DRB1*04:02L HLA-DRB1*04:05L HLA-DQA1*01:02-B1*06:02L HLA-DRB1*01:02L HLA-DRB4*03:01NL HLA-DRB1*08:04L HLA-DRB3*02:01L HLA-DPA1*03:01-B1*04:02L HLA-DRB1*11:03L HLA-DRB1*11:04L
  REGION 1..12: note = CONT. FROM ABOVE: HLA-DRB1*14:02L HLA-DPA1*01:03-B1*04:01L HLA-D RB1*04:10L HLA-DRB1*09:01L HLA-DRB1*12:02L HLA-DPA1*03:01-B1*105 :01L HLA-DRB1*14:54L HLA-DQA1*05:05-B1*03:01L HLA-DRB1*14:17L HL A-DPA1*01:02-B1*04:01L HLA-DRB1*07:01L HLA-DRB1*04:08L
  source 1..12: note = Severe acute respiratory syndrome coronavirus 2
VNNLDKSAGFPF

SEQ ID NO: 14557 - protein, 12 aa, Severe acute respiratory syndrome-related coronavirus
  REGION 1..12: note = Table B: HLA-DRB1*13:02L HLA-DQA1*01:02-B1*06:02L HLA-DRB1*01:02L HLA-DRB1*12:01L HLA-DPA1*03:01-B1*105:01L HLA-DQA1*01:03-B1*06:01L HLA-DRB1*04:08L HLA-DRB1*15:03L
  source 1..12: note = Severe acute respiratory syndrome coronavirus 2
FPFNKWGKARLY

SEQ ID NO: 14558 - protein, 14 aa, Severe acute respiratory syndrome-related coronavirus
  REGION 1..14: note = Table B: HLA-DRB1*13:02L HLA-DRB1*04:04L HLA-DQA1*01:02-B1*06:02L HLA-DRB1*08:01L HLA-DPA1*01:02-B1*04:01L HLA-DQA1*01:03-B1*06:01L HLA-DQA1*02:01-B1*03:03L
  source 1..14: note = Severe acute respiratory syndrome coronavirus 2
GKARLYYDSMSYED

SEQ ID NO: 14559 - protein, 14 aa, Severe acute respiratory syndrome-related coronavirus
  REGION 1..14: note = Table B: HLA-DRB1*13:02L HLA-DRB1*04:04L HLA-DRB1*01:02L HLA-DRB1*08:04L HLA-DPA1*01:03-B1*03:01L HLA-DPA1*01:02-B1*04:01L HLA-DQA1*01:03-B1*06:01L HLA-DRB1*08:03L
  source 1..14: note = Severe acute respiratory syndrome coronavirus 2
KARLYYDSMSYEDQ

SEQ ID NO: 14560 - protein, 15 aa, Severe acute respiratory syndrome-related coronavirus
  REGION 1..15: note = Table B: HLA-DRB1*13:02L HLA-DRB1*04:04L HLA-DQA1*01:01-B1*05:01L HLA-DPA1*01:03-B1*04:01L HLA-DPA1*01:03-B1*02:01L HLA-DQA1*05:05-B1*03:01L HLA-DRB1*08:03L
  source 1..15: note = Severe acute respiratory syndrome coronavirus 2
ARLYYDSMSYEDQDA

SEQ ID NO: 14561 - protein, 15 aa, Severe acute respiratory syndrome-related coronavirus
  REGION 1..15: note = Table B: HLA-DRB1*13:02L HLA-DRB1*08:04L HLA-DRB1*14:01L HLA-DRB1*11:03L HLA-DRB1*11:04L HLA-DRB1*11:01L HLA-DRB3*01:01L HLA-DPA1*01:03-B1*02:01L
  source 1..15: note = Severe acute respiratory syndrome coronavirus 2
SMSYEDQDALFAYTK

SEQ ID NO: 14562 - protein, 14 aa, Severe acute respiratory syndrome-related coronavirus
  REGION 1..14: note = Table B: HLA-DRB1*13:02L HLA-DPA1*03:01-B1*105:01L HLA-DPA1*01:03-B1*104:01L HLA-DQA1*05:05-B1*03:01L
  source 1..14: note = Severe acute respiratory syndrome coronavirus 2
YTKRNVIPTITQMN

SEQ ID NO: 14563 - protein, 14 aa, Severe acute respiratory syndrome-related coronavirus
  REGION 1..14: note = Table B: HLA-DRB1*13:02L HLA-DRB1*01:03L HLA-DRB1*04:04L HLA-DRB1*04:05L HLA-DRB1*01:02L HLA-DRB1*08:04L HLA-DPA1*03:01-B1*04:02L HLA-DRB1*11:04L HLA-DRB1*08:01L HLA-DRB1*11:01L HLA-DRB1*04:10L HLA-DPA1*01:03-B1*04:02L
  REGION 1..14: note = CONT. FROM ABOVE: HLA-DRB1*14:54L HLA-DPA1*01:03-B1*02:01L HLA-D QA1*05:05-B1*03:01L HLA-DQA1*01:03-B1*06:01L HLA-DRB1*04:08L
  source 1..14: note = Severe acute respiratory syndrome coronavirus 2
IPTITQMNLKYAIS

SEQ ID NO: 14564 - protein, 13 aa, Severe acute respiratory syndrome-related coronavirus
  REGION 1..13: note = Table B: HLA-DRB1*13:02L HLA-DRB1*13:03L HLA-DQA1*01:02-B1*06:02L HLA-DRB1*01:02L HLA-DRB1*11:04L HLA-DRB1*11:01L HLA-DRB3*01:01L HLA-DRB1*16:01L HLA-DRB1*04:08L
  source 1..13: note = Severe acute respiratory syndrome coronavirus 2
AISAKNRARTVAG

SEQ ID NO: 14565 - protein, 14 aa, Severe acute respiratory syndrome-related coronavirus
  REGION 1..14: note = Table B: HLA-DRB1*13:02L HLA-DRB1*04:05L HLA-DRB1*01:02L HLA-DPA1*01:03-B1*03:01L HLA-DRB1*12:01L HLA-DPA1*01:03-B1*104:01L
  source 1..14: note = Severe acute respiratory syndrome coronavirus 2
NRARTVAGVSICST

SEQ ID NO: 14566 - protein, 10 aa, Severe acute respiratory syndrome-related coronavirus
  REGION 1..10: note = Table B: HLA-DRB1*13:02L HLA-DRB1*13:03L HLA-DRB1*01:03L HLA-DRB1*11:04L HLA-DRB1*08:01L HLA-DRB1*12:01L HLA-DQA1*03:01-B1*03:02L HLA-DRB1*14:17L HLA-DRB1*16:01L HLA-DQA1*02:01-B1*03:03L
  source 1..10: note = Severe acute respiratory syndrome coronavirus 2
TMTNRQFHQK

SEQ ID NO: 14567 - protein, 14 aa, Severe acute respiratory syndrome-related coronavirus
  REGION 1..14: note = Table B: HLA-DRB1*13:02L HLA-DRB1*04:05L HLA-DRB1*14:01L HLA-DRB1*11:01L HLA-DRB3*01:01L HLA-DPA1*02:01-B1*13:01L HLA-DRB1*15:03L
  source 1..14: note = Severe acute respiratory syndrome coronavirus 2
TNRQFHQKLLKSIA

SEQ ID NO: 14568 - protein, 15 aa, Severe acute respiratory syndrome-related coronavirus
  REGION 1..15: note = Table B: HLA-DRB1*13:02L HLA-DRB1*04:04L HLA-DPA1*01:03-B1*04:01L HLA-DPA1*01:03-B1*04:02L HLA-DPA1*02:01-B1*13:01L HLA-DQA1*01:03-B1*06:01L HLA-DQA1*02:01-B1*03:03L
  source 1..15: note = Severe acute respiratory syndrome coronavirus 2
NRQFHQKLLKSIAAT

SEQ ID NO: 14569 - protein, 14 aa, Severe acute respiratory syndrome-related coronavirus
  REGION 1..14: note = Table B: HLA-DRB1*13:02L HLA-DRB1*13:03L HLA-DRB4*03:01NL HLA-DRB1*08:04L HLA-DPA1*01:03-B1*03:01L HLA-DRB1*11:03L HLA-DRB1*11:01L HLA-DQA1*01-B1*05L HLA-DQA1*05:05-B1*03:19L HLA-DRB3*01:01L HLA-DPA1*02:01-B1*13:01L HLA-DRB1*14:54L
  REGION 1..14: note = CONT. FROM ABOVE: HLA-DRB1*07:01L HLA-DRB1*08:03L HLA-DRB1*15:01 L
  source 1..14: note = Severe acute respiratory syndrome coronavirus 2
QKLLKSIAATRGAT

SEQ ID NO: 14570 - protein, 13 aa, Severe acute respiratory syndrome-related coronavirus
  REGION 1..13: note = Table B: HLA-DRB1*13:02L HLA-DRB4*03:01NL HLA-DQA1*05:01-B1*02:01L HLA-DPA1*02:01-B1*13:01L HLA-DRB1*16:01L
  source 1..13: note = Severe acute respiratory syndrome coronavirus 2
AATRGATVVIGTS

SEQ ID NO: 14571 - protein, 14 aa, Severe acute respiratory syndrome-related coronavirus
  REGION 1..14: note = Table B: HLA-DRB1*13:02L HLA-DRB1*11:01L
  source 1..14: note = Severe acute respiratory syndrome coronavirus 2
VVIGTSKFYGGWHN

SEQ ID NO: 14572 - protein, 14 aa, Severe acute respiratory syndrome-related coronavirus
  REGION 1..14: note = Table B: HLA-DRB1*13:02L HLA-DRB1*01:03L HLA-DRB1*01:02L HLA-DRB1*04:08L HLA-DRB1*15:03L
  source 1..14: note = Severe acute respiratory syndrome coronavirus 2
YGGWHNMLKTVYSD

SEQ ID NO: 14573 - protein, 14 aa, Severe acute respiratory syndrome-related coronavirus
  REGION 1..14: note = Table B: HLA-DRB1*13:02L HLA-DRB1*01:02L HLA-DRB1*14:01L HLA-DRB1*08:01L HLA-DRB1*04:08L
  source 1..14: note = Severe acute respiratory syndrome coronavirus 2
GWHNMLKTVYSDVE

SEQ ID NO: 14574 - protein, 18 aa, Severe acute respiratory syndrome-related coronavirus
  REGION 1..18: note = Table B: HLA-DRB1*13:02L HLA-DRB1*08:04L HLA-DPA1*01:03-B1*03:01L HLA-DRB1*03:01L HLA-DRB1*14:02L HLA-DQA1*05:05-B1*03:19L HLA-DQA1*05:01-B1*02:01L HLA-DPA1*01:03-B1*04:01L HLA-DPA1*01:03-B1*04:02L
  REGION 1..18: note = CONT. FROM ABOVE: HLA-DPA1*01:03-B1*104:01L HLA-DQA1*05:05-B1*03 :01L HLA-DQA1*02:01-B1*03:03L
  source 1..18: note = Severe acute respiratory syndrome coronavirus 2
NPHLMGWDYPKCDRAMPN

SEQ ID NO: 14575 - protein, 10 aa, Severe acute respiratory syndrome-related coronavirus
  REGION 1..10: note = Table B: HLA-DRB1*13:02L HLA-DRB1*13:03L HLA-DRB1*12:01L HLA-DQA1*03:01-B1*03:02L
  source 1..10: note = Severe acute respiratory syndrome coronavirus 2
RIMASLVLAR

SEQ ID NO: 14576 - protein, 13 aa, Severe acute respiratory syndrome-related coronavirus
  REGION 1..13: note = Table B: HLA-DRB1*13:02L HLA-DRB1*04:05L HLA-DRB1*08:04L HLA-DRB1*11:04L HLA-DRB1*11:01L HLA-DPA1*03:01-B1*105:01L HLA-DRB1*14:54L HLA-DPA1*01:02-B1*04:01L HLA-DRB1*04:08L HLA-DRB1*15:03L
  source 1..13: note = Severe acute respiratory syndrome coronavirus 2
IMASLVLARKHTT

SEQ ID NO: 14577 - protein, 14 aa, Severe acute respiratory syndrome-related coronavirus
  REGION 1..14: note = Table B: HLA-DRB1*13:02L HLA-DRB1*01:01L HLA-DPA1*01:03-B1*03:01L HLA-DRB1*11:01L HLA-DPA1*01:02-B1*04:01L HLA-DRB1*04:08L HLA-DQA1*02:01-B1*03:03L
  source 1..14: note = Severe acute respiratory syndrome coronavirus 2
VLARKHTTCCSLSH

SEQ ID NO: 14578 - protein, 14 aa, Severe acute respiratory syndrome-related coronavirus
  REGION 1..14: note = Table B: HLA-DRB1*13:02L HLA-DRB1*01:01L HLA-DRB1*11:01L HLA-DPA1*01:02-B1*04:01L
  source 1..14: note = Severe acute respiratory syndrome coronavirus 2
LARKHTTCCSLSHR

SEQ ID NO: 14579 - protein, 16 aa, Severe acute respiratory syndrome-related coronavirus
  REGION 1..16: note = Table B: HLA-DRB1*13:02L HLA-DRB1*14:02L
  source 1..16: note = Severe acute respiratory syndrome coronavirus 2
LSEMVMCGGSLYVKPG

SEQ ID NO: 14580 - protein, 14 aa, Severe acute respiratory syndrome-related coronavirus
  REGION 1..14: note = Table B: HLA-DRB1*13:02L HLA-DRB1*01:02L HLA-DRB1*08:04L HLA-DPA1*01:03-B1*03:01L HLA-DRB1*11:03L HLA-DRB1*11:04L HLA-DRB1*14:02L HLA-DRB1*11:01L HLA-DRB1*04:10L HLA-DRB1*12:02L HLA-DRB1*08:03L HLA-DRB1*15:03L
  source 1..14: note = Severe acute respiratory syndrome coronavirus 2
GGSLYVKPGGTSSG

SEQ ID NO: 14581 - protein, 14 aa, Severe acute respiratory syndrome-related coronavirus
  REGION 1..14: note = Table B: HLA-DRB1*13:02L HLA-DRB1*04:04L HLA-DRB1*08:77L HLA-DPA1*03:01-B1*04:02L HLA-DRB1*14:02L HLA-DPA1*01:03-B1*04:01L HLA-DRB3*01:01L HLA-DRB1*07:01L
  source 1..14: note = Severe acute respiratory syndrome coronavirus 2
SGDATTAYANSVFN

SEQ ID NO: 14582 - protein, 15 aa, Severe acute respiratory syndrome-related coronavirus
  REGION 1..15: note = Table B: HLA-DRB1*13:02L
  source 1..15: note = Severe acute respiratory syndrome coronavirus 2
DATTAYANSVFNICQ

SEQ ID NO: 14583 - protein, 16 aa, Severe acute respiratory syndrome-related coronavirus
  REGION 1..16: note = Table B: HLA-DRB1*13:02L HLA-DRB1*11:02L HLA-DRB1*14:02L
  source 1..16: note = Severe acute respiratory syndrome coronavirus 2
TTAYANSVFNICQAVT

SEQ ID NO: 14584 - protein, 14 aa, Severe acute respiratory syndrome-related coronavirus
  REGION 1..14: note = Table B: HLA-DRB1*13:02L HLA-DRB1*08:04L HLA-DRB3*02:01L HLA-DPA1*03:01-B1*04:02L HLA-DPA1*01:03-B1*04:02L HLA-DPA1*02:01-B1*13:01L HLA-DPA1*01:02-B1*04:01L
  source 1..14: note = Severe acute respiratory syndrome coronavirus 2
ANSVFNICQAVTAN

SEQ ID NO: 14585 - protein, 13 aa, Severe acute respiratory syndrome-related coronavirus
  REGION 1..13: note = Table B: HLA-DRB1*13:02L HLA-DRB1*14:01L HLA-DRB1*12:01L HLA-DRB1*15:03L
  source 1..13: note = Severe acute respiratory syndrome coronavirus 2
QAVTANVNALLST

SEQ ID NO: 14586 - protein, 13 aa, Severe acute respiratory syndrome-related coronavirus
  REGION 1..13: note = Table B: HLA-DRB1*13:02L HLA-DQA1*01:02-B1*06:02L HLA-DRB1*14:01L HLA-DRB1*12:01L HLA-DRB1*15:03L
  source 1..13: note = Severe acute respiratory syndrome coronavirus 2
AVTANVNALLSTD

SEQ ID NO: 14587 - protein, 11 aa, Severe acute respiratory syndrome-related coronavirus
  REGION 1..11: note = Table B: HLA-DRB1*13:02L
  source 1..11: note = Severe acute respiratory syndrome coronavirus 2
NALLSTDGNKI

SEQ ID NO: 14588 - protein, 13 aa, Severe acute respiratory syndrome-related coronavirus
  REGION 1..13: note = Table B: HLA-DRB1*13:02L
  source 1..13: note = Severe acute respiratory syndrome coronavirus 2
TDGNKIADKYVRN

SEQ ID NO: 14589 - protein, 13 aa, Severe acute respiratory syndrome-related coronavirus
  REGION 1..13: note = Table B: HLA-DRB1*13:02L HLA-DPA1*01:03-B1*03:01L HLA-DPA1*01:02-B1*04:01L
  source 1..13: note = Severe acute respiratory syndrome coronavirus 2
DGNKIADKYVRNL

SEQ ID NO: 14590 - protein, 13 aa, Severe acute respiratory syndrome-related coronavirus
  REGION 1..13: note = Table B: HLA-DRB1*13:02L HLA-DRB1*04:05L HLA-DRB1*01:02L HLA-DPA1*01:02-B1*04:01L
  source 1..13: note = Severe acute respiratory syndrome coronavirus 2
GNKIADKYVRNLQ

SEQ ID NO: 14591 - protein, 14 aa, Severe acute respiratory syndrome-related coronavirus
  REGION 1..14: note = Table B: HLA-DRB1*13:02L HLA-DPA1*01:03-B1*03:01L HLA-DQA1*02:01-B1*03:03L HLA-DRB1*15:03L
  source 1..14: note = Severe acute respiratory syndrome coronavirus 2
LQHRLYECLYRNRD

SEQ ID NO: 14592 - protein, 14 aa, Severe acute respiratory syndrome-related coronavirus
  REGION 1..14: note = Table B: HLA-DRB1*13:02L HLA-DRB1*04:05L HLA-DRB1*14:01L HLA-DPA1*01:03-B1*04:02L HLA-DRB1*12:01L HLA-DRB3*01:01L HLA-DPA1*02:01-B1*13:01L HLA-DPA1*01:02-B1*04:01L HLA-DRB1*15:03L
  source 1..14: note = Severe acute respiratory syndrome coronavirus 2
HRLYECLYRNRDVD

SEQ ID NO: 14593 - protein, 14 aa, Severe acute respiratory syndrome-related coronavirus
  REGION 1..14: note = Table B: HLA-DRB1*13:02L HLA-DRB1*04:05L HLA-DRB1*01:02L HLA-DRB3*01:01L
  source 1..14: note = Severe acute respiratory syndrome coronavirus 2
RLYECLYRNRDVDT

SEQ ID NO: 14594 - protein, 12 aa, Severe acute respiratory syndrome-related coronavirus
  REGION 1..12: note = Table B: HLA-DRB1*13:02L HLA-DRB1*01:02L HLA-DRB3*02:01L HLA-DQA1*05:05-B1*03:01L
  source 1..12: note = Severe acute respiratory syndrome coronavirus 2
RDVDTDFVNEFY

SEQ ID NO: 14595 - protein, 12 aa, Severe acute respiratory syndrome-related coronavirus
  REGION 1..12: note = Table B: HLA-DRB1*13:02L HLA-DRB1*01:02L HLA-DRB1*08:04L HLA-DRB1*11:04L HLA-DPA1*01:03-B1*04:02L HLA-DRB1*08:03L
  source 1..12: note = Severe acute respiratory syndrome coronavirus 2
EFYAYLRKHFSM

SEQ ID NO: 14596 - protein, 14 aa, Severe acute respiratory syndrome-related coronavirus
  REGION 1..14: note = Table B: HLA-DRB1*13:02L
  source 1..14: note = Severe acute respiratory syndrome coronavirus 2
YLRKHFSMMILSDD

SEQ ID NO: 14597 - protein, 13 aa, Severe acute respiratory syndrome-related coronavirus
  REGION 1..13: note = Table B: HLA-DRB1*13:02L HLA-DRB1*08:04L HLA-DRB4*01:01L
  source 1..13: note = Severe acute respiratory syndrome coronavirus 2
MMILSDDAVVCFN

SEQ ID NO: 14598 - protein, 14 aa, Severe acute respiratory syndrome-related coronavirus
  REGION 1..14: note = Table B: HLA-DRB1*13:02L HLA-DRB1*08:04L HLA-DRB3*02:01L HLA-DRB1*11:02L HLA-DRB4*01:01L HLA-DRB3*01:01L HLA-DRB1*04:08L
  source 1..14: note = Severe acute respiratory syndrome coronavirus 2
MILSDDAVVCFNST

SEQ ID NO: 14599 - protein, 14 aa, Severe acute respiratory syndrome-related coronavirus
  REGION 1..14: note = Table B: HLA-DRB1*13:02L HLA-DRB1*01:03L HLA-DRB1*04:04L HLA-DRB1*04:05L HLA-DRB1*14:01L HLA-DQA1*05:05-B1*03:19L HLA-DRB1*04:10L HLA-DPA1*03:01-B1*105:01L HLA-DQA1*03:01-B1*03:02L HLA-DQA1*05:05-B1*03:01L
  REGION 1..14: note = CONT. FROM ABOVE: HLA-DQA1*01:03-B1*06:01L HLA-DRB1*04:08L HLA-D QA1*02:01-B1*03:03L HLA-DRB1*15:01L
  source 1..14: note = Severe acute respiratory syndrome coronavirus 2
DAVVCFNSTYASQG

SEQ ID NO: 14600 - protein, 12 aa, Severe acute respiratory syndrome-related coronavirus
  REGION 1..12: note = Table B: HLA-DRB1*13:02L HLA-DRB1*13:03L HLA-DRB1*04:05L HLA-DRB1*01:02L HLA-DRB1*08:04L HLA-DPA1*01:03-B1*03:01L HLA-DQA1*01:01-B1*05:01L HLA-DRB1*08:01L HLA-DQA1*05:01-B1*02:01L HLA-DQA1*05:05-B1*03:116L
  REGION 1..12: note = CONT. FROM ABOVE: HLA-DPA1*01:03-B1*04:02L HLA-DRB1*12:01L HLA-D PA1*01:02-B1*04:01L HLA-DRB1*16:01L HLA-DRB1*04:08L HLA-DRB1*15: 03L
  source 1..12: note = Severe acute respiratory syndrome coronavirus 2
YASQGLVASIKN

SEQ ID NO: 14601 - protein, 13 aa, Severe acute respiratory syndrome-related coronavirus
  REGION 1..13: note = Table B: HLA-DRB1*13:02L HLA-DRB1*13:03L HLA-DRB1*08:04L HLA-DRB1*11:04L HLA-DRB1*08:01L
  source 1..13: note = Severe acute respiratory syndrome coronavirus 2
SQGLVASIKNFKS

SEQ ID NO: 14602 - protein, 14 aa, Severe acute respiratory syndrome-related coronavirus
  REGION 1..14: note = Table B: HLA-DRB1*13:02L HLA-DPA1*01:03-B1*104:01L
  source 1..14: note = Severe acute respiratory syndrome coronavirus 2
KNFKSVLYYQNNVF

SEQ ID NO: 14603 - protein, 13 aa, Severe acute respiratory syndrome-related coronavirus
  REGION 1..13: note = Table B: HLA-DRB1*13:02L HLA-DRB1*01:03L HLA-DRB1*08:04L HLA-DPA1*01:03-B1*03:01L HLA-DPA1*01:03-B1*04:02L HLA-DRB1*14:17L HLA-DPA1*01:02-B1*04:01L HLA-DQA1*01:03-B1*06:01L HLA-DRB1*04:08L
  source 1..13: note = Severe acute respiratory syndrome coronavirus 2
VLYYQNNVFMSEA

SEQ ID NO: 14604 - protein, 12 aa, Severe acute respiratory syndrome-related coronavirus
  REGION 1..12: note = Table B: HLA-DRB1*13:02L HLA-DRB1*04:04L HLA-DRB1*04:05L HLA-DRB1*01:02L HLA-DRB1*08:04L HLA-DPA1*01:03-B1*03:01L HLA-DPA1*03:01-B1*04:02L HLA-DRB1*14:01L HLA-DRB1*11:04L HLA-DRB1*08:01L HLA-DRB1*11:01L HLA-DQA1*01-B1*05L
  REGION 1..12: note = CONT. FROM ABOVE: HLA-DPA1*01:03-B1*04:01L HLA-DRB1*12:01L HLA-D RB1*14:54L HLA-DPA1*01:03-B1*02:01L HLA-DRB1*04:08L HLA-DRB1*15: 03L
  source 1..12: note = Severe acute respiratory syndrome coronavirus 2
YYQNNVFMSEAK

SEQ ID NO: 14605 - protein, 16 aa, Severe acute respiratory syndrome-related coronavirus
  REGION 1..16: note = Table B: HLA-DRB1*13:02L HLA-DRB1*04:04L HLA-DQA1*01:02-B1*06:02L HLA-DPA1*01:03-B1*03:01L HLA-DRB1*12:01L HLA-DPA1*02:01-B1*13:01L HLA-DPA1*03:01-B1*105:01L HLA-DPA1*01:03-B1*104:01L
  REGION 1..16: note = CONT. FROM ABOVE: HLA-DRB1*07:01L HLA-DRB1*15:03L
  source 1..16: note = Severe acute respiratory syndrome coronavirus 2
SEAKCWTETDLTKGPH

SEQ ID NO: 14606 - protein, 12 aa, Severe acute respiratory syndrome-related coronavirus
  REGION 1..12: note = Table B: HLA-DRB1*13:02L HLA-DRB3*02:01L HLA-DRB1*14:01L HLA-DRB1*09:01L HLA-DPA1*02:01-B1*13:01L HLA-DQA1*05:05-B1*03:01L
  source 1..12: note = Severe acute respiratory syndrome coronavirus 2
TETDLTKGPHEF

SEQ ID NO: 14607 - protein, 18 aa, Severe acute respiratory syndrome-related coronavirus
  REGION 1..18: note = Table B: HLA-DRB1*13:02L HLA-DRB1*01:02L HLA-DRB1*08:04L
  source 1..18: note = Severe acute respiratory syndrome coronavirus 2
TMLVKQGDDYVYLPYPDP

SEQ ID NO: 14608 - protein, 18 aa, Severe acute respiratory syndrome-related coronavirus
  REGION 1..18: note = Table B: HLA-DRB1*13:02L
  source 1..18: note = Severe acute respiratory syndrome coronavirus 2
MLVKQGDDYVYLPYPDPS

SEQ ID NO: 14609 - protein, 12 aa, Severe acute respiratory syndrome-related coronavirus
  REGION 1..12: note = Table B: HLA-DRB1*13:02L HLA-DRB1*04:04L HLA-DRB3*02:01L HLA-DRB3*01:01L HLA-DQA1*05:05-B1*03:01L HLA-DRB1*07:01L HLA-DRB1*04:08L HLA-DRB1*15:01L
  source 1..12: note = Severe acute respiratory syndrome coronavirus 2
YLPYPDPSRILG

SEQ ID NO: 14610 - protein, 13 aa, Severe acute respiratory syndrome-related coronavirus
  REGION 1..13: note = Table B: HLA-DRB1*13:02L HLA-DRB1*11:04L HLA-DRB1*14:02L HLA-DQA1*01:01-B1*05:01L HLA-DRB1*11:01L HLA-DQA1*05:01-B1*02:01L HLA-DPA1*02:01-B1*13:01L HLA-DPA1*03:01-B1*105:01L HLA-DPA1*01:02-B1*04:01L
  REGION 1..13: note = CONT. FROM ABOVE: HLA-DRB1*15:03L
  source 1..13: note = Severe acute respiratory syndrome coronavirus 2
IDAYPLTKHPNQE

SEQ ID NO: 14611 - protein, 14 aa, Severe acute respiratory syndrome-related coronavirus
  REGION 1..14: note = Table B: HLA-DRB1*13:02L HLA-DRB1*04:05L
  source 1..14: note = Severe acute respiratory syndrome coronavirus 2
VFHLYLQYIRKLHD

SEQ ID NO: 14612 - protein, 12 aa, Severe acute respiratory syndrome-related coronavirus
  REGION 1..12: note = Table B: HLA-DRB1*13:02L HLA-DRB1*01:03L HLA-DRB1*04:05L HLA-DRB1*01:02L HLA-DRB3*01:01L HLA-DPA1*01:02-B1*04:01L HLA-DRB1*16:01L HLA-DRB1*15:03L
  source 1..12: note = Severe acute respiratory syndrome coronavirus 2
LYLQYIRKLHDE

SEQ ID NO: 14613 - protein, 13 aa, Severe acute respiratory syndrome-related coronavirus
  REGION 1..13: note = Table B: HLA-DRB1*13:02L HLA-DRB1*04:02L HLA-DRB1*04:04L HLA-DPA1*03:01-B1*04:02L HLA-DQA1*01-B1*05L HLA-DRB1*04:10L HLA-DRB3*01:01L HLA-DPA1*02:01-B1*13:01L HLA-DPA1*03:01-B1*105:01L HLA-DQA1*03:01-B1*03:02L
  REGION 1..13: note = CONT. FROM ABOVE: HLA-DRB1*14:17L HLA-DPA1*01:02-B1*04:01L HLA-D RB1*08:03L HLA-DQA1*02:01-B1*03:03L
  source 1..13: note = Severe acute respiratory syndrome coronavirus 2
LQYIRKLHDELTG

SEQ ID NO: 14614 - protein, 15 aa, Severe acute respiratory syndrome-related coronavirus
  REGION 1..15: note = Table B: HLA-DRB1*13:02L HLA-DRB1*01:03L HLA-DRB1*01:01L HLA-DRB1*08:04L HLA-DRB3*02:01L HLA-DPA1*03:01-B1*04:02L HLA-DRB1*14:01L HLA-DRB1*14:02L HLA-DRB1*08:01L HLA-DRB1*09:01L HLA-DPA1*01:03-B1*04:02L HLA-DPA1*02:01-B1*13:01L
  REGION 1..15: note = CONT. FROM ABOVE: HLA-DPA1*01:03-B1*104:01L HLA-DRB1*10:01L HLA- DRB1*08:03L HLA-DRB1*15:01L
  source 1..15: note = Severe acute respiratory syndrome coronavirus 2
GHMLDMYSVMLTNDN

SEQ ID NO: 14615 - protein, 13 aa, Severe acute respiratory syndrome-related coronavirus
  REGION 1..13: note = Table B: HLA-DRB1*13:02L HLA-DRB1*04:05L HLA-DRB1*01:02L HLA-DRB4*03:01NL HLA-DRB1*08:04L HLA-DRB1*11:03L HLA-DRB1*11:04L HLA-DRB1*08:01L HLA-DRB1*11:01L HLA-DRB3*01:01L HLA-DRB1*14:54L HLA-DQA1*05:05-B1*03:01L HLA-DRB1*14:17L HLA-DRB1*04:08L
  source 1..13: note = Severe acute respiratory syndrome coronavirus 2
LTNDNTSRYWEPE

SEQ ID NO: 14616 - protein, 14 aa, Severe acute respiratory syndrome-related coronavirus
  REGION 1..14: note = Table B: HLA-DRB1*13:02L HLA-DPA1*01:03-B1*104:01L HLA-DRB1*04:08L
  source 1..14: note = Severe acute respiratory syndrome coronavirus 2
DNTSRYWEPEFYEA

SEQ ID NO: 14617 - protein, 14 aa, Severe acute respiratory syndrome-related coronavirus
  REGION 1..14: note = Table B: HLA-DRB1*13:02L HLA-DRB1*04:05L HLA-DRB1*08:04L HLA-DRB1*14:01L HLA-DRB1*11:04L HLA-DRB1*11:01L HLA-DRB3*01:01L
  source 1..14: note = Severe acute respiratory syndrome coronavirus 2
YWEPEFYEAMYTPH

SEQ ID NO: 14618 - protein, 16 aa, Severe acute respiratory syndrome-related coronavirus
  REGION 1..16: note = Table B: HLA-DRB1*13:02L HLA-DRB1*08:04L
  source 1..16: note = Severe acute respiratory syndrome coronavirus 2
HVISTSHKLVLSVNPY

SEQ ID NO: 14619 - protein, 13 aa, Severe acute respiratory syndrome-related coronavirus
  REGION 1..13: note = Table B: HLA-DRB1*13:02L HLA-DRB1*04:05L HLA-DRB3*01:01L HLA-DPA1*02:01-B1*13:01L HLA-DRB1*08:03L HLA-DRB1*15:03L
  source 1..13: note = Severe acute respiratory syndrome coronavirus 2
MSYYCKSHKPPIS

SEQ ID NO: 14620 - protein, 12 aa, Severe acute respiratory syndrome-related coronavirus
  REGION 1..12: note = Table B: HLA-DRB1*13:02L HLA-DRB1*01:02L HLA-DRB1*08:04L HLA-DPA1*01:03-B1*03:01L HLA-DPA1*03:01-B1*04:02L HLA-DRB1*14:01L HLA-DQA1*05:05-B1*03:19L HLA-DQA1*05:01-B1*02:01L HLA-DRB1*12:01L
  source 1..12: note = Severe acute respiratory syndrome coronavirus 2
DYILANTCTERL

SEQ ID NO: 14621 - protein, 13 aa, Severe acute respiratory syndrome-related coronavirus
  REGION 1..13: note = Table B: HLA-DRB1*13:02L HLA-DRB1*08:04L HLA-DPA1*01:03-B1*03:01L HLA-DRB1*14:01L HLA-DRB1*11:04L HLA-DRB1*08:01L HLA-DRB1*11:01L HLA-DPA1*01:03-B1*04:01L HLA-DRB1*04:10L HLA-DPA1*02:01-B1*13:01L HLA-DRB1*10:01L
  source 1..13: note = Severe acute respiratory syndrome coronavirus 2
LKLFAAETLKATE

SEQ ID NO: 14622 - protein, 12 aa, Severe acute respiratory syndrome-related coronavirus
  REGION 1..12: note = Table B: HLA-DRB1*13:02L HLA-DRB1*13:03L HLA-DRB1*04:05L HLA-DRB1*01:02L HLA-DRB1*08:04L HLA-DRB3*02:01L HLA-DPA1*01:03-B1*03:01L HLA-DPA1*03:01-B1*04:02L HLA-DRB1*14:01L HLA-DRB1*14:02L HLA-DQA1*01:01-B1*05:01L
  REGION 1..12: note = CONT. FROM ABOVE: HLA-DRB1*08:01L HLA-DPA1*01:03-B1*04:01L HLA-D RB1*04:10L HLA-DPA1*02:01-B1*13:01L HLA-DPA1*01:03-B1*02:01L HLA -DPA1*01:03-B1*104:01L HLA-DRB1*15:03L
  source 1..12: note = Severe acute respiratory syndrome coronavirus 2
FAAETLKATEET

SEQ ID NO: 14623 - protein, 11 aa, Severe acute respiratory syndrome-related coronavirus
  REGION 1..11: note = Table B: HLA-DRB1*13:02L HLA-DRB1*04:02L HLA-DRB1*08:01L HLA-DRB1*14:17L
  source 1..11: note = Severe acute respiratory syndrome coronavirus 2
ETLKATEETFK

SEQ ID NO: 14624 - protein, 10 aa, Severe acute respiratory syndrome-related coronavirus
  REGION 1..10: note = Table B: HLA-DRB1*13:02L HLA-DRB1*13:03L HLA-DRB1*12:01L HLA-DQA1*03:01-B1*03:02L HLA-DQA1*05:05-B1*03:01L
  source 1..10: note = Severe acute respiratory syndrome coronavirus 2
KLSYGIATVR

SEQ ID NO: 14625 - protein, 16 aa, Severe acute respiratory syndrome-related coronavirus
  REGION 1..16: note = Table B: HLA-DRB1*13:02L HLA-DRB1*04:02L HLA-DRB1*04:04L HLA-DRB1*14:01L HLA-DRB3*01:01L HLA-DPA1*02:01-B1*13:01L HLA-DPA1*03:01-B1*105:01L HLA-DRB1*07:01L
  source 1..16: note = Severe acute respiratory syndrome coronavirus 2
DRELHLSWEVGKPRPP

SEQ ID NO: 14626 - protein, 10 aa, Severe acute respiratory syndrome-related coronavirus
  REGION 1..10: note = Table B: HLA-DRB1*13:02L HLA-DRB1*13:03L HLA-DRB4*03:01NL HLA-DRB1*08:01L HLA-DQA1*01-B1*05L HLA-DRB1*12:01L HLA-DQA1*03:01-B1*03:02L HLA-DQA1*05:05-B1*03:01L HLA-DQA1*02:01-B1*03:03L
  source 1..10: note = Severe acute respiratory syndrome coronavirus 2
GDYGDAVVYR

SEQ ID NO: 14627 - protein, 12 aa, Severe acute respiratory syndrome-related coronavirus
  REGION 1..12: note = Table B: HLA-DRB1*13:02L HLA-DRB1*01:03L HLA-DRB3*02:01L HLA-DRB1*11:03L HLA-DRB1*14:02L HLA-DQA1*05:05-B1*03:01L HLA-DRB1*04:08L
  source 1..12: note = Severe acute respiratory syndrome coronavirus 2
GDYFVLTSHTVM

SEQ ID NO: 14628 - protein, 12 aa, Severe acute respiratory syndrome-related coronavirus
  REGION 1..12: note = Table B: HLA-DRB1*13:02L HLA-DRB1*01:03L HLA-DRB1*01:01L HLA-DRB3*02:01L HLA-DPA1*01:03-B1*03:01L HLA-DRB1*11:03L HLA-DRB1*14:02L HLA-DRB1*09:01L HLA-DQA1*05:05-B1*03:01L HLA-DRB1*07:01L HLA-DRB1*10:01L HLA-DRB1*04:08L
  source 1..12: note = Severe acute respiratory syndrome coronavirus 2
DYFVLTSHTVMP

SEQ ID NO: 14629 - protein, 14 aa, Severe acute respiratory syndrome-related coronavirus
  REGION 1..14: note = Table B: HLA-DRB1*13:02L HLA-DRB1*01:03L HLA-DRB1*04:04L HLA-DRB1*04:05L HLA-DRB1*01:02L HLA-DPA1*01:03-B1*03:01L HLA-DRB1*08:01L HLA-DPA1*01:03-B1*04:02L HLA-DRB1*12:01L HLA-DPA1*01:03-B1*104:01L HLA-DPA1*01:02-B1*04:01L
  REGION 1..14: note = CONT. FROM ABOVE: HLA-DRB1*16:01L HLA-DRB1*04:08L HLA-DRB1*15:03 L
  source 1..14: note = Severe acute respiratory syndrome coronavirus 2
VLTSHTVMPLSAPT

SEQ ID NO: 14630 - protein, 12 aa, Severe acute respiratory syndrome-related coronavirus
  REGION 1..12: note = Table B: HLA-DRB1*13:02L HLA-DRB1*04:05L HLA-DRB4*03:01NL HLA-DPA1*01:03-B1*03:01L HLA-DRB1*11:03L HLA-DRB1*04:10L HLA-DRB1*12:02L HLA-DRB1*14:54L HLA-DQA1*05:05-B1*03:01L
  source 1..12: note = Severe acute respiratory syndrome coronavirus 2
SHTVMPLSAPTL

SEQ ID NO: 14631 - protein, 13 aa, Severe acute respiratory syndrome-related coronavirus
  REGION 1..13: note = Table B: HLA-DRB1*13:02L HLA-DRB1*04:05L HLA-DRB1*12:02L HLA-DRB1*04:08L
  source 1..13: note = Severe acute respiratory syndrome coronavirus 2
TVMPLSAPTLVPQ

SEQ ID NO: 14632 - protein, 14 aa, Severe acute respiratory syndrome-related coronavirus
  REGION 1..14: note = Table B: HLA-DRB1*13:02L HLA-DRB1*01:02L HLA-DRB1*04:08L
  source 1..14: note = Severe acute respiratory syndrome coronavirus 2
MPLSAPTLVPQEHY

SEQ ID NO: 14633 - protein, 12 aa, Severe acute respiratory syndrome-related coronavirus
  REGION 1..12: note = Table B: HLA-DRB1*13:02L HLA-DRB1*04:05L HLA-DRB1*01:02L HLA-DQA1*01:01-B1*05:01L HLA-DRB1*08:01L HLA-DRB1*14:54L HLA-DRB1*14:17L HLA-DRB1*04:08L
  source 1..12: note = Severe acute respiratory syndrome coronavirus 2
APTLVPQEHYVR

SEQ ID NO: 14634 - protein, 14 aa, Severe acute respiratory syndrome-related coronavirus
  REGION 1..14: note = Table B: HLA-DRB1*13:02L HLA-DRB1*01:03L HLA-DRB1*01:02L HLA-DRB1*03:01L HLA-DRB1*12:01L HLA-DRB3*01:01L HLA-DRB1*04:08L
  source 1..14: note = Severe acute respiratory syndrome coronavirus 2
PTLVPQEHYVRITG

SEQ ID NO: 14635 - protein, 15 aa, Severe acute respiratory syndrome-related coronavirus
  REGION 1..15: note = Table B: HLA-DRB1*13:02L HLA-DRB1*04:04L HLA-DRB4*03:01NL HLA-DRB1*08:04L HLA-DRB3*02:01L HLA-DPA1*01:03-B1*03:01L HLA-DPA1*03:01-B1*04:02L HLA-DRB1*11:03L HLA-DRB1*11:04L HLA-DRB1*14:02L HLA-DQA1*01:01-B1*05:01L HLA-DRB1*11:01L
  REGION 1..15: note = CONT. FROM ABOVE: HLA-DQA1*05:01-B1*02:01L HLA-DRB1*04:10L HLA-D PA1*01:03-B1*04:02L HLA-DRB1*12:02L HLA-DRB3*01:01L HLA-DPA1*02: 01-B1*13:01L HLA-DRB1*14:54L HLA-DPA1*01:03-B1*02:01L HLA-DQA1*0 5:05-B1*03:01L HLA-DRB1*07:01L HLA-DRB1*10:01L
  REGION 1..15: note = CONT. FROM ABOVE: HLA-DQA1*01:03-B1*06:01L HLA-DRB1*08:02L HLA-D RB1*08:03L
  source 1..15: note = Severe acute respiratory syndrome coronavirus 2
VPQEHYVRITGLYPT

SEQ ID NO: 14636 - protein, 13 aa, Severe acute respiratory syndrome-related coronavirus
  REGION 1..13: note = Table B: HLA-DRB1*13:02L HLA-DRB1*13:03L HLA-DRB1*01:03L HLA-DRB1*04:04L HLA-DRB1*01:02L HLA-DRB1*08:04L HLA-DPA1*01:03-B1*03:01L HLA-DPA1*03:01-B1*04:02L HLA-DRB1*14:01L HLA-DRB1*11:04L HLA-DQA1*01:01-B1*05:01L
  REGION 1..13: note = CONT. FROM ABOVE: HLA-DRB1*08:01L HLA-DRB1*12:01L HLA-DRB1*12:02 L HLA-DPA1*02:01-B1*13:01L HLA-DRB1*14:54L HLA-DPA1*01:03-B1*104 :01L HLA-DRB1*10:01L HLA-DRB1*04:08L HLA-DRB1*08:03L HLA-DRB1*15 :03L
  source 1..13: note = Severe acute respiratory syndrome coronavirus 2
ITGLYPTLNISDE

SEQ ID NO: 14637 - protein, 12 aa, Severe acute respiratory syndrome-related coronavirus
  REGION 1..12: note = Table B: HLA-DRB1*13:02L HLA-DRB1*14:54L HLA-DRB1*16:01L
  source 1..12: note = Severe acute respiratory syndrome coronavirus 2
SNVANYQKVGMQ

SEQ ID NO: 14638 - protein, 10 aa, Severe acute respiratory syndrome-related coronavirus
  REGION 1..10: note = Table B: HLA-DRB1*13:02L HLA-DRB1*13:03L HLA-DRB1*04:02L HLA-DRB1*01:01L HLA-DRB4*03:01NL HLA-DRB1*08:01L HLA-DRB1*12:01L HLA-DQA1*03:01-B1*03:02L HLA-DQA1*05:05-B1*03:01L HLA-DRB1*14:17L HLA-DRB1*16:01L HLA-DQA1*02:01-B1*03:03L
  source 1..10: note = Severe acute respiratory syndrome coronavirus 2
ANYQKVGMQK

SEQ ID NO: 14639 - protein, 14 aa, Severe acute respiratory syndrome-related coronavirus
  REGION 1..14: note = Table B: HLA-DRB1*13:02L HLA-DRB1*04:05L HLA-DRB1*01:02L HLA-DPA1*01:03-B1*02:01L HLA-DQA1*05:05-B1*03:01L HLA-DRB1*04:08L
  source 1..14: note = Severe acute respiratory syndrome coronavirus 2
KSHFAIGLALYYPS

SEQ ID NO: 14640 - protein, 15 aa, Severe acute respiratory syndrome-related coronavirus
  REGION 1..15: note = Table B: HLA-DRB1*13:02L HLA-DRB1*04:04L HLA-DRB1*04:05L HLA-DRB1*11:01L HLA-DRB3*01:01L
  source 1..15: note = Severe acute respiratory syndrome coronavirus 2
SHFAIGLALYYPSAR

SEQ ID NO: 14641 - protein, 14 aa, Severe acute respiratory syndrome-related coronavirus
  REGION 1..14: note = Table B: HLA-DRB1*13:02L HLA-DPA1*01:03-B1*03:01L HLA-DRB1*08:01L
  source 1..14: note = Severe acute respiratory syndrome coronavirus 2
AIGLALYYPSARIV

SEQ ID NO: 14642 - protein, 14 aa, Severe acute respiratory syndrome-related coronavirus
  REGION 1..14: note = Table B: HLA-DRB1*13:02L HLA-DPA1*01:03-B1*104:01L HLA-DRB1*04:08L HLA-DRB1*15:03L
  source 1..14: note = Severe acute respiratory syndrome coronavirus 2
YPSARIVYTACSHA

SEQ ID NO: 14643 - protein, 16 aa, Severe acute respiratory syndrome-related coronavirus
  REGION 1..16: note = Table B: HLA-DRB1*13:02L HLA-DPA1*02:01-B1*13:01L HLA-DPA1*03:01-B1*105:01L HLA-DRB1*16:01L
  source 1..16: note = Severe acute respiratory syndrome coronavirus 2
AVDALCEKALKYLPID

SEQ ID NO: 14644 - protein, 15 aa, Severe acute respiratory syndrome-related coronavirus
  REGION 1..15: note = Table B: HLA-DRB1*13:02L HLA-DRB3*01:01L
  source 1..15: note = Severe acute respiratory syndrome coronavirus 2
ALKYLPIDKCSRIIP

SEQ ID NO: 14645 - protein, 15 aa, Severe acute respiratory syndrome-related coronavirus
  REGION 1..15: note = Table B: HLA-DRB1*13:02L HLA-DRB1*04:05L HLA-DRB1*08:04L HLA-DRB1*11:04L HLA-DRB1*11:01L HLA-DRB1*12:01L
  source 1..15: note = Severe acute respiratory syndrome coronavirus 2
LKYLPIDKCSRIIPA

SEQ ID NO: 14646 - protein, 16 aa, Severe acute respiratory syndrome-related coronavirus
  REGION 1..16: note = Table B: HLA-DRB1*13:02L HLA-DRB1*01:03L HLA-DRB1*04:05L HLA-DQA1*01:02-B1*06:02L HLA-DRB1*12:01L HLA-DPA1*02:01-B1*13:01L HLA-DRB1*15:03L
  source 1..16: note = Severe acute respiratory syndrome coronavirus 2
IPARARVECFDKFKVN

SEQ ID NO: 14647 - protein, 14 aa, Severe acute respiratory syndrome-related coronavirus
  REGION 1..14: note = Table B: HLA-DRB1*13:02L HLA-DRB1*01:03L HLA-DRB1*04:05L HLA-DRB1*01:02L HLA-DRB1*11:04L HLA-DRB1*08:01L HLA-DRB1*11:01L HLA-DRB1*12:01L HLA-DRB3*01:01L HLA-DRB1*04:08L HLA-DRB1*15:03L
  source 1..14: note = Severe acute respiratory syndrome coronavirus 2
ARVECFDKFKVNST

SEQ ID NO: 14648 - protein, 14 aa, Severe acute respiratory syndrome-related coronavirus
  REGION 1..14: note = Table B: HLA-DRB1*13:02L HLA-DRB1*04:02L HLA-DRB1*01:02L HLA-DRB4*03:01NL HLA-DPA1*01:03-B1*03:01L HLA-DPA1*01:03-B1*04:02L HLA-DPA1*02:01-B1*13:01L
  source 1..14: note = Severe acute respiratory syndrome coronavirus 2
ALPETTADIVVFDE

SEQ ID NO: 14649 - protein, 13 aa, Severe acute respiratory syndrome-related coronavirus
  REGION 1..13: note = Table B: HLA-DRB1*13:02L HLA-DRB1*01:03L HLA-DRB1*04:04L HLA-DRB1*04:05L HLA-DQA1*01:02-B1*06:02L HLA-DRB3*02:01L HLA-DRB1*04:08L HLA-DRB1*15:01L
  source 1..13: note = Severe acute respiratory syndrome coronavirus 2
ADIVVFDEISMAT

SEQ ID NO: 14650 - protein, 13 aa, Severe acute respiratory syndrome-related coronavirus
  REGION 1..13: note = Table B: HLA-DRB1*13:02L HLA-DRB1*04:05L HLA-DQA1*01:02-B1*06:02L HLA-DRB1*14:01L HLA-DRB1*08:01L HLA-DRB3*01:01L
  source 1..13: note = Severe acute respiratory syndrome coronavirus 2
DLSVVNARLRAKH

SEQ ID NO: 14651 - protein, 16 aa, Severe acute respiratory syndrome-related coronavirus
  REGION 1..16: note = Table B: HLA-DRB1*13:02L HLA-DRB3*01:01L HLA-DPA1*02:01-B1*13:01L
  source 1..16: note = Severe acute respiratory syndrome coronavirus 2
VNARLRAKHYVYIGDP

SEQ ID NO: 14652 - protein, 16 aa, Severe acute respiratory syndrome-related coronavirus
  REGION 1..16: note = Table B: HLA-DRB1*13:02L HLA-DRB1*04:04L HLA-DRB1*04:05L HLA-DRB1*14:01L HLA-DPA1*02:01-B1*13:01L
  source 1..16: note = Severe acute respiratory syndrome coronavirus 2
NARLRAKHYVYIGDPA

SEQ ID NO: 14653 - protein, 13 aa, Severe acute respiratory syndrome-related coronavirus
  REGION 1..13: note = Table B: HLA-DRB1*13:02L HLA-DRB1*14:01L HLA-DRB1*14:02L
  source 1..13: note = Severe acute respiratory syndrome coronavirus 2
HYVYIGDPAQLPA

SEQ ID NO: 14654 - protein, 13 aa, Severe acute respiratory syndrome-related coronavirus
  REGION 1..13: note = Table B: HLA-DRB1*13:02L HLA-DQA1*01:02-B1*06:02L HLA-DRB1*01:02L HLA-DRB1*08:04L HLA-DRB3*02:01L HLA-DPA1*01:03-B1*03:01L HLA-DPA1*03:01-B1*04:02L HLA-DRB1*14:01L HLA-DRB1*14:02L HLA-DRB1*12:02L
  source 1..13: note = Severe acute respiratory syndrome coronavirus 2
YVYIGDPAQLPAP

SEQ ID NO: 14655 - protein, 11 aa, Severe acute respiratory syndrome-related coronavirus
  REGION 1..11: note = Table B: HLA-DRB1*13:02L HLA-DQA1*01:02-B1*06:02L HLA-DRB1*01:02L HLA-DRB1*08:77L HLA-DRB3*02:01L HLA-DPA1*01:03-B1*03:01L HLA-DPA1*03:01-B1*04:02L HLA-DRB1*14:01L HLA-DRB1*11:03L HLA-DRB1*11:04L HLA-DRB1*14:02L
  REGION 1..11: note = CONT. FROM ABOVE: HLA-DQA1*01:01-B1*05:01L HLA-DRB1*08:01L HLA-D RB5*01:01L HLA-DQA1*05:05-B1*03:19L HLA-DPA1*01:03-B1*04:01L HLA -DQA1*05:05-B1*03:116L HLA-DRB1*09:01L HLA-DPA1*01:03-B1*04:02L HLA-DRB1*12:01L HLA-DRB1*12:02L HLA-DRB3*01:01L
  REGION 1..11: note = CONT. FROM ABOVE: HLA-DPA1*02:01-B1*13:01L HLA-DPA1*03:01-B1*105 :01L HLA-DRB1*14:54L HLA-DRB1*14:17L HLA-DPA1*01:02-B1*04:01L HL A-DRB1*10:01L HLA-DRB1*15:03L
  source 1..11: note = Severe acute respiratory syndrome coronavirus 2
DPAQLPAPRTL

SEQ ID NO: 14656 - protein, 12 aa, Severe acute respiratory syndrome-related coronavirus
  REGION 1..12: note = Table B: HLA-DRB1*13:02L HLA-DRB1*01:02L HLA-DRB3*02:01L HLA-DRB1*12:02L HLA-DQA1*05:05-B1*03:01L
  source 1..12: note = Severe acute respiratory syndrome coronavirus 2
EIVDTVSALVYD

SEQ ID NO: 14657 - protein, 12 aa, Severe acute respiratory syndrome-related coronavirus
  REGION 1..12: note = Table B: HLA-DRB1*13:02L HLA-DRB1*13:03L HLA-DRB1*01:03L HLA-DRB1*04:05L HLA-DRB1*01:02L HLA-DRB4*03:01NL HLA-DRB1*08:04L HLA-DRB1*08:77L HLA-DRB1*11:03L HLA-DRB1*11:04L HLA-DRB1*14:02L HLA-DRB1*08:01L HLA-DRB1*11:01L HLA-DQA1*05:01-B1*02:01L
  REGION 1..12: note = CONT. FROM ABOVE: HLA-DRB1*12:01L HLA-DRB1*12:02L HLA-DRB3*01:01 L HLA-DPA1*01:02-B1*04:01L HLA-DRB1*04:08L HLA-DRB1*08:03L HLA-D RB1*15:03L
  source 1..12: note = Severe acute respiratory syndrome coronavirus 2
VSALVYDNKLKA

SEQ ID NO: 14658 - protein, 12 aa, Severe acute respiratory syndrome-related coronavirus
  REGION 1..12: note = Table B: HLA-DRB1*13:02L HLA-DRB1*04:05L HLA-DQA1*01:02-B1*06:02L HLA-DRB1*03:01L HLA-DRB1*14:01L HLA-DRB1*11:01L HLA-DRB1*12:01L HLA-DQA1*02:01-B1*03:03L HLA-DRB1*15:03L
  source 1..12: note = Severe acute respiratory syndrome coronavirus 2
VYDNKLKAHKDK

SEQ ID NO: 14659 - protein, 12 aa, Severe acute respiratory syndrome-related coronavirus
  REGION 1..12: note = Table B: HLA-DRB1*13:02L HLA-DRB1*13:03L HLA-DRB1*04:05L HLA-DPA1*01:03-B1*03:01L HLA-DPA1*03:01-B1*04:02L HLA-DRB1*14:01L HLA-DRB1*08:01L HLA-DQA1*05:05-B1*03:19L HLA-DQA1*05:01-B1*02:01L HLA-DRB1*12:01L
  REGION 1..12: note = CONT. FROM ABOVE: HLA-DPA1*02:01-B1*13:01L HLA-DRB1*15:03L
  source 1..12: note = Severe acute respiratory syndrome coronavirus 2
MFYKGVITHDVS

SEQ ID NO: 14660 - protein, 11 aa, Severe acute respiratory syndrome-related coronavirus
  REGION 1..11: note = Table B: HLA-DRB1*13:02L HLA-DRB1*13:03L HLA-DRB1*08:01L HLA-DRB1*12:01L
  source 1..11: note = Severe acute respiratory syndrome coronavirus 2
ITHDVSSAINR

SEQ ID NO: 14661 - protein, 10 aa, Severe acute respiratory syndrome-related coronavirus
  REGION 1..10: note = Table B: HLA-DRB1*13:02L HLA-DRB1*13:03L HLA-DRB1*01:03L HLA-DRB1*08:01L HLA-DRB1*12:01L HLA-DQA1*03:01-B1*03:02L HLA-DRB1*14:17L HLA-DQA1*02:01-B1*03:03L
  source 1..10: note = Severe acute respiratory syndrome coronavirus 2
INRPQIGVVR

SEQ ID NO: 14662 - protein, 16 aa, Severe acute respiratory syndrome-related coronavirus
  REGION 1..16: note = Table B: HLA-DRB1*13:02L HLA-DRB1*04:04L HLA-DRB1*01:01L HLA-DRB1*07:01L HLA-DRB1*15:01L
  source 1..16: note = Severe acute respiratory syndrome coronavirus 2
RPQIGVVREFLTRNPA

SEQ ID NO: 14663 - protein, 14 aa, Severe acute respiratory syndrome-related coronavirus
  REGION 1..14: note = Table B: HLA-DRB1*13:02L HLA-DRB1*04:04L HLA-DRB1*11:04L HLA-DRB1*11:01L HLA-DRB1*07:01L
  source 1..14: note = Severe acute respiratory syndrome coronavirus 2
VVREFLTRNPAWRK

SEQ ID NO: 14664 - protein, 12 aa, Severe acute respiratory syndrome-related coronavirus
  REGION 1..12: note = Table B: HLA-DRB1*13:02L HLA-DRB1*04:05L HLA-DRB1*12:01L HLA-DRB3*01:01L HLA-DPA1*01:02-B1*04:01L HLA-DRB1*15:03L
  source 1..12: note = Severe acute respiratory syndrome coronavirus 2
EFLTRNPAWRKA

SEQ ID NO: 14665 - protein, 13 aa, Severe acute respiratory syndrome-related coronavirus
  REGION 1..13: note = Table B: HLA-DRB1*13:02L HLA-DRB1*13:03L HLA-DRB1*04:04L HLA-DRB4*03:01NL HLA-DRB1*08:04L HLA-DPA1*01:03-B1*03:01L HLA-DRB1*14:01L HLA-DRB1*08:01L HLA-DPA1*01:03-B1*04:01L HLA-DPA1*01:03-B1*04:02L HLA-DPA1*02:01-B1*13:01L
  source 1..13: note = Severe acute respiratory syndrome coronavirus 2
RKAVFISPYNSQN

SEQ ID NO: 14666 - protein, 14 aa, Severe acute respiratory syndrome-related coronavirus
  REGION 1..14: note = Table B: HLA-DRB1*13:02L HLA-DRB1*08:04L HLA-DPA1*01:03-B1*04:01L HLA-DPA1*01:03-B1*04:02L HLA-DPA1*01:03-B1*104:01L HLA-DRB1*10:01L
  source 1..14: note = Severe acute respiratory syndrome coronavirus 2
KAVFISPYNSQNAV

SEQ ID NO: 14667 - protein, 12 aa, Severe acute respiratory syndrome-related coronavirus
  REGION 1..12: note = Table B: HLA-DRB1*13:02L HLA-DQA1*01:02-B1*06:02L HLA-DRB1*01:01L HLA-DRB1*08:01L HLA-DQA1*05:05-B1*03:01L HLA-DRB1*10:01L HLA-DRB1*08:03L
  source 1..12: note = Severe acute respiratory syndrome coronavirus 2
FISPYNSQNAVA

SEQ ID NO: 14668 - protein, 12 aa, Severe acute respiratory syndrome-related coronavirus
  REGION 1..12: note = Table B: HLA-DRB1*13:02L HLA-DRB1*04:04L HLA-DRB1*08:04L HLA-DRB1*08:77L HLA-DRB3*02:01L HLA-DPA1*01:03-B1*03:01L HLA-DRB1*11:03L HLA-DRB1*11:04L HLA-DRB1*12:02L HLA-DRB1*07:01L
  source 1..12: note = Severe acute respiratory syndrome coronavirus 2
SKILGLPTQTVD

SEQ ID NO: 14669 - protein, 11 aa, Severe acute respiratory syndrome-related coronavirus
  REGION 1..11: note = Table B: HLA-DRB1*13:02L HLA-DRB1*04:04L HLA-DRB1*08:77L HLA-DRB1*11:03L HLA-DRB1*11:04L HLA-DRB1*12:02L HLA-DRB1*10:01L HLA-DRB1*04:08L HLA-DRB1*08:03L
  source 1..11: note = Severe acute respiratory syndrome coronavirus 2
ILGLPTQTVDS

SEQ ID NO: 14670 - protein, 11 aa, Severe acute respiratory syndrome-related coronavirus
  REGION 1..11: note = Table B: HLA-DRB1*13:02L HLA-DRB1*04:02L HLA-DRB1*11:01L HLA-DPA1*03:01-B1*105:01L HLA-DQA1*02:01-B1*03:03L
  source 1..11: note = Severe acute respiratory syndrome coronavirus 2
QTVDSSQGSEY

SEQ ID NO: 14671 - protein, 14 aa, Severe acute respiratory syndrome-related coronavirus
  REGION 1..14: note = Table B: HLA-DRB1*13:02L HLA-DRB1*13:03L HLA-DRB1*04:02L HLA-DRB1*04:04L HLA-DRB1*04:05L HLA-DRB1*14:01L HLA-DRB1*11:04L HLA-DRB1*14:02L HLA-DRB1*11:01L HLA-DQA1*05:05-B1*03:19L HLA-DRB3*01:01L HLA-DRB1*10:01L HLA-DRB1*08:03L
  source 1..14: note = Severe acute respiratory syndrome coronavirus 2
GSEYDYVIFTQTTE

SEQ ID NO: 14672 - protein, 10 aa, Severe acute respiratory syndrome-related coronavirus
  REGION 1..10: note = Table B: HLA-DRB1*13:02L HLA-DRB1*13:03M HLA-DRB1*01:01L HLA-DRB4*03:01NL HLA-DRB1*14:01L HLA-DRB1*11:04L HLA-DRB1*08:01M HLA-DRB5*01:01L HLA-DRB1*12:01L HLA-DQA1*03:01-B1*03:02M HLA-DQA1*05:05-B1*03:01M HLA-DQA1*01:03-B1*06:01L
  REGION 1..10: note = CONT. FROM ABOVE: HLA-DQA1*02:01-B1*03:03L HLA-DRB1*15:01L
  source 1..10: note = Severe acute respiratory syndrome coronavirus 2
ETAHSCNVNR

SEQ ID NO: 14673 - protein, 11 aa, Severe acute respiratory syndrome-related coronavirus
  REGION 1..11: note = Table B: HLA-DRB1*13:02L HLA-DRB1*13:03L HLA-DRB1*01:03L HLA-DRB1*08:01L HLA-DRB1*12:01L HLA-DRB1*16:01L
  source 1..11: note = Severe acute respiratory syndrome coronavirus 2
NVNRFNVAITR

SEQ ID NO: 14674 - protein, 11 aa, Severe acute respiratory syndrome-related coronavirus
  REGION 1..11: note = Table B: HLA-DRB1*13:02L HLA-DRB1*04:05L HLA-DRB1*01:02L HLA-DQA1*01:01-B1*05:01L HLA-DRB1*08:01L HLA-DQA1*05:05-B1*03:19L HLA-DQA1*05:01-B1*02:01L HLA-DRB1*12:01L HLA-DPA1*03:01-B1*105:01L HLA-DRB1*14:54L
  REGION 1..11: note = CONT. FROM ABOVE: HLA-DQA1*05:05-B1*03:01L HLA-DRB1*04:08L HLA-D RB1*15:03L
  source 1..11: note = Severe acute respiratory syndrome coronavirus 2
FNVAITRAKVG

SEQ ID NO: 14675 - protein, 12 aa, Severe acute respiratory syndrome-related coronavirus
  REGION 1..12: note = Table B: HLA-DRB1*13:02L HLA-DRB1*04:05L HLA-DPA1*01:03-B1*03:01L HLA-DPA1*03:01-B1*04:02L HLA-DRB1*14:54L
  source 1..12: note = Severe acute respiratory syndrome coronavirus 2
NVAITRAKVGIL

SEQ ID NO: 14676 - protein, 14 aa, Severe acute respiratory syndrome-related coronavirus
  REGION 1..14: note = Table B: HLA-DRB1*13:02L HLA-DRB1*04:04L HLA-DPA1*01:03-B1*104:01L HLA-DPA1*01:02-B1*04:01L HLA-DRB1*07:01L HLA-DRB1*04:08L
  source 1..14: note = Severe acute respiratory syndrome coronavirus 2
TRAKVGILCIMSDR

SEQ ID NO: 14677 - protein, 14 aa, Severe acute respiratory syndrome-related coronavirus
  REGION 1..14: note = Table B: HLA-DRB1*13:02L HLA-DRB1*04:04L HLA-DPA1*01:03-B1*03:01L HLA-DPA1*01:03-B1*104:01L
  source 1..14: note = Severe acute respiratory syndrome coronavirus 2
RAKVGILCIMSDRD

SEQ ID NO: 14678 - protein, 14 aa, Severe acute respiratory syndrome-related coronavirus
  REGION 1..14: note = Table B: HLA-DRB1*13:02L HLA-DRB1*04:05L HLA-DRB1*01:02L HLA-DRB1*08:04L
  source 1..14: note = Severe acute respiratory syndrome coronavirus 2
DRDLYDKLQFTSLE

SEQ ID NO: 14679 - protein, 15 aa, Severe acute respiratory syndrome-related coronavirus
  REGION 1..15: note = Table B: HLA-DRB1*13:02L
  source 1..15: note = Severe acute respiratory syndrome coronavirus 2
DLYDKLQFTSLEIPR

SEQ ID NO: 14680 - protein, 12 aa, Severe acute respiratory syndrome-related coronavirus
  REGION 1..12: note = Table B: HLA-DRB1*13:02L HLA-DRB1*13:03L HLA-DRB1*01:03L HLA-DRB1*04:04L HLA-DRB1*04:05L HLA-DRB4*03:01NL HLA-DRB1*08:77L HLA-DRB3*02:01L HLA-DPA1*01:03-B1*03:01L HLA-DPA1*03:01-B1*04:02L HLA-DRB1*14:01L HLA-DRB1*11:03L
  REGION 1..12: note = CONT. FROM ABOVE: HLA-DRB1*14:02L HLA-DQA1*01-B1*05L HLA-DQA1*05 :05-B1*03:19L HLA-DRB1*04:10L HLA-DRB1*09:01L HLA-DRB1*12:02L HL A-DPA1*02:01-B1*13:01L HLA-DRB1*14:54L HLA-DPA1*01:02-B1*04:01L HLA-DRB1*07:01L HLA-DRB1*10:01L HLA-DRB1*04:08L
  source 1..12: note = Severe acute respiratory syndrome coronavirus 2
RNVATLQAENVT

SEQ ID NO: 14681 - protein, 12 aa, Severe acute respiratory syndrome-related coronavirus
  REGION 1..12: note = Table B: HLA-DRB1*13:02L HLA-DRB1*01:01L HLA-DRB1*08:77L HLA-DRB1*14:01L HLA-DRB1*11:03L HLA-DRB1*14:02L HLA-DRB1*12:02L HLA-DRB1*07:01L
  source 1..12: note = Severe acute respiratory syndrome coronavirus 2
NVATLQAENVTG

SEQ ID NO: 14682 - protein, 12 aa, Severe acute respiratory syndrome-related coronavirus
  REGION 1..12: note = Table B: HLA-DRB1*13:02L HLA-DRB1*08:77L HLA-DRB3*02:01L HLA-DPA1*01:03-B1*03:01L HLA-DQA1*01-B1*05L HLA-DPA1*01:03-B1*04:01L HLA-DRB1*12:02L HLA-DRB1*07:01L
  source 1..12: note = Severe acute respiratory syndrome coronavirus 2
VATLQAENVTGL

SEQ ID NO: 14683 - protein, 13 aa, Severe acute respiratory syndrome-related coronavirus
  REGION 1..13: note = Table B: HLA-DRB1*13:02L HLA-DRB1*04:02L HLA-DRB1*11:03L HLA-DRB1*12:01L HLA-DRB3*01:01L HLA-DRB1*14:54L
  source 1..13: note = Severe acute respiratory syndrome coronavirus 2
TGLFKDCSKVITG

SEQ ID NO: 14684 - protein, 11 aa, Severe acute respiratory syndrome-related coronavirus
  REGION 1..11: note = Table B: HLA-DRB1*13:02L HLA-DQA1*01:02-B1*06:02L HLA-DPA1*03:01-B1*04:02L HLA-DQA1*05:05-B1*03:116L HLA-DQA1*01:03-B1*06:01L HLA-DRB1*15:03L
  source 1..11: note = Severe acute respiratory syndrome coronavirus 2
GLHPTQAPTHL

SEQ ID NO: 14685 - protein, 11 aa, Severe acute respiratory syndrome-related coronavirus
  REGION 1..11: note = Table B: HLA-DRB1*13:02L HLA-DRB4*03:01NL HLA-DRB1*03:01L HLA-DRB1*14:01L HLA-DQA1*05:01-B1*02:01L HLA-DRB3*01:01L HLA-DRB1*14:54L HLA-DRB1*04:08L
  source 1..11: note = Severe acute respiratory syndrome coronavirus 2
LSVDTKFKTEG

SEQ ID NO: 14686 - protein, 15 aa, Severe acute respiratory syndrome-related coronavirus
  REGION 1..15: note = Table B: HLA-DRB1*13:02L HLA-DRB1*04:05L HLA-DRB1*03:01L HLA-DRB1*12:01L HLA-DRB1*04:08L
  source 1..15: note = Severe acute respiratory syndrome coronavirus 2
IPGIPKDMTYRRLIS

SEQ ID NO: 14687 - protein, 11 aa, Severe acute respiratory syndrome-related coronavirus
  REGION 1..11: note = Table B: HLA-DRB1*13:02L HLA-DRB1*13:03L HLA-DQA1*01:02-B1*06:02L HLA-DRB1*01:02L HLA-DRB3*02:01L HLA-DPA1*01:03-B1*03:01L HLA-DRB1*14:01L HLA-DPA1*01:03-B1*04:01L HLA-DPA1*01:03-B1*04:02L
  source 1..11: note = Severe acute respiratory syndrome coronavirus 2
MNYQVNGYPNM

SEQ ID NO: 14688 - protein, 10 aa, Severe acute respiratory syndrome-related coronavirus
  REGION 1..10: note = Table B: HLA-DRB1*13:02L HLA-DRB1*13:03L HLA-DRB1*01:01L HLA-DRB4*03:01NL HLA-DRB3*02:01L HLA-DRB1*11:04L HLA-DRB1*08:01L HLA-DRB5*01:01L HLA-DPA1*01:03-B1*04:02L HLA-DRB1*12:01L HLA-DRB1*12:02L HLA-DQA1*03:01-B1*03:02M
  REGION 1..10: note = CONT. FROM ABOVE: HLA-DQA1*05:05-B1*03:01L HLA-DRB1*14:17L HLA-D QA1*01:03-B1*06:01L HLA-DQA1*02:01-B1*03:03L
  source 1..10: note = Severe acute respiratory syndrome coronavirus 2
NGYPNMFITR

SEQ ID NO: 14689 - protein, 12 aa, Severe acute respiratory syndrome-related coronavirus
  REGION 1..12: note = Table B: HLA-DRB1*13:02L HLA-DRB1*04:05L HLA-DQA1*01:02-B1*06:02L HLA-DRB1*14:01L HLA-DRB3*01:01L HLA-DRB1*15:03L
  source 1..12: note = Severe acute respiratory syndrome coronavirus 2
FITREEAIRHVR

SEQ ID NO: 14690 - protein, 14 aa, Severe acute respiratory syndrome-related coronavirus
  REGION 1..14: note = Table B: HLA-DRB1*13:02L HLA-DRB1*04:05L HLA-DRB1*01:01L HLA-DRB1*08:04L HLA-DRB1*11:04L HLA-DRB1*11:01L HLA-DRB3*01:01L HLA-DPA1*02:01-B1*13:01L HLA-DRB1*07:01L HLA-DRB1*15:01L
  source 1..14: note = Severe acute respiratory syndrome coronavirus 2
EEAIRHVRAWIGFD

SEQ ID NO: 14691 - protein, 13 aa, Severe acute respiratory syndrome-related coronavirus
  REGION 1..13: note = Table B: HLA-DRB1*13:02L HLA-DRB1*01:03L HLA-DRB1*04:04L HLA-DPA1*01:03-B1*03:01L HLA-DPA1*03:01-B1*04:02L HLA-DRB1*08:01L HLA-DPA1*03:01-B1*105:01L HLA-DQA1*03:01-B1*03:02L HLA-DPA1*01:02-B1*04:01L
  REGION 1..13: note = CONT. FROM ABOVE: HLA-DRB1*07:01L
  source 1..13: note = Severe acute respiratory syndrome coronavirus 2
RHVRAWIGFDVEG

SEQ ID NO: 14692 - protein, 12 aa, Severe acute respiratory syndrome-related coronavirus
  REGION 1..12: note = Table B: HLA-DRB1*13:02L HLA-DRB1*04:02L HLA-DPA1*01:03-B1*03:01L HLA-DRB1*14:01L HLA-DQA1*01:01-B1*05:01L HLA-DQA1*01-B1*05L HLA-DRB1*12:01L HLA-DQA1*05:05-B1*03:01L HLA-DRB1*16:01L
  source 1..12: note = Severe acute respiratory syndrome coronavirus 2
EAVGTNLPLQLG

SEQ ID NO: 14693 - protein, 13 aa, Severe acute respiratory syndrome-related coronavirus
  REGION 1..13: note = Table B: HLA-DRB1*13:02L HLA-DRB1*13:03L HLA-DRB1*04:02L HLA-DRB1*04:05L HLA-DRB1*01:02L HLA-DRB4*03:01NL HLA-DRB1*08:77L HLA-DRB3*02:01L HLA-DPA1*01:03-B1*03:01L HLA-DPA1*03:01-B1*04:02L HLA-DRB1*14:01L HLA-DRB1*11:03L
  REGION 1..13: note = CONT. FROM ABOVE: HLA-DPA1*01:03-B1*04:01L HLA-DRB1*09:01L HLA-D RB1*12:01L HLA-DRB1*12:02L HLA-DRB1*14:54L HLA-DRB1*14:17L HLA-D RB1*07:01L HLA-DRB1*16:01L HLA-DRB1*15:03L
  source 1..13: note = Severe acute respiratory syndrome coronavirus 2
LPLQLGFSTGVNL

SEQ ID NO: 14694 - protein, 10 aa, Severe acute respiratory syndrome-related coronavirus
  REGION 1..10: note = Table B: HLA-DRB1*13:02L HLA-DRB1*13:03L HLA-DRB4*03:01NL HLA-DRB1*08:01L HLA-DRB5*01:01L HLA-DRB1*12:01L HLA-DQA1*03:01-B1*03:02L HLA-DQA1*05:05-B1*03:01L
  source 1..10: note = Severe acute respiratory syndrome coronavirus 2
DTPNNTDFSR

SEQ ID NO: 14695 - protein, 14 aa, Severe acute respiratory syndrome-related coronavirus
  REGION 1..14: note = Table B: HLA-DRB1*13:02L HLA-DRB1*04:04L HLA-DRB1*11:04L HLA-DRB1*11:01L HLA-DRB3*01:01L HLA-DPA1*02:01-B1*13:01L HLA-DPA1*03:01-B1*105:01L HLA-DQA1*05:05-B1*03:01L HLA-DRB1*07:01L HLA-DRB1*10:01L HLA-DQA1*01:03-B1*06:01L
  REGION 1..14: note = CONT. FROM ABOVE: HLA-DRB1*08:03L
  source 1..14: note = Severe acute respiratory syndrome coronavirus 2
NTDFSRVSAKPPPG

SEQ ID NO: 14696 - protein, 14 aa, Severe acute respiratory syndrome-related coronavirus
  REGION 1..14: note = Table B: HLA-DRB1*13:02L HLA-DRB1*04:04L HLA-DPA1*01:03-B1*03:01L HLA-DRB1*14:01L HLA-DQA1*01:01-B1*05:01L HLA-DRB1*11:01L HLA-DQA1*01-B1*05L HLA-DPA1*03:01-B1*105:01L HLA-DRB1*14:54L
  REGION 1..14: note = CONT. FROM ABOVE: HLA-DPA1*01:03-B1*104:01L HLA-DPA1*01:02-B1*04 :01L HLA-DRB1*07:01L HLA-DRB1*08:03L HLA-DRB1*15:03L
  source 1..14: note = Severe acute respiratory syndrome coronavirus 2
DFSRVSAKPPPGDQ

SEQ ID NO: 14697 - protein, 16 aa, Severe acute respiratory syndrome-related coronavirus
  REGION 1..16: note = Table B: HLA-DRB1*13:02L HLA-DRB1*14:01L HLA-DRB1*08:01L HLA-DRB1*07:01L
  source 1..16: note = Severe acute respiratory syndrome coronavirus 2
PPPGDQFKHLIPLMYK

SEQ ID NO: 14698 - protein, 13 aa, Severe acute respiratory syndrome-related coronavirus
  REGION 1..13: note = Table B: HLA-DRB1*13:02L HLA-DRB1*04:05L HLA-DRB1*08:04L HLA-DPA1*01:03-B1*03:01L HLA-DPA1*01:03-B1*04:01L HLA-DPA1*01:03-B1*04:02L HLA-DPA1*01:03-B1*02:01L HLA-DQA1*05:05-B1*03:01L
  source 1..13: note = Severe acute respiratory syndrome coronavirus 2
GLPWNVVRIKIVQ

SEQ ID NO: 14699 - protein, 14 aa, Severe acute respiratory syndrome-related coronavirus
  REGION 1..14: note = Table B: HLA-DRB1*13:02L
  source 1..14: note = Severe acute respiratory syndrome coronavirus 2
NVVRIKIVQMLSDT

SEQ ID NO: 14700 - protein, 15 aa, Severe acute respiratory syndrome-related coronavirus
  REGION 1..15: note = Table B: HLA-DRB1*13:02L
  source 1..15: note = Severe acute respiratory syndrome coronavirus 2
VVRIKIVQMLSDTLK

SEQ ID NO: 14701 - protein, 13 aa, Severe acute respiratory syndrome-related coronavirus
  REGION 1..13: note = Table B: HLA-DRB1*13:02L HLA-DRB1*01:01L HLA-DRB3*02:01L HLA-DPA1*01:03-B1*03:01L HLA-DRB1*11:03L HLA-DRB1*11:04L HLA-DRB1*08:01L HLA-DRB3*01:01L HLA-DQA1*05:05-B1*03:01L HLA-DRB1*07:01L HLA-DRB1*08:03L HLA-DRB1*15:01L
  source 1..13: note = Severe acute respiratory syndrome coronavirus 2
IKIVQMLSDTLKN

SEQ ID NO: 14702 - protein, 14 aa, Severe acute respiratory syndrome-related coronavirus
  REGION 1..14: note = Table B: HLA-DRB1*13:02L HLA-DRB1*08:04L HLA-DPA1*02:01-B1*13:01L
  source 1..14: note = Severe acute respiratory syndrome coronavirus 2
IVQMLSDTLKNLSD

SEQ ID NO: 14703 - protein, 12 aa, Severe acute respiratory syndrome-related coronavirus
  REGION 1..12: note = Table B: HLA-DRB1*13:02L HLA-DRB1*04:08L
  source 1..12: note = Severe acute respiratory syndrome coronavirus 2
RVVFVLWAHGFE

SEQ ID NO: 14704 - protein, 13 aa, Severe acute respiratory syndrome-related coronavirus
  REGION 1..13: note = Table B: HLA-DRB1*13:02L HLA-DRB1*01:03L HLA-DRB1*08:04L HLA-DPA1*01:03-B1*03:01L HLA-DRB1*14:02L HLA-DRB1*08:01L HLA-DQA1*05:05-B1*03:19L HLA-DPA1*01:03-B1*02:01L HLA-DPA1*01:03-B1*104:01L HLA-DQA1*05:05-B1*03:01L
  source 1..13: note = Severe acute respiratory syndrome coronavirus 2
VVFVLWAHGFELT

SEQ ID NO: 14705 - protein, 14 aa, Severe acute respiratory syndrome-related coronavirus
  REGION 1..14: note = Table B: HLA-DRB1*13:02L HLA-DRB1*11:04L HLA-DRB1*14:02L HLA-DRB1*11:01L HLA-DPA1*01:03-B1*104:01L
  source 1..14: note = Severe acute respiratory syndrome coronavirus 2
FVLWAHGFELTSMK

SEQ ID NO: 14706 - protein, 16 aa, Severe acute respiratory syndrome-related coronavirus
  REGION 1..16: note = Table B: HLA-DRB1*13:02L HLA-DPA1*01:03-B1*03:01L HLA-DPA1*01:03-B1*04:02L HLA-DRB3*01:01L HLA-DPA1*01:03-B1*02:01L HLA-DQA1*05:05-B1*03:01L
  source 1..16: note = Severe acute respiratory syndrome coronavirus 2
GFELTSMKYFVKIGPE

SEQ ID NO: 14707 - protein, 13 aa, Severe acute respiratory syndrome-related coronavirus
  REGION 1..13: note = Table B: HLA-DRB1*13:02L HLA-DRB1*04:05L HLA-DRB1*01:02L HLA-DRB1*12:01L HLA-DPA1*02:01-B1*13:01L
  source 1..13: note = Severe acute respiratory syndrome coronavirus 2
TSMKYFVKIGPER

SEQ ID NO: 14708 - protein, 12 aa, Severe acute respiratory syndrome-related coronavirus
  REGION 1..12: note = Table B: HLA-DRB1*13:02L HLA-DRB1*04:04L HLA-DRB1*08:04L HLA-DPA1*01:03-B1*03:01L HLA-DRB1*11:04L HLA-DQA1*01:01-B1*05:01L HLA-DRB1*11:01L HLA-DRB1*04:10L HLA-DRB3*01:01L HLA-DPA1*02:01-B1*13:01L HLA-DRB1*14:54L
  REGION 1..12: note = CONT. FROM ABOVE: HLA-DRB1*07:01L HLA-DRB1*10:01L HLA-DRB1*08:03 L
  source 1..12: note = Severe acute respiratory syndrome coronavirus 2
MKYFVKIGPERT

SEQ ID NO: 14709 - protein, 14 aa, Severe acute respiratory syndrome-related coronavirus
  REGION 1..14: note = Table B: HLA-DRB1*13:02L HLA-DPA1*03:01-B1*04:02L HLA-DRB1*11:02L HLA-DRB1*11:03L HLA-DRB1*11:04L HLA-DRB1*14:02L HLA-DQA1*05:05-B1*03:19L HLA-DQA1*05:05-B1*03:116L HLA-DRB1*12:01L HLA-DRB3*01:01L HLA-DPA1*01:03-B1*02:01L
  REGION 1..14: note = CONT. FROM ABOVE: HLA-DRB1*08:02L HLA-DRB1*15:03L
  source 1..14: note = Severe acute respiratory syndrome coronavirus 2
SDTYACWHHSIGFD

SEQ ID NO: 14710 - protein, 12 aa, Severe acute respiratory syndrome-related coronavirus
  REGION 1..12: note = Table B: HLA-DRB1*13:02L HLA-DRB1*04:05L HLA-DRB1*01:02L HLA-DRB3*02:01L HLA-DPA1*01:03-B1*03:01L HLA-DRB1*14:01L HLA-DPA1*01:03-B1*04:02L HLA-DQA1*05:05-B1*03:01L
  source 1..12: note = Severe acute respiratory syndrome coronavirus 2
SIGFDYVYNPFM

SEQ ID NO: 14711 - protein, 13 aa, Severe acute respiratory syndrome-related coronavirus
  REGION 1..13: note = Table B: HLA-DRB1*13:02L HLA-DRB1*01:02L HLA-DRB1*08:04L HLA-DRB3*02:01L HLA-DPA1*01:03-B1*03:01L HLA-DRB1*03:01L HLA-DPA1*01:03-B1*04:02L HLA-DQA1*05:05-B1*03:01L HLA-DRB1*04:08L
  source 1..13: note = Severe acute respiratory syndrome coronavirus 2
NPFMIDVQQWGFT

SEQ ID NO: 14712 - protein, 13 aa, Severe acute respiratory syndrome-related coronavirus
  REGION 1..13: note = Table B: HLA-DRB1*13:02L HLA-DRB1*04:02L HLA-DRB1*08:04L HLA-DRB1*14:01L HLA-DRB1*14:17L
  source 1..13: note = Severe acute respiratory syndrome coronavirus 2
TGNLQSNHDLYCQ

SEQ ID NO: 14713 - protein, 14 aa, Severe acute respiratory syndrome-related coronavirus
  REGION 1..14: note = Table B: HLA-DRB1*13:02L HLA-DRB1*01:02L HLA-DRB1*08:04L HLA-DPA1*03:01-B1*04:02L HLA-DRB1*14:01L HLA-DRB3*01:01L HLA-DPA1*01:02-B1*04:01L HLA-DQA1*01:03-B1*06:01L HLA-DRB1*04:08L
  source 1..14: note = Severe acute respiratory syndrome coronavirus 2
GNLQSNHDLYCQVH

SEQ ID NO: 14714 - protein, 14 aa, Severe acute respiratory syndrome-related coronavirus
  REGION 1..14: note = Table B: HLA-DRB1*13:02L HLA-DPA1*01:03-B1*03:01L HLA-DRB1*11:04L HLA-DPA1*02:01-B1*13:01L HLA-DRB1*07:01L
  source 1..14: note = Severe acute respiratory syndrome coronavirus 2
GNAHVASCDAIMTR

SEQ ID NO: 14715 - protein, 13 aa, Severe acute respiratory syndrome-related coronavirus
  REGION 1..13: note = Table B: HLA-DRB1*13:02L HLA-DRB1*04:04L HLA-DRB1*01:02L HLA-DRB4*03:01NL HLA-DRB1*08:04L HLA-DPA1*01:03-B1*03:01L HLA-DRB1*08:01L HLA-DRB1*04:10L HLA-DPA1*01:03-B1*04:02L HLA-DRB1*12:01L HLA-DRB1*14:54L HLA-DQA1*05:05-B1*03:01L
  REGION 1..13: note = CONT. FROM ABOVE: HLA-DRB1*04:08L
  source 1..13: note = Severe acute respiratory syndrome coronavirus 2
YPIIGDELKINAA

SEQ ID NO: 14716 - protein, 13 aa, Severe acute respiratory syndrome-related coronavirus
  REGION 1..13: note = Table B: HLA-DRB1*13:02L HLA-DRB1*13:03L HLA-DRB1*04:05L HLA-DRB1*11:03L
  source 1..13: note = Severe acute respiratory syndrome coronavirus 2
ELKINAACRKVQH

SEQ ID NO: 14717 - protein, 14 aa, Severe acute respiratory syndrome-related coronavirus
  REGION 1..14: note = Table B: HLA-DRB1*13:02L HLA-DRB1*04:04L HLA-DRB1*04:05L HLA-DRB1*08:04L HLA-DPA1*01:03-B1*03:01L HLA-DRB1*11:03L HLA-DRB1*11:04L HLA-DRB1*11:01L HLA-DRB3*01:01L HLA-DPA1*02:01-B1*13:01L HLA-DPA1*03:01-B1*105:01L
  REGION 1..14: note = CONT. FROM ABOVE: HLA-DPA1*01:03-B1*02:01L HLA-DRB1*07:01L HLA-D RB1*04:08M HLA-DRB1*08:03L HLA-DRB1*15:03L
  source 1..14: note = Severe acute respiratory syndrome coronavirus 2
VQHMVVKAALLADK

SEQ ID NO: 14718 - protein, 12 aa, Severe acute respiratory syndrome-related coronavirus
  REGION 1..12: note = Table B: HLA-DRB1*13:02L HLA-DRB1*08:04L HLA-DPA1*01:03-B1*03:01L HLA-DRB1*11:04L HLA-DRB1*08:01L HLA-DRB1*11:01L HLA-DRB3*01:01L HLA-DPA1*01:03-B1*02:01L
  source 1..12: note = Severe acute respiratory syndrome coronavirus 2
AALLADKFPVLH

SEQ ID NO: 14719 - protein, 12 aa, Severe acute respiratory syndrome-related coronavirus
  REGION 1..12: note = Table B: HLA-DRB1*13:02L HLA-DRB1*04:04L HLA-DRB1*01:02L HLA-DRB1*08:04L HLA-DRB1*08:77L HLA-DRB1*14:01L HLA-DRB1*11:04L HLA-DQA1*05:01-B1*02:01L HLA-DRB1*04:10L HLA-DRB3*01:01L HLA-DPA1*02:01-B1*13:01L HLA-DRB1*10:01L
  source 1..12: note = Severe acute respiratory syndrome coronavirus 2
FPVLHDIGNPKA

SEQ ID NO: 14720 - protein, 14 aa, Severe acute respiratory syndrome-related coronavirus
  REGION 1..14: note = Table B: HLA-DRB1*13:02L HLA-DRB1*13:03L HLA-DRB1*01:03L HLA-DRB1*04:02L HLA-DRB1*04:04L HLA-DRB1*04:05L HLA-DRB1*01:02L HLA-DRB4*03:01NL HLA-DRB1*08:04L HLA-DRB1*08:77L HLA-DRB3*02:01L HLA-DPA1*01:03-B1*03:01L HLA-DPA1*03:01-B1*04:02L
  REGION 1..14: note = CONT. FROM ABOVE: HLA-DRB1*14:01L HLA-DRB1*11:03L HLA-DRB1*11:04 L HLA-DRB1*14:02L HLA-DQA1*01:01-B1*05:01L HLA-DRB1*08:01L HLA-D RB1*11:01L HLA-DQA1*01-B1*05L HLA-DQA1*05:01-B1*02:01L HLA-DPA1* 01:03-B1*04:01L HLA-DRB1*04:10L HLA-DRB1*09:01L
  REGION 1..14: note = CONT. FROM ABOVE: HLA-DPA1*01:03-B1*04:02L HLA-DRB1*12:01M HLA-D RB1*12:02L HLA-DRB3*01:01L HLA-DPA1*02:01-B1*13:01L HLA-DRB1*14: 54L HLA-DPA1*01:03-B1*02:01L HLA-DPA1*01:03-B1*104:01L HLA-DRB1* 14:17L HLA-DPA1*01:02-B1*04:01L HLA-DRB1*07:01L HLA-DRB1*10:01L
  REGION 1..14: note = CONT. FROM ABOVE: HLA-DRB1*16:01L HLA-DRB1*04:08L HLA-DRB1*08:02 L HLA-DRB1*08:03L HLA-DRB1*15:03L
  source 1..14: note = Severe acute respiratory syndrome coronavirus 2
NPKAIKCVPQADVE

SEQ ID NO: 14721 - protein, 14 aa, Severe acute respiratory syndrome-related coronavirus
  REGION 1..14: note = Table B: HLA-DRB1*13:02L HLA-DRB1*01:03L HLA-DRB1*04:05L HLA-DRB1*01:02L HLA-DPA1*02:01-B1*13:01L HLA-DQA1*03:01-B1*03:02L HLA-DQA1*02:01-B1*03:03L
  source 1..14: note = Severe acute respiratory syndrome coronavirus 2
DAQPCSDKAYKIEE

SEQ ID NO: 14722 - protein, 14 aa, Severe acute respiratory syndrome-related coronavirus
  REGION 1..14: note = Table B: HLA-DRB1*13:02L HLA-DRB1*08:01L HLA-DPA1*01:03-B1*02:01L
  source 1..14: note = Severe acute respiratory syndrome coronavirus 2
KAYKIEELFYSYAT

SEQ ID NO: 14723 - protein, 14 aa, Severe acute respiratory syndrome-related coronavirus
  REGION 1..14: note = Table B: HLA-DRB1*13:02L HLA-DRB1*01:02L HLA-DRB1*08:04L HLA-DRB1*08:01L HLA-DRB1*12:01L HLA-DPA1*01:03-B1*02:01L HLA-DRB1*04:08L
  source 1..14: note = Severe acute respiratory syndrome coronavirus 2
AYKIEELFYSYATH

SEQ ID NO: 14724 - protein, 14 aa, Severe acute respiratory syndrome-related coronavirus
  REGION 1..14: note = Table B: HLA-DRB1*13:02L HLA-DRB1*08:04L HLA-DPA1*03:01-B1*04:02L HLA-DRB3*01:01L HLA-DQA1*05:05-B1*03:01L
  source 1..14: note = Severe acute respiratory syndrome coronavirus 2
FYSYATHSDKFTDG

SEQ ID NO: 14725 - protein, 13 aa, Severe acute respiratory syndrome-related coronavirus
  REGION 1..13: note = Table B: HLA-DRB1*13:02L HLA-DRB1*04:05L
  source 1..13: note = Severe acute respiratory syndrome coronavirus 2
NVDRYPANSIVCR

SEQ ID NO: 14726 - protein, 14 aa, Severe acute respiratory syndrome-related coronavirus
  REGION 1..14: note = Table B: HLA-DRB1*13:02L HLA-DRB1*04:04L HLA-DRB1*04:05L HLA-DQA1*01:02-B1*06:02L HLA-DPA1*01:03-B1*03:01L HLA-DPA1*03:01-B1*105:01L HLA-DPA1*01:03-B1*104:01L HLA-DRB1*07:01L HLA-DRB1*04:08L HLA-DRB1*15:03L
  source 1..14: note = Severe acute respiratory syndrome coronavirus 2
IVCRFDTRVLSNLN

SEQ ID NO: 14727 - protein, 13 aa, Severe acute respiratory syndrome-related coronavirus
  REGION 1..13: note = Table B: HLA-DRB1*13:02L HLA-DRB1*13:03L HLA-DRB1*04:05L HLA-DQA1*01:02-B1*06:02L HLA-DRB1*08:04L HLA-DRB1*11:04L HLA-DRB1*11:01L HLA-DRB1*12:01L HLA-DRB1*04:08L
  source 1..13: note = Severe acute respiratory syndrome coronavirus 2
GSLYVNKHAFHTP

SEQ ID NO: 14728 - protein, 13 aa, Severe acute respiratory syndrome-related coronavirus
  REGION 1..13: note = Table B: HLA-DRB1*13:02L HLA-DRB1*04:05L HLA-DRB1*11:03L HLA-DRB3*01:01L HLA-DRB1*08:03L HLA-DQA1*02:01-B1*03:03L
  source 1..13: note = Severe acute respiratory syndrome coronavirus 2
SLYVNKHAFHTPA

SEQ ID NO: 14729 - protein, 13 aa, Severe acute respiratory syndrome-related coronavirus
  REGION 1..13: note = Table B: HLA-DRB1*13:02L HLA-DRB1*01:03L HLA-DRB1*04:04L HLA-DRB1*01:01L HLA-DPA1*01:03-B1*03:01L HLA-DQA1*01:01-B1*05:01L HLA-DRB1*11:01L HLA-DRB1*04:10L HLA-DRB3*01:01L HLA-DPA1*01:03-B1*104:01L
  REGION 1..13: note = CONT. FROM ABOVE: HLA-DPA1*01:02-B1*04:01L HLA-DRB1*07:01L HLA-D RB1*04:08L HLA-DRB1*15:03L
  source 1..13: note = Severe acute respiratory syndrome coronavirus 2
VNKHAFHTPAFDK

SEQ ID NO: 14730 - protein, 14 aa, Severe acute respiratory syndrome-related coronavirus
  REGION 1..14: note = Table B: HLA-DRB1*13:02L HLA-DRB1*04:04L HLA-DPA1*01:03-B1*03:01L
  source 1..14: note = Severe acute respiratory syndrome coronavirus 2
NKHAFHTPAFDKSA

SEQ ID NO: 14731 - protein, 16 aa, Severe acute respiratory syndrome-related coronavirus
  REGION 1..16: note = Table B: HLA-DRB1*13:02L HLA-DRB1*03:01L HLA-DRB1*11:01L HLA-DQA1*05:05-B1*03:19L
  source 1..16: note = Severe acute respiratory syndrome coronavirus 2
PFFYYSDSPCESHGKQ

SEQ ID NO: 14732 - protein, 13 aa, Severe acute respiratory syndrome-related coronavirus
  REGION 1..13: note = Table B: HLA-DRB1*13:02L HLA-DRB1*13:03L HLA-DRB1*01:03L HLA-DRB1*04:04L HLA-DQA1*01:02-B1*06:02L HLA-DRB1*01:02L HLA-DRB4*03:01NL HLA-DRB1*08:04L HLA-DPA1*01:03-B1*03:01L HLA-DPA1*03:01-B1*04:02L HLA-DRB1*04:10L HLA-DRB1*12:01L
  REGION 1..13: note = CONT. FROM ABOVE: HLA-DPA1*02:01-B1*13:01L HLA-DPA1*03:01-B1*105 :01L HLA-DPA1*01:02-B1*04:01L HLA-DQA1*01:03-B1*06:01L HLA-DRB1* 04:08L HLA-DQA1*02:01-B1*03:03L
  source 1..13: note = Severe acute respiratory syndrome coronavirus 2
GKQVVSDIDYVPL

SEQ ID NO: 14733 - protein, 13 aa, Severe acute respiratory syndrome-related coronavirus
  REGION 1..13: note = Table B: HLA-DRB1*13:02L
  source 1..13: note = Severe acute respiratory syndrome coronavirus 2
DYVPLKSATCITR

SEQ ID NO: 14734 - protein, 13 aa, Severe acute respiratory syndrome-related coronavirus
  REGION 1..13: note = Table B: HLA-DRB1*13:02L HLA-DRB1*04:05L HLA-DRB3*01:01L
  source 1..13: note = Severe acute respiratory syndrome coronavirus 2
GGAVCRHHANEYR

SEQ ID NO: 14735 - protein, 13 aa, Severe acute respiratory syndrome-related coronavirus
  REGION 1..13: note = Table B: HLA-DRB1*13:02L HLA-DRB1*08:04L HLA-DRB1*14:01L HLA-DRB1*08:01L
  source 1..13: note = Severe acute respiratory syndrome coronavirus 2
NEYRLYLDAYNMM

SEQ ID NO: 14736 - protein, 14 aa, Severe acute respiratory syndrome-related coronavirus
  REGION 1..14: note = Table B: HLA-DRB1*13:02L HLA-DRB1*01:03L HLA-DRB1*04:05L HLA-DRB1*01:02L HLA-DPA1*01:03-B1*02:01L HLA-DRB1*04:08L
  source 1..14: note = Severe acute respiratory syndrome coronavirus 2
RLYLDAYNMMISAG

SEQ ID NO: 14737 - protein, 12 aa, Severe acute respiratory syndrome-related coronavirus
  REGION 1..12: note = Table B: HLA-DRB1*13:02L HLA-DRB1*04:02L HLA-DRB1*04:05L HLA-DRB1*08:04L HLA-DRB3*02:01L HLA-DRB1*11:04L HLA-DRB1*11:01L HLA-DPA1*01:03-B1*104:01L HLA-DQA1*05:05-B1*03:01L
  source 1..12: note = Severe acute respiratory syndrome coronavirus 2
SLWVYKQFDTYN

SEQ ID NO: 14738 - protein, 12 aa, Severe acute respiratory syndrome-related coronavirus
  REGION 1..12: note = Table B: HLA-DRB1*13:02L HLA-DRB3*02:01L HLA-DPA1*01:03-B1*104:01L HLA-DQA1*05:05-B1*03:01L
  source 1..12: note = Severe acute respiratory syndrome coronavirus 2
WVYKQFDTYNLW

SEQ ID NO: 14739 - protein, 11 aa, Severe acute respiratory syndrome-related coronavirus
  REGION 1..11: note = Table B: HLA-DRB1*13:02L HLA-DRB1*13:03L HLA-DRB1*04:02L HLA-DRB4*03:01NL HLA-DRB1*08:01L HLA-DRB5*01:01L HLA-DRB1*12:01L HLA-DQA1*05:05-B1*03:01L HLA-DRB1*14:17L HLA-DRB1*16:01L HLA-DQA1*01:03-B1*06:01L HLA-DQA1*02:01-B1*03:03L
  source 1..11: note = Severe acute respiratory syndrome coronavirus 2
DTYNLWNTFTR

SEQ ID NO: 14740 - protein, 13 aa, Severe acute respiratory syndrome-related coronavirus
  REGION 1..13: note = Table B: HLA-DRB1*13:02L HLA-DRB1*13:03L HLA-DRB1*01:03L HLA-DRB1*01:02L HLA-DRB1*11:02L HLA-DRB1*11:04L HLA-DQA1*05:05-B1*03:19L HLA-DQA1*05:05-B1*03:116L HLA-DPA1*01:03-B1*02:01L HLA-DQA1*05:05-B1*03:01L
  REGION 1..13: note = CONT. FROM ABOVE: HLA-DRB1*16:01L HLA-DRB1*08:02L HLA-DRB1*08:03 L HLA-DRB1*15:03L
  source 1..13: note = Severe acute respiratory syndrome coronavirus 2
NLWNTFTRLQSLE

SEQ ID NO: 14741 - protein, 13 aa, Severe acute respiratory syndrome-related coronavirus
  REGION 1..13: note = Table B: HLA-DRB1*13:02L HLA-DRB1*13:03L HLA-DRB1*04:02L HLA-DRB1*04:04L HLA-DRB1*04:05L HLA-DRB4*03:01NL HLA-DRB1*08:04L HLA-DRB1*08:77L HLA-DRB3*02:01L HLA-DRB1*11:03L HLA-DRB1*11:04L HLA-DRB1*14:02L HLA-DRB1*11:01L HLA-DRB1*09:01L HLA-DRB3*01:01L
  REGION 1..13: note = CONT. FROM ABOVE: HLA-DRB1*14:54L HLA-DPA1*01:03-B1*104:01L HLA- DQA1*05:05-B1*03:01L HLA-DRB1*14:17L HLA-DRB1*07:01L HLA-DRB1*10 :01L HLA-DRB1*08:03L
  source 1..13: note = Severe acute respiratory syndrome coronavirus 2
LQSLENVAFNVVN

SEQ ID NO: 14742 - protein, 10 aa, Severe acute respiratory syndrome-related coronavirus
  REGION 1..10: note = Table B: HLA-DRB1*13:02L HLA-DRB1*13:03L HLA-DRB1*01:01L HLA-DRB4*03:01NL HLA-DRB1*11:04L HLA-DRB1*08:01L HLA-DRB5*01:01L HLA-DPA1*01:03-B1*04:02L HLA-DRB1*12:01L HLA-DRB1*12:02L HLA-DQA1*03:01-B1*03:02L HLA-DQA1*05:05-B1*03:01L
  REGION 1..10: note = CONT. FROM ABOVE: HLA-DQA1*01:03-B1*06:01L HLA-DQA1*02:01-B1*03: 03L HLA-DRB1*15:01L
  source 1..10: note = Severe acute respiratory syndrome coronavirus 2
ENVAFNVVNK

SEQ ID NO: 14743 - protein, 12 aa, Severe acute respiratory syndrome-related coronavirus
  REGION 1..12: note = Table B: HLA-DRB1*13:02L HLA-DRB1*11:03L HLA-DRB1*11:04L HLA-DRB1*11:01L HLA-DRB1*12:01L HLA-DRB1*04:08L HLA-DRB1*08:03L
  source 1..12: note = Severe acute respiratory syndrome coronavirus 2
AFNVVNKGHFDG

SEQ ID NO: 14744 - protein, 12 aa, Severe acute respiratory syndrome-related coronavirus
  REGION 1..12: note = Table B: HLA-DRB1*13:02L HLA-DRB1*13:03L HLA-DRB1*01:03L HLA-DRB1*04:04L HLA-DRB1*04:05L HLA-DRB4*03:01NL HLA-DRB1*08:04L HLA-DRB1*08:77L HLA-DRB3*02:01L HLA-DPA1*01:03-B1*03:01L HLA-DRB1*03:01L HLA-DRB1*11:03L HLA-DRB1*11:04L HLA-DRB1*14:02L
  REGION 1..12: note = CONT. FROM ABOVE: HLA-DRB1*08:01L HLA-DRB1*11:01L HLA-DQA1*01-B1 *05L HLA-DPA1*01:03-B1*04:01L HLA-DRB1*04:10L HLA-DRB1*09:01L HL A-DPA1*01:03-B1*04:02L HLA-DRB1*12:02L HLA-DRB3*01:01L HLA-DPA1* 02:01-B1*13:01L HLA-DRB1*14:54L HLA-DPA1*01:03-B1*02:01L
  REGION 1..12: note = CONT. FROM ABOVE: HLA-DQA1*05:05-B1*03:01L HLA-DRB1*07:01L HLA-D RB1*10:01L HLA-DRB1*04:08L HLA-DRB1*08:03L
  source 1..12: note = Severe acute respiratory syndrome coronavirus 2
IINNTVYTKVDG

SEQ ID NO: 14745 - protein, 11 aa, Severe acute respiratory syndrome-related coronavirus
  REGION 1..11: note = Table B: HLA-DRB1*13:02L HLA-DRB1*01:03L HLA-DRB1*04:04L HLA-DQA1*01:02-B1*06:02L HLA-DRB1*01:02L HLA-DRB1*08:04L HLA-DRB1*08:77L HLA-DRB3*02:01L HLA-DPA1*01:03-B1*03:01L HLA-DPA1*03:01-B1*04:02L HLA-DRB1*14:01L HLA-DRB1*11:03L
  REGION 1..11: note = CONT. FROM ABOVE: HLA-DRB1*11:04L HLA-DRB1*14:02L HLA-DQA1*01:01 -B1*05:01L HLA-DRB1*08:01L HLA-DRB5*01:01L HLA-DQA1*05:05-B1*03: 19L HLA-DPA1*01:03-B1*04:01L HLA-DRB1*09:01L HLA-DRB1*12:02L HLA -DPA1*02:01-B1*13:01L HLA-DPA1*03:01-B1*105:01L
  REGION 1..11: note = CONT. FROM ABOVE: HLA-DQA1*05:05-B1*03:01L HLA-DRB1*07:01L HLA-D RB1*10:01L HLA-DRB1*04:08L HLA-DRB1*08:03L HLA-DRB1*15:03L
  source 1..11: note = Severe acute respiratory syndrome coronavirus 2
VYTKVDGVDVE

SEQ ID NO: 14746 - protein, 13 aa, Severe acute respiratory syndrome-related coronavirus
  REGION 1..13: note = Table B: HLA-DRB1*13:02L HLA-DRB1*08:04L HLA-DPA1*03:01-B1*04:02L HLA-DQA1*05:01-B1*02:01L HLA-DRB1*12:02L HLA-DPA1*01:02-B1*04:01L
  source 1..13: note = Severe acute respiratory syndrome coronavirus 2
DVELFENKTTLPV

SEQ ID NO: 14747 - protein, 13 aa, Severe acute respiratory syndrome-related coronavirus
  REGION 1..13: note = Table B: HLA-DRB1*13:02L HLA-DRB1*13:03L HLA-DRB1*01:03L HLA-DQA1*01:02-B1*06:02L HLA-DRB1*01:02L HLA-DRB1*08:04L HLA-DRB1*11:03L HLA-DRB1*11:04L HLA-DRB1*08:01L HLA-DRB1*11:01L HLA-DRB1*12:01L HLA-DRB3*01:01L HLA-DRB1*16:01L HLA-DRB1*04:08L
  REGION 1..13: note = CONT. FROM ABOVE: HLA-DRB1*15:03L
  source 1..13: note = Severe acute respiratory syndrome coronavirus 2
VAFELWAKRNIKP

SEQ ID NO: 14748 - protein, 13 aa, Severe acute respiratory syndrome-related coronavirus
  REGION 1..13: note = Table B: HLA-DRB1*13:02L HLA-DRB1*13:03L HLA-DRB1*04:04L HLA-DQA1*01:02-B1*06:02L HLA-DRB1*01:01L HLA-DPA1*01:03-B1*03:01L HLA-DRB1*11:01L HLA-DRB3*01:01L HLA-DPA1*01:03-B1*104:01L HLA-DRB1*07:01L HLA-DRB1*15:03L
  source 1..13: note = Severe acute respiratory syndrome coronavirus 2
WAKRNIKPVPEVK

SEQ ID NO: 14749 - protein, 12 aa, Severe acute respiratory syndrome-related coronavirus
  REGION 1..12: note = Table B: HLA-DRB1*13:02L HLA-DRB1*07:01L HLA-DRB1*04:08L
  source 1..12: note = Severe acute respiratory syndrome coronavirus 2
RNIKPVPEVKIL

SEQ ID NO: 14750 - protein, 12 aa, Severe acute respiratory syndrome-related coronavirus
  REGION 1..12: note = Table B: HLA-DRB1*13:02L
  source 1..12: note = Severe acute respiratory syndrome coronavirus 2
NIKPVPEVKILN

SEQ ID NO: 14751 - protein, 12 aa, Severe acute respiratory syndrome-related coronavirus
  REGION 1..12: note = Table B: HLA-DRB1*13:02L HLA-DRB1*14:01L HLA-DRB1*12:01L HLA-DRB1*15:03L
  source 1..12: note = Severe acute respiratory syndrome coronavirus 2
KILNNLGVDIAA

SEQ ID NO: 14752 - protein, 12 aa, Severe acute respiratory syndrome-related coronavirus
  REGION 1..12: note = Table B: HLA-DRB1*13:02L HLA-DRB1*04:05L HLA-DRB1*08:04L HLA-DRB3*02:01L HLA-DPA1*03:01-B1*04:02L HLA-DRB1*14:01L HLA-DRB1*14:02L HLA-DRB1*08:01L HLA-DRB1*04:10L HLA-DPA1*01:03-B1*04:02L HLA-DRB1*12:02L
  REGION 1..12: note = CONT. FROM ABOVE: HLA-DPA1*02:01-B1*13:01L HLA-DRB1*14:54L HLA-D RB1*04:08L
  source 1..12: note = Severe acute respiratory syndrome coronavirus 2
DIAANTVIWDYK

SEQ ID NO: 14753 - protein, 12 aa, Severe acute respiratory syndrome-related coronavirus
  REGION 1..12: note = Table B: HLA-DRB1*13:02L HLA-DRB1*04:05L HLA-DQA1*01:02-B1*06:02L HLA-DRB1*01:02L HLA-DRB4*03:01NL HLA-DRB1*08:04L HLA-DRB1*11:04L HLA-DRB1*08:01L HLA-DQA1*01-B1*05L HLA-DRB1*04:10L HLA-DRB1*12:01L
  REGION 1..12: note = CONT. FROM ABOVE: HLA-DRB3*01:01L HLA-DQA1*03:01-B1*03:02L HLA-D RB1*14:54L HLA-DPA1*01:02-B1*04:01L HLA-DRB1*04:08L HLA-DRB1*08: 03L HLA-DQA1*02:01-B1*03:03L HLA-DRB1*15:03L
  source 1..12: note = Severe acute respiratory syndrome coronavirus 2
TVIWDYKRDAPA

SEQ ID NO: 14754 - protein, 12 aa, Severe acute respiratory syndrome-related coronavirus
  REGION 1..12: note = Table B: HLA-DRB1*13:02L HLA-DQA1*01:02-B1*06:02L HLA-DRB1*01:02L HLA-DRB1*08:04L HLA-DRB1*11:04L HLA-DRB1*11:01L HLA-DRB1*04:10L HLA-DRB1*12:01L HLA-DRB3*01:01L HLA-DRB1*08:03L HLA-DQA1*02:01-B1*03:03L
  source 1..12: note = Severe acute respiratory syndrome coronavirus 2
VIWDYKRDAPAH

SEQ ID NO: 14755 - protein, 10 aa, Severe acute respiratory syndrome-related coronavirus
  REGION 1..10: note = Table B: HLA-DRB1*13:02L HLA-DRB1*14:01L HLA-DRB1*16:01L
  source 1..10: note = Severe acute respiratory syndrome coronavirus 2
YKRDAPAHIS

SEQ ID NO: 14756 - protein, 13 aa, Severe acute respiratory syndrome-related coronavirus
  REGION 1..13: note = Table B: HLA-DRB1*13:02L HLA-DRB1*13:03L HLA-DRB1*01:03L HLA-DRB1*04:04L HLA-DRB1*04:05L HLA-DRB1*01:02L HLA-DRB4*03:01NL HLA-DPA1*03:01-B1*04:02L HLA-DRB1*14:01L HLA-DRB1*08:01L HLA-DRB1*04:10L HLA-DRB1*12:01L HLA-DRB1*12:02L
  REGION 1..13: note = CONT. FROM ABOVE: HLA-DPA1*02:01-B1*13:01L HLA-DPA1*03:01-B1*105 :01L HLA-DRB1*14:54L HLA-DRB1*14:17L HLA-DRB1*04:08L HLA-DRB1*08 :03L HLA-DRB1*15:01L
  source 1..13: note = Severe acute respiratory syndrome coronavirus 2
APLTVFFDGRVDG

SEQ ID NO: 14757 - protein, 12 aa, Severe acute respiratory syndrome-related coronavirus
  REGION 1..12: note = Table B: HLA-DRB1*13:02L HLA-DRB1*13:03L HLA-DRB1*01:03L HLA-DRB1*04:05L HLA-DRB1*01:02L HLA-DRB4*03:01NL HLA-DRB1*08:04L HLA-DRB3*02:01L HLA-DPA1*01:03-B1*03:01L HLA-DPA1*03:01-B1*04:02L HLA-DRB1*03:01L HLA-DRB1*14:01L
  REGION 1..12: note = CONT. FROM ABOVE: HLA-DRB1*14:02L HLA-DQA1*01:01-B1*05:01L HLA-D RB1*08:01L HLA-DRB1*04:10L HLA-DPA1*01:03-B1*04:02L HLA-DRB1*12: 01L HLA-DRB3*01:01L HLA-DPA1*02:01-B1*13:01L HLA-DRB1*14:54L HLA -DRB1*14:17L HLA-DPA1*01:02-B1*04:01L HLA-DRB1*16:01L
  REGION 1..12: note = CONT. FROM ABOVE: HLA-DRB1*04:08L HLA-DRB1*08:03L HLA-DRB1*15:03 L
  source 1..12: note = Severe acute respiratory syndrome coronavirus 2
VFFDGRVDGQVD

SEQ ID NO: 14758 - protein, 15 aa, Severe acute respiratory syndrome-related coronavirus
  REGION 1..15: note = Table B: HLA-DRB1*13:02L HLA-DRB1*04:04L HLA-DPA1*01:03-B1*104:01L HLA-DRB1*07:01L
  source 1..15: note = Severe acute respiratory syndrome coronavirus 2
RNARNGVLITEGSVK

SEQ ID NO: 14759 - protein, 14 aa, Severe acute respiratory syndrome-related coronavirus
  REGION 1..14: note = Table B: HLA-DRB1*13:02L HLA-DRB1*08:04L HLA-DRB1*14:01L HLA-DRB1*11:03L HLA-DRB1*14:02L HLA-DQA1*01:01-B1*05:01L HLA-DRB1*08:01L HLA-DRB1*11:01L HLA-DQA1*01-B1*05L HLA-DRB1*09:01L HLA-DRB1*12:02L HLA-DRB3*01:01L
  REGION 1..14: note = CONT. FROM ABOVE: HLA-DPA1*02:01-B1*13:01L HLA-DPA1*01:03-B1*104 :01L HLA-DRB1*07:01L
  source 1..14: note = Severe acute respiratory syndrome coronavirus 2
EGSVKGLQPSVGPK

SEQ ID NO: 14760 - protein, 12 aa, Severe acute respiratory syndrome-related coronavirus
  REGION 1..12: note = Table B: HLA-DRB1*13:02L HLA-DRB1*01:02L HLA-DRB1*14:01L HLA-DQA1*05:05-B1*03:19L HLA-DQA1*05:01-B1*02:01L HLA-DRB1*12:01L HLA-DRB1*12:02L HLA-DRB1*14:54L HLA-DQA1*05:05-B1*03:01L HLA-DRB1*16:01L HLA-DRB1*15:03L
  source 1..12: note = Severe acute respiratory syndrome coronavirus 2
GLQPSVGPKQAS

SEQ ID NO: 14761 - protein, 16 aa, Severe acute respiratory syndrome-related coronavirus
  REGION 1..16: note = Table B: HLA-DRB1*13:02L HLA-DPA1*01:03-B1*03:01L HLA-DQA1*05:01-B1*02:01L HLA-DRB1*12:01L HLA-DPA1*02:01-B1*13:01L HLA-DPA1*03:01-B1*105:01L HLA-DPA1*01:03-B1*104:01L HLA-DRB1*15:03L
  source 1..16: note = Severe acute respiratory syndrome coronavirus 2
GPKQASLNGVTLIGEA

SEQ ID NO: 14762 - protein, 13 aa, Severe acute respiratory syndrome-related coronavirus
  REGION 1..13: note = Table B: HLA-DRB1*13:02L HLA-DRB1*04:04L HLA-DRB1*08:04L HLA-DRB3*02:01L HLA-DQA1*01:01-B1*05:01L HLA-DRB1*08:01L HLA-DRB1*04:10L HLA-DPA1*01:03-B1*02:01L
  source 1..13: note = Severe acute respiratory syndrome coronavirus 2
VTLIGEAVKTQFN

SEQ ID NO: 14763 - protein, 16 aa, Severe acute respiratory syndrome-related coronavirus
  REGION 1..16: note = Table B: HLA-DRB1*13:02L HLA-DRB3*01:01L
  source 1..16: note = Severe acute respiratory syndrome coronavirus 2
IGEAVKTQFNYYKKVD

SEQ ID NO: 14764 - protein, 13 aa, Severe acute respiratory syndrome-related coronavirus
  REGION 1..13: note = Table B: HLA-DRB1*13:02L HLA-DRB1*12:01L HLA-DRB3*01:01L HLA-DPA1*02:01-B1*13:01L HLA-DRB1*14:54L HLA-DRB1*15:03L
  source 1..13: note = Severe acute respiratory syndrome coronavirus 2
VKTQFNYYKKVDG

SEQ ID NO: 14765 - protein, 14 aa, Severe acute respiratory syndrome-related coronavirus
  REGION 1..14: note = Table B: HLA-DRB1*13:02L HLA-DRB1*04:04L HLA-DRB1*08:04L HLA-DRB1*11:04L HLA-DRB1*11:01L HLA-DRB3*01:01L
  source 1..14: note = Severe acute respiratory syndrome coronavirus 2
YFTQSRNLQEFKPR

SEQ ID NO: 14766 - protein, 16 aa, Severe acute respiratory syndrome-related coronavirus
  REGION 1..16: note = Table B: HLA-DRB1*13:02L HLA-DRB3*01:01L HLA-DPA1*03:01-B1*105:01L
  source 1..16: note = Severe acute respiratory syndrome coronavirus 2
SRNLQEFKPRSQMEID

SEQ ID NO: 14767 - protein, 10 aa, Severe acute respiratory syndrome-related coronavirus
  REGION 1..10: note = Table B: HLA-DRB1*13:02L HLA-DRB1*13:03L HLA-DRB4*03:01NL HLA-DRB1*08:01L HLA-DRB5*01:01L HLA-DPA1*01:03-B1*04:02L HLA-DRB1*12:01L HLA-DQA1*03:01-B1*03:02M HLA-DQA1*05:05-B1*03:01L HLA-DRB1*14:17L
  REGION 1..10: note = CONT. FROM ABOVE: HLA-DQA1*01:03-B1*06:01L HLA-DQA1*02:01-B1*03: 03L
  source 1..10: note = Severe acute respiratory syndrome coronavirus 2
ELAMDEFIER

SEQ ID NO: 14768 - protein, 12 aa, Severe acute respiratory syndrome-related coronavirus
  REGION 1..12: note = Table B: HLA-DRB1*13:02L HLA-DRB1*13:03L HLA-DRB1*01:02L HLA-DRB1*08:04L HLA-DPA1*03:01-B1*04:02L HLA-DRB1*14:01L HLA-DRB1*11:04L HLA-DRB1*11:01L HLA-DRB1*12:01L HLA-DPA1*01:02-B1*04:01L HLA-DRB1*04:08L HLA-DRB1*08:03L
  REGION 1..12: note = CONT. FROM ABOVE: HLA-DRB1*15:03L
  source 1..12: note = Severe acute respiratory syndrome coronavirus 2
EFIERYKLEGYA

SEQ ID NO: 14769 - protein, 14 aa, Severe acute respiratory syndrome-related coronavirus
  REGION 1..14: note = Table B: HLA-DRB1*13:02L HLA-DRB1*08:03L
  source 1..14: note = Severe acute respiratory syndrome coronavirus 2
ERYKLEGYAFEHIV

SEQ ID NO: 14770 - protein, 14 aa, Severe acute respiratory syndrome-related coronavirus
  REGION 1..14: note = Table B: HLA-DRB1*13:02L HLA-DRB1*04:05L HLA-DRB1*08:04L HLA-DRB1*11:01L HLA-DPA1*01:03-B1*02:01L
  source 1..14: note = Severe acute respiratory syndrome coronavirus 2
YKLEGYAFEHIVYG

SEQ ID NO: 14771 - protein, 14 aa, Severe acute respiratory syndrome-related coronavirus
  REGION 1..14: note = Table B: HLA-DRB1*13:02L HLA-DRB1*08:04L HLA-DRB1*08:01L HLA-DRB1*10:01L
  source 1..14: note = Severe acute respiratory syndrome coronavirus 2
LEGYAFEHIVYGDF

SEQ ID NO: 14772 - protein, 14 aa, Severe acute respiratory syndrome-related coronavirus
  REGION 1..14: note = Table B: HLA-DRB1*13:02L
  source 1..14: note = Severe acute respiratory syndrome coronavirus 2
EGYAFEHIVYGDFS

SEQ ID NO: 14773 - protein, 14 aa, Severe acute respiratory syndrome-related coronavirus
  REGION 1..14: note = Table B: HLA-DRB1*13:02L HLA-DRB1*11:01L HLA-DRB3*01:01L
  source 1..14: note = Severe acute respiratory syndrome coronavirus 2
GYAFEHIVYGDFSH

SEQ ID NO: 14774 - protein, 14 aa, Severe acute respiratory syndrome-related coronavirus
  REGION 1..14: note = Table B: HLA-DRB1*13:02L
  source 1..14: note = Severe acute respiratory syndrome coronavirus 2
AFEHIVYGDFSHSQ

SEQ ID NO: 14775 - protein, 13 aa, Severe acute respiratory syndrome-related coronavirus
  REGION 1..13: note = Table B: HLA-DRB1*13:02L HLA-DRB1*04:04L HLA-DRB1*11:04L HLA-DRB3*01:01L
  source 1..13: note = Severe acute respiratory syndrome coronavirus 2
EHIVYGDFSHSQL

SEQ ID NO: 14776 - protein, 14 aa, Severe acute respiratory syndrome-related coronavirus
  REGION 1..14: note = Table B: HLA-DRB1*13:02L HLA-DRB3*01:01L
  source 1..14: note = Severe acute respiratory syndrome coronavirus 2
HIVYGDFSHSQLGG

SEQ ID NO: 14777 - protein, 12 aa, Severe acute respiratory syndrome-related coronavirus
  REGION 1..12: note = Table B: HLA-DRB1*13:02L HLA-DRB1*13:03L HLA-DRB1*04:05L HLA-DRB1*08:04L HLA-DPA1*01:03-B1*03:01L HLA-DRB1*14:01L HLA-DQA1*01:01-B1*05:01L HLA-DRB1*11:01L HLA-DPA1*02:01-B1*13:01L HLA-DPA1*01:03-B1*02:01L
  REGION 1..12: note = CONT. FROM ABOVE: HLA-DRB1*15:03L
  source 1..12: note = Severe acute respiratory syndrome coronavirus 2
GDFSHSQLGGLH

SEQ ID NO: 14778 - protein, 16 aa, Severe acute respiratory syndrome-related coronavirus
  REGION 1..16: note = Table B: HLA-DRB1*13:02L HLA-DRB1*08:04L HLA-DPA1*02:01-B1*13:01L
  source 1..16: note = Severe acute respiratory syndrome coronavirus 2
GLHLLIGLAKRFKESP

SEQ ID NO: 14779 - protein, 15 aa, Severe acute respiratory syndrome-related coronavirus
  REGION 1..15: note = Table B: HLA-DRB1*13:02L HLA-DRB1*01:03L HLA-DRB1*08:04L HLA-DRB1*11:04L HLA-DRB1*11:01L HLA-DRB1*04:08L
  source 1..15: note = Severe acute respiratory syndrome coronavirus 2
HLLIGLAKRFKESPF

SEQ ID NO: 14780 - protein, 14 aa, Severe acute respiratory syndrome-related coronavirus
  REGION 1..14: note = Table B: HLA-DRB1*13:02L HLA-DRB1*08:04L HLA-DRB1*11:04L HLA-DRB1*11:01L HLA-DRB3*01:01L HLA-DRB1*08:03L
  source 1..14: note = Severe acute respiratory syndrome coronavirus 2
LIGLAKRFKESPFE

SEQ ID NO: 14781 - protein, 15 aa, Severe acute respiratory syndrome-related coronavirus
  REGION 1..15: note = Table B: HLA-DRB1*13:02L
  source 1..15: note = Severe acute respiratory syndrome coronavirus 2
IGLAKRFKESPFELE

SEQ ID NO: 14782 - protein, 13 aa, Severe acute respiratory syndrome-related coronavirus
  REGION 1..13: note = Table B: HLA-DRB1*13:02L HLA-DRB1*13:03L HLA-DRB1*04:05L HLA-DRB1*14:01L HLA-DRB1*11:04L HLA-DRB1*11:01L HLA-DPA1*01:03-B1*04:02L HLA-DRB3*01:01L HLA-DQA1*03:01-B1*03:02L HLA-DPA1*01:03-B1*02:01L
  REGION 1..13: note = CONT. FROM ABOVE: HLA-DQA1*02:01-B1*03:03L
  source 1..13: note = Severe acute respiratory syndrome coronavirus 2
AKRFKESPFELED

SEQ ID NO: 14783 - protein, 13 aa, Severe acute respiratory syndrome-related coronavirus
  REGION 1..13: note = Table B: HLA-DRB1*13:02L HLA-DRB1*04:05L HLA-DRB1*14:02L HLA-DQA1*05:05-B1*03:19L HLA-DRB3*01:01L HLA-DRB1*08:03L
  source 1..13: note = Severe acute respiratory syndrome coronavirus 2
ESPFELEDFIPMD

SEQ ID NO: 14784 - protein, 12 aa, Severe acute respiratory syndrome-related coronavirus
  REGION 1..12: note = Table B: HLA-DRB1*13:02L HLA-DRB1*01:02L HLA-DRB1*08:04L HLA-DRB1*14:01L HLA-DRB1*14:02L HLA-DPA1*02:01-B1*13:01L
  source 1..12: note = Severe acute respiratory syndrome coronavirus 2
DLLLDDFVEIIK

SEQ ID NO: 14785 - protein, 11 aa, Severe acute respiratory syndrome-related coronavirus
  REGION 1..11: note = Table B: HLA-DRB1*13:02L HLA-DRB1*01:03L HLA-DRB1*01:02L HLA-DRB4*03:01NL HLA-DRB1*08:04L HLA-DRB3*02:01L HLA-DPA1*01:03-B1*03:01L HLA-DRB1*14:02L HLA-DQA1*05:05-B1*03:19L HLA-DPA1*01:03-B1*04:01L
  REGION 1..11: note = CONT. FROM ABOVE: HLA-DQA1*05:05-B1*03:116L HLA-DRB1*04:10L HLA- DPA1*01:03-B1*04:02L HLA-DRB1*12:01L HLA-DPA1*02:01-B1*13:01L HL A-DRB1*14:54L HLA-DQA1*05:05-B1*03:01L HLA-DRB1*04:08L HLA-DRB1* 08:03L
  source 1..11: note = Severe acute respiratory syndrome coronavirus 2
DFVEIIKSQDL

SEQ ID NO: 14786 - protein, 12 aa, Severe acute respiratory syndrome-related coronavirus
  REGION 1..12: note = Table B: HLA-DRB1*13:02L HLA-DRB1*01:03L HLA-DRB1*04:04L HLA-DRB1*08:77L HLA-DRB3*02:01L HLA-DPA1*01:03-B1*03:01L HLA-DPA1*03:01-B1*04:02L HLA-DRB1*14:02L HLA-DRB1*12:02L HLA-DQA1*05:05-B1*03:01L HLA-DRB1*04:08L
  source 1..12: note = Severe acute respiratory syndrome coronavirus 2
VEIIKSQDLSVV

SEQ ID NO: 14787 - protein, 10 aa, Severe acute respiratory syndrome-related coronavirus
  REGION 1..10: note = Table B: HLA-DRB1*13:02L HLA-DRB1*13:03L HLA-DRB1*01:01L HLA-DRB4*03:01NL HLA-DRB1*11:04L HLA-DRB1*08:01L HLA-DRB5*01:01L HLA-DRB1*12:01L HLA-DRB1*12:02L HLA-DRB3*01:01L HLA-DQA1*03:01-B1*03:02M HLA-DQA1*05:05-B1*03:01L
  REGION 1..10: note = CONT. FROM ABOVE: HLA-DRB1*14:17L HLA-DRB1*16:01L HLA-DQA1*02:01 -B1*03:03L
  source 1..10: note = Severe acute respiratory syndrome coronavirus 2
KSQDLSVVSK

SEQ ID NO: 14788 - protein, 15 aa, Severe acute respiratory syndrome-related coronavirus
  REGION 1..15: note = Table B: HLA-DRB1*13:02L
  source 1..15: note = Severe acute respiratory syndrome coronavirus 2
LSVVSKVVKVTIDYT

SEQ ID NO: 14789 - protein, 14 aa, Severe acute respiratory syndrome-related coronavirus
  REGION 1..14: note = Table B: HLA-DRB1*13:02L HLA-DRB1*08:04L HLA-DQA1*05:05-B1*03:01L
  source 1..14: note = Severe acute respiratory syndrome coronavirus 2
VVSKVVKVTIDYTE

SEQ ID NO: 14790 - protein, 11 aa, Severe acute respiratory syndrome-related coronavirus
  REGION 1..11: note = Table B: HLA-DRB1*13:02L HLA-DRB1*01:02L HLA-DRB3*02:01L HLA-DRB1*09:01L HLA-DQA1*05:05-B1*03:01L HLA-DRB1*04:08L
  source 1..11: note = Severe acute respiratory syndrome coronavirus 2
VTIDYTEISFM

SEQ ID NO: 14791 - protein, 14 aa, Severe acute respiratory syndrome-related coronavirus
  REGION 1..14: note = Table B: HLA-DRB1*13:02L HLA-DRB1*01:02L HLA-DRB1*12:01L HLA-DPA1*02:01-B1*13:01L HLA-DRB1*08:03L HLA-DRB1*15:03L
  source 1..14: note = Severe acute respiratory syndrome coronavirus 2
GHVETFYPKLQSSQ

SEQ ID NO: 14792 - protein, 13 aa, Severe acute respiratory syndrome-related coronavirus
  REGION 1..13: note = Table B: HLA-DRB1*13:02L HLA-DRB1*13:03L HLA-DRB1*01:03L HLA-DRB1*04:02L HLA-DRB1*04:05L HLA-DQA1*01:02-B1*06:02L HLA-DRB1*01:02L HLA-DRB1*08:04L HLA-DRB1*11:04L HLA-DRB1*08:01L HLA-DRB1*11:01L HLA-DRB1*12:01L HLA-DRB3*01:01L HLA-DRB1*14:54L
  REGION 1..13: note = CONT. FROM ABOVE: HLA-DPA1*01:02-B1*04:01L HLA-DRB1*16:01L HLA-D RB1*04:08L HLA-DRB1*15:03L
  source 1..13: note = Severe acute respiratory syndrome coronavirus 2
MPNLYKMQRMLLE

SEQ ID NO: 14793 - protein, 13 aa, Severe acute respiratory syndrome-related coronavirus
  REGION 1..13: note = Table B: HLA-DRB1*13:02L HLA-DRB1*13:03L HLA-DRB1*01:03L HLA-DRB1*04:02L HLA-DRB1*04:04L HLA-DRB1*04:05L HLA-DRB4*03:01NL HLA-DRB1*08:77L HLA-DRB3*02:01L HLA-DPA1*03:01-B1*04:02L HLA-DRB1*14:01L HLA-DRB1*11:03L HLA-DRB1*14:02L
  REGION 1..13: note = CONT. FROM ABOVE: HLA-DQA1*01-B1*05L HLA-DRB1*04:10L HLA-DRB1*09 :01L HLA-DRB1*12:02L HLA-DPA1*02:01-B1*13:01L HLA-DRB1*14:54L HL A-DPA1*01:03-B1*104:01L HLA-DPA1*01:02-B1*04:01L HLA-DRB1*07:01L HLA-DRB1*10:01L HLA-DRB1*04:08L
  source 1..13: note = Severe acute respiratory syndrome coronavirus 2
LNTLTLAVPYNMR

SEQ ID NO: 14794 - protein, 14 aa, Severe acute respiratory syndrome-related coronavirus
  REGION 1..14: note = Table B: HLA-DRB1*13:02L HLA-DRB1*11:04L HLA-DRB1*11:01L HLA-DRB1*12:01L
  source 1..14: note = Severe acute respiratory syndrome coronavirus 2
AVPYNMRVIHFGAG

SEQ ID NO: 14795 - protein, 15 aa, Severe acute respiratory syndrome-related coronavirus
  REGION 1..15: note = Table B: HLA-DRB1*13:02L HLA-DPA1*01:03-B1*03:01L HLA-DRB1*11:04L HLA-DRB1*11:01L HLA-DPA1*01:03-B1*04:02L HLA-DRB1*12:01L HLA-DRB3*01:01L HLA-DPA1*01:03-B1*02:01L HLA-DPA1*01:03-B1*104:01L HLA-DQA1*05:05-B1*03:01L
  source 1..15: note = Severe acute respiratory syndrome coronavirus 2
VPYNMRVIHFGAGSD

SEQ ID NO: 14796 - protein, 11 aa, Severe acute respiratory syndrome-related coronavirus
  REGION 1..11: note = Table B: HLA-DRB1*13:02L HLA-DRB1*01:03L HLA-DRB1*04:02L HLA-DRB1*04:05L HLA-DRB1*08:77L HLA-DPA1*03:01-B1*04:02L HLA-DRB1*12:01L HLA-DRB1*14:17L HLA-DQA1*02:01-B1*03:03L
  source 1..11: note = Severe acute respiratory syndrome coronavirus 2
NDFVSDADSTL

SEQ ID NO: 14797 - protein, 12 aa, Severe acute respiratory syndrome-related coronavirus
  REGION 1..12: note = Table B: HLA-DRB1*13:02L HLA-DRB1*01:01L HLA-DRB1*01:02L HLA-DRB1*08:04L HLA-DRB3*02:01L HLA-DPA1*01:03-B1*03:01L HLA-DRB1*03:01L HLA-DRB1*11:01L HLA-DRB5*01:01L HLA-DRB4*01:01L HLA-DRB1*09:01L HLA-DRB1*12:02L HLA-DRB3*01:01L
  REGION 1..12: note = CONT. FROM ABOVE: HLA-DPA1*03:01-B1*105:01L HLA-DRB1*08:03L HLA- DQA1*02:01-B1*03:03L HLA-DRB1*15:03L
  source 1..12: note = Severe acute respiratory syndrome coronavirus 2
DFVSDADSTLIG

SEQ ID NO: 14798 - protein, 15 aa, Severe acute respiratory syndrome-related coronavirus
  REGION 1..15: note = Table B: HLA-DRB1*13:02L HLA-DPA1*02:01-B1*13:01L
  source 1..15: note = Severe acute respiratory syndrome coronavirus 2
DADSTLIGDCATVHT

SEQ ID NO: 14799 - protein, 11 aa, Severe acute respiratory syndrome-related coronavirus
  REGION 1..11: note = Table B: HLA-DRB1*13:02L HLA-DRB1*01:03L HLA-DRB1*11:04L HLA-DRB1*11:01L
  source 1..11: note = Severe acute respiratory syndrome coronavirus 2
MYDPKTKNVTK

SEQ ID NO: 14800 - protein, 14 aa, Severe acute respiratory syndrome-related coronavirus
  REGION 1..14: note = Table B: HLA-DRB1*13:02L HLA-DRB1*13:03L HLA-DRB1*01:03L HLA-DRB1*04:05L HLA-DRB3*02:01L HLA-DPA1*01:03-B1*03:01L HLA-DQA1*05:01-B1*02:01L HLA-DPA1*02:01-B1*13:01L HLA-DPA1*03:01-B1*105:01L HLA-DPA1*01:03-B1*104:01L
  REGION 1..14: note = CONT. FROM ABOVE: HLA-DRB1*07:01L HLA-DRB1*16:01L HLA-DRB1*04:08 L HLA-DRB1*15:03L
  source 1..14: note = Severe acute respiratory syndrome coronavirus 2
IQQKLALGGSVAIK

SEQ ID NO: 14801 - protein, 11 aa, Severe acute respiratory syndrome-related coronavirus
  REGION 1..11: note = Table B: HLA-DRB1*13:02L HLA-DRB1*01:02L HLA-DPA1*03:01-B1*04:02L HLA-DRB1*14:01L HLA-DQA1*05:01-B1*02:01L HLA-DPA1*03:01-B1*105:01L HLA-DRB1*16:01L HLA-DRB1*15:03L
  source 1..11: note = Severe acute respiratory syndrome coronavirus 2
ALGGSVAIKIT

SEQ ID NO: 14802 - protein, 14 aa, Severe acute respiratory syndrome-related coronavirus
  REGION 1..14: note = Table B: HLA-DRB1*13:02L HLA-DRB1*04:04L HLA-DRB1*11:04L HLA-DRB3*01:01L
  source 1..14: note = Severe acute respiratory syndrome coronavirus 2
SVAIKITEHSWNAD

SEQ ID NO: 14803 - protein, 14 aa, Severe acute respiratory syndrome-related coronavirus
  REGION 1..14: note = Table B: HLA-DRB1*13:02L HLA-DPA1*01:03-B1*03:01L HLA-DPA1*03:01-B1*04:02L
  source 1..14: note = Severe acute respiratory syndrome coronavirus 2
VAIKITEHSWNADL

SEQ ID NO: 14804 - protein, 14 aa, Severe acute respiratory syndrome-related coronavirus
  REGION 1..14: note = Table B: HLA-DRB1*13:02L HLA-DRB1*08:01L
  source 1..14: note = Severe acute respiratory syndrome coronavirus 2
IKITEHSWNADLYK

SEQ ID NO: 14805 - protein, 15 aa, Severe acute respiratory syndrome-related coronavirus
  REGION 1..15: note = Table B: HLA-DRB1*13:02L HLA-DRB1*08:04L HLA-DRB1*14:01L HLA-DRB1*11:04L
  source 1..15: note = Severe acute respiratory syndrome coronavirus 2
EHSWNADLYKLMGHF

SEQ ID NO: 14806 - protein, 14 aa, Severe acute respiratory syndrome-related coronavirus
  REGION 1..14: note = Table B: HLA-DRB1*13:02L HLA-DRB1*14:02L HLA-DRB1*11:01L HLA-DPA1*01:03-B1*04:02L HLA-DQA1*05:05-B1*03:01L HLA-DRB1*04:08L
  source 1..14: note = Severe acute respiratory syndrome coronavirus 2
ADLYKLMGHFAWWT

SEQ ID NO: 14807 - protein, 12 aa, Severe acute respiratory syndrome-related coronavirus
  REGION 1..12: note = Table B: HLA-DRB1*13:02L HLA-DRB1*04:02L HLA-DRB4*03:01NL HLA-DRB3*02:01L HLA-DPA1*01:03-B1*03:01L HLA-DPA1*03:01-B1*04:02L HLA-DQA1*01-B1*05L HLA-DRB1*12:01L HLA-DRB1*12:02L HLA-DRB1*14:54L HLA-DQA1*05:05-B1*03:01L
  REGION 1..12: note = CONT. FROM ABOVE: HLA-DRB1*16:01L
  source 1..12: note = Severe acute respiratory syndrome coronavirus 2
VTNVNASSSEAF

SEQ ID NO: 14808 - protein, 14 aa, Severe acute respiratory syndrome-related coronavirus
  REGION 1..14: note = Table B: HLA-DRB1*13:02L
  source 1..14: note = Severe acute respiratory syndrome coronavirus 2
TNVNASSSEAFLIG

SEQ ID NO: 14809 - protein, 13 aa, Severe acute respiratory syndrome-related coronavirus
  REGION 1..13: note = Table B: HLA-DRB1*13:02L HLA-DRB1*04:08L
  source 1..13: note = Severe acute respiratory syndrome coronavirus 2
DGYVMHANYIFWR

SEQ ID NO: 14810 - protein, 14 aa, Severe acute respiratory syndrome-related coronavirus
  REGION 1..14: note = Table B: HLA-DRB1*13:02L HLA-DRB1*14:01L HLA-DRB1*04:08L
  source 1..14: note = Severe acute respiratory syndrome coronavirus 2
GYVMHANYIFWRNT

SEQ ID NO: 14811 - protein, 13 aa, Severe acute respiratory syndrome-related coronavirus
  REGION 1..13: note = Table B: HLA-DRB1*13:02L HLA-DRB1*04:02L HLA-DRB1*04:05L HLA-DRB1*08:77L HLA-DRB3*02:01L HLA-DPA1*01:03-B1*03:01L HLA-DRB1*14:17L
  source 1..13: note = Severe acute respiratory syndrome coronavirus 2
TNPIQLSSYSLFD

SEQ ID NO: 14812 - protein, 15 aa, Severe acute respiratory syndrome-related coronavirus
  REGION 1..15: note = Table B: HLA-DRB1*13:02L HLA-DRB1*01:03L HLA-DRB1*04:02L HLA-DRB1*04:04L HLA-DRB1*04:05L HLA-DRB1*08:04L HLA-DRB3*02:01L HLA-DRB1*14:02L HLA-DQA1*01:01-B1*05:01L HLA-DRB1*08:01L HLA-DRB1*04:10L HLA-DRB3*01:01L HLA-DPA1*01:03-B1*02:01L
  REGION 1..15: note = CONT. FROM ABOVE: HLA-DPA1*01:03-B1*104:01L HLA-DRB1*07:01L HLA- DRB1*04:08L HLA-DRB1*08:03L
  source 1..15: note = Severe acute respiratory syndrome coronavirus 2
NPIQLSSYSLFDMSK

SEQ ID NO: 14813 - protein, 14 aa, Severe acute respiratory syndrome-related coronavirus
  REGION 1..14: note = Table B: HLA-DRB1*13:02L HLA-DRB1*01:03L HLA-DRB1*08:04L HLA-DPA1*01:03-B1*04:01L HLA-DRB1*04:08L
  source 1..14: note = Severe acute respiratory syndrome coronavirus 2
LSSYSLFDMSKFPL

SEQ ID NO: 14814 - protein, 11 aa, Severe acute respiratory syndrome-related coronavirus
  REGION 1..11: note = Table B: HLA-DRB1*13:02L HLA-DRB1*13:03L HLA-DRB1*04:05L HLA-DQA1*01:02-B1*06:02L HLA-DRB1*01:02L HLA-DRB4*03:01NL HLA-DRB1*08:04L HLA-DRB1*11:04L HLA-DRB1*08:01L HLA-DRB1*11:01L HLA-DRB1*12:01L HLA-DRB3*01:01L HLA-DRB1*14:54L
  REGION 1..11: note = CONT. FROM ABOVE: HLA-DQA1*05:05-B1*03:01L HLA-DQA1*01:03-B1*06: 01L HLA-DRB1*04:08L
  source 1..11: note = Severe acute respiratory syndrome coronavirus 2
SLFDMSKFPLK

SEQ ID NO: 14815 - protein, 14 aa, Severe acute respiratory syndrome-related coronavirus
  REGION 1..14: note = Table B: HLA-DRB1*13:02L HLA-DRB1*01:03L HLA-DQA1*05:05-B1*03:01L HLA-DRB1*07:01L HLA-DRB1*04:08L
  source 1..14: note = Severe acute respiratory syndrome coronavirus 2
FPLKLRGTAVMSLK

SEQ ID NO: 14816 - protein, 11 aa, Severe acute respiratory syndrome-related coronavirus
  REGION 1..11: note = Table B: HLA-DRB1*13:02L HLA-DRB1*13:03L HLA-DRB1*04:05L HLA-DRB1*01:02L HLA-DRB4*03:01NL HLA-DRB1*08:77L HLA-DRB3*02:01L HLA-DPA1*03:01-B1*04:02L HLA-DQA1*01-B1*05L HLA-DRB1*04:10L HLA-DRB1*12:02L HLA-DQA1*05:05-B1*03:01L
  REGION 1..11: note = CONT. FROM ABOVE: HLA-DPA1*01:02-B1*04:01L HLA-DRB1*07:01L
  source 1..11: note = Severe acute respiratory syndrome coronavirus 2
AVMSLKEGQIN

SEQ ID NO: 14817 - protein, 13 aa, Severe acute respiratory syndrome-related coronavirus
  REGION 1..13: note = Table B: HLA-DRB1*13:02L HLA-DRB1*04:05L HLA-DQA1*01:02-B1*06:02L HLA-DRB1*11:04L HLA-DRB1*11:01L HLA-DRB1*04:08L
  source 1..13: note = Severe acute respiratory syndrome coronavirus 2
ILSLLSKGRLIIR

SEQ ID NO: 14818 - protein, 14 aa, Severe acute respiratory syndrome-related coronavirus
  REGION 1..14: note = Table B: HLA-DRB1*13:02L HLA-DQA1*01:02-B1*06:02L HLA-DRB1*04:08L HLA-DRB1*15:03L
  source 1..14: note = Severe acute respiratory syndrome coronavirus 2
LSLLSKGRLIIREN

SEQ ID NO: 14819 - protein, 14 aa, Severe acute respiratory syndrome-related coronavirus
  REGION 1..14: note = Table B: HLA-DRB1*13:02L HLA-DRB1*01:02L HLA-DRB1*04:08L HLA-DRB1*15:03L
  source 1..14: note = Severe acute respiratory syndrome coronavirus 2
SLLSKGRLIIRENN

SEQ ID NO: 14820 - protein, 13 aa, Severe acute respiratory syndrome-related coronavirus
  REGION 1..13: note = Table B: HLA-DRB1*13:02L HLA-DRB1*13:03L HLA-DRB1*04:04L HLA-DQA1*01:02-B1*06:02L HLA-DRB1*11:04L HLA-DRB1*11:01L HLA-DRB3*01:01L HLA-DPA1*02:01-B1*13:01L HLA-DRB1*14:17L HLA-DQA1*02:01-B1*03:03L
  source 1..13: note = Severe acute respiratory syndrome coronavirus 2
KGRLIIRENNRVV

SEQ ID NO: 14821 - protein, 13 aa, Severe acute respiratory syndrome-related coronavirus
  REGION 1..13: note = Table B: HLA-DRB1*13:02L HLA-DRB3*01:01L
  source 1..13: note = Severe acute respiratory syndrome coronavirus 2
GRLIIRENNRVVI

SEQ ID NO: 14822 - protein, 12 aa, Severe acute respiratory syndrome-related coronavirus
  REGION 1..12: note = Table B: HLA-DRB1*13:02L HLA-DRB1*01:03L HLA-DRB1*01:02L HLA-DRB1*14:01L HLA-DRB1*12:01L HLA-DRB1*16:01L
  source 1..12: note = Severe acute respiratory syndrome coronavirus 2
IRENNRVVISSD

SEQ ID NO: 14823 - protein, 14 aa, Severe acute respiratory syndrome-related coronavirus
  REGION 1..14: note = Table B: HLA-DRB1*13:02L HLA-DRB1*04:05L HLA-DRB1*01:02L HLA-DRB4*03:01NL HLA-DRB1*08:04L HLA-DRB3*02:01L HLA-DRB1*14:01L HLA-DRB1*11:03L HLA-DRB1*11:04L HLA-DRB1*08:01L HLA-DRB1*04:10L HLA-DRB1*09:01L HLA-DRB1*12:02L HLA-DRB3*01:01L HLA-DRB1*14:54L
  REGION 1..14: note = CONT. FROM ABOVE: HLA-DQA1*05:05-B1*03:01L HLA-DRB1*07:01L HLA-D RB1*04:08L HLA-DRB1*08:03L
  source 1..14: note = Severe acute respiratory syndrome coronavirus 2
LPPAYTNSFTRGVY

SEQ ID NO: 14824 - protein, 16 aa, Severe acute respiratory syndrome-related coronavirus
  REGION 1..16: note = Table B: HLA-DRB1*13:02L HLA-DRB1*04:05L HLA-DQA1*05:05-B1*03:01L HLA-DRB1*04:08L
  source 1..16: note = Severe acute respiratory syndrome coronavirus 2
PPAYTNSFTRGVYYPD

SEQ ID NO: 14825 - protein, 13 aa, Severe acute respiratory syndrome-related coronavirus
  REGION 1..13: note = Table B: HLA-DRB1*13:02L HLA-DRB1*04:04L HLA-DRB4*03:01NL HLA-DRB1*08:04L HLA-DPA1*01:03-B1*03:01L HLA-DPA1*03:01-B1*04:02L HLA-DRB1*11:04L HLA-DQA1*01:01-B1*05:01L HLA-DRB1*11:01L
  REGION 1..13: note = CONT. FROM ABOVE: HLA-DQA1*05:01-B1*02:01L HLA-DPA1*01:03-B1*04: 01L HLA-DRB1*04:10L HLA-DPA1*01:03-B1*04:02L HLA-DRB3*01:01L HLA -DPA1*02:01-B1*13:01L HLA-DRB1*14:54L HLA-DPA1*01:03-B1*02:01L H LA-DRB1*08:03L
  source 1..13: note = Severe acute respiratory syndrome coronavirus 2
TNSFTRGVYYPDK

SEQ ID NO: 14826 - protein, 10 aa, Severe acute respiratory syndrome-related coronavirus
  REGION 1..10: note = Table B: HLA-DRB1*13:02L HLA-DRB1*13:03L HLA-DRB1*04:02L HLA-DRB1*01:01L HLA-DRB4*03:01NL HLA-DRB3*02:01L HLA-DRB1*14:01L HLA-DRB1*11:04L HLA-DRB1*08:01L HLA-DRB5*01:01L HLA-DPA1*01:03-B1*04:02L HLA-DRB1*12:01L HLA-DRB1*12:02L
  REGION 1..10: note = CONT. FROM ABOVE: HLA-DQA1*03:01-B1*03:02M HLA-DQA1*05:05-B1*03: 01L HLA-DRB1*14:17L HLA-DRB1*16:01L HLA-DQA1*02:01-B1*03:03L HLA -DRB1*15:01L
  source 1..10: note = Severe acute respiratory syndrome coronavirus 2
GVYYPDKVFR

SEQ ID NO: 14827 - protein, 12 aa, Severe acute respiratory syndrome-related coronavirus
  REGION 1..12: note = Table B: HLA-DRB1*13:02L HLA-DRB1*04:05L HLA-DRB1*01:02L HLA-DRB1*08:04L HLA-DPA1*01:03-B1*03:01L HLA-DPA1*03:01-B1*04:02L HLA-DRB1*14:02L HLA-DRB1*08:01L HLA-DQA1*05:01-B1*02:01L HLA-DPA1*01:03-B1*04:02L
  REGION 1..12: note = CONT. FROM ABOVE: HLA-DRB1*12:01L HLA-DRB1*15:03L
  source 1..12: note = Severe acute respiratory syndrome coronavirus 2
VYYPDKVFRSSV

SEQ ID NO: 14828 - protein, 14 aa, Severe acute respiratory syndrome-related coronavirus
  REGION 1..14: note = Table B: HLA-DRB1*13:02L HLA-DRB1*13:03L HLA-DRB1*04:04L HLA-DRB1*08:04L HLA-DRB1*14:01L HLA-DRB1*14:02L
  source 1..14: note = Severe acute respiratory syndrome coronavirus 2
DKVFRSSVLHSTQD

SEQ ID NO: 14829 - protein, 10 aa, Severe acute respiratory syndrome-related coronavirus
  REGION 1..10: note = Table B: HLA-DRB1*13:02L HLA-DRB1*13:03L HLA-DRB1*01:01L HLA-DRB4*03:01NL HLA-DRB1*11:04L HLA-DRB1*08:01L HLA-DRB5*01:01L HLA-DRB1*12:01L HLA-DQA1*03:01-B1*03:02M HLA-DQA1*05:05-B1*03:01L
  source 1..10: note = Severe acute respiratory syndrome coronavirus 2
HVSGTNGTKR

SEQ ID NO: 14830 - protein, 13 aa, Severe acute respiratory syndrome-related coronavirus
  REGION 1..13: note = Table B: HLA-DRB1*13:02L HLA-DRB1*04:05L HLA-DQA1*01:02-B1*06:02L HLA-DRB1*01:02L HLA-DPA1*01:03-B1*03:01L HLA-DRB1*12:01L HLA-DPA1*02:01-B1*13:01L HLA-DQA1*03:01-B1*03:02L
  REGION 1..13: note = CONT. FROM ABOVE: HLA-DPA1*01:03-B1*104:01L HLA-DPA1*01:02-B1*04 :01L HLA-DRB1*16:01L HLA-DRB1*04:08L HLA-DQA1*02:01-B1*03:03L HL A-DRB1*15:03L
  source 1..13: note = Severe acute respiratory syndrome coronavirus 2
GTKRFDNPVLPFN

SEQ ID NO: 14831 - protein, 14 aa, Severe acute respiratory syndrome-related coronavirus
  REGION 1..14: note = Table B: HLA-DRB1*13:02L HLA-DPA1*01:03-B1*104:01L HLA-DRB1*15:03L
  source 1..14: note = Severe acute respiratory syndrome coronavirus 2
TKRFDNPVLPFNDG

SEQ ID NO: 14832 - protein, 13 aa, Severe acute respiratory syndrome-related coronavirus
  REGION 1..13: note = Table B: HLA-DRB1*13:02L HLA-DRB1*04:04L HLA-DRB1*08:01L HLA-DRB1*04:10L HLA-DRB1*14:54L
  source 1..13: note = Severe acute respiratory syndrome coronavirus 2
DNPVLPFNDGVYF

SEQ ID NO: 14833 - protein, 17 aa, Severe acute respiratory syndrome-related coronavirus
  REGION 1..17: note = Table B: HLA-DRB1*13:02L HLA-DRB1*08:04L HLA-DQA1*01:01-B1*05:01L HLA-DRB1*11:01L HLA-DPA1*01:03-B1*02:01L
  source 1..17: note = Severe acute respiratory syndrome coronavirus 2
NPVLPFNDGVYFASTEK

SEQ ID NO: 14834 - protein, 12 aa, Severe acute respiratory syndrome-related coronavirus
  REGION 1..12: note = Table B: HLA-DRB1*13:02L HLA-DRB1*04:04L HLA-DRB1*08:04L HLA-DRB1*08:77L HLA-DRB1*11:03L HLA-DRB1*11:04L HLA-DRB1*14:02L HLA-DRB5*01:01L HLA-DPA1*01:03-B1*04:01L HLA-DRB1*09:01L HLA-DRB1*12:02L HLA-DPA1*02:01-B1*13:01L
  REGION 1..12: note = CONT. FROM ABOVE: HLA-DPA1*01:03-B1*104:01L HLA-DRB1*07:01L HLA- DRB1*08:03L
  source 1..12: note = Severe acute respiratory syndrome coronavirus 2
DGVYFASTEKSN

SEQ ID NO: 14835 - protein, 12 aa, Severe acute respiratory syndrome-related coronavirus
  REGION 1..12: note = Table B: HLA-DRB1*13:02L HLA-DRB1*08:04L HLA-DRB1*14:02L HLA-DPA1*01:03-B1*04:01L HLA-DPA1*01:03-B1*104:01L
  source 1..12: note = Severe acute respiratory syndrome coronavirus 2
VYFASTEKSNII

SEQ ID NO: 14836 - protein, 14 aa, Severe acute respiratory syndrome-related coronavirus
  REGION 1..14: note = Table B: HLA-DRB1*13:02L HLA-DRB1*04:05L HLA-DRB1*08:01L HLA-DPA1*01:03-B1*02:01L HLA-DPA1*01:03-B1*104:01L
  source 1..14: note = Severe acute respiratory syndrome coronavirus 2
SNIIRGWIFGTTLD

SEQ ID NO: 14837 - protein, 11 aa, Severe acute respiratory syndrome-related coronavirus
  REGION 1..11: note = Table B: HLA-DRB1*13:02L HLA-DRB1*04:04L HLA-DQA1*01:02-B1*06:02L HLA-DRB1*01:02L HLA-DRB1*08:77L HLA-DPA1*01:03-B1*03:01L HLA-DPA1*03:01-B1*04:02L HLA-DRB1*14:01L HLA-DRB1*11:03L HLA-DRB1*11:04L HLA-DRB1*14:02L
  REGION 1..11: note = CONT. FROM ABOVE: HLA-DQA1*01:01-B1*05:01L HLA-DRB5*01:01L HLA-D RB1*12:02L HLA-DPA1*03:01-B1*105:01L HLA-DPA1*01:02-B1*04:01L HL A-DRB1*10:01L HLA-DRB1*15:03L
  source 1..11: note = Severe acute respiratory syndrome coronavirus 2
IFGTTLDSKTQ

SEQ ID NO: 14838 - protein, 13 aa, Severe acute respiratory syndrome-related coronavirus
  REGION 1..13: note = Table B: HLA-DRB1*13:02L HLA-DRB1*13:03L HLA-DRB1*01:02L HLA-DRB1*04:10L HLA-DPA1*01:03-B1*104:01L
  source 1..13: note = Severe acute respiratory syndrome coronavirus 2
LDSKTQSLLIVNN

SEQ ID NO: 14839 - protein, 14 aa, Severe acute respiratory syndrome-related coronavirus
  REGION 1..14: note = Table B: HLA-DRB1*13:02L HLA-DRB1*01:02L HLA-DPA1*01:03-B1*104:01L
  source 1..14: note = Severe acute respiratory syndrome coronavirus 2
DSKTQSLLIVNNAT

SEQ ID NO: 14840 - protein, 13 aa, Severe acute respiratory syndrome-related coronavirus
  REGION 1..13: note = Table B: HLA-DRB1*13:02L HLA-DRB1*14:01L HLA-DRB1*15:03L
  source 1..13: note = Severe acute respiratory syndrome coronavirus 2
TQSLLIVNNATNV

SEQ ID NO: 14841 - protein, 16 aa, Severe acute respiratory syndrome-related coronavirus
  REGION 1..16: note = Table B: HLA-DRB1*13:02L
  source 1..16: note = Severe acute respiratory syndrome coronavirus 2
TNVVIKVCEFQFCNDP

SEQ ID NO: 14842 - protein, 12 aa, Severe acute respiratory syndrome-related coronavirus
  REGION 1..12: note = Table B: HLA-DRB1*13:02L HLA-DRB1*08:04L HLA-DRB1*08:01L HLA-DRB1*04:08L
  source 1..12: note = Severe acute respiratory syndrome coronavirus 2
GVYYHKNNKSWM

SEQ ID NO: 14843 - protein, 14 aa, Severe acute respiratory syndrome-related coronavirus
  REGION 1..14: note = Table B: HLA-DRB1*13:02L
  source 1..14: note = Severe acute respiratory syndrome coronavirus 2
VYYHKNNKSWMESE

SEQ ID NO: 14844 - protein, 14 aa, Severe acute respiratory syndrome-related coronavirus
  REGION 1..14: note = Table B: HLA-DRB1*13:02L HLA-DRB1*04:05L HLA-DRB1*08:04L HLA-DRB1*11:01L HLA-DRB3*01:01L
  source 1..14: note = Severe acute respiratory syndrome coronavirus 2
NNKSWMESEFRVYS

SEQ ID NO: 14845 - protein, 14 aa, Severe acute respiratory syndrome-related coronavirus
  REGION 1..14: note = Table B: HLA-DRB1*13:02L HLA-DRB1*04:05L HLA-DRB1*01:02L HLA-DRB1*08:04L HLA-DRB1*14:01L HLA-DRB1*11:04L HLA-DRB1*11:01L HLA-DRB3*01:01L
  source 1..14: note = Severe acute respiratory syndrome coronavirus 2
KSWMESEFRVYSSA

SEQ ID NO: 14846 - protein, 12 aa, Severe acute respiratory syndrome-related coronavirus
  REGION 1..12: note = Table B: HLA-DRB1*13:02L HLA-DRB1*04:04L HLA-DRB1*08:04L HLA-DRB1*08:77L HLA-DRB3*02:01L HLA-DRB1*11:03L HLA-DRB1*11:04L HLA-DRB1*08:01L HLA-DQA1*05:05-B1*03:19L HLA-DRB1*09:01L HLA-DPA1*01:03-B1*04:02L HLA-DRB1*12:02L
  REGION 1..12: note = CONT. FROM ABOVE: HLA-DPA1*02:01-B1*13:01L HLA-DPA1*01:03-B1*104 :01L HLA-DRB1*10:01L HLA-DRB1*08:03L
  source 1..12: note = Severe acute respiratory syndrome coronavirus 2
ESEFRVYSSANN

SEQ ID NO: 14847 - protein, 13 aa, Severe acute respiratory syndrome-related coronavirus
  REGION 1..13: note = Table B: HLA-DRB1*13:02L HLA-DRB1*04:04L HLA-DRB1*01:01L HLA-DRB3*02:01L HLA-DRB1*11:03L HLA-DRB1*11:04L HLA-DRB1*14:02L HLA-DRB1*08:01L HLA-DRB1*11:01L HLA-DQA1*05:05-B1*03:19L HLA-DPA1*01:03-B1*04:01L HLA-DPA1*01:03-B1*04:02L
  REGION 1..13: note = CONT. FROM ABOVE: HLA-DRB3*01:01L HLA-DPA1*01:03-B1*104:01L HLA- DRB1*07:01L HLA-DRB1*10:01L HLA-DRB1*15:01L
  source 1..13: note = Severe acute respiratory syndrome coronavirus 2
SEFRVYSSANNCT

SEQ ID NO: 14848 - protein, 14 aa, Severe acute respiratory syndrome-related coronavirus
  REGION 1..14: note = Table B: HLA-DRB1*13:02L HLA-DRB3*02:01L HLA-DRB1*14:01L HLA-DRB1*11:04L HLA-DRB1*10:01L HLA-DRB1*08:03L
  source 1..14: note = Severe acute respiratory syndrome coronavirus 2
TFEYVSQPFLMDLE

SEQ ID NO: 14849 - protein, 14 aa, Severe acute respiratory syndrome-related coronavirus
  REGION 1..14: note = Table B: HLA-DRB1*13:02L HLA-DRB1*14:01L HLA-DRB3*01:01L
  source 1..14: note = Severe acute respiratory syndrome coronavirus 2
FKNLREFVFKNIDG

SEQ ID NO: 14850 - protein, 13 aa, Severe acute respiratory syndrome-related coronavirus
  REGION 1..13: note = Table B: HLA-DRB1*13:02L HLA-DRB1*01:02L HLA-DRB1*08:04L HLA-DRB1*08:01L HLA-DRB1*04:08L
  source 1..13: note = Severe acute respiratory syndrome coronavirus 2
LREFVFKNIDGYF

SEQ ID NO: 14851 - protein, 11 aa, Severe acute respiratory syndrome-related coronavirus
  REGION 1..11: note = Table B: HLA-DRB1*13:02L HLA-DRB1*13:03L HLA-DRB1*04:02L HLA-DRB1*01:02L HLA-DRB1*14:01L HLA-DRB1*08:01L HLA-DRB1*12:01L HLA-DRB1*14:17L HLA-DRB1*04:08L
  source 1..11: note = Severe acute respiratory syndrome coronavirus 2
FVFKNIDGYFK

SEQ ID NO: 14852 - protein, 14 aa, Severe acute respiratory syndrome-related coronavirus
  REGION 1..14: note = Table B: HLA-DRB1*13:02L HLA-DRB1*04:05L HLA-DRB1*11:01L HLA-DRB1*12:01L HLA-DRB1*15:03L
  source 1..14: note = Severe acute respiratory syndrome coronavirus 2
FKNIDGYFKIYSKH

SEQ ID NO: 14853 - protein, 12 aa, Severe acute respiratory syndrome-related coronavirus
  REGION 1..12: note = Table B: HLA-DRB1*13:02L HLA-DRB3*01:01L HLA-DPA1*02:01-B1*13:01L HLA-DPA1*03:01-B1*105:01L HLA-DRB1*15:03L
  source 1..12: note = Severe acute respiratory syndrome coronavirus 2
YFKIYSKHTPIN

SEQ ID NO: 14854 - protein, 10 aa, Severe acute respiratory syndrome-related coronavirus
  REGION 1..10: note = Table B: HLA-DRB1*13:02L HLA-DRB1*13:03L HLA-DRB1*01:01L HLA-DRB4*03:01NL HLA-DRB1*11:04L HLA-DRB1*08:01L HLA-DRB5*01:01L HLA-DPA1*01:03-B1*04:02L HLA-DRB1*12:01L HLA-DQA1*03:01-B1*03:02M HLA-DQA1*05:05-B1*03:01M
  REGION 1..10: note = CONT. FROM ABOVE: HLA-DQA1*01:03-B1*06:01L HLA-DQA1*02:01-B1*03: 03L
  source 1..10: note = Severe acute respiratory syndrome coronavirus 2
DLPIGINITR

SEQ ID NO: 14855 - protein, 13 aa, Severe acute respiratory syndrome-related coronavirus
  REGION 1..13: note = Table B: HLA-DRB1*13:02L HLA-DRB1*04:04L HLA-DRB1*04:10L HLA-DPA1*01:03-B1*104:01L
  source 1..13: note = Severe acute respiratory syndrome coronavirus 2
ALHRSYLTPGDSS

SEQ ID NO: 14856 - protein, 17 aa, Severe acute respiratory syndrome-related coronavirus
  REGION 1..17: note = Table B: HLA-DRB1*13:02L HLA-DRB1*08:04L HLA-DPA1*02:01-B1*13:01L
  source 1..17: note = Severe acute respiratory syndrome coronavirus 2
TPGDSSSGWTAGAAAYY

SEQ ID NO: 14857 - protein, 12 aa, Severe acute respiratory syndrome-related coronavirus
  REGION 1..12: note = Table B: HLA-DRB1*13:02L HLA-DRB1*04:04L HLA-DRB1*08:04L HLA-DRB3*02:01L HLA-DPA1*01:03-B1*03:01L HLA-DRB1*14:01L HLA-DRB1*11:03L HLA-DQA1*01:01-B1*05:01L HLA-DRB1*08:01L HLA-DQA1*05:05-B1*03:19L HLA-DPA1*01:03-B1*04:01L
  REGION 1..12: note = CONT. FROM ABOVE: HLA-DRB1*04:10L HLA-DRB1*12:02L HLA-DPA1*02:01 -B1*13:01L HLA-DRB1*14:54L HLA-DQA1*05:05-B1*03:01L HLA-DRB1*10: 01L HLA-DRB1*08:03L
  source 1..12: note = Severe acute respiratory syndrome coronavirus 2
AAYYVGYLQPRT

SEQ ID NO: 14858 - protein, 14 aa, Severe acute respiratory syndrome-related coronavirus
  REGION 1..14: note = Table B: HLA-DRB1*13:02L
  source 1..14: note = Severe acute respiratory syndrome coronavirus 2
VGYLQPRTFLLKYN

SEQ ID NO: 14859 - protein, 16 aa, Severe acute respiratory syndrome-related coronavirus
  REGION 1..16: note = Table B: HLA-DRB1*13:02L HLA-DPA1*03:01-B1*04:02L HLA-DRB1*11:01L HLA-DRB4*01:01L HLA-DPA1*01:03-B1*04:02L HLA-DRB1*14:54L HLA-DPA1*01:03-B1*02:01L HLA-DPA1*01:03-B1*104:01L HLA-DPA1*01:02-B1*04:01L
  source 1..16: note = Severe acute respiratory syndrome coronavirus 2
ITDAVDCALDPLSETK

SEQ ID NO: 14860 - protein, 11 aa, Severe acute respiratory syndrome-related coronavirus
  REGION 1..11: note = Table B: HLA-DRB1*13:02L HLA-DRB1*13:03L HLA-DRB1*04:05L HLA-DRB1*01:02L HLA-DRB1*08:04L HLA-DRB1*08:77L HLA-DRB3*02:01L HLA-DRB1*03:01L HLA-DRB1*14:01L HLA-DRB1*11:02L HLA-DRB1*11:04L HLA-DRB1*08:01L HLA-DRB1*11:01L HLA-DRB4*01:01L
  REGION 1..11: note = CONT. FROM ABOVE: HLA-DQA1*05:05-B1*03:116L HLA-DQA1*03:01-B1*03 :02L HLA-DRB1*10:01L
  source 1..11: note = Severe acute respiratory syndrome coronavirus 2
VFNATRFASVY

SEQ ID NO: 14861 - protein, 12 aa, Severe acute respiratory syndrome-related coronavirus
  REGION 1..12: note = Table B: HLA-DRB1*13:02L HLA-DRB1*13:03L HLA-DRB1*01:03L HLA-DRB1*04:04L HLA-DRB1*04:05L HLA-DRB1*01:02L HLA-DPA1*01:03-B1*03:01L HLA-DRB1*08:01L HLA-DRB1*11:01L HLA-DPA1*02:01-B1*13:01L HLA-DPA1*01:03-B1*104:01L
  REGION 1..12: note = CONT. FROM ABOVE: HLA-DPA1*01:02-B1*04:01L HLA-DRB1*07:01L HLA-D RB1*16:01L HLA-DRB1*04:08L HLA-DRB1*15:03L
  source 1..12: note = Severe acute respiratory syndrome coronavirus 2
ATRFASVYAWNR

SEQ ID NO: 14862 - protein, 12 aa, Severe acute respiratory syndrome-related coronavirus
  REGION 1..12: note = Table B: HLA-DRB1*13:02L HLA-DRB1*04:05L HLA-DRB1*01:02L HLA-DRB1*11:04L HLA-DRB1*08:01L HLA-DRB1*11:01L HLA-DRB1*12:01L HLA-DRB3*01:01L HLA-DPA1*01:02-B1*04:01L HLA-DRB1*16:01L HLA-DRB1*04:08L HLA-DRB1*15:03L
  source 1..12: note = Severe acute respiratory syndrome coronavirus 2
ASVYAWNRKRIS

SEQ ID NO: 14863 - protein, 12 aa, Severe acute respiratory syndrome-related coronavirus
  REGION 1..12: note = Table B: HLA-DRB1*13:02L HLA-DRB1*04:02L HLA-DRB1*04:05L HLA-DRB1*11:02L HLA-DRB1*11:03L HLA-DRB1*13:01L HLA-DRB1*12:01L HLA-DRB1*14:54L HLA-DPA1*01:02-B1*04:01L HLA-DRB1*08:03L HLA-DRB1*15:03L
  source 1..12: note = Severe acute respiratory syndrome coronavirus 2
SVYAWNRKRISN

SEQ ID NO: 14864 - protein, 13 aa, Severe acute respiratory syndrome-related coronavirus
  REGION 1..13: note = Table B: HLA-DRB1*13:02L HLA-DRB1*04:04L HLA-DRB1*04:05L HLA-DQA1*01:02-B1*06:02L HLA-DPA1*01:03-B1*03:01L HLA-DRB1*12:01L HLA-DQA1*03:01-B1*03:02L HLA-DRB1*16:01L HLA-DQA1*02:01-B1*03:03L HLA-DRB1*15:03L
  source 1..13: note = Severe acute respiratory syndrome coronavirus 2
NRKRISNCVADYS

SEQ ID NO: 14865 - protein, 14 aa, Severe acute respiratory syndrome-related coronavirus
  REGION 1..14: note = Table B: HLA-DRB1*13:02L HLA-DRB1*04:05L HLA-DRB1*01:02L HLA-DPA1*03:01-B1*04:02L HLA-DRB1*12:01L HLA-DPA1*03:01-B1*105:01L HLA-DPA1*01:03-B1*104:01L HLA-DPA1*01:02-B1*04:01L HLA-DRB1*15:03L
  source 1..14: note = Severe acute respiratory syndrome coronavirus 2
SPTKLNDLCFTNVY

SEQ ID NO: 14866 - protein, 13 aa, Severe acute respiratory syndrome-related coronavirus
  REGION 1..13: note = Table B: HLA-DRB1*13:02L HLA-DRB1*08:04L HLA-DRB1*11:04L HLA-DRB1*04:10L HLA-DRB3*01:01L HLA-DPA1*02:01-B1*13:01L HLA-DPA1*03:01-B1*105:01L HLA-DPA1*01:02-B1*04:01L HLA-DRB1*08:03L
  source 1..13: note = Severe acute respiratory syndrome coronavirus 2
ADSFVIRGDEVRQ

SEQ ID NO: 14867 - protein, 14 aa, Severe acute respiratory syndrome-related coronavirus
  REGION 1..14: note = Table B: HLA-DRB1*13:02L HLA-DRB3*01:01L HLA-DRB1*15:03L
  source 1..14: note = Severe acute respiratory syndrome coronavirus 2
SFVIRGDEVRQIAP

SEQ ID NO: 14868 - protein, 10 aa, Severe acute respiratory syndrome-related coronavirus
  REGION 1..10: note = Table B: HLA-DRB1*13:02L HLA-DRB1*13:03L HLA-DRB1*01:03L HLA-DRB1*01:01L HLA-DRB4*03:01NL HLA-DRB1*14:01L HLA-DRB1*11:04L HLA-DRB1*08:01L HLA-DRB1*12:01L HLA-DRB3*01:01L HLA-DQA1*03:01-B1*03:02L HLA-DQA1*05:05-B1*03:01L
  REGION 1..10: note = CONT. FROM ABOVE: HLA-DRB1*16:01L
  source 1..10: note = Severe acute respiratory syndrome coronavirus 2
RQIAPGQTGK

SEQ ID NO: 14869 - protein, 12 aa, Severe acute respiratory syndrome-related coronavirus
  REGION 1..12: note = Table B: HLA-DRB1*13:02L
  source 1..12: note = Severe acute respiratory syndrome coronavirus 2
QIAPGQTGKIAD

SEQ ID NO: 14870 - protein, 13 aa, Severe acute respiratory syndrome-related coronavirus
  REGION 1..13: note = Table B: HLA-DRB1*13:02L HLA-DRB1*04:05L HLA-DRB3*02:01L HLA-DRB1*11:01L HLA-DRB4*02:01NL HLA-DQA1*05:05-B1*03:116L HLA-DPA1*02:01-B1*13:01L
  source 1..13: note = Severe acute respiratory syndrome coronavirus 2
IAPGQTGKIADYN

SEQ ID NO: 14871 - protein, 14 aa, Severe acute respiratory syndrome-related coronavirus
  REGION 1..14: note = Table B: HLA-DRB1*13:02L HLA-DRB1*04:04L HLA-DRB1*04:05L HLA-DRB1*11:01L HLA-DRB3*01:01L HLA-DPA1*02:01-B1*13:01L HLA-DPA1*01:02-B1*04:01L HLA-DRB1*07:01L
  source 1..14: note = Severe acute respiratory syndrome coronavirus 2
APGQTGKIADYNYK

SEQ ID NO: 14872 - protein, 16 aa, Severe acute respiratory syndrome-related coronavirus
  REGION 1..16: note = Table B: HLA-DRB1*13:02L HLA-DRB1*04:02L HLA-DPA1*03:01-B1*04:02L HLA-DRB1*14:02L HLA-DQA1*01:01-B1*05:01L HLA-DRB1*11:01L HLA-DQA1*01-B1*05L HLA-DPA1*01:02-B1*04:01L HLA-DRB1*10:01L
  source 1..16: note = Severe acute respiratory syndrome coronavirus 2
LPDDFTGCVIAWNSNN

SEQ ID NO: 14873 - protein, 11 aa, Severe acute respiratory syndrome-related coronavirus
  REGION 1..11: note = Table B: HLA-DRB1*13:02L HLA-DRB1*13:03L HLA-DRB1*01:03L HLA-DRB1*04:04L HLA-DRB1*08:77L HLA-DRB1*14:01L HLA-DRB1*11:03L HLA-DRB1*11:04L HLA-DRB1*12:02L HLA-DRB1*14:54L HLA-DRB1*10:01L HLA-DRB1*04:08L HLA-DRB1*08:03L
  source 1..11: note = Severe acute respiratory syndrome coronavirus 2
VIAWNSNNLDS

SEQ ID NO: 14874 - protein, 13 aa, Severe acute respiratory syndrome-related coronavirus
  REGION 1..13: note = Table B: HLA-DRB1*13:02L HLA-DRB1*04:05L
  source 1..13: note = Severe acute respiratory syndrome coronavirus 2
GGNYNYLYRLFRK

SEQ ID NO: 14875 - protein, 13 aa, Severe acute respiratory syndrome-related coronavirus
  REGION 1..13: note = Table B: HLA-DRB1*13:02L HLA-DRB1*04:05L HLA-DRB1*08:04L HLA-DRB1*11:03L HLA-DRB1*15:03L
  source 1..13: note = Severe acute respiratory syndrome coronavirus 2
GNYNYLYRLFRKS

SEQ ID NO: 14876 - protein, 13 aa, Severe acute respiratory syndrome-related coronavirus
  REGION 1..13: note = Table B: HLA-DRB1*13:02L HLA-DPA1*01:03-B1*02:01L
  source 1..13: note = Severe acute respiratory syndrome coronavirus 2
NYNYLYRLFRKSN

SEQ ID NO: 14877 - protein, 13 aa, Severe acute respiratory syndrome-related coronavirus
  REGION 1..13: note = Table B: HLA-DRB1*13:02L HLA-DRB1*14:01L HLA-DRB1*11:04L HLA-DRB1*11:01L HLA-DRB1*12:01L HLA-DRB3*01:01L HLA-DRB1*15:03L
  source 1..13: note = Severe acute respiratory syndrome coronavirus 2
YLYRLFRKSNLKP

SEQ ID NO: 14878 - protein, 13 aa, Severe acute respiratory syndrome-related coronavirus
  REGION 1..13: note = Table B: HLA-DRB1*13:02L HLA-DRB1*04:05L HLA-DQA1*01:02-B1*06:02L HLA-DRB1*11:04L HLA-DRB1*11:01L HLA-DRB3*01:01L HLA-DPA1*02:01-B1*13:01L HLA-DQA1*03:01-B1*03:02L HLA-DQA1*02:01-B1*03:03L
  source 1..13: note = Severe acute respiratory syndrome coronavirus 2
YRLFRKSNLKPFE

SEQ ID NO: 14879 - protein, 14 aa, Severe acute respiratory syndrome-related coronavirus
  REGION 1..14: note = Table B: HLA-DRB1*13:02L HLA-DRB1*04:05L HLA-DRB3*01:01L HLA-DPA1*02:01-B1*13:01L
  source 1..14: note = Severe acute respiratory syndrome coronavirus 2
RLFRKSNLKPFERD

SEQ ID NO: 14880 - protein, 13 aa, Severe acute respiratory syndrome-related coronavirus
  REGION 1..13: note = Table B: HLA-DRB1*13:02L HLA-DRB1*01:03L HLA-DRB1*04:05L HLA-DQA1*01:02-B1*06:02L HLA-DRB1*01:02L HLA-DRB1*08:04L HLA-DRB1*11:03L HLA-DRB1*11:04L HLA-DRB1*11:01L HLA-DRB1*12:01L HLA-DRB3*01:01L HLA-DRB1*14:54L HLA-DRB1*14:17L HLA-DRB1*04:08L
  REGION 1..13: note = CONT. FROM ABOVE: HLA-DRB1*08:03L HLA-DRB1*15:03L
  source 1..13: note = Severe acute respiratory syndrome coronavirus 2
SNLKPFERDISTE

SEQ ID NO: 14881 - protein, 12 aa, Severe acute respiratory syndrome-related coronavirus
  REGION 1..12: note = Table B: HLA-DRB1*13:02L HLA-DRB1*13:03L HLA-DRB1*01:03L HLA-DRB1*04:02L HLA-DRB1*04:05L HLA-DRB1*01:02L HLA-DRB4*03:01NL HLA-DRB1*08:04L HLA-DRB3*02:01L HLA-DRB1*14:01L HLA-DRB1*11:03L HLA-DRB1*11:04L HLA-DRB1*12:01L HLA-DRB1*12:02L HLA-DRB3*01:01L
  REGION 1..12: note = CONT. FROM ABOVE: HLA-DPA1*03:01-B1*105:01L HLA-DQA1*03:01-B1*03 :02L HLA-DRB1*14:54L HLA-DQA1*05:05-B1*03:01L HLA-DPA1*01:02-B1* 04:01L HLA-DRB1*04:08L
  source 1..12: note = Severe acute respiratory syndrome coronavirus 2
PFERDISTEIYQ

SEQ ID NO: 14882 - protein, 12 aa, Severe acute respiratory syndrome-related coronavirus
  REGION 1..12: note = Table B: HLA-DRB1*13:02L HLA-DQA1*01:02-B1*06:02L HLA-DRB1*01:02L HLA-DRB4*03:01NL HLA-DRB1*08:77L HLA-DRB3*02:01L HLA-DRB1*14:01L HLA-DQA1*05:01-B1*02:01L HLA-DRB1*12:01L HLA-DRB1*12:02L HLA-DPA1*03:01-B1*105:01L HLA-DRB1*14:54L
  REGION 1..12: note = CONT. FROM ABOVE: HLA-DRB1*14:17L HLA-DRB1*16:01L HLA-DQA1*01:03 -B1*06:01L HLA-DRB1*04:08L HLA-DRB1*15:03L
  source 1..12: note = Severe acute respiratory syndrome coronavirus 2
TEIYQAGSTPCN

SEQ ID NO: 14883 - protein, 12 aa, Severe acute respiratory syndrome-related coronavirus
  REGION 1..12: note = Table B: HLA-DRB1*13:02L HLA-DRB1*13:03L HLA-DRB1*01:03L HLA-DRB1*04:04L HLA-DRB1*04:05L HLA-DQA1*01:02-B1*06:02L HLA-DRB1*01:01L HLA-DRB1*01:02L HLA-DRB4*03:01NL HLA-DRB1*08:77L HLA-DPA1*01:03-B1*03:01L HLA-DRB1*14:01L HLA-DRB1*11:03L
  REGION 1..12: note = CONT. FROM ABOVE: HLA-DRB1*14:02L HLA-DQA1*05:01-B1*02:01L HLA-D RB1*12:01L HLA-DPA1*03:01-B1*105:01L HLA-DRB1*14:54L HLA-DRB1*14 :17L HLA-DRB1*10:01L HLA-DRB1*16:01L HLA-DQA1*01:03-B1*06:01L HL A-DRB1*04:08L HLA-DRB1*15:03L
  source 1..12: note = Severe acute respiratory syndrome coronavirus 2
EIYQAGSTPCNG

SEQ ID NO: 14884 - protein, 13 aa, Severe acute respiratory syndrome-related coronavirus
  REGION 1..13: note = Table B: HLA-DRB1*13:02L HLA-DRB1*13:03L HLA-DRB1*01:03L HLA-DRB1*04:04L HLA-DQA1*01:02-B1*06:02L HLA-DRB1*01:02L HLA-DRB1*08:04L HLA-DRB1*08:77L HLA-DRB3*02:01L HLA-DPA1*01:03-B1*03:01L HLA-DPA1*03:01-B1*04:02L
  REGION 1..13: note = CONT. FROM ABOVE: HLA-DRB1*14:01L HLA-DRB1*11:03L HLA-DRB1*11:04 L HLA-DRB1*14:02L HLA-DRB1*08:01L HLA-DRB1*04:10L HLA-DRB1*09:01 L HLA-DRB1*12:01L HLA-DRB1*12:02L HLA-DPA1*02:01-B1*13:01L HLA-D PA1*03:01-B1*105:01L HLA-DRB1*10:01L HLA-DRB1*04:08L
  REGION 1..13: note = CONT. FROM ABOVE: HLA-DRB1*08:03L HLA-DRB1*15:03L
  source 1..13: note = Severe acute respiratory syndrome coronavirus 2
LQSYGFQPTNGVG

SEQ ID NO: 14885 - protein, 13 aa, Severe acute respiratory syndrome-related coronavirus
  REGION 1..13: note = Table B: HLA-DRB1*13:02L HLA-DRB1*04:05L HLA-DRB1*01:02L HLA-DRB1*08:01L HLA-DPA1*01:03-B1*04:02L HLA-DRB1*04:08L
  source 1..13: note = Severe acute respiratory syndrome coronavirus 2
FQPTNGVGYQPYR

SEQ ID NO: 14886 - protein, 16 aa, Severe acute respiratory syndrome-related coronavirus
  REGION 1..16: note = Table B: HLA-DRB1*13:02L HLA-DPA1*01:03-B1*03:01L HLA-DPA1*01:03-B1*04:02L
  source 1..16: note = Severe acute respiratory syndrome coronavirus 2
QPTNGVGYQPYRVVVL

SEQ ID NO: 14887 - protein, 13 aa, Severe acute respiratory syndrome-related coronavirus
  REGION 1..13: note = Table B: HLA-DRB1*13:02L HLA-DRB1*04:02L HLA-DPA1*01:03-B1*03:01L HLA-DPA1*01:03-B1*04:02L HLA-DQA1*05:05-B1*03:01L
  source 1..13: note = Severe acute respiratory syndrome coronavirus 2
GVGYQPYRVVVLS

SEQ ID NO: 14888 - protein, 14 aa, Severe acute respiratory syndrome-related coronavirus
  REGION 1..14: note = Table B: HLA-DRB1*13:02L HLA-DPA1*01:03-B1*03:01L HLA-DPA1*01:03-B1*04:02L HLA-DQA1*05:05-B1*03:01L HLA-DRB1*07:01L HLA-DRB1*15:01L
  source 1..14: note = Severe acute respiratory syndrome coronavirus 2
VGYQPYRVVVLSFE

SEQ ID NO: 14889 - protein, 14 aa, Severe acute respiratory syndrome-related coronavirus
  REGION 1..14: note = Table B: HLA-DRB1*13:02L HLA-DRB1*04:04L HLA-DRB1*11:04L HLA-DRB1*11:01L HLA-DRB3*01:01L
  source 1..14: note = Severe acute respiratory syndrome coronavirus 2
RVVVLSFELLHAPA

SEQ ID NO: 14890 - protein, 12 aa, Severe acute respiratory syndrome-related coronavirus
  REGION 1..12: note = Table B: HLA-DRB1*13:02L HLA-DRB1*04:04L HLA-DQA1*01:02-B1*06:02L HLA-DRB1*08:04L HLA-DRB3*02:01L HLA-DPA1*01:03-B1*03:01L HLA-DRB1*14:01L HLA-DRB1*11:03L HLA-DRB1*11:04L HLA-DRB1*08:01L HLA-DQA1*05:05-B1*03:19L
  REGION 1..12: note = CONT. FROM ABOVE: HLA-DPA1*01:03-B1*04:01L HLA-DRB1*04:10L HLA-D PA1*01:03-B1*04:02L HLA-DRB1*12:02L HLA-DPA1*02:01-B1*13:01L HLA -DRB1*14:54L HLA-DPA1*01:03-B1*02:01L HLA-DPA1*01:03-B1*104:01L HLA-DQA1*05:05-B1*03:01L HLA-DRB1*10:01L
  REGION 1..12: note = CONT. FROM ABOVE: HLA-DQA1*01:03-B1*06:01L HLA-DRB1*08:03L
  source 1..12: note = Severe acute respiratory syndrome coronavirus 2
VLSFELLHAPAT

SEQ ID NO: 14891 - protein, 12 aa, Severe acute respiratory syndrome-related coronavirus
  REGION 1..12: note = Table B: HLA-DRB1*13:02L HLA-DRB1*13:03L HLA-DRB1*01:03L HLA-DRB1*04:04L HLA-DRB1*04:05L HLA-DRB1*01:02L HLA-DPA1*01:03-B1*03:01L HLA-DRB1*08:01L HLA-DRB1*11:01L HLA-DRB1*12:01L HLA-DPA1*02:01-B1*13:01L
  REGION 1..12: note = CONT. FROM ABOVE: HLA-DPA1*01:02-B1*04:01L HLA-DRB1*07:01L HLA-D RB1*16:01L HLA-DRB1*04:08L HLA-DQA1*02:01-B1*03:03L
  source 1..12: note = Severe acute respiratory syndrome coronavirus 2
GPKKSTNLVKNK

SEQ ID NO: 14892 - protein, 12 aa, Severe acute respiratory syndrome-related coronavirus
  REGION 1..12: note = Table B: HLA-DRB1*13:02L HLA-DRB1*01:02L HLA-DRB1*14:01L HLA-DRB1*12:01L HLA-DRB1*15:03L
  source 1..12: note = Severe acute respiratory syndrome coronavirus 2
TNLVKNKCVNFN

SEQ ID NO: 14893 - protein, 14 aa, Severe acute respiratory syndrome-related coronavirus
  REGION 1..14: note = Table B: HLA-DRB1*13:02L HLA-DRB1*01:02L HLA-DRB1*14:01L HLA-DRB1*12:01L
  source 1..14: note = Severe acute respiratory syndrome coronavirus 2
NLVKNKCVNFNFNG

SEQ ID NO: 14894 - protein, 14 aa, Severe acute respiratory syndrome-related coronavirus
  REGION 1..14: note = Table B: HLA-DRB1*13:02L HLA-DRB1*04:04L HLA-DRB1*11:01L HLA-DRB1*04:10L HLA-DPA1*02:01-B1*13:01L HLA-DPA1*01:03-B1*104:01L HLA-DRB1*15:03L
  source 1..14: note = Severe acute respiratory syndrome coronavirus 2
NGLTGTGVLTESNK

SEQ ID NO: 14895 - protein, 14 aa, Severe acute respiratory syndrome-related coronavirus
  REGION 1..14: note = Table B: HLA-DRB1*13:02L HLA-DRB1*04:08L
  source 1..14: note = Severe acute respiratory syndrome coronavirus 2
VLTESNKKFLPFQQ

SEQ ID NO: 14896 - protein, 14 aa, Severe acute respiratory syndrome-related coronavirus
  REGION 1..14: note = Table B: HLA-DRB1*13:02L
  source 1..14: note = Severe acute respiratory syndrome coronavirus 2
KFLPFQQFGRDIAD

SEQ ID NO: 14897 - protein, 14 aa, Severe acute respiratory syndrome-related coronavirus
  REGION 1..14: note = Table B: HLA-DRB1*13:02L
  source 1..14: note = Severe acute respiratory syndrome coronavirus 2
FLPFQQFGRDIADT

SEQ ID NO: 14898 - protein, 10 aa, Severe acute respiratory syndrome-related coronavirus
  REGION 1..10: note = Table B: HLA-DRB1*13:02L HLA-DRB1*13:03M HLA-DRB1*04:02L HLA-DRB1*01:01L HLA-DRB4*03:01NL HLA-DRB3*02:01L HLA-DRB1*14:01L HLA-DRB1*11:04L HLA-DRB1*14:02L HLA-DRB1*08:01L HLA-DRB5*01:01L HLA-DPA1*01:03-B1*04:02L HLA-DRB1*12:01M HLA-DRB1*12:02L
  REGION 1..10: note = CONT. FROM ABOVE: HLA-DPA1*03:01-B1*105:01L HLA-DQA1*03:01-B1*03 :02L HLA-DQA1*05:05-B1*03:01L HLA-DRB1*14:17L HLA-DRB1*16:01L HL A-DQA1*01:03-B1*06:01L HLA-DRB1*08:03L HLA-DQA1*02:01-B1*03:03L
  source 1..10: note = Severe acute respiratory syndrome coronavirus 2
DIADTTDAVR

SEQ ID NO: 14899 - protein, 12 aa, Severe acute respiratory syndrome-related coronavirus
  REGION 1..12: note = Table B: HLA-DRB1*13:02L HLA-DRB1*13:03L HLA-DRB1*01:03L HLA-DRB1*04:05L HLA-DQA1*01:02-B1*06:02L HLA-DRB1*01:02L HLA-DRB1*08:77L HLA-DPA1*01:03-B1*03:01L HLA-DRB1*14:01L HLA-DRB1*14:02L HLA-DQA1*05:05-B1*03:19L HLA-DRB1*04:10L
  REGION 1..12: note = CONT. FROM ABOVE: HLA-DRB1*12:01L HLA-DRB1*12:02L HLA-DPA1*02:01 -B1*13:01L HLA-DPA1*03:01-B1*105:01L HLA-DRB1*14:54L HLA-DRB1*04 :08L HLA-DRB1*15:03L
  source 1..12: note = Severe acute respiratory syndrome coronavirus 2
IADTTDAVRDPQ

SEQ ID NO: 14900 - protein, 11 aa, Severe acute respiratory syndrome-related coronavirus
  REGION 1..11: note = Table B: HLA-DRB1*13:02L HLA-DQA1*01:02-B1*06:02L HLA-DPA1*01:03-B1*03:01L HLA-DQA1*05:05-B1*03:19L HLA-DRB1*04:10L HLA-DRB1*12:02L HLA-DPA1*03:01-B1*105:01L HLA-DRB1*04:08L
  source 1..11: note = Severe acute respiratory syndrome coronavirus 2
DTTDAVRDPQT

SEQ ID NO: 14901 - protein, 12 aa, Severe acute respiratory syndrome-related coronavirus
  REGION 1..12: note = Table B: HLA-DRB1*13:02L HLA-DRB1*13:03L HLA-DRB1*01:03L HLA-DRB1*04:02L HLA-DRB1*04:05L HLA-DRB1*01:02L HLA-DRB4*03:01NL HLA-DRB3*02:01L HLA-DRB1*14:01L HLA-DRB1*08:01L HLA-DRB1*04:10L HLA-DPA1*02:01-B1*13:01L HLA-DPA1*01:03-B1*104:01L
  REGION 1..12: note = CONT. FROM ABOVE: HLA-DRB1*04:08L
  source 1..12: note = Severe acute respiratory syndrome coronavirus 2
SNQVAVLYQDVN

SEQ ID NO: 14902 - protein, 14 aa, Severe acute respiratory syndrome-related coronavirus
  REGION 1..14: note = Table B: HLA-DRB1*13:02L HLA-DRB1*01:03L HLA-DRB1*04:02L HLA-DRB1*04:05L HLA-DQA1*01:02-B1*06:02L HLA-DRB1*01:02L HLA-DRB1*08:04L HLA-DPA1*01:03-B1*03:01L HLA-DPA1*03:01-B1*04:02L HLA-DRB1*14:01L HLA-DRB1*14:02L
  REGION 1..14: note = CONT. FROM ABOVE: HLA-DQA1*05:01-B1*02:01L HLA-DRB4*01:01L HLA-D PA1*01:03-B1*04:02L HLA-DRB1*12:01L HLA-DPA1*02:01-B1*13:01L HLA -DPA1*03:01-B1*105:01L HLA-DQA1*03:01-B1*03:02L HLA-DRB1*14:17L HLA-DRB1*16:01L HLA-DRB1*04:08L
  source 1..14: note = Severe acute respiratory syndrome coronavirus 2
VAVLYQDVNCTEVP

SEQ ID NO: 14903 - protein, 14 aa, Severe acute respiratory syndrome-related coronavirus
  REGION 1..14: note = Table B: HLA-DRB1*13:02L HLA-DRB1*01:03L HLA-DRB1*04:02L HLA-DRB1*04:04L HLA-DRB1*04:05L HLA-DRB1*08:04L HLA-DPA1*01:03-B1*03:01L HLA-DPA1*03:01-B1*04:02L HLA-DRB1*08:01L HLA-DPA1*01:03-B1*04:02L HLA-DRB1*12:01L
  REGION 1..14: note = CONT. FROM ABOVE: HLA-DPA1*02:01-B1*13:01L HLA-DPA1*01:03-B1*104 :01L HLA-DRB1*16:01L HLA-DRB1*04:08L HLA-DRB1*15:03L
  source 1..14: note = Severe acute respiratory syndrome coronavirus 2
YQDVNCTEVPVAIH

SEQ ID NO: 14904 - protein, 13 aa, Severe acute respiratory syndrome-related coronavirus
  REGION 1..13: note = Table B: HLA-DRB1*13:02L HLA-DRB1*04:05L HLA-DRB1*01:02L HLA-DPA1*01:03-B1*03:01L HLA-DQA1*05:05-B1*03:19L HLA-DRB1*12:01L HLA-DPA1*02:01-B1*13:01L HLA-DPA1*01:03-B1*104:01L HLA-DRB1*04:08L
  source 1..13: note = Severe acute respiratory syndrome coronavirus 2
FQTRAGCLIGAEH

SEQ ID NO: 14905 - protein, 16 aa, Severe acute respiratory syndrome-related coronavirus
  REGION 1..16: note = Table B: HLA-DRB1*13:02L HLA-DRB1*04:05L HLA-DRB1*01:02L HLA-DPA1*01:03-B1*03:01L HLA-DRB1*12:01L HLA-DPA1*02:01-B1*13:01L HLA-DPA1*01:03-B1*104:01L HLA-DRB1*15:03L
  source 1..16: note = Severe acute respiratory syndrome coronavirus 2
GAEHVNNSYECDIPIG

SEQ ID NO: 14906 - protein, 13 aa, Severe acute respiratory syndrome-related coronavirus
  REGION 1..13: note = Table B: HLA-DRB1*13:02L HLA-DRB1*13:03L HLA-DRB1*08:04L HLA-DPA1*01:03-B1*03:01L HLA-DPA1*03:01-B1*04:02L HLA-DRB1*11:04L HLA-DRB1*14:02L HLA-DPA1*01:03-B1*04:02L HLA-DRB3*01:01L HLA-DPA1*02:01-B1*13:01L HLA-DRB1*14:54L
  REGION 1..13: note = CONT. FROM ABOVE: HLA-DRB1*10:01L
  source 1..13: note = Severe acute respiratory syndrome coronavirus 2
NNSYECDIPIGAG

SEQ ID NO: 14907 - protein, 13 aa, Severe acute respiratory syndrome-related coronavirus
  REGION 1..13: note = Table B: HLA-DRB1*13:02L HLA-DRB1*13:03L HLA-DRB1*08:77L HLA-DRB1*11:03L HLA-DRB1*12:02L HLA-DPA1*02:01-B1*13:01L
  source 1..13: note = Severe acute respiratory syndrome coronavirus 2
IIAYTMSLGAENS

SEQ ID NO: 14908 - protein, 12 aa, Severe acute respiratory syndrome-related coronavirus
  REGION 1..12: note = Table B: HLA-DRB1*13:02L
  source 1..12: note = Severe acute respiratory syndrome coronavirus 2
AYSNNSIAIPTN

SEQ ID NO: 14909 - protein, 14 aa, Severe acute respiratory syndrome-related coronavirus
  REGION 1..14: note = Table B: HLA-DRB1*13:02L HLA-DRB1*04:02L HLA-DRB1*04:05L HLA-DRB1*01:02L HLA-DPA1*01:03-B1*03:01L HLA-DRB1*14:01L HLA-DRB1*14:17L HLA-DRB1*16:01L
  source 1..14: note = Severe acute respiratory syndrome coronavirus 2
SNNSIAIPTNFTIS

SEQ ID NO: 14910 - protein, 12 aa, Severe acute respiratory syndrome-related coronavirus
  REGION 1..12: note = Table B: HLA-DRB1*13:02L HLA-DRB1*04:04L HLA-DRB1*01:02L HLA-DRB1*08:04L HLA-DPA1*01:03-B1*03:01L HLA-DRB1*04:08L HLA-DRB1*15:03L
  source 1..12: note = Severe acute respiratory syndrome coronavirus 2
ILPVSMTKTSVD

SEQ ID NO: 14911 - protein, 16 aa, Severe acute respiratory syndrome-related coronavirus
  REGION 1..16: note = Table B: HLA-DRB1*13:02L
  source 1..16: note = Severe acute respiratory syndrome coronavirus 2
SNLLLQYGSFCTQLNR

SEQ ID NO: 14912 - protein, 13 aa, Severe acute respiratory syndrome-related coronavirus
  REGION 1..13: note = Table B: HLA-DRB1*13:02L HLA-DPA1*02:01-B1*13:01L HLA-DPA1*01:03-B1*104:01L
  source 1..13: note = Severe acute respiratory syndrome coronavirus 2
QLNRALTGIAVEQ

SEQ ID NO: 14913 - protein, 13 aa, Severe acute respiratory syndrome-related coronavirus
  REGION 1..13: note = Table B: HLA-DRB1*13:02L HLA-DQA1*01:01-B1*05:01L HLA-DPA1*01:03-B1*104:01L
  source 1..13: note = Severe acute respiratory syndrome coronavirus 2
LNRALTGIAVEQD

SEQ ID NO: 14914 - protein, 12 aa, Severe acute respiratory syndrome-related coronavirus
  REGION 1..12: note = Table B: HLA-DRB1*13:02L HLA-DRB1*04:04L HLA-DRB1*08:04L HLA-DRB1*11:03L HLA-DRB1*11:04L HLA-DRB1*12:02L HLA-DPA1*02:01-B1*13:01L HLA-DPA1*01:02-B1*04:01L HLA-DRB1*07:01L HLA-DRB1*08:03L
  source 1..12: note = Severe acute respiratory syndrome coronavirus 2
RALTGIAVEQDK

SEQ ID NO: 14915 - protein, 14 aa, Severe acute respiratory syndrome-related coronavirus
  REGION 1..14: note = Table B: HLA-DRB1*13:02L HLA-DPA1*01:03-B1*104:01L
  source 1..14: note = Severe acute respiratory syndrome coronavirus 2
ALTGIAVEQDKNTQ

SEQ ID NO: 14916 - protein, 10 aa, Severe acute respiratory syndrome-related coronavirus
  REGION 1..10: note = Table B: HLA-DRB1*13:02L HLA-DRB1*13:03L HLA-DQA1*01:02-B1*06:02L HLA-DRB4*03:01NL HLA-DRB1*08:01L HLA-DRB5*01:01L HLA-DPA1*01:03-B1*04:02L HLA-DRB1*12:01L HLA-DPA1*03:01-B1*105:01L HLA-DQA1*03:01-B1*03:02L
  REGION 1..10: note = CONT. FROM ABOVE: HLA-DQA1*05:05-B1*03:01L HLA-DPA1*01:02-B1*04: 01L HLA-DQA1*01:03-B1*06:01L HLA-DQA1*02:01-B1*03:03L
  source 1..10: note = Severe acute respiratory syndrome coronavirus 2
NTQEVFAQVK

SEQ ID NO: 14917 - protein, 13 aa, Severe acute respiratory syndrome-related coronavirus
  REGION 1..13: note = Table B: HLA-DRB1*13:02L HLA-DRB4*03:01NL HLA-DRB1*08:04L HLA-DRB1*11:04L HLA-DRB1*14:02L HLA-DRB1*11:01L HLA-DRB1*12:02L HLA-DPA1*01:03-B1*104:01L HLA-DRB1*10:01L
  source 1..13: note = Severe acute respiratory syndrome coronavirus 2
GFNFSQILPDPSK

SEQ ID NO: 14918 - protein, 13 aa, Severe acute respiratory syndrome-related coronavirus
  REGION 1..13: note = Table B: HLA-DRB1*13:02L HLA-DRB1*13:03L HLA-DRB1*04:04L HLA-DRB1*08:04L HLA-DPA1*01:03-B1*03:01L HLA-DRB1*14:02L HLA-DQA1*01:01-B1*05:01L HLA-DRB1*08:01L HLA-DPA1*02:01-B1*13:01L HLA-DPA1*01:03-B1*02:01L
  REGION 1..13: note = CONT. FROM ABOVE: HLA-DPA1*01:03-B1*104:01L HLA-DRB1*15:03L
  source 1..13: note = Severe acute respiratory syndrome coronavirus 2
FNFSQILPDPSKP

SEQ ID NO: 14919 - protein, 10 aa, Severe acute respiratory syndrome-related coronavirus
  REGION 1..10: note = Table B: HLA-DRB1*13:02L HLA-DRB1*13:03L HLA-DRB4*03:01NL HLA-DPA1*01:03-B1*04:02L HLA-DRB1*12:01L HLA-DPA1*03:01-B1*105:01L HLA-DQA1*03:01-B1*03:02L HLA-DQA1*05:05-B1*03:01L HLA-DPA1*01:02-B1*04:01L
  REGION 1..10: note = CONT. FROM ABOVE: HLA-DQA1*02:01-B1*03:03L
  source 1..10: note = Severe acute respiratory syndrome coronavirus 2
SFIEDLLFNK

SEQ ID NO: 14920 - protein, 12 aa, Severe acute respiratory syndrome-related coronavirus
  REGION 1..12: note = Table B: HLA-DRB1*13:02L HLA-DRB1*13:03L HLA-DRB1*04:02L HLA-DQA1*01:02-B1*06:02L HLA-DRB1*08:04L HLA-DRB1*12:01L HLA-DRB1*14:54L HLA-DRB1*16:01L HLA-DRB1*15:03L
  source 1..12: note = Severe acute respiratory syndrome coronavirus 2
DLLFNKVTLADA

SEQ ID NO: 14921 - protein, 15 aa, Severe acute respiratory syndrome-related coronavirus
  REGION 1..15: note = Table B: HLA-DRB1*13:02L HLA-DQA1*05:05-B1*03:01L HLA-DQA1*01:03-B1*06:01L HLA-DQA1*02:01-B1*03:03L
  source 1..15: note = Severe acute respiratory syndrome coronavirus 2
DAGFIKQYGDCLGDI

SEQ ID NO: 14922 - protein, 13 aa, Severe acute respiratory syndrome-related coronavirus
  REGION 1..13: note = Table B: HLA-DRB1*13:02L HLA-DRB1*04:05L HLA-DQA1*01:02-B1*06:02L HLA-DRB1*01:02L HLA-DPA1*01:03-B1*03:01L HLA-DRB1*12:01L HLA-DPA1*02:01-B1*13:01L
  source 1..13: note = Severe acute respiratory syndrome coronavirus 2
IAARDLICAQKFN

SEQ ID NO: 14923 - protein, 13 aa, Severe acute respiratory syndrome-related coronavirus
  REGION 1..13: note = Table B: HLA-DRB1*13:02L HLA-DRB1*01:02L HLA-DRB1*11:04L HLA-DRB1*11:01L HLA-DRB3*01:01L
  source 1..13: note = Severe acute respiratory syndrome coronavirus 2
RDLICAQKFNGLT

SEQ ID NO: 14924 - protein, 15 aa, Severe acute respiratory syndrome-related coronavirus
  REGION 1..15: note = Table B: HLA-DRB1*13:02L HLA-DRB1*08:04L HLA-DPA1*03:01-B1*04:02L HLA-DRB1*14:02L HLA-DRB1*11:01L HLA-DRB4*02:01NL HLA-DPA1*01:03-B1*104:01L HLA-DRB1*15:03L
  source 1..15: note = Severe acute respiratory syndrome coronavirus 2
AGTITSGWTFGAGAA

SEQ ID NO: 14925 - protein, 15 aa, Severe acute respiratory syndrome-related coronavirus
  REGION 1..15: note = Table B: HLA-DRB1*13:02L HLA-DRB1*04:05L HLA-DQA1*01:01-B1*05:01L HLA-DRB1*11:01L HLA-DPA1*02:01-B1*13:01L
  source 1..15: note = Severe acute respiratory syndrome coronavirus 2
GWTFGAGAALQIPFA

SEQ ID NO: 14926 - protein, 14 aa, Severe acute respiratory syndrome-related coronavirus
  REGION 1..14: note = Table B: HLA-DRB1*13:02L HLA-DRB1*08:04L
  source 1..14: note = Severe acute respiratory syndrome coronavirus 2
QMAYRFNGIGVTQN

SEQ ID NO: 14927 - protein, 13 aa, Severe acute respiratory syndrome-related coronavirus
  REGION 1..13: note = Table B: HLA-DRB1*13:02L HLA-DRB1*04:02L HLA-DRB1*01:02L HLA-DRB1*14:01L HLA-DRB1*14:54L
  source 1..13: note = Severe acute respiratory syndrome coronavirus 2
GIGVTQNVLYENQ

SEQ ID NO: 14928 - protein, 14 aa, Severe acute respiratory syndrome-related coronavirus
  REGION 1..14: note = Table B: HLA-DRB1*13:02L HLA-DRB1*04:05L HLA-DRB1*08:04L HLA-DRB3*02:01L HLA-DPA1*02:01-B1*13:01L HLA-DRB1*04:08L
  source 1..14: note = Severe acute respiratory syndrome coronavirus 2
VTQNVLYENQKLIA

SEQ ID NO: 14929 - protein, 12 aa, Severe acute respiratory syndrome-related coronavirus
  REGION 1..12: note = Table B: HLA-DRB1*13:02L HLA-DRB1*13:03L HLA-DRB1*01:03L HLA-DRB1*04:02L HLA-DRB1*04:05L HLA-DQA1*01:02-B1*06:02L HLA-DRB1*01:02L HLA-DRB4*03:01NL HLA-DRB1*08:04L HLA-DRB1*08:77L HLA-DRB3*02:01L HLA-DPA1*01:03-B1*03:01L HLA-DRB1*08:01L
  REGION 1..12: note = CONT. FROM ABOVE: HLA-DQA1*01-B1*05L HLA-DQA1*05:01-B1*02:01L HL A-DPA1*01:03-B1*04:01L HLA-DPA1*01:03-B1*04:02L HLA-DRB1*12:01L HLA-DRB1*12:02L HLA-DPA1*02:01-B1*13:01L HLA-DRB1*14:54L HLA-DPA 1*01:03-B1*104:01L HLA-DQA1*05:05-B1*03:01L HLA-DRB1*14:17L
  REGION 1..12: note = CONT. FROM ABOVE: HLA-DQA1*01:03-B1*06:01L HLA-DRB1*04:08L
  source 1..12: note = Severe acute respiratory syndrome coronavirus 2
NQKLIANQFNSA

SEQ ID NO: 14930 - protein, 12 aa, Severe acute respiratory syndrome-related coronavirus
  REGION 1..12: note = Table B: HLA-DRB1*13:02L HLA-DRB1*13:03L HLA-DRB1*04:04L HLA-DRB1*04:05L HLA-DRB1*01:02L HLA-DRB1*08:04L HLA-DPA1*01:03-B1*03:01L HLA-DRB1*11:04L HLA-DRB1*08:01L HLA-DRB1*11:01L HLA-DRB1*04:10L HLA-DPA1*02:01-B1*13:01L
  REGION 1..12: note = CONT. FROM ABOVE: HLA-DRB1*14:54L HLA-DPA1*01:03-B1*02:01L HLA-D QA1*05:05-B1*03:01L HLA-DRB1*10:01L
  source 1..12: note = Severe acute respiratory syndrome coronavirus 2
KLIANQFNSAIG

SEQ ID NO: 14931 - protein, 12 aa, Severe acute respiratory syndrome-related coronavirus
  REGION 1..12: note = Table B: HLA-DRB1*13:02L HLA-DRB1*08:04L HLA-DRB1*08:77L HLA-DRB3*02:01L HLA-DPA1*01:03-B1*03:01L HLA-DPA1*03:01-B1*04:02L HLA-DRB1*08:01L HLA-DRB1*04:10L HLA-DRB1*09:01L HLA-DRB1*12:02L HLA-DPA1*02:01-B1*13:01L
  source 1..12: note = Severe acute respiratory syndrome coronavirus 2
ANQFNSAIGKIQ

SEQ ID NO: 14932 - protein, 13 aa, Severe acute respiratory syndrome-related coronavirus
  REGION 1..13: note = Table B: HLA-DRB1*13:02L HLA-DRB1*04:04L HLA-DRB1*01:01L HLA-DRB1*08:04L HLA-DPA1*01:03-B1*03:01L HLA-DPA1*03:01-B1*04:02L HLA-DRB1*11:03L HLA-DRB1*11:04L HLA-DRB1*14:02L HLA-DQA1*01:01-B1*05:01L HLA-DRB1*08:01L
  REGION 1..13: note = CONT. FROM ABOVE: HLA-DRB1*11:01L HLA-DRB1*04:10L HLA-DPA1*01:03 -B1*04:02L HLA-DRB1*12:02L HLA-DPA1*02:01-B1*13:01L HLA-DRB1*07: 01L HLA-DRB1*10:01L HLA-DRB1*08:03L
  source 1..13: note = Severe acute respiratory syndrome coronavirus 2
NQFNSAIGKIQDS

SEQ ID NO: 14933 - protein, 14 aa, Severe acute respiratory syndrome-related coronavirus
  REGION 1..14: note = Table B: HLA-DRB1*13:02L HLA-DRB1*08:04L HLA-DRB1*11:01L HLA-DPA1*02:01-B1*13:01L HLA-DPA1*01:03-B1*104:01L HLA-DRB1*08:03L
  source 1..14: note = Severe acute respiratory syndrome coronavirus 2
STASALGKLQDVVN

SEQ ID NO: 14934 - protein, 13 aa, Severe acute respiratory syndrome-related coronavirus
  REGION 1..13: note = Table B: HLA-DRB1*13:02L HLA-DPA1*01:03-B1*03:01L HLA-DPA1*02:01-B1*13:01L
  source 1..13: note = Severe acute respiratory syndrome coronavirus 2
ALGKLQDVVNQNA

SEQ ID NO: 14935 - protein, 10 aa, Severe acute respiratory syndrome-related coronavirus
  REGION 1..10: note = Table B: HLA-DRB1*13:02L HLA-DRB1*13:03L HLA-DRB1*04:02L HLA-DRB4*03:01NL HLA-DRB1*08:01L HLA-DRB5*01:01L HLA-DRB1*12:01L HLA-DQA1*03:01-B1*03:02M HLA-DQA1*05:05-B1*03:01L HLA-DRB1*14:17L HLA-DQA1*01:03-B1*06:01L
  REGION 1..10: note = CONT. FROM ABOVE: HLA-DQA1*02:01-B1*03:03L
  source 1..10: note = Severe acute respiratory syndrome coronavirus 2
SSVLNDILSR

SEQ ID NO: 14936 - protein, 12 aa, Severe acute respiratory syndrome-related coronavirus
  REGION 1..12: note = Table B: HLA-DRB1*13:02L HLA-DRB1*01:03L HLA-DRB1*04:02L HLA-DRB1*04:04L HLA-DRB1*04:05L HLA-DQA1*01:02-B1*06:02L HLA-DRB1*01:02L HLA-DRB4*03:01NL HLA-DPA1*01:03-B1*03:01L HLA-DQA1*01-B1*05L HLA-DQA1*05:01-B1*02:01L HLA-DRB1*04:10L
  REGION 1..12: note = CONT. FROM ABOVE: HLA-DPA1*02:01-B1*13:01L HLA-DQA1*05:05-B1*03: 01L HLA-DRB1*14:17L HLA-DRB1*07:01L HLA-DRB1*04:08L
  source 1..12: note = Severe acute respiratory syndrome coronavirus 2
LDKVEAEVQIDR

SEQ ID NO: 14937 - protein, 14 aa, Severe acute respiratory syndrome-related coronavirus
  REGION 1..14: note = Table B: HLA-DRB1*13:02L HLA-DPA1*01:03-B1*03:01L
  source 1..14: note = Severe acute respiratory syndrome coronavirus 2
GRLQSLQTYVTQQL

SEQ ID NO: 14938 - protein, 10 aa, Severe acute respiratory syndrome-related coronavirus
  REGION 1..10: note = Table B: HLA-DRB1*13:02L HLA-DRB1*13:03L HLA-DRB1*04:02L HLA-DRB4*03:01NL HLA-DRB1*08:01L HLA-DRB1*12:01L HLA-DQA1*03:01-B1*03:02L HLA-DQA1*05:05-B1*03:01L HLA-DRB1*14:17L HLA-DRB1*16:01L HLA-DQA1*01:03-B1*06:01L
  REGION 1..10: note = CONT. FROM ABOVE: HLA-DQA1*02:01-B1*03:03L
  source 1..10: note = Severe acute respiratory syndrome coronavirus 2
QTYVTQQLIR

SEQ ID NO: 14939 - protein, 14 aa, Severe acute respiratory syndrome-related coronavirus
  REGION 1..14: note = Table B: HLA-DRB1*13:02L HLA-DPA1*01:03-B1*03:01L HLA-DPA1*02:01-B1*13:01L
  source 1..14: note = Severe acute respiratory syndrome coronavirus 2
VTQQLIRAAEIRAS

SEQ ID NO: 14940 - protein, 12 aa, Severe acute respiratory syndrome-related coronavirus
  REGION 1..12: note = Table B: HLA-DRB1*13:02L HLA-DRB1*04:04L HLA-DRB1*04:05L HLA-DPA1*01:03-B1*03:01L HLA-DRB1*11:01L HLA-DRB4*02:01NL HLA-DPA1*01:03-B1*02:01L HLA-DPA1*01:03-B1*104:01L HLA-DRB1*08:03L HLA-DRB1*15:03L
  source 1..12: note = Severe acute respiratory syndrome coronavirus 2
LIRAAEIRASAN

SEQ ID NO: 14941 - protein, 10 aa, Severe acute respiratory syndrome-related coronavirus
  REGION 1..10: note = Table B: HLA-DRB1*13:02L HLA-DRB1*13:03L HLA-DRB1*01:03L HLA-DRB1*04:02L HLA-DRB1*01:01L HLA-DRB4*03:01NL HLA-DRB1*08:01L HLA-DRB1*12:01L HLA-DQA1*03:01-B1*03:02L HLA-DQA1*05:05-B1*03:01L HLA-DRB1*14:17L HLA-DRB1*16:01L
  REGION 1..10: note = CONT. FROM ABOVE: HLA-DQA1*02:01-B1*03:03L
  source 1..10: note = Severe acute respiratory syndrome coronavirus 2
RASANLAATK

SEQ ID NO: 14942 - protein, 15 aa, Severe acute respiratory syndrome-related coronavirus
  REGION 1..15: note = Table B: HLA-DRB1*13:02L HLA-DRB1*04:05L HLA-DRB1*08:04L HLA-DPA1*01:03-B1*03:01L HLA-DRB1*14:02L HLA-DRB1*08:01L HLA-DRB1*11:01L HLA-DPA1*02:01-B1*13:01L HLA-DPA1*01:03-B1*104:01L
  source 1..15: note = Severe acute respiratory syndrome coronavirus 2
SANLAATKMSECVLG

SEQ ID NO: 14943 - protein, 14 aa, Severe acute respiratory syndrome-related coronavirus
  REGION 1..14: note = Table B: HLA-DRB1*13:02L HLA-DRB1*01:03L HLA-DRB1*04:04L HLA-DRB1*04:05L HLA-DRB1*01:02L HLA-DRB1*12:01L HLA-DQA1*03:01-B1*03:02L HLA-DPA1*01:03-B1*104:01L HLA-DRB1*04:08L
  source 1..14: note = Severe acute respiratory syndrome coronavirus 2
AATKMSECVLGQSK

SEQ ID NO: 14944 - protein, 14 aa, Severe acute respiratory syndrome-related coronavirus
  REGION 1..14: note = Table B: HLA-DRB1*13:02L HLA-DRB1*01:01L HLA-DPA1*01:03-B1*03:01L HLA-DRB1*03:01L HLA-DRB1*11:03L HLA-DRB1*14:02L HLA-DPA1*01:03-B1*04:02L HLA-DRB3*01:01L HLA-DPA1*02:01-B1*13:01L HLA-DPA1*01:03-B1*02:01L
  REGION 1..14: note = CONT. FROM ABOVE: HLA-DRB1*07:01L HLA-DQA1*01:03-B1*06:01L
  source 1..14: note = Severe acute respiratory syndrome coronavirus 2
KGYHLMSFPQSAPH

SEQ ID NO: 14945 - protein, 14 aa, Severe acute respiratory syndrome-related coronavirus
  REGION 1..14: note = Table B: HLA-DRB1*13:02L HLA-DRB1*01:01L HLA-DPA1*03:01-B1*04:02L HLA-DRB1*14:02L HLA-DPA1*01:03-B1*04:02L HLA-DRB3*01:01L HLA-DPA1*01:03-B1*02:01L HLA-DPA1*01:03-B1*104:01L
  source 1..14: note = Severe acute respiratory syndrome coronavirus 2
GYHLMSFPQSAPHG

SEQ ID NO: 14946 - protein, 13 aa, Severe acute respiratory syndrome-related coronavirus
  REGION 1..13: note = Table B: HLA-DRB1*13:02L HLA-DRB1*01:03L HLA-DRB1*04:02L HLA-DRB1*04:05L HLA-DRB1*08:04L HLA-DRB3*02:01L HLA-DRB1*08:01L HLA-DQA1*01-B1*05L HLA-DPA1*02:01-B1*13:01L HLA-DQA1*03:01-B1*03:02L HLA-DPA1*01:03-B1*02:01L
  REGION 1..13: note = CONT. FROM ABOVE: HLA-DPA1*01:03-B1*104:01L HLA-DQA1*05:05-B1*03 :01L HLA-DRB1*14:17L HLA-DQA1*01:03-B1*06:01L
  source 1..13: note = Severe acute respiratory syndrome coronavirus 2
GVVFLHVTYVPAQ

SEQ ID NO: 14947 - protein, 10 aa, Severe acute respiratory syndrome-related coronavirus
  REGION 1..10: note = Table B: HLA-DRB1*13:02L HLA-DRB1*13:03L HLA-DRB1*04:02L HLA-DRB4*03:01NL HLA-DRB1*08:01L HLA-DRB5*01:01L HLA-DRB1*12:01L HLA-DQA1*03:01-B1*03:02L HLA-DQA1*05:05-B1*03:01L HLA-DRB1*14:17L HLA-DQA1*02:01-B1*03:03L
  source 1..10: note = Severe acute respiratory syndrome coronavirus 2
HVTYVPAQEK

SEQ ID NO: 14948 - protein, 12 aa, Severe acute respiratory syndrome-related coronavirus
  REGION 1..12: note = Table B: HLA-DRB1*13:02L HLA-DRB1*08:04L HLA-DRB3*02:01L HLA-DPA1*01:03-B1*03:01L HLA-DRB1*09:01L HLA-DRB1*12:02L HLA-DRB1*07:01L
  source 1..12: note = Severe acute respiratory syndrome coronavirus 2
VTYVPAQEKNFT

SEQ ID NO: 14949 - protein, 13 aa, Severe acute respiratory syndrome-related coronavirus
  REGION 1..13: note = Table B: HLA-DRB1*13:02L HLA-DRB1*01:03L HLA-DRB1*08:04L HLA-DRB1*14:01L HLA-DRB3*01:01L HLA-DRB1*16:01L
  source 1..13: note = Severe acute respiratory syndrome coronavirus 2
APAICHDGKAHFP

SEQ ID NO: 14950 - protein, 15 aa, Severe acute respiratory syndrome-related coronavirus
  REGION 1..15: note = Table B: HLA-DRB1*13:02L HLA-DPA1*01:03-B1*104:01L HLA-DRB1*15:03L
  source 1..15: note = Severe acute respiratory syndrome coronavirus 2
AHFPREGVFVSNGTH

SEQ ID NO: 14951 - protein, 14 aa, Severe acute respiratory syndrome-related coronavirus
  REGION 1..14: note = Table B: HLA-DRB1*13:02L HLA-DRB1*04:02L HLA-DRB1*11:04L HLA-DRB1*11:01L HLA-DQA1*03:01-B1*03:02L HLA-DRB1*08:03L
  source 1..14: note = Severe acute respiratory syndrome coronavirus 2
GTHWFVTQRNFYEP

SEQ ID NO: 14952 - protein, 13 aa, Severe acute respiratory syndrome-related coronavirus
  REGION 1..13: note = Table B: HLA-DRB1*13:02L HLA-DRB1*14:02L HLA-DRB1*11:01L HLA-DPA1*01:03-B1*04:02L HLA-DRB3*01:01L HLA-DRB1*08:02L
  source 1..13: note = Severe acute respiratory syndrome coronavirus 2
HWFVTQRNFYEPQ

SEQ ID NO: 14953 - protein, 14 aa, Severe acute respiratory syndrome-related coronavirus
  REGION 1..14: note = Table B: HLA-DRB1*13:02L HLA-DPA1*01:03-B1*104:01L
  source 1..14: note = Severe acute respiratory syndrome coronavirus 2
VTQRNFYEPQIITT

SEQ ID NO: 14954 - protein, 13 aa, Severe acute respiratory syndrome-related coronavirus
  REGION 1..13: note = Table B: HLA-DRB1*13:02L HLA-DRB1*01:03L HLA-DRB1*04:04L HLA-DRB1*01:02L HLA-DRB1*08:04L HLA-DPA1*01:03-B1*03:01L HLA-DPA1*03:01-B1*04:02L HLA-DQA1*01:01-B1*05:01L HLA-DRB1*08:01L HLA-DPA1*01:03-B1*04:02L HLA-DRB1*12:01L
  REGION 1..13: note = CONT. FROM ABOVE: HLA-DPA1*02:01-B1*13:01L HLA-DRB1*14:54L HLA-D PA1*01:02-B1*04:01L HLA-DRB1*10:01L HLA-DRB1*08:03L HLA-DRB1*15: 03L
  source 1..13: note = Severe acute respiratory syndrome coronavirus 2
RNFYEPQIITTDN

SEQ ID NO: 14955 - protein, 11 aa, Severe acute respiratory syndrome-related coronavirus
  REGION 1..11: note = Table B: HLA-DRB1*13:02L HLA-DRB1*13:03L HLA-DRB1*04:02L HLA-DRB4*03:01NL HLA-DRB1*14:01L HLA-DQA1*05:01-B1*02:01L HLA-DRB1*12:01L HLA-DRB1*14:54L HLA-DRB1*16:01L
  source 1..11: note = Severe acute respiratory syndrome coronavirus 2
IITTDNTFVSG

SEQ ID NO: 14956 - protein, 14 aa, Severe acute respiratory syndrome-related coronavirus
  REGION 1..14: note = Table B: HLA-DRB1*13:02L HLA-DRB1*13:03L HLA-DRB1*01:03L HLA-DRB1*04:02L HLA-DRB1*04:04L HLA-DRB1*04:05L HLA-DRB1*01:02L HLA-DRB4*03:01NL HLA-DRB1*08:04L HLA-DRB1*08:77L HLA-DRB3*02:01L HLA-DPA1*01:03-B1*03:01L HLA-DPA1*03:01-B1*04:02L
  REGION 1..14: note = CONT. FROM ABOVE: HLA-DRB1*14:01L HLA-DRB1*11:03L HLA-DRB1*11:04 L HLA-DRB1*14:02L HLA-DQA1*01:01-B1*05:01L HLA-DRB1*08:01L HLA-D RB1*11:01L HLA-DQA1*01-B1*05L HLA-DPA1*01:03-B1*04:01L HLA-DQA1* 05:05-B1*03:116L HLA-DRB1*04:10L HLA-DRB1*09:01L
  REGION 1..14: note = CONT. FROM ABOVE: HLA-DPA1*01:03-B1*04:02L HLA-DRB1*12:01L HLA-D RB1*12:02L HLA-DPA1*02:01-B1*13:01L HLA-DRB1*14:54L HLA-DPA1*01: 03-B1*02:01L HLA-DPA1*01:03-B1*104:01L HLA-DRB1*14:17L HLA-DPA1* 01:02-B1*04:01L HLA-DRB1*07:01L HLA-DRB1*10:01L HLA-DRB1*16:01L
  REGION 1..14: note = CONT. FROM ABOVE: HLA-DRB1*04:08L HLA-DRB1*08:03L HLA-DRB1*15:03L
  source 1..14: note = Severe acute respiratory syndrome coronavirus 2
DNTFVSGNCDVVIG

SEQ ID NO: 14957 - protein, 15 aa, Severe acute respiratory syndrome-related coronavirus
  REGION 1..15: note = Table B: HLA-DRB1*13:02L HLA-DRB1*01:03L HLA-DRB1*01:02L HLA-DPA1*01:03-B1*03:01L HLA-DRB1*08:01L HLA-DRB3*01:01L HLA-DQA1*05:05-B1*03:01L HLA-DRB1*04:08L HLA-DRB1*08:03L
  source 1..15: note = Severe acute respiratory syndrome coronavirus 2
DPLQPELDSFKEELD

SEQ ID NO: 14958 - protein, 14 aa, Severe acute respiratory syndrome-related coronavirus
  REGION 1..14: note = Table B: HLA-DRB1*13:02L HLA-DRB1*04:04L HLA-DRB1*11:04L HLA-DQA1*01-B1*05L HLA-DRB3*01:01L
  source 1..14: note = Severe acute respiratory syndrome coronavirus 2
EELDKYFKNHTSPD

SEQ ID NO: 14959 - protein, 13 aa, Severe acute respiratory syndrome-related coronavirus
  REGION 1..13: note = Table B: HLA-DRB1*13:02L HLA-DRB1*08:04L HLA-DRB1*11:04L HLA-DRB1*11:01L HLA-DRB1*04:10L HLA-DRB3*01:01L HLA-DPA1*02:01-B1*13:01L HLA-DRB1*08:03L HLA-DRB1*15:03L
  source 1..13: note = Severe acute respiratory syndrome coronavirus 2
LDKYFKNHTSPDV

SEQ ID NO: 14960 - protein, 12 aa, Severe acute respiratory syndrome-related coronavirus
  REGION 1..12: note = Table B: HLA-DRB1*13:02L HLA-DRB1*13:03L HLA-DRB1*01:03L HLA-DRB1*04:04L HLA-DRB1*04:05L HLA-DRB1*01:01L HLA-DRB1*08:04L HLA-DRB1*08:77L HLA-DRB3*02:01L HLA-DPA1*01:03-B1*03:01L HLA-DPA1*03:01-B1*04:02L HLA-DRB1*14:01L HLA-DRB1*11:03L
  REGION 1..12: note = CONT. FROM ABOVE: HLA-DRB1*11:04L HLA-DRB1*14:02L HLA-DQA1*01:01 -B1*05:01L HLA-DRB1*08:01L HLA-DRB5*01:01L HLA-DQA1*01-B1*05L HL A-DRB4*01:01L HLA-DRB1*04:10L HLA-DPA1*01:03-B1*04:02L HLA-DRB1* 12:02L HLA-DPA1*02:01-B1*13:01L HLA-DRB1*14:54L HLA-DRB1*07:01L
  REGION 1..12: note = CONT. FROM ABOVE: HLA-DRB1*10:01L HLA-DRB1*04:08L HLA-DRB1*08:03 L HLA-DRB1*15:03L
  source 1..12: note = Severe acute respiratory syndrome coronavirus 2
GDISGINASVVN

SEQ ID NO: 14961 - protein, 15 aa, Severe acute respiratory syndrome-related coronavirus
  REGION 1..15: note = Table B: HLA-DRB1*13:02L HLA-DRB1*04:04L HLA-DRB1*08:04L HLA-DPA1*01:03-B1*04:02L
  source 1..15: note = Severe acute respiratory syndrome coronavirus 2
AKNLNESLIDLQELG

SEQ ID NO: 14962 - protein, 10 aa, Severe acute respiratory syndrome-related coronavirus
  REGION 1..10: note = Table B: HLA-DRB1*13:02L HLA-DRB1*13:03L HLA-DRB1*04:02L HLA-DQA1*01:02-B1*06:02L HLA-DRB1*01:01L HLA-DRB4*03:01NL HLA-DRB3*02:01L HLA-DRB1*14:01L HLA-DRB1*11:04L HLA-DRB1*08:01L HLA-DRB5*01:01L HLA-DPA1*01:03-B1*04:02L HLA-DRB1*12:01L
  REGION 1..10: note = CONT. FROM ABOVE: HLA-DRB1*12:02L HLA-DPA1*03:01-B1*105:01L HLA- DQA1*03:01-B1*03:02M HLA-DQA1*05:05-B1*03:01L HLA-DRB1*14:17L HL A-DRB1*16:01L HLA-DQA1*01:03-B1*06:01L HLA-DQA1*02:01-B1*03:03L
  source 1..10: note = Severe acute respiratory syndrome coronavirus 2
SLIDLQELGK

SEQ ID NO: 14963 - protein, 14 aa, Severe acute respiratory syndrome-related coronavirus
  REGION 1..14: note = Table B: HLA-DRB1*13:02L HLA-DRB1*04:05L HLA-DRB1*11:03L HLA-DRB1*11:04L HLA-DRB1*11:01L HLA-DRB3*01:01L HLA-DPA1*01:03-B1*02:01L HLA-DRB1*08:03L
  source 1..14: note = Severe acute respiratory syndrome coronavirus 2
IDLQELGKYEQYIK

SEQ ID NO: 14964 - protein, 16 aa, Severe acute respiratory syndrome-related coronavirus
  REGION 1..16: note = Table B: HLA-DRB1*13:02L
  source 1..16: note = Severe acute respiratory syndrome coronavirus 2
DLQELGKYEQYIKWPW

SEQ ID NO: 14965 - protein, 12 aa, Severe acute respiratory syndrome-related coronavirus
  REGION 1..12: note = Table B: HLA-DRB1*13:02L HLA-DRB1*01:03L HLA-DRB1*01:02L HLA-DRB1*08:04L HLA-DRB1*14:01L HLA-DRB1*08:01L HLA-DPA1*03:01-B1*105:01L HLA-DRB1*04:08L
  source 1..12: note = Severe acute respiratory syndrome coronavirus 2
GKYEQYIKWPWY

SEQ ID NO: 14966 - protein, 13 aa, Severe acute respiratory syndrome-related coronavirus
  REGION 1..13: note = Table B: HLA-DRB1*13:02L HLA-DRB1*01:03L HLA-DRB1*04:04L HLA-DRB1*04:05L HLA-DQA1*01:02-B1*06:02L HLA-DRB1*01:02L HLA-DRB1*08:04L HLA-DPA1*01:03-B1*03:01L HLA-DPA1*03:01-B1*04:02L HLA-DRB1*14:01L HLA-DQA1*01-B1*05L
  REGION 1..13: note = CONT. FROM ABOVE: HLA-DPA1*01:03-B1*04:02L HLA-DRB1*12:01L HLA-D PA1*02:01-B1*13:01L HLA-DPA1*01:03-B1*104:01L HLA-DQA1*05:05-B1* 03:01L HLA-DRB1*16:01L HLA-DRB1*04:08L HLA-DRB1*15:03L
  source 1..13: note = Severe acute respiratory syndrome coronavirus 2
DLFMRIFTIGTVT

SEQ ID NO: 14967 - protein, 12 aa, Severe acute respiratory syndrome-related coronavirus
  REGION 1..12: note = Table B: HLA-DRB1*13:02L HLA-DRB1*01:02L HLA-DRB3*02:01L
  source 1..12: note = Severe acute respiratory syndrome coronavirus 2
IPIQASLPFGWL

SEQ ID NO: 14968 - protein, 10 aa, Severe acute respiratory syndrome-related coronavirus
  REGION 1..10: note = Table B: HLA-DRB1*13:02L HLA-DRB1*13:03L HLA-DQA1*01:02-B1*06:02L HLA-DRB4*03:01NL HLA-DRB1*08:01L HLA-DRB1*12:01L HLA-DPA1*03:01-B1*105:01L HLA-DQA1*03:01-B1*03:02L HLA-DQA1*05:05-B1*03:01L
  REGION 1..10: note = CONT. FROM ABOVE: HLA-DQA1*01:03-B1*06:01L HLA-DQA1*02:01-B1*03: 03L
  source 1..10: note = Severe acute respiratory syndrome coronavirus 2
QSASKIITLK

SEQ ID NO: 14969 - protein, 10 aa, Severe acute respiratory syndrome-related coronavirus
  REGION 1..10: note = Table B: HLA-DRB1*13:02L HLA-DRB1*13:03L HLA-DRB1*08:01L HLA-DRB1*12:01L HLA-DQA1*03:01-B1*03:02L HLA-DQA1*05:05-B1*03:01L HLA-DQA1*01:03-B1*06:01L HLA-DQA1*02:01-B1*03:03L
  source 1..10: note = Severe acute respiratory syndrome coronavirus 2
SASKIITLKK

SEQ ID NO: 14970 - protein, 12 aa, Severe acute respiratory syndrome-related coronavirus
  REGION 1..12: note = Table B: HLA-DRB1*13:02L HLA-DRB1*04:05L HLA-DRB1*12:01L HLA-DRB3*01:01L HLA-DRB1*14:54L HLA-DPA1*01:02-B1*04:01L HLA-DRB1*15:03L
  source 1..12: note = Severe acute respiratory syndrome coronavirus 2
ASKIITLKKRWQ

SEQ ID NO: 14971 - protein, 12 aa, Severe acute respiratory syndrome-related coronavirus
  REGION 1..12: note = Table B: HLA-DRB1*13:02L HLA-DRB1*13:03L HLA-DRB1*01:03L HLA-DRB1*04:05L HLA-DRB1*01:02L HLA-DRB1*11:02L HLA-DRB1*11:03L HLA-DRB1*12:01L HLA-DRB3*01:01L HLA-DRB1*04:08L HLA-DRB1*15:03L
  source 1..12: note = Severe acute respiratory syndrome coronavirus 2
KIITLKKRWQLA

SEQ ID NO: 14972 - protein, 14 aa, Severe acute respiratory syndrome-related coronavirus
  REGION 1..14: note = Table B: HLA-DRB1*13:02L HLA-DRB1*01:03L HLA-DRB1*01:02L HLA-DRB3*01:01L HLA-DRB1*04:08L
  source 1..14: note = Severe acute respiratory syndrome coronavirus 2
IITLKKRWQLALSK

SEQ ID NO: 14973 - protein, 12 aa, Severe acute respiratory syndrome-related coronavirus
  REGION 1..12: note = Table B: HLA-DRB1*13:02L HLA-DRB1*13:03L HLA-DRB1*04:05L HLA-DRB1*01:01L HLA-DRB1*14:01L HLA-DRB1*11:04L HLA-DRB1*11:01L HLA-DRB3*01:01L HLA-DPA1*02:01-B1*13:01L
  source 1..12: note = Severe acute respiratory syndrome coronavirus 2
KRWQLALSKGVH

SEQ ID NO: 14974 - protein, 12 aa, Severe acute respiratory syndrome-related coronavirus
  REGION 1..12: note = Table B: HLA-DRB1*13:02L HLA-DRB1*01:03L
  source 1..12: note = Severe acute respiratory syndrome coronavirus 2
YFLQSINFVRII

SEQ ID NO: 14975 - protein, 11 aa, Severe acute respiratory syndrome-related coronavirus
  REGION 1..11: note = Table B: HLA-DRB1*13:02L
  source 1..11: note = Severe acute respiratory syndrome coronavirus 2
QSINFVRIIMR

SEQ ID NO: 14976 - protein, 12 aa, Severe acute respiratory syndrome-related coronavirus
  REGION 1..12: note = Table B: HLA-DRB1*13:02L HLA-DRB1*04:02L HLA-DRB1*04:05L HLA-DRB1*01:02L HLA-DRB1*08:04L HLA-DPA1*01:03-B1*03:01L HLA-DPA1*03:01-B1*04:02L HLA-DRB1*12:01L HLA-DRB1*12:02L HLA-DPA1*02:01-B1*13:01L HLA-DRB1*14:54L
  REGION 1..12: note = CONT. FROM ABOVE: HLA-DPA1*01:02-B1*04:01L
  source 1..12: note = Severe acute respiratory syndrome coronavirus 2
KNPLLYDANYFL

SEQ ID NO: 14977 - protein, 14 aa, Severe acute respiratory syndrome-related coronavirus
  REGION 1..14: note = Table B: HLA-DRB1*13:02L HLA-DRB1*01:03L HLA-DQA1*01:02-B1*06:02L HLA-DRB1*01:02L HLA-DRB1*08:04L HLA-DPA1*03:01-B1*04:02L HLA-DRB1*14:01L HLA-DRB1*08:01L HLA-DRB1*11:01L HLA-DPA1*01:03-B1*04:02L
  REGION 1..14: note = CONT. FROM ABOVE: HLA-DPA1*03:01-B1*105:01L HLA-DRB1*16:01L HLA- DRB1*04:08L HLA-DRB1*15:03L
  source 1..14: note = Severe acute respiratory syndrome coronavirus 2
DANYFLCWHTNCYD

SEQ ID NO: 14978 - protein, 14 aa, Severe acute respiratory syndrome-related coronavirus
  REGION 1..14: note = Table B: HLA-DRB1*13:02L HLA-DRB1*01:02L HLA-DRB1*15:03L
  source 1..14: note = Severe acute respiratory syndrome coronavirus 2
VTSSIVITSGDGTT

SEQ ID NO: 14979 - protein, 14 aa, Severe acute respiratory syndrome-related coronavirus
  REGION 1..14: note = Table B: HLA-DRB1*13:02L HLA-DRB1*01:03L HLA-DQA1*01:02-B1*06:02L HLA-DRB1*01:02L HLA-DRB1*12:01L HLA-DPA1*03:01-B1*105:01L HLA-DRB1*14:54L HLA-DRB1*16:01L HLA-DQA1*01:03-B1*06:01L
  source 1..14: note = Severe acute respiratory syndrome coronavirus 2
SIVITSGDGTTSPI

SEQ ID NO: 14980 - protein, 13 aa, Severe acute respiratory syndrome-related coronavirus
  REGION 1..13: note = Table B: HLA-DRB1*13:02L HLA-DRB1*01:02L HLA-DRB1*11:01L HLA-DRB1*04:10L HLA-DRB3*01:01L HLA-DRB1*14:54L
  source 1..13: note = Severe acute respiratory syndrome coronavirus 2
SGDGTTSPISEHD

SEQ ID NO: 14981 - protein, 10 aa, Severe acute respiratory syndrome-related coronavirus
  REGION 1..10: note = Table B: HLA-DRB1*13:02L HLA-DRB1*13:03L HLA-DRB1*04:02L HLA-DRB4*03:01NL HLA-DRB1*08:01L HLA-DRB5*01:01L HLA-DRB1*12:01L HLA-DQA1*03:01-B1*03:02L HLA-DQA1*05:05-B1*03:01L HLA-DRB1*14:17L HLA-DQA1*01:03-B1*06:01L
  REGION 1..10: note = CONT. FROM ABOVE: HLA-DQA1*02:01-B1*03:03L
  source 1..10: note = Severe acute respiratory syndrome coronavirus 2
DYQIGGYTEK

SEQ ID NO: 14982 - protein, 14 aa, Severe acute respiratory syndrome-related coronavirus
  REGION 1..14: note = Table B: HLA-DRB1*13:02L HLA-DRB1*14:01L HLA-DRB1*11:04L HLA-DRB1*11:01L HLA-DRB3*01:01L HLA-DQA1*05:05-B1*03:01L
  source 1..14: note = Severe acute respiratory syndrome coronavirus 2
IGGYTEKWESGVKD

SEQ ID NO: 14983 - protein, 14 aa, Severe acute respiratory syndrome-related coronavirus
  REGION 1..14: note = Table B: HLA-DRB1*13:02L HLA-DRB1*01:03L HLA-DRB1*04:05L HLA-DRB1*01:02L HLA-DRB1*04:08L
  source 1..14: note = Severe acute respiratory syndrome coronavirus 2
DTGVEHVTFFIYNK

SEQ ID NO: 14984 - protein, 15 aa, Severe acute respiratory syndrome-related coronavirus
  REGION 1..15: note = Table B: HLA-DRB1*13:02L HLA-DRB1*01:03L HLA-DRB1*04:05L HLA-DPA1*01:03-B1*04:01L HLA-DQA1*02:01-B1*03:03L
  source 1..15: note = Severe acute respiratory syndrome coronavirus 2
GVEHVTFFIYNKIVD

SEQ ID NO: 14985 - protein, 14 aa, Severe acute respiratory syndrome-related coronavirus
  REGION 1..14: note = Table B: HLA-DRB1*13:02L HLA-DRB1*01:03L HLA-DRB1*01:02L HLA-DRB1*14:01L HLA-DRB1*14:02L HLA-DRB1*11:01L HLA-DRB1*12:01L HLA-DRB1*08:03L
  source 1..14: note = Severe acute respiratory syndrome coronavirus 2
HVTFFIYNKIVDEP

SEQ ID NO: 14986 - protein, 13 aa, Severe acute respiratory syndrome-related coronavirus
  REGION 1..13: note = Table B: HLA-DRB1*13:02L HLA-DRB1*01:03L HLA-DRB1*04:04L HLA-DRB1*04:05L HLA-DRB4*03:01NL HLA-DRB1*08:77L HLA-DPA1*01:03-B1*03:01L HLA-DRB1*14:01L HLA-DQA1*01:01-B1*05:01L HLA-DQA1*01-B1*05L HLA-DRB1*04:10L
  REGION 1..13: note = CONT. FROM ABOVE: HLA-DPA1*02:01-B1*13:01L HLA-DRB1*14:54L HLA-D PA1*01:03-B1*104:01L HLA-DRB1*10:01L HLA-DRB1*16:01L HLA-DQA1*01 :03-B1*06:01L HLA-DRB1*04:08L
  source 1..13: note = Severe acute respiratory syndrome coronavirus 2
IHTIDGSSGVVNP

SEQ ID NO: 14987 - protein, 16 aa, Severe acute respiratory syndrome-related coronavirus
  REGION 1..16: note = Table B: HLA-DRB1*13:02L HLA-DRB3*01:01L HLA-DPA1*02:01-B1*13:01L HLA-DPA1*01:03-B1*104:01L
  source 1..16: note = Severe acute respiratory syndrome coronavirus 2
TIDGSSGVVNPVMEPI

SEQ ID NO: 14988 - protein, 14 aa, Severe acute respiratory syndrome-related coronavirus
  REGION 1..14: note = Table B: HLA-DRB1*13:02L HLA-DRB1*01:02L HLA-DPA1*02:01-B1*13:01L HLA-DQA1*05:05-B1*03:01L
  source 1..14: note = Severe acute respiratory syndrome coronavirus 2
VVNPVMEPIYDEPT

SEQ ID NO: 14989 - protein, 14 aa, Severe acute respiratory syndrome-related coronavirus
  REGION 1..14: note = Table B: HLA-DRB1*13:02L HLA-DQA1*01:02-B1*06:02L HLA-DRB1*14:01L HLA-DPA1*02:01-B1*13:01L HLA-DPA1*03:01-B1*105:01L
  source 1..14: note = Severe acute respiratory syndrome coronavirus 2
VNPVMEPIYDEPTT

SEQ ID NO: 14990 - protein, 14 aa, Severe acute respiratory syndrome-related coronavirus
  REGION 1..14: note = Table B: HLA-DRB1*13:02L HLA-DRB1*01:03L HLA-DRB1*04:02L HLA-DRB1*04:04L HLA-DRB1*04:05L HLA-DRB4*03:01NL HLA-DRB1*14:02L HLA-DQA1*01:01-B1*05:01L HLA-DRB1*08:01L HLA-DRB1*11:01L HLA-DRB4*02:01NL HLA-DPA1*01:03-B1*04:01L
  REGION 1..14: note = CONT. FROM ABOVE: HLA-DPA1*01:03-B1*04:02L HLA-DRB1*12:01L HLA-D RB3*01:01L HLA-DRB1*14:17L HLA-DRB1*04:08M
  source 1..14: note = Severe acute respiratory syndrome coronavirus 2
VSEETGTLIVNSVL

SEQ ID NO: 14991 - protein, 12 aa, Severe acute respiratory syndrome-related coronavirus
  REGION 1..12: note = Table B: HLA-DRB1*13:02L HLA-DRB1*14:01L HLA-DPA1*03:01-B1*105:01L HLA-DRB1*16:01L
  source 1..12: note = Severe acute respiratory syndrome coronavirus 2
TGTLIVNSVLLF

SEQ ID NO: 14992 - protein, 13 aa, Severe acute respiratory syndrome-related coronavirus
  REGION 1..13: note = Table B: HLA-DRB1*13:02L HLA-DRB1*04:05L HLA-DRB1*11:04L HLA-DRB1*11:01L HLA-DRB3*01:01L HLA-DPA1*02:01-B1*13:01L HLA-DPA1*01:03-B1*02:01L HLA-DRB1*08:03L
  source 1..13: note = Severe acute respiratory syndrome coronavirus 2
PSFYVYSRVKNLN

SEQ ID NO: 14993 - protein, 12 aa, Severe acute respiratory syndrome-related coronavirus
  REGION 1..12: note = Table B: HLA-DRB1*13:02L HLA-DRB1*13:03L HLA-DRB1*04:04L HLA-DRB1*04:05L HLA-DRB1*08:04L HLA-DRB1*14:01L HLA-DRB1*11:04L HLA-DRB1*08:01L HLA-DRB1*11:01L HLA-DRB1*14:54L
  source 1..12: note = Severe acute respiratory syndrome coronavirus 2
YVYSRVKNLNSS

SEQ ID NO: 14994 - protein, 13 aa, Severe acute respiratory syndrome-related coronavirus
  REGION 1..13: note = Table B: HLA-DRB1*13:02L HLA-DRB1*13:03L HLA-DRB1*01:02L HLA-DRB4*03:01NL HLA-DPA1*01:03-B1*03:01L HLA-DPA1*01:03-B1*04:01L HLA-DQA1*05:05-B1*03:116L HLA-DRB1*04:10L HLA-DRB3*01:01L HLA-DRB1*14:17L
  REGION 1..13: note = CONT. FROM ABOVE: HLA-DPA1*01:02-B1*04:01L HLA-DRB1*07:01L HLA-D RB1*15:03L
  source 1..13: note = Severe acute respiratory syndrome coronavirus 2
ADSNGTITVEELK

SEQ ID NO: 14995 - protein, 13 aa, Severe acute respiratory syndrome-related coronavirus
  REGION 1..13: note = Table B: HLA-DRB1*13:02L HLA-DPA1*01:03-B1*04:02L HLA-DRB3*01:01L HLA-DRB1*14:54L HLA-DPA1*01:03-B1*02:01L
  source 1..13: note = Severe acute respiratory syndrome coronavirus 2
TITVEELKKLLEQ

SEQ ID NO: 14996 - protein, 14 aa, Severe acute respiratory syndrome-related coronavirus
  REGION 1..14: note = Table B: HLA-DRB1*13:02L HLA-DRB1*11:02L HLA-DPA1*02:01-B1*13:01L HLA-DQA1*05:05-B1*03:01L HLA-DRB1*08:02L
  source 1..14: note = Severe acute respiratory syndrome coronavirus 2
ITVEELKKLLEQWN

SEQ ID NO: 14997 - protein, 14 aa, Severe acute respiratory syndrome-related coronavirus
  REGION 1..14: note = Table B: HLA-DRB1*13:02L HLA-DPA1*01:03-B1*104:01L HLA-DQA1*02:01-B1*03:03L
  source 1..14: note = Severe acute respiratory syndrome coronavirus 2
ELKKLLEQWNLVIG

SEQ ID NO: 14998 - protein, 12 aa, Severe acute respiratory syndrome-related coronavirus
  REGION 1..12: note = Table B: HLA-DRB1*13:02L HLA-DRB1*04:05L HLA-DRB1*08:04L
  source 1..12: note = Severe acute respiratory syndrome coronavirus 2
LLQFAYANRNRF

SEQ ID NO: 14999 - protein, 12 aa, Severe acute respiratory syndrome-related coronavirus
  REGION 1..12: note = Table B: HLA-DRB1*13:02L HLA-DRB1*04:05L HLA-DRB1*08:04L HLA-DRB1*11:04L HLA-DRB1*11:01L HLA-DRB3*01:01L
  source 1..12: note = Severe acute respiratory syndrome coronavirus 2
LQFAYANRNRFL

SEQ ID NO: 15000 - protein, 14 aa, Severe acute respiratory syndrome-related coronavirus
  REGION 1..14: note = Table B: HLA-DRB1*13:02L HLA-DRB1*08:01L HLA-DRB1*12:01L HLA-DRB3*01:01L HLA-DRB1*04:08L
  source 1..14: note = Severe acute respiratory syndrome coronavirus 2
FAYANRNRFLYIIK

SEQ ID NO: 15001 - protein, 13 aa, Severe acute respiratory syndrome-related coronavirus
  REGION 1..13: note = Table B: HLA-DRB1*13:02L HLA-DPA1*01:03-B1*04:02L HLA-DRB3*01:01L
  source 1..13: note = Severe acute respiratory syndrome coronavirus 2
LSYFIASFRLFAR

SEQ ID NO: 15002 - protein, 13 aa, Severe acute respiratory syndrome-related coronavirus
  REGION 1..13: note = Table B: HLA-DRB1*13:02L HLA-DRB3*01:01L
  source 1..13: note = Severe acute respiratory syndrome coronavirus 2
SYFIASFRLFART

SEQ ID NO: 15003 - protein, 12 aa, Severe acute respiratory syndrome-related coronavirus
  REGION 1..12: note = Table B: HLA-DRB1*13:02L HLA-DQA1*01:02-B1*06:02L HLA-DRB1*01:02L HLA-DRB1*14:01L HLA-DRB1*12:01L HLA-DRB3*01:01L HLA-DRB1*16:01L HLA-DRB1*04:08L HLA-DRB1*15:03L
  source 1..12: note = Severe acute respiratory syndrome coronavirus 2
FIASFRLFARTR

SEQ ID NO: 15004 - protein, 13 aa, Severe acute respiratory syndrome-related coronavirus
  REGION 1..13: note = Table B: HLA-DRB1*13:02L HLA-DRB1*04:02L HLA-DRB1*11:02L HLA-DRB1*11:03L HLA-DQA1*05:05-B1*03:116L HLA-DPA1*01:03-B1*04:02L HLA-DPA1*02:01-B1*13:01L HLA-DRB1*08:02L HLA-DRB1*08:03L
  source 1..13: note = Severe acute respiratory syndrome coronavirus 2
IASFRLFARTRSM

SEQ ID NO: 15005 - protein, 16 aa, Severe acute respiratory syndrome-related coronavirus
  REGION 1..16: note = Table B: HLA-DRB1*13:02L HLA-DPA1*01:03-B1*104:01L
  source 1..16: note = Severe acute respiratory syndrome coronavirus 2
LFARTRSMWSFNPETN

SEQ ID NO: 15006 - protein, 12 aa, Severe acute respiratory syndrome-related coronavirus
  REGION 1..12: note = Table B: HLA-DRB1*13:02L HLA-DRB1*08:04L
  source 1..12: note = Severe acute respiratory syndrome coronavirus 2
NILLNVPLHGTI

SEQ ID NO: 15007 - protein, 12 aa, Severe acute respiratory syndrome-related coronavirus
  REGION 1..12: note = Table B: HLA-DRB1*13:02L HLA-DQA1*05:05-B1*03:01L
  source 1..12: note = Severe acute respiratory syndrome coronavirus 2
ILLNVPLHGTIL

SEQ ID NO: 15008 - protein, 16 aa, Severe acute respiratory syndrome-related coronavirus
  REGION 1..16: note = Table B: HLA-DRB1*13:02L HLA-DPA1*01:03-B1*03:01L HLA-DPA1*02:01-B1*13:01L HLA-DPA1*01:03-B1*104:01L
  source 1..16: note = Severe acute respiratory syndrome coronavirus 2
VPLHGTILTRPLLESE

SEQ ID NO: 15009 - protein, 10 aa, Severe acute respiratory syndrome-related coronavirus
  REGION 1..10: note = Table B: HLA-DRB1*13:02L HLA-DRB1*13:03L HLA-DRB4*03:01NL HLA-DRB1*08:01L HLA-DRB1*12:01L HLA-DQA1*03:01-B1*03:02L HLA-DQA1*05:05-B1*03:01L
  source 1..10: note = Severe acute respiratory syndrome coronavirus 2
ELVIGAVILR

SEQ ID NO: 15010 - protein, 14 aa, Severe acute respiratory syndrome-related coronavirus
  REGION 1..14: note = Table B: HLA-DRB1*13:02L HLA-DRB1*04:05L HLA-DRB1*11:04L HLA-DRB1*08:01L HLA-DRB1*12:01L
  source 1..14: note = Severe acute respiratory syndrome coronavirus 2
IGAVILRGHLRIAG

SEQ ID NO: 15011 - protein, 13 aa, Severe acute respiratory syndrome-related coronavirus
  REGION 1..13: note = Table B: HLA-DRB1*13:02L HLA-DRB1*04:05L HLA-DRB1*14:01L HLA-DRB1*12:01L HLA-DRB3*01:01L HLA-DRB1*16:01L
  source 1..13: note = Severe acute respiratory syndrome coronavirus 2
VILRGHLRIAGHH

SEQ ID NO: 15012 - protein, 12 aa, Severe acute respiratory syndrome-related coronavirus
  REGION 1..12: note = Table B: HLA-DRB1*13:02L HLA-DQA1*01:02-B1*06:02L HLA-DRB1*01:02L HLA-DRB1*12:01L HLA-DRB3*01:01L HLA-DPA1*01:02-B1*04:01L HLA-DRB1*08:03L HLA-DRB1*15:03L
  source 1..12: note = Severe acute respiratory syndrome coronavirus 2
RGHLRIAGHHLG

SEQ ID NO: 15013 - protein, 12 aa, Severe acute respiratory syndrome-related coronavirus
  REGION 1..12: note = Table B: HLA-DRB1*13:02L HLA-DQA1*01:02-B1*06:02L HLA-DRB1*01:02L HLA-DRB3*01:01L HLA-DRB1*15:03L
  source 1..12: note = Severe acute respiratory syndrome coronavirus 2
GHLRIAGHHLGR

SEQ ID NO: 15014 - protein, 10 aa, Severe acute respiratory syndrome-related coronavirus
  REGION 1..10: note = Table B: HLA-DRB1*13:02L HLA-DRB1*13:03L HLA-DRB1*01:01L HLA-DRB4*03:01NL HLA-DRB1*11:04L HLA-DRB1*08:01L HLA-DRB5*01:01L HLA-DRB1*12:01L HLA-DQA1*03:01-B1*03:02M HLA-DQA1*05:05-B1*03:01L HLA-DRB1*14:17L
  REGION 1..10: note = CONT. FROM ABOVE: HLA-DQA1*02:01-B1*03:03L
  source 1..10: note = Severe acute respiratory syndrome coronavirus 2
SYYKLGASQR

SEQ ID NO: 15015 - protein, 14 aa, Severe acute respiratory syndrome-related coronavirus
  REGION 1..14: note = Table B: HLA-DRB1*13:02L HLA-DRB1*11:01L HLA-DRB3*01:01L HLA-DPA1*02:01-B1*13:01L
  source 1..14: note = Severe acute respiratory syndrome coronavirus 2
VAGDSGFAAYSRYR

SEQ ID NO: 15016 - protein, 12 aa, Severe acute respiratory syndrome-related coronavirus
  REGION 1..12: note = Table B: HLA-DRB1*13:02L HLA-DRB1*13:03L HLA-DRB1*04:02L HLA-DRB1*04:05L HLA-DRB1*01:02L HLA-DRB1*08:04L HLA-DRB1*11:04L HLA-DRB1*08:01L HLA-DRB1*11:01L HLA-DRB1*12:01L HLA-DRB3*01:01L HLA-DRB1*16:01L HLA-DRB1*04:08L HLA-DRB1*15:03L
  source 1..12: note = Severe acute respiratory syndrome coronavirus 2
SGFAAYSRYRIG

SEQ ID NO: 15017 - protein, 14 aa, Severe acute respiratory syndrome-related coronavirus
  REGION 1..14: note = Table B: HLA-DRB1*13:02L HLA-DRB1*04:04L HLA-DRB1*11:04L HLA-DRB1*11:01L HLA-DRB3*01:01L HLA-DPA1*02:01-B1*13:01L HLA-DPA1*03:01-B1*105:01L HLA-DRB1*15:03L
  source 1..14: note = Severe acute respiratory syndrome coronavirus 2
SRYRIGNYKLNTDH

SEQ ID NO: 15018 - protein, 12 aa, Severe acute respiratory syndrome-related coronavirus
  REGION 1..12: note = Table B: HLA-DRB1*13:02L HLA-DRB1*01:02L HLA-DRB1*08:04L HLA-DQA1*01-B1*05L HLA-DQA1*05:01-B1*02:01L HLA-DQA1*03:01-B1*03:02L HLA-DQA1*02:01-B1*03:03L HLA-DRB1*15:03L
  source 1..12: note = Severe acute respiratory syndrome coronavirus 2
YKLNTDHSSSSD

SEQ ID NO: 15019 - protein, 13 aa, Severe acute respiratory syndrome-related coronavirus
  REGION 1..13: note = Table B: HLA-DRB1*13:02L HLA-DQA1*01:02-B1*06:02L HLA-DRB1*01:02L HLA-DPA1*01:03-B1*03:01L HLA-DRB1*04:10L HLA-DRB3*01:01L HLA-DPA1*02:01-B1*13:01L HLA-DPA1*03:01-B1*105:01L HLA-DRB1*04:08L HLA-DRB1*15:03L
  source 1..13: note = Severe acute respiratory syndrome coronavirus 2
LNTDHSSSSDNIA

SEQ ID NO: 15020 - protein, 16 aa, Severe acute respiratory syndrome-related coronavirus
  REGION 1..16: note = Table B: HLA-DRB1*13:02L HLA-DPA1*01:03-B1*104:01L
  source 1..16: note = Severe acute respiratory syndrome coronavirus 2
NTDHSSSSDNIALLVQ

SEQ ID NO: 15021 - protein, 13 aa, Severe acute respiratory syndrome-related coronavirus
  REGION 1..13: note = Table B: HLA-DRB1*13:02L HLA-DRB1*01:03L
  source 1..13: note = Severe acute respiratory syndrome coronavirus 2
EILLIIMRTFKVS

SEQ ID NO: 15022 - protein, 12 aa, Severe acute respiratory syndrome-related coronavirus
  REGION 1..12: note = Table B: HLA-DRB1*13:02L HLA-DRB1*11:03L HLA-DPA1*01:03-B1*04:02L HLA-DRB3*01:01L HLA-DPA1*03:01-B1*105:01L HLA-DPA1*01:03-B1*02:01L HLA-DRB1*08:03L HLA-DRB1*15:03L
  source 1..12: note = Severe acute respiratory syndrome coronavirus 2
IINLIIKNLSKS

SEQ ID NO: 15023 - protein, 12 aa, Severe acute respiratory syndrome-related coronavirus
  REGION 1..12: note = Table B: HLA-DRB1*13:02L HLA-DRB1*01:02L HLA-DPA1*03:01-B1*04:02L HLA-DPA1*01:02-B1*04:01L HLA-DRB1*16:01L
  source 1..12: note = Severe acute respiratory syndrome coronavirus 2
INLIIKNLSKSL

SEQ ID NO: 15024 - protein, 12 aa, Severe acute respiratory syndrome-related coronavirus
  REGION 1..12: note = Table B: HLA-DRB1*13:02L HLA-DRB1*08:04L HLA-DRB1*14:54L
  source 1..12: note = Severe acute respiratory syndrome coronavirus 2
NLIIKNLSKSLT

SEQ ID NO: 15025 - protein, 15 aa, Severe acute respiratory syndrome-related coronavirus
  REGION 1..15: note = Table B: HLA-DRB1*13:02L HLA-DRB1*04:04L HLA-DPA1*01:03-B1*03:01L HLA-DRB1*11:04L HLA-DPA1*02:01-B1*13:01L HLA-DPA1*01:03-B1*02:01L
  source 1..15: note = Severe acute respiratory syndrome coronavirus 2
SKSLTENKYSQLDEE

SEQ ID NO: 15026 - protein, 13 aa, Severe acute respiratory syndrome-related coronavirus
  REGION 1..13: note = Table B: HLA-DRB1*13:02L HLA-DRB1*13:03L HLA-DRB1*01:03L HLA-DRB1*04:02L HLA-DRB1*04:05L HLA-DRB1*01:02L HLA-DRB3*02:01L HLA-DPA1*01:03-B1*03:01L HLA-DPA1*03:01-B1*04:02L HLA-DRB1*14:02L HLA-DPA1*01:03-B1*04:01L
  REGION 1..13: note = CONT. FROM ABOVE: HLA-DPA1*01:03-B1*04:02L HLA-DQA1*05:05-B1*03: 01L HLA-DPA1*01:02-B1*04:01L HLA-DRB1*04:08L
  source 1..13: note = Severe acute respiratory syndrome coronavirus 2
YSQLDEEQPMEID

SEQ ID NO: 15027 - protein, 12 aa, Severe acute respiratory syndrome-related coronavirus
  REGION 1..12: note = Table B: HLA-DRB1*13:02L HLA-DRB1*01:03L HLA-DRB1*04:05L HLA-DRB1*01:02L HLA-DRB4*03:01NL HLA-DRB1*08:04L HLA-DRB1*08:77L HLA-DRB3*02:01L HLA-DPA1*01:03-B1*03:01L HLA-DRB1*14:01L HLA-DRB1*11:03L HLA-DRB1*11:04L HLA-DRB1*14:02L
  REGION 1..12: note = CONT. FROM ABOVE: HLA-DQA1*01:01-B1*05:01L HLA-DQA1*05:05-B1*03: 19L HLA-DRB1*04:10L HLA-DRB1*12:01L HLA-DRB1*12:02L HLA-DRB1*14: 54L HLA-DQA1*05:05-B1*03:01L HLA-DRB1*10:01L HLA-DRB1*04:08L HLA -DRB1*15:03L
  source 1..12: note = Severe acute respiratory syndrome coronavirus 2
SGTYEGNSPFHP

SEQ ID NO: 15028 - protein, 12 aa, Severe acute respiratory syndrome-related coronavirus
  REGION 1..12: note = Table B: HLA-DRB1*13:02L HLA-DRB1*01:03L HLA-DRB1*04:05L HLA-DQA1*01:02-B1*06:02L HLA-DRB1*01:02L HLA-DRB4*03:01NL HLA-DRB1*08:04L HLA-DPA1*01:03-B1*03:01L HLA-DPA1*03:01-B1*04:02L HLA-DRB1*14:01L HLA-DRB1*14:02L
  REGION 1..12: note = CONT. FROM ABOVE: HLA-DRB1*12:01L HLA-DRB1*12:02L HLA-DPA1*03:01 -B1*105:01L HLA-DRB1*14:54L HLA-DQA1*05:05-B1*03:01L HLA-DQA1*01 :03-B1*06:01L HLA-DRB1*04:08L HLA-DRB1*15:03L
  source 1..12: note = Severe acute respiratory syndrome coronavirus 2
GTYEGNSPFHPL

SEQ ID NO: 15029 - protein, 16 aa, Severe acute respiratory syndrome-related coronavirus
  REGION 1..16: note = Table B: HLA-DRB1*13:02L HLA-DRB1*14:02L
  source 1..16: note = Severe acute respiratory syndrome coronavirus 2
HPLADNKFALTCFSTQ

SEQ ID NO: 15030 - protein, 10 aa, Severe acute respiratory syndrome-related coronavirus
  REGION 1..10: note = Table B: HLA-DRB1*13:02L HLA-DRB1*12:01L HLA-DQA1*03:01-B1*03:02L
  source 1..10: note = Severe acute respiratory syndrome coronavirus 2
RSVSPKLFIR

SEQ ID NO: 15031 - protein, 14 aa, Severe acute respiratory syndrome-related coronavirus
  REGION 1..14: note = Table B: HLA-DRB1*13:02L HLA-DRB1*14:01L HLA-DPA1*03:01-B1*105:01L
  source 1..14: note = Severe acute respiratory syndrome coronavirus 2
IVFITLCFTLKRKT

SEQ ID NO: 15032 - protein, 14 aa, Severe acute respiratory syndrome-related coronavirus
  REGION 1..14: note = Table B: HLA-DRB1*13:02L HLA-DRB1*01:03L HLA-DRB1*04:02L HLA-DRB1*04:05L HLA-DRB1*01:02L HLA-DRB1*08:04L HLA-DRB1*14:01M HLA-DRB1*11:03L HLA-DRB1*11:04L HLA-DRB1*08:01L HLA-DRB1*11:01L HLA-DRB1*12:01L HLA-DRB3*01:01L HLA-DPA1*02:01-B1*13:01L
  REGION 1..14: note = CONT. FROM ABOVE: HLA-DPA1*01:02-B1*04:01L HLA-DRB1*04:08L HLA-D RB1*15:03L
  source 1..14: note = Severe acute respiratory syndrome coronavirus 2
DPCPIHFYSKWYIR

SEQ ID NO: 15033 - protein, 14 aa, Severe acute respiratory syndrome-related coronavirus
  REGION 1..14: note = Table B: HLA-DRB1*13:02L HLA-DQA1*01:02-B1*06:02L HLA-DRB1*01:01L HLA-DRB1*14:01L HLA-DRB1*11:04L HLA-DRB1*11:01L HLA-DRB3*01:01L HLA-DRB1*07:01L HLA-DQA1*02:01-B1*03:03L
  source 1..14: note = Severe acute respiratory syndrome coronavirus 2
SKWYIRVGARKSAP

SEQ ID NO: 15034 - protein, 15 aa, Severe acute respiratory syndrome-related coronavirus
  REGION 1..15: note = Table B: HLA-DRB1*13:02L HLA-DRB1*04:05L HLA-DRB1*01:02L
  source 1..15: note = Severe acute respiratory syndrome coronavirus 2
VGARKSAPLIELCVD

SEQ ID NO: 15035 - protein, 15 aa, Severe acute respiratory syndrome-related coronavirus
  REGION 1..15: note = Table B: HLA-DRB1*13:02L HLA-DRB1*04:05L HLA-DRB1*01:02L HLA-DRB1*12:01L
  source 1..15: note = Severe acute respiratory syndrome coronavirus 2
GARKSAPLIELCVDE

SEQ ID NO: 15036 - protein, 14 aa, Severe acute respiratory syndrome-related coronavirus
  REGION 1..14: note = Table B: HLA-DRB1*13:02L HLA-DRB1*01:02L HLA-DPA1*01:03-B1*03:01L
  source 1..14: note = Severe acute respiratory syndrome coronavirus 2
AGSKSPIQYIDIGN

SEQ ID NO: 15037 - protein, 12 aa, Severe acute respiratory syndrome-related coronavirus
  REGION 1..12: note = Table B: HLA-DRB1*13:02L HLA-DRB1*04:02L HLA-DRB1*04:05L HLA-DRB1*01:02L HLA-DRB3*02:01L HLA-DRB1*14:54L HLA-DRB1*14:17L HLA-DRB1*04:08L
  source 1..12: note = Severe acute respiratory syndrome coronavirus 2
KSPIQYIDIGNY

SEQ ID NO: 15038 - protein, 12 aa, Severe acute respiratory syndrome-related coronavirus
  REGION 1..12: note = Table B: HLA-DRB1*13:02L HLA-DRB1*04:02L HLA-DRB1*04:04L HLA-DRB1*04:05L HLA-DRB1*01:02L HLA-DRB1*08:04L HLA-DRB3*02:01L HLA-DRB1*11:03L HLA-DRB1*11:04L HLA-DQA1*01:01-B1*05:01L HLA-DRB1*08:01L HLA-DRB5*01:01L HLA-DRB1*04:10L HLA-DRB1*09:01L
  REGION 1..12: note = CONT. FROM ABOVE: HLA-DRB1*12:02L HLA-DRB3*01:01L HLA-DRB1*14:54 L HLA-DRB1*14:17L HLA-DRB1*07:01L HLA-DRB1*04:08L HLA-DRB1*08:03 L
  source 1..12: note = Severe acute respiratory syndrome coronavirus 2
SPIQYIDIGNYT

SEQ ID NO: 15039 - protein, 13 aa, Severe acute respiratory syndrome-related coronavirus
  REGION 1..13: note = Table B: HLA-DRB1*13:02L HLA-DRB1*13:03L HLA-DRB1*01:03L HLA-DRB1*04:05L HLA-DRB1*01:02L HLA-DRB1*08:04L HLA-DRB3*02:01L HLA-DPA1*01:03-B1*03:01L HLA-DPA1*03:01-B1*04:02L HLA-DRB1*14:02L HLA-DRB1*08:01L HLA-DQA1*01-B1*05L
  REGION 1..13: note = CONT. FROM ABOVE: HLA-DQA1*05:05-B1*03:19L HLA-DQA1*05:01-B1*02: 01L HLA-DRB1*12:01L HLA-DRB3*01:01L HLA-DPA1*02:01-B1*13:01L HLA -DPA1*03:01-B1*105:01L HLA-DRB1*14:54L HLA-DQA1*05:05-B1*03:01L HLA-DPA1*01:02-B1*04:01L HLA-DRB1*04:08L
  source 1..13: note = Severe acute respiratory syndrome coronavirus 2
LPFTINCQEPKLG

SEQ ID NO: 15040 - protein, 12 aa, Severe acute respiratory syndrome-related coronavirus
  REGION 1..12: note = Table B: HLA-DRB1*13:02L HLA-DRB1*01:03L HLA-DRB1*04:02L HLA-DRB1*04:04L HLA-DRB1*04:05L HLA-DRB1*08:04L HLA-DRB3*02:01L HLA-DPA1*01:03-B1*03:01L HLA-DRB1*14:01L HLA-DRB1*14:02L HLA-DRB1*08:01L HLA-DPA1*01:03-B1*04:01L HLA-DRB1*12:01L
  REGION 1..12: note = CONT. FROM ABOVE: HLA-DRB3*01:01L HLA-DQA1*05:05-B1*03:01L HLA-D RB1*14:17L HLA-DRB1*04:08L HLA-DRB1*15:01L
  source 1..12: note = Severe acute respiratory syndrome coronavirus 2
FLEYHDVRVVLD

SEQ ID NO: 15041 - protein, 14 aa, Severe acute respiratory syndrome-related coronavirus
  REGION 1..14: note = Table B: HLA-DRB1*13:02L HLA-DRB1*13:03L HLA-DRB1*01:03L HLA-DRB1*04:05L HLA-DRB1*01:02L HLA-DRB4*03:01NL HLA-DRB1*08:04L HLA-DPA1*01:03-B1*03:01L HLA-DQA1*01:01-B1*05:01L HLA-DRB1*08:01L HLA-DRB1*11:01L HLA-DRB1*04:10L
  REGION 1..14: note = CONT. FROM ABOVE: HLA-DPA1*01:03-B1*04:02L HLA-DRB1*12:01L HLA-D PA1*02:01-B1*13:01L HLA-DPA1*03:01-B1*105:01L HLA-DPA1*01:03-B1* 104:01L HLA-DRB1*14:17L HLA-DRB1*16:01L HLA-DRB1*04:08L HLA-DRB1 *15:03L
  source 1..14: note = Severe acute respiratory syndrome coronavirus 2
APRITFGGPSDSTG

SEQ ID NO: 15042 - protein, 11 aa, Severe acute respiratory syndrome-related coronavirus
  REGION 1..11: note = Table B: HLA-DRB1*13:02L HLA-DRB4*03:01NL HLA-DRB5*01:01L HLA-DRB1*14:17L HLA-DQA1*01:03-B1*06:01L HLA-DQA1*02:01-B1*03:03L
  source 1..11: note = Severe acute respiratory syndrome coronavirus 2
DSTGSNQNGER

SEQ ID NO: 15043 - protein, 16 aa, Severe acute respiratory syndrome-related coronavirus
  REGION 1..16: note = Table B: HLA-DRB1*13:02L HLA-DRB3*02:01L HLA-DPA1*02:01-B1*13:01L HLA-DRB1*07:01L HLA-DRB1*04:08L
  source 1..16: note = Severe acute respiratory syndrome coronavirus 2
GKEDLKFPRGQGVPIN

SEQ ID NO: 15044 - protein, 12 aa, Severe acute respiratory syndrome-related coronavirus
  REGION 1..12: note = Table B: HLA-DRB1*13:02L HLA-DRB1*04:05L HLA-DRB1*01:02L HLA-DRB1*14:01L HLA-DRB1*11:04L HLA-DRB1*08:01L HLA-DRB1*11:01L HLA-DRB1*12:01L HLA-DRB3*01:01L HLA-DRB1*16:01L HLA-DRB1*04:08L HLA-DRB1*15:03L
  source 1..12: note = Severe acute respiratory syndrome coronavirus 2
DQIGYYRRATRR

SEQ ID NO: 15045 - protein, 16 aa, Severe acute respiratory syndrome-related coronavirus
  REGION 1..16: note = Table B: HLA-DRB1*13:02L HLA-DQA1*01:02-B1*06:02L HLA-DRB1*03:01L HLA-DRB1*11:03L
  source 1..16: note = Severe acute respiratory syndrome coronavirus 2
IGYYRRATRRIRGGDG

SEQ ID NO: 15046 - protein, 14 aa, Severe acute respiratory syndrome-related coronavirus
  REGION 1..14: note = Table B: HLA-DRB1*13:02L HLA-DRB1*13:03L HLA-DRB1*04:05L HLA-DRB4*03:01NL HLA-DRB1*08:04L HLA-DPA1*01:03-B1*03:01L HLA-DRB1*11:04L HLA-DRB1*14:02L HLA-DQA1*01-B1*05L HLA-DQA1*05:05-B1*03:116L HLA-DRB1*04:10L HLA-DRB3*01:01L
  REGION 1..14: note = CONT. FROM ABOVE: HLA-DPA1*02:01-B1*13:01L HLA-DPA1*01:03-B1*104 :01L HLA-DRB1*14:17L HLA-DRB1*16:01L HLA-DRB1*08:03L HLA-DRB1*15 :03L
  source 1..14: note = Severe acute respiratory syndrome coronavirus 2
GPEAGLPYGANKDG

SEQ ID NO: 15047 - protein, 16 aa, Severe acute respiratory syndrome-related coronavirus
  REGION 1..16: note = Table B: HLA-DRB1*13:02L HLA-DRB1*04:04L HLA-DPA1*01:03-B1*03:01L HLA-DRB1*14:01L HLA-DRB1*11:01L HLA-DQA1*05:05-B1*03:19L HLA-DRB3*01:01L HLA-DPA1*03:01-B1*105:01L HLA-DPA1*01:03-B1*104:01L
  REGION 1..16: note = CONT. FROM ABOVE: HLA-DRB1*07:01L HLA-DRB1*15:03L
  source 1..16: note = Severe acute respiratory syndrome coronavirus 2
TPKDHIGTRNPANNAA

SEQ ID NO: 15048 - protein, 13 aa, Severe acute respiratory syndrome-related coronavirus
  REGION 1..13: note = Table B: HLA-DRB1*13:02L HLA-DRB3*02:01L HLA-DPA1*01:03-B1*03:01L HLA-DPA1*03:01-B1*04:02L HLA-DRB1*11:03L HLA-DRB1*12:02L HLA-DRB1*10:01L
  source 1..13: note = Severe acute respiratory syndrome coronavirus 2
NAAIVLQLPQGTT

SEQ ID NO: 15049 - protein, 13 aa, Severe acute respiratory syndrome-related coronavirus
  REGION 1..13: note = Table B: HLA-DRB1*13:02L HLA-DRB1*01:03L HLA-DRB1*04:05L HLA-DQA1*01:02-B1*06:02L HLA-DPA1*01:03-B1*03:01L HLA-DRB1*14:01L HLA-DQA1*05:05-B1*03:19L HLA-DRB1*04:10L HLA-DPA1*03:01-B1*105:01L HLA-DRB1*14:54L
  REGION 1..13: note = CONT. FROM ABOVE: HLA-DQA1*01:03-B1*06:01L HLA-DRB1*04:08L
  source 1..13: note = Severe acute respiratory syndrome coronavirus 2
IVLQLPQGTTLPK

SEQ ID NO: 15050 - protein, 11 aa, Severe acute respiratory syndrome-related coronavirus
  REGION 1..11: note = Table B: HLA-DRB1*13:02L HLA-DRB1*13:03L HLA-DRB1*01:03L HLA-DRB4*03:01NL HLA-DRB1*08:01L HLA-DRB1*12:01L HLA-DQA1*05:05-B1*03:01L
  source 1..11: note = Severe acute respiratory syndrome coronavirus 2
GSRGGSQASSR

SEQ ID NO: 15051 - protein, 11 aa, Severe acute respiratory syndrome-related coronavirus
  REGION 1..11: note = Table B: HLA-DRB1*13:02L HLA-DRB4*03:01NL HLA-DRB1*08:01L HLA-DRB1*12:01L HLA-DQA1*05:05-B1*03:01L HLA-DRB1*14:17L
  source 1..11: note = Severe acute respiratory syndrome coronavirus 2
SSRNSTPGSSR

SEQ ID NO: 15052 - protein, 14 aa, Severe acute respiratory syndrome-related coronavirus
  REGION 1..14: note = Table B: HLA-DRB1*13:02L HLA-DQA1*01:02-B1*06:02L HLA-DRB1*01:02L HLA-DPA1*01:03-B1*03:01L HLA-DRB1*14:01L HLA-DQA1*01-B1*05L HLA-DRB1*12:01L HLA-DPA1*02:01-B1*13:01L HLA-DQA1*01:03-B1*06:01L
  source 1..14: note = Severe acute respiratory syndrome coronavirus 2
SPARMAGNGGDAAL

SEQ ID NO: 15053 - protein, 14 aa, Severe acute respiratory syndrome-related coronavirus
  REGION 1..14: note = Table B: HLA-DRB1*13:02L HLA-DRB1*04:05L HLA-DQA1*05:05-B1*03:19L HLA-DPA1*01:03-B1*104:01L
  source 1..14: note = Severe acute respiratory syndrome coronavirus 2
GDAALALLLLDRLN

SEQ ID NO: 15054 - protein, 12 aa, Severe acute respiratory syndrome-related coronavirus
  REGION 1..12: note = Table B: HLA-DRB1*13:02L HLA-DRB1*01:03L HLA-DRB1*01:02L HLA-DRB1*11:04L HLA-DRB1*11:01L HLA-DRB1*04:08L
  source 1..12: note = Severe acute respiratory syndrome coronavirus 2
LALLLLDRLNQL

SEQ ID NO: 15055 - protein, 12 aa, Severe acute respiratory syndrome-related coronavirus
  REGION 1..12: note = Table B: HLA-DRB1*13:02L HLA-DRB1*01:02L HLA-DRB1*11:02L HLA-DRB1*11:03L HLA-DRB1*11:04L HLA-DRB1*11:01L HLA-DRB3*01:01L HLA-DRB1*14:54L HLA-DPA1*01:03-B1*02:01L HLA-DRB1*08:02L
  source 1..12: note = Severe acute respiratory syndrome coronavirus 2
ALLLLDRLNQLE

SEQ ID NO: 15056 - protein, 13 aa, Severe acute respiratory syndrome-related coronavirus
  REGION 1..13: note = Table B: HLA-DRB1*13:02L HLA-DRB1*04:05L HLA-DRB3*01:01L HLA-DPA1*01:03-B1*02:01L
  source 1..13: note = Severe acute respiratory syndrome coronavirus 2
LLLLDRLNQLESK

SEQ ID NO: 15057 - protein, 10 aa, Severe acute respiratory syndrome-related coronavirus
  REGION 1..10: note = Table B: HLA-DRB1*13:02L HLA-DRB1*13:03L HLA-DRB1*01:03L HLA-DRB1*04:02L HLA-DRB1*01:01L HLA-DRB4*03:01NL HLA-DRB1*11:04L HLA-DRB1*08:01L HLA-DRB5*01:01L HLA-DRB1*12:01L HLA-DQA1*03:01-B1*03:02M HLA-DQA1*05:05-B1*03:01L
  REGION 1..10: note = CONT. FROM ABOVE: HLA-DRB1*14:17L HLA-DRB1*16:01L HLA-DQA1*02:01 -B1*03:03L
  source 1..10: note = Severe acute respiratory syndrome coronavirus 2
QQQGQTVTKK

SEQ ID NO: 15058 - protein, 10 aa, Severe acute respiratory syndrome-related coronavirus
  REGION 1..10: note = Table B: HLA-DRB1*13:02L HLA-DRB1*13:03L HLA-DRB1*01:03L HLA-DRB1*04:02L HLA-DRB1*01:01L HLA-DRB4*03:01NL HLA-DRB1*14:01L HLA-DRB1*11:04L HLA-DRB1*08:01L HLA-DRB5*01:01L HLA-DRB1*12:01L HLA-DRB1*12:02L HLA-DQA1*03:01-B1*03:02M
  REGION 1..10: note = CONT. FROM ABOVE: HLA-DQA1*05:05-B1*03:01L HLA-DRB1*14:17L HLA-D RB1*16:01L HLA-DQA1*01:03-B1*06:01L HLA-DQA1*02:01-B1*03:03L
  source 1..10: note = Severe acute respiratory syndrome coronavirus 2
SAAEASKKPR

SEQ ID NO: 15059 - protein, 10 aa, Severe acute respiratory syndrome-related coronavirus
  REGION 1..10: note = Table B: HLA-DRB1*13:02L HLA-DRB1*13:03L HLA-DRB1*11:04L HLA-DRB1*08:01L HLA-DRB1*12:01L HLA-DQA1*03:01-B1*03:02L
  source 1..10: note = Severe acute respiratory syndrome coronavirus 2
EASKKPRQKR

SEQ ID NO: 15060 - protein, 13 aa, Severe acute respiratory syndrome-related coronavirus
  REGION 1..13: note = Table B: HLA-DRB1*13:02L HLA-DRB1*04:04L HLA-DRB1*07:01L
  source 1..13: note = Severe acute respiratory syndrome coronavirus 2
QKRTATKAYNVTQ

SEQ ID NO: 15061 - protein, 13 aa, Severe acute respiratory syndrome-related coronavirus
  REGION 1..13: note = Table B: HLA-DRB1*13:02L HLA-DRB1*04:04L HLA-DRB1*04:05L HLA-DRB1*01:02L HLA-DPA1*01:03-B1*03:01L HLA-DPA1*03:01-B1*04:02L HLA-DRB1*14:01L HLA-DQA1*01:01-B1*05:01L HLA-DRB1*08:01L HLA-DRB1*04:10L
  REGION 1..13: note = CONT. FROM ABOVE: HLA-DRB1*12:02L HLA-DPA1*02:01-B1*13:01L HLA-D PA1*03:01-B1*105:01L HLA-DRB1*14:54L HLA-DPA1*01:03-B1*104:01L H LA-DRB1*04:08L HLA-DRB1*15:03L
  source 1..13: note = Severe acute respiratory syndrome coronavirus 2
TATKAYNVTQAFG

SEQ ID NO: 15062 - protein, 10 aa, Severe acute respiratory syndrome-related coronavirus
  REGION 1..10: note = Table B: HLA-DRB1*13:02L HLA-DRB1*13:03L HLA-DRB4*03:01NL HLA-DRB1*08:01L HLA-DRB1*12:01L HLA-DQA1*03:01-B1*03:02L HLA-DQA1*05:05-B1*03:01L
  source 1..10: note = Severe acute respiratory syndrome coronavirus 2
AYNVTQAFGR

SEQ ID NO: 15063 - protein, 14 aa, Severe acute respiratory syndrome-related coronavirus
  REGION 1..14: note = Table B: HLA-DRB1*13:02L HLA-DRB1*04:05L HLA-DRB1*01:02L HLA-DPA1*01:03-B1*03:01L HLA-DRB1*12:01L HLA-DPA1*02:01-B1*13:01L HLA-DQA1*03:01-B1*03:02L HLA-DPA1*01:03-B1*104:01L HLA-DRB1*07:01L
  REGION 1..14: note = CONT. FROM ABOVE: HLA-DQA1*02:01-B1*03:03L
  source 1..14: note = Severe acute respiratory syndrome coronavirus 2
FGRRGPEQTQGNFG

SEQ ID NO: 15064 - protein, 16 aa, Severe acute respiratory syndrome-related coronavirus
  REGION 1..16: note = Table B: HLA-DRB1*13:02L HLA-DRB1*13:03L HLA-DRB1*04:04L HLA-DRB1*08:04L HLA-DRB3*02:01L HLA-DRB1*14:01L HLA-DRB1*14:02L HLA-DRB1*08:01L HLA-DPA1*01:03-B1*04:01L HLA-DRB3*01:01L HLA-DPA1*01:03-B1*104:01L HLA-DRB1*07:01L HLA-DRB1*08:03L
  source 1..16: note = Severe acute respiratory syndrome coronavirus 2
GPEQTQGNFGDQELIR

SEQ ID NO: 15065 - protein, 14 aa, Severe acute respiratory syndrome-related coronavirus
  REGION 1..14: note = Table B: HLA-DRB1*13:02L HLA-DRB1*08:04L HLA-DPA1*01:03-B1*03:01L HLA-DPA1*03:01-B1*04:02L HLA-DRB1*14:01L HLA-DRB1*14:02L HLA-DRB1*08:01L HLA-DRB1*04:10L HLA-DPA1*01:03-B1*04:02L HLA-DRB3*01:01L
  REGION 1..14: note = CONT. FROM ABOVE: HLA-DQA1*05:05-B1*03:01L
  source 1..14: note = Severe acute respiratory syndrome coronavirus 2
TQGNFGDQELIRQG

SEQ ID NO: 15066 - protein, 13 aa, Severe acute respiratory syndrome-related coronavirus
  REGION 1..13: note = Table B: HLA-DRB1*13:02L HLA-DRB1*04:04L HLA-DRB1*14:01L HLA-DPA1*02:01-B1*13:01L HLA-DRB1*15:03L
  source 1..13: note = Severe acute respiratory syndrome coronavirus 2
LIRQGTDYKHWPQ

SEQ ID NO: 15067 - protein, 15 aa, Severe acute respiratory syndrome-related coronavirus
  REGION 1..15: note = Table B: HLA-DRB1*13:02L HLA-DRB1*04:04L HLA-DRB1*11:04L HLA-DRB1*14:02L HLA-DPA1*01:03-B1*04:02L
  source 1..15: note = Severe acute respiratory syndrome coronavirus 2
GTDYKHWPQIAQFAP

SEQ ID NO: 15068 - protein, 14 aa, Severe acute respiratory syndrome-related coronavirus
  REGION 1..14: note = Table B: HLA-DRB1*13:02L HLA-DRB1*04:02L HLA-DRB1*04:05L HLA-DRB1*01:02L HLA-DRB1*08:04L HLA-DPA1*01:03-B1*03:01L HLA-DPA1*03:01-B1*04:02L HLA-DQA1*01-B1*05L HLA-DPA1*01:03-B1*04:01L HLA-DPA1*01:03-B1*04:02L
  REGION 1..14: note = CONT. FROM ABOVE: HLA-DPA1*02:01-B1*13:01L HLA-DPA1*01:03-B1*104 :01L HLA-DRB1*04:08L HLA-DRB1*15:03L
  source 1..14: note = Severe acute respiratory syndrome coronavirus 2
APSASAFFGMSRIG

SEQ ID NO: 15069 - protein, 13 aa, Severe acute respiratory syndrome-related coronavirus
  REGION 1..13: note = Table B: HLA-DRB1*13:02L HLA-DRB1*01:03L HLA-DRB1*04:02L HLA-DRB1*04:05L HLA-DRB1*01:02L HLA-DRB1*11:03L HLA-DRB1*14:02L HLA-DQA1*05:05-B1*03:116L HLA-DPA1*02:01-B1*13:01L HLA-DRB1*08:02L
  source 1..13: note = Severe acute respiratory syndrome coronavirus 2
ASAFFGMSRIGME

SEQ ID NO: 15070 - protein, 14 aa, Severe acute respiratory syndrome-related coronavirus
  REGION 1..14: note = Table B: HLA-DRB1*13:02L HLA-DRB1*13:03L HLA-DRB1*01:03L HLA-DRB1*04:05L HLA-DRB4*03:01NL HLA-DPA1*01:03-B1*03:01L HLA-DQA1*01:01-B1*05:01L HLA-DRB1*08:01L HLA-DQA1*05:05-B1*03:19L HLA-DQA1*05:01-B1*02:01L
  REGION 1..14: note = CONT. FROM ABOVE: HLA-DRB1*04:10L HLA-DPA1*01:03-B1*04:02L HLA-D RB1*12:01L HLA-DPA1*02:01-B1*13:01L HLA-DPA1*03:01-B1*105:01L HL A-DPA1*01:03-B1*104:01L HLA-DQA1*05:05-B1*03:01L HLA-DPA1*01:02- B1*04:01L HLA-DRB1*04:08L HLA-DRB1*15:03L
  source 1..14: note = Severe acute respiratory syndrome coronavirus 2
TPSGTWLTYTGAIK

SEQ ID NO: 15071 - protein, 12 aa, Severe acute respiratory syndrome-related coronavirus
  REGION 1..12: note = Table B: HLA-DRB1*13:02L HLA-DRB1*13:03L HLA-DRB1*01:03L HLA-DRB1*04:05L HLA-DRB4*03:01NL HLA-DPA1*01:03-B1*03:01L HLA-DRB1*11:03L HLA-DQA1*05:01-B1*02:01L HLA-DPA1*01:03-B1*04:01L HLA-DRB1*09:01L HLA-DRB1*12:02L
  REGION 1..12: note = CONT. FROM ABOVE: HLA-DPA1*02:01-B1*13:01L HLA-DPA1*03:01-B1*105 :01L HLA-DQA1*05:05-B1*03:01L HLA-DRB1*04:08L
  source 1..12: note = Severe acute respiratory syndrome coronavirus 2
GTWLTYTGAIKL

SEQ ID NO: 15072 - protein, 16 aa, Severe acute respiratory syndrome-related coronavirus
  REGION 1..16: note = Table B: HLA-DRB1*13:02L
  source 1..16: note = Severe acute respiratory syndrome coronavirus 2
DDKDPNFKDQVILLNK

SEQ ID NO: 15073 - protein, 12 aa, Severe acute respiratory syndrome-related coronavirus
  REGION 1..12: note = Table B: HLA-DRB1*13:02L HLA-DRB1*11:01L HLA-DPA1*02:01-B1*13:01L
  source 1..12: note = Severe acute respiratory syndrome coronavirus 2
KDQVILLNKHID

SEQ ID NO: 15074 - protein, 12 aa, Severe acute respiratory syndrome-related coronavirus
  REGION 1..12: note = Table B: HLA-DRB1*13:02L HLA-DRB1*01:02L HLA-DRB1*11:03L HLA-DRB1*11:01L HLA-DRB3*01:01L
  source 1..12: note = Severe acute respiratory syndrome coronavirus 2
VILLNKHIDAYK

SEQ ID NO: 15075 - protein, 15 aa, Severe acute respiratory syndrome-related coronavirus
  REGION 1..15: note = Table B: HLA-DRB1*13:02L HLA-DPA1*03:01-B1*04:02L HLA-DPA1*02:01-B1*13:01L
  source 1..15: note = Severe acute respiratory syndrome coronavirus 2
NKHIDAYKTFPPTEP

SEQ ID NO: 15076 - protein, 14 aa, Severe acute respiratory syndrome-related coronavirus
  REGION 1..14: note = Table B: HLA-DRB1*13:02L HLA-DRB1*01:03L HLA-DRB1*04:04L HLA-DRB1*08:77L HLA-DRB3*02:01L HLA-DPA1*01:03-B1*03:01L HLA-DPA1*03:01-B1*04:02L HLA-DRB1*14:01L HLA-DRB1*11:03L HLA-DQA1*01:01-B1*05:01L HLA-DRB1*09:01L HLA-DRB1*12:02L
  REGION 1..14: note = CONT. FROM ABOVE: HLA-DPA1*02:01-B1*13:01L HLA-DRB1*07:01L HLA-D RB1*10:01L HLA-DRB1*04:08L HLA-DRB1*08:03L
  source 1..14: note = Severe acute respiratory syndrome coronavirus 2
QQTVTLLPAADLDD

SEQ ID NO: 15077 - protein, 15 aa, Severe acute respiratory syndrome-related coronavirus
  REGION 1..15: note = Table B: HLA-DRB1*13:02L
  source 1..15: note = Severe acute respiratory syndrome coronavirus 2
VTLLPAADLDDFSKQ

SEQ ID NO: 15078 - protein, 16 aa, Severe acute respiratory syndrome-related coronavirus
  REGION 1..16: note = Table B: HLA-DRB1*13:02L
  source 1..16: note = Severe acute respiratory syndrome coronavirus 2
DDFSKQLQQSMSSADS

SEQ ID NO: 15079 - protein, 12 aa, Severe acute respiratory syndrome-related coronavirus
  REGION 1..12: note = Table B: HLA-DRB1*13:02L HLA-DRB1*04:04L HLA-DRB1*08:04L HLA-DRB3*02:01L HLA-DPA1*03:01-B1*04:02L HLA-DRB1*14:01L HLA-DRB1*11:04L HLA-DRB1*09:01L HLA-DPA1*01:03-B1*04:02L HLA-DRB1*12:02L HLA-DPA1*01:03-B1*104:01L HLA-DRB1*07:01L
  REGION 1..12: note = CONT. FROM ABOVE: HLA-DRB1*10:01L HLA-DRB1*08:03L
  source 1..12: note = Severe acute respiratory syndrome coronavirus 2
SRNYIAQVDVVN

SEQ ID NO: 15080 - protein, 11 aa, Severe acute respiratory syndrome-related coronavirus
  REGION 1..11: note = Table B: HLA-DRB1*13:03L HLA-DRB1*08:01L
  source 1..11: note = Severe acute respiratory syndrome coronavirus 2
QPYVFIKRSDA

SEQ ID NO: 15081 - protein, 10 aa, Severe acute respiratory syndrome-related coronavirus
  REGION 1..10: note = Table B: HLA-DRB1*13:03L HLA-DRB1*08:01L
  source 1..10: note = Severe acute respiratory syndrome coronavirus 2
YVFIKRSDAR

SEQ ID NO: 15082 - protein, 10 aa, Severe acute respiratory syndrome-related coronavirus
  REGION 1..10: note = Table B: HLA-DRB1*13:03L HLA-DRB1*01:03L HLA-DQA1*01:02-B1*06:02L HLA-DRB1*14:02L HLA-DQA1*05:05-B1*03:19L HLA-DQA1*05:01-B1*02:01L HLA-DPA1*03:01-B1*105:01L HLA-DQA1*02:01-B1*03:03L
  source 1..10: note = Severe acute respiratory syndrome coronavirus 2
PHVGEIPVAY

SEQ ID NO: 15083 - protein, 10 aa, Severe acute respiratory syndrome-related coronavirus
  REGION 1..10: note = Table B: HLA-DRB1*13:03L HLA-DRB1*01:03L HLA-DQA1*01:02-B1*06:02L HLA-DRB1*03:01L HLA-DRB1*14:02L HLA-DRB1*11:01L HLA-DQA1*05:05-B1*03:19L HLA-DQA1*05:01-B1*02:01L HLA-DPA1*01:03-B1*04:02L
  REGION 1..10: note = CONT. FROM ABOVE: HLA-DRB1*08:02L HLA-DQA1*02:01-B1*03:03L
  source 1..10: note = Severe acute respiratory syndrome coronavirus 2
GNKGAGGHSY

SEQ ID NO: 15084 - protein, 14 aa, Severe acute respiratory syndrome-related coronavirus
  REGION 1..14: note = Table B: HLA-DRB1*13:03L HLA-DRB1*04:02L HLA-DRB1*04:10L
  source 1..14: note = Severe acute respiratory syndrome coronavirus 2
GDELGTDPYEDFQE

SEQ ID NO: 15085 - protein, 13 aa, Severe acute respiratory syndrome-related coronavirus
  REGION 1..13: note = Table B: HLA-DRB1*13:03L HLA-DRB1*01:03L HLA-DRB1*04:04L HLA-DRB1*14:01L HLA-DRB1*08:01L HLA-DPA1*02:01-B1*13:01L HLA-DPA1*03:01-B1*105:01L HLA-DRB1*15:01L
  source 1..13: note = Severe acute respiratory syndrome coronavirus 2
EHEIAWYTERSEK

SEQ ID NO: 15086 - protein, 11 aa, Severe acute respiratory syndrome-related coronavirus
  REGION 1..11: note = Table B: HLA-DRB1*13:03L HLA-DRB1*01:03L HLA-DRB1*04:05L HLA-DRB1*01:02L HLA-DRB4*03:01NL HLA-DRB1*04:10L HLA-DRB1*12:01L HLA-DRB1*14:54L HLA-DPA1*01:02-B1*04:01L HLA-DRB1*16:01L HLA-DRB1*04:08L HLA-DQA1*02:01-B1*03:03L HLA-DRB1*15:03L
  source 1..11: note = Severe acute respiratory syndrome coronavirus 2
IAWYTERSEKS

SEQ ID NO: 15087 - protein, 10 aa, Severe acute respiratory syndrome-related coronavirus
  REGION 1..10: note = Table B: HLA-DRB1*13:03L HLA-DRB1*08:01L HLA-DQA1*03:01-B1*03:02L HLA-DQA1*02:01-B1*03:03L
  source 1..10: note = Severe acute respiratory syndrome coronavirus 2
TPFEIKLAKK

SEQ ID NO: 15088 - protein, 16 aa, Severe acute respiratory syndrome-related coronavirus
  REGION 1..16: note = Table B: HLA-DRB1*13:03L HLA-DRB1*08:01L HLA-DRB3*01:01L HLA-DQA1*01:03-B1*06:01L
  source 1..16: note = Severe acute respiratory syndrome coronavirus 2
IKLAKKFDTFNGECPN

SEQ ID NO: 15089 - protein, 10 aa, Severe acute respiratory syndrome-related coronavirus
  REGION 1..10: note = Table B: HLA-DRB1*13:03L HLA-DRB1*01:03L HLA-DQA1*01:02-B1*06:02L HLA-DPA1*01:03-B1*03:01L HLA-DQA1*05:05-B1*03:19L HLA-DQA1*05:01-B1*02:01L HLA-DPA1*03:01-B1*105:01L HLA-DQA1*02:01-B1*03:03L
  source 1..10: note = Severe acute respiratory syndrome coronavirus 2
VGPEHSLAEY

SEQ ID NO: 15090 - protein, 13 aa, Severe acute respiratory syndrome-related coronavirus
  REGION 1..13: note = Table B: HLA-DRB1*13:03L HLA-DRB1*01:03L HLA-DQA1*01:02-B1*06:02L HLA-DRB3*01:01L HLA-DRB1*16:01L HLA-DRB1*04:08L
  source 1..13: note = Severe acute respiratory syndrome coronavirus 2
ESGLKTILRKGGR

SEQ ID NO: 15091 - protein, 14 aa, Severe acute respiratory syndrome-related coronavirus
  REGION 1..14: note = Table B: HLA-DRB1*13:03L HLA-DRB1*03:01L HLA-DQA1*01:01-B1*05:01L HLA-DRB1*11:01L HLA-DRB3*01:01L HLA-DRB1*07:01L
  source 1..14: note = Severe acute respiratory syndrome coronavirus 2
QKEKVNINIVGDFK

SEQ ID NO: 15092 - protein, 12 aa, Severe acute respiratory syndrome-related coronavirus
  REGION 1..12: note = Table B: HLA-DRB1*13:03L HLA-DRB1*04:02L HLA-DRB1*08:04L HLA-DPA1*03:01-B1*04:02L HLA-DRB1*14:01L HLA-DRB1*08:01L HLA-DPA1*01:02-B1*04:01L HLA-DRB1*16:01L
  source 1..12: note = Severe acute respiratory syndrome coronavirus 2
TSAFVETVKGLD

SEQ ID NO: 15093 - protein, 12 aa, Severe acute respiratory syndrome-related coronavirus
  REGION 1..12: note = Table B: HLA-DRB1*13:03L HLA-DRB1*01:03L HLA-DRB1*04:04L HLA-DRB1*04:05L HLA-DQA1*01:02-B1*06:02L HLA-DRB1*01:01L HLA-DRB1*08:04L HLA-DRB3*02:01L HLA-DPA1*01:03-B1*03:01L HLA-DPA1*03:01-B1*04:02L HLA-DRB1*14:01L HLA-DRB1*11:03L
  REGION 1..12: note = CONT. FROM ABOVE: HLA-DRB1*11:04L HLA-DRB1*14:02L HLA-DRB1*04:10 L HLA-DRB1*09:01L HLA-DRB1*12:02L HLA-DRB1*14:54L HLA-DPA1*01:03 -B1*104:01L HLA-DPA1*01:02-B1*04:01L HLA-DRB1*10:01L HLA-DRB1*04 :08L HLA-DRB1*08:03L HLA-DRB1*15:01L
  source 1..12: note = Severe acute respiratory syndrome coronavirus 2
VVMAYITGGVVQ

SEQ ID NO: 15094 - protein, 12 aa, Severe acute respiratory syndrome-related coronavirus
  REGION 1..12: note = Table B: HLA-DRB1*13:03L HLA-DRB1*04:02L HLA-DRB1*04:04L HLA-DRB1*04:05L HLA-DRB1*08:04L HLA-DRB3*02:01L HLA-DRB1*11:03L HLA-DRB1*14:02L HLA-DPA1*02:01-B1*13:01L HLA-DQA1*05:05-B1*03:01L HLA-DRB1*07:01L HLA-DRB1*08:03L
  source 1..12: note = Severe acute respiratory syndrome coronavirus 2
VEFLRDGWEIVK

SEQ ID NO: 15095 - protein, 12 aa, Severe acute respiratory syndrome-related coronavirus
  REGION 1..12: note = Table B: HLA-DRB1*13:03L HLA-DQA1*01:02-B1*06:02L HLA-DRB1*14:54L
  source 1..12: note = Severe acute respiratory syndrome coronavirus 2
GGQIVTCAKEIK

SEQ ID NO: 15096 - protein, 13 aa, Severe acute respiratory syndrome-related coronavirus
  REGION 1..13: note = Table B: HLA-DRB1*13:03L HLA-DRB1*11:01L
  source 1..13: note = Severe acute respiratory syndrome coronavirus 2
VQTFFKLVNKFLA

SEQ ID NO: 15097 - protein, 10 aa, Severe acute respiratory syndrome-related coronavirus
  REGION 1..10: note = Table B: HLA-DRB1*13:03L HLA-DRB1*01:03L HLA-DQA1*01:02-B1*06:02L HLA-DRB1*08:04L HLA-DPA1*03:01-B1*04:02L HLA-DRB1*14:01L HLA-DRB1*11:04L HLA-DRB1*08:01L HLA-DRB1*11:01L HLA-DQA1*05:05-B1*03:19L
  REGION 1..10: note = CONT. FROM ABOVE: HLA-DPA1*01:03-B1*04:01L HLA-DPA1*01:03-B1*04: 02L HLA-DRB1*12:01L HLA-DPA1*02:01-B1*13:01L HLA-DPA1*03:01-B1*1 05:01L HLA-DPA1*01:02-B1*04:01L HLA-DRB1*16:01L HLA-DQA1*01:03-B 1*06:01L HLA-DRB1*04:08L HLA-DQA1*02:01-B1*03:03L
  REGION 1..10: note = CONT. FROM ABOVE: HLA-DRB1*15:03L
  source 1..10: note = Severe acute respiratory syndrome coronavirus 2
FKLVNKFLAL

SEQ ID NO: 15098 - protein, 10 aa, Severe acute respiratory syndrome-related coronavirus
  REGION 1..10: note = Table B: HLA-DRB1*13:03L HLA-DRB4*03:01NL HLA-DRB1*12:01L HLA-DQA1*03:01-B1*03:02L HLA-DRB1*14:17L HLA-DQA1*02:01-B1*03:03L
  source 1..10: note = Severe acute respiratory syndrome coronavirus 2
SIIIGGAKLK

SEQ ID NO: 15099 - protein, 12 aa, Severe acute respiratory syndrome-related coronavirus
  REGION 1..12: note = Table B: HLA-DRB1*13:03L HLA-DRB1*01:03L HLA-DRB1*04:05L HLA-DRB1*11:04L HLA-DRB1*11:01L HLA-DRB1*16:01L HLA-DRB1*04:08L
  source 1..12: note = Severe acute respiratory syndrome coronavirus 2
GLYRKCVKSREE

SEQ ID NO: 15100 - protein, 11 aa, Severe acute respiratory syndrome-related coronavirus
  REGION 1..11: note = Table B: HLA-DRB1*13:03L HLA-DRB1*01:03L HLA-DPA1*01:03-B1*03:01L HLA-DRB1*14:01L HLA-DQA1*05:05-B1*03:19L HLA-DQA1*05:01-B1*02:01L HLA-DPA1*03:01-B1*105:01L HLA-DQA1*03:01-B1*03:02L
  REGION 1..11: note = CONT. FROM ABOVE: HLA-DPA1*01:02-B1*04:01L HLA-DRB1*16:01L HLA-D RB1*15:03L
  source 1..11: note = Severe acute respiratory syndrome coronavirus 2
MPLKAPKEIIF

SEQ ID NO: 15101 - protein, 14 aa, Severe acute respiratory syndrome-related coronavirus
  REGION 1..14: note = Table B: HLA-DRB1*13:03L HLA-DRB1*01:03L HLA-DRB1*04:02L HLA-DRB1*04:05L HLA-DQA1*01:02-B1*06:02L HLA-DRB1*08:04L HLA-DPA1*01:03-B1*03:01L HLA-DRB1*14:02L HLA-DQA1*05:05-B1*03:19L HLA-DPA1*01:03-B1*04:01L
  REGION 1..14: note = CONT. FROM ABOVE: HLA-DPA1*02:01-B1*13:01L HLA-DPA1*03:01-B1*105 :01L HLA-DPA1*01:03-B1*104:01L HLA-DQA1*05:05-B1*03:01L HLA-DRB1 *14:17L HLA-DQA1*01:03-B1*06:01L HLA-DRB1*04:08L
  source 1..14: note = Severe acute respiratory syndrome coronavirus 2
APKEIIFLEGETLP

SEQ ID NO: 15102 - protein, 10 aa, Severe acute respiratory syndrome-related coronavirus
  REGION 1..10: note = Table B: HLA-DRB1*13:03L HLA-DQA1*01:02-B1*06:02L HLA-DPA1*03:01-B1*105:01L
  source 1..10: note = Severe acute respiratory syndrome coronavirus 2
LPTEVLTEEV

SEQ ID NO: 15103 - protein, 15 aa, Severe acute respiratory syndrome-related coronavirus
  REGION 1..15: note = Table B: HLA-DRB1*13:03L HLA-DRB4*03:01NL HLA-DRB1*04:10L
  source 1..15: note = Severe acute respiratory syndrome coronavirus 2
VVLKTGDLQPLEQPT

SEQ ID NO: 15104 - protein, 10 aa, Severe acute respiratory syndrome-related coronavirus
  REGION 1..10: note = Table B: HLA-DRB1*13:03L HLA-DRB1*04:05L HLA-DQA1*01-B1*05L
  source 1..10: note = Severe acute respiratory syndrome coronavirus 2
QPLEQPTSEA

SEQ ID NO: 15105 - protein, 10 aa, Severe acute respiratory syndrome-related coronavirus
  REGION 1..10: note = Table B: HLA-DRB1*13:03L HLA-DQA1*01:02-B1*06:02L HLA-DRB1*08:77L HLA-DPA1*01:03-B1*03:01L HLA-DRB1*03:01L HLA-DQA1*05:05-B1*03:19L HLA-DQA1*05:01-B1*02:01L HLA-DPA1*01:03-B1*04:01L HLA-DPA1*01:03-B1*104:01L
  REGION 1..10: note = CONT. FROM ABOVE: HLA-DRB1*10:01L HLA-DRB1*16:01L
  source 1..10: note = Severe acute respiratory syndrome coronavirus 2
DDTVIEVQGY

SEQ ID NO: 15106 - protein, 16 aa, Severe acute respiratory syndrome-related coronavirus
  REGION 1..16: note = Table B: HLA-DRB1*13:03L HLA-DRB1*14:02L HLA-DQA1*01:01-B1*05:01L HLA-DRB1*11:01L HLA-DPA1*01:03-B1*04:02L HLA-DRB3*01:01L HLA-DPA1*01:03-B1*104:01L HLA-DPA1*01:02-B1*04:01L
  REGION 1..16: note = CONT. FROM ABOVE: HLA-DRB1*08:02L
  source 1..16: note = Severe acute respiratory syndrome coronavirus 2
VQGYKSVNITFELDER

SEQ ID NO: 15107 - protein, 11 aa, Severe acute respiratory syndrome-related coronavirus
  REGION 1..11: note = Table B: HLA-DRB1*13:03L HLA-DRB1*01:03L HLA-DRB1*04:02L HLA-DRB1*04:05L HLA-DRB1*01:02L HLA-DRB4*03:01NL HLA-DRB1*14:01L HLA-DRB1*12:01L HLA-DRB1*14:54L HLA-DRB1*14:17L HLA-DRB1*04:08L
  source 1..11: note = Severe acute respiratory syndrome coronavirus 2
ITFELDERIDK

SEQ ID NO: 15108 - protein, 10 aa, Severe acute respiratory syndrome-related coronavirus
  REGION 1..10: note = Table B: HLA-DRB1*13:03L HLA-DQA1*01:02-B1*06:02L HLA-DRB1*08:77L HLA-DPA1*01:03-B1*03:01L HLA-DRB1*03:01L HLA-DRB1*11:02L HLA-DQA1*01-B1*05L HLA-DQA1*05:05-B1*03:19M HLA-DQA1*05:01-B1*02:01M HLA-DRB4*01:01L
  REGION 1..10: note = CONT. FROM ABOVE: HLA-DPA1*01:03-B1*04:01L HLA-DQA1*05:05-B1*03: 116L HLA-DPA1*01:03-B1*104:01L HLA-DRB1*10:01L HLA-DRB1*16:01L
  source 1..10: note = Severe acute respiratory syndrome coronavirus 2
DLDEWSMATY

SEQ ID NO: 15109 - protein, 16 aa, Severe acute respiratory syndrome-related coronavirus
  REGION 1..16: note = Table B: HLA-DRB1*13:03L HLA-DRB1*01:03L HLA-DRB1*04:02L HLA-DRB1*14:02L HLA-DQA1*05:05-B1*03:01L
  source 1..16: note = Severe acute respiratory syndrome coronavirus 2
EPSTQYEYGTEDDYQG

SEQ ID NO: 15110 - protein, 10 aa, Severe acute respiratory syndrome-related coronavirus
  REGION 1..10: note = Table B: HLA-DRB1*13:03L HLA-DRB1*04:05L HLA-DQA1*01-B1*05L HLA-DRB1*16:01L
  source 1..10: note = Severe acute respiratory syndrome coronavirus 2
KPLEFGATSA

SEQ ID NO: 15111 - protein, 14 aa, Severe acute respiratory syndrome-related coronavirus
  REGION 1..14: note = Table B: HLA-DRB1*13:03L HLA-DRB1*01:02L HLA-DPA1*02:01-B1*13:01L
  source 1..14: note = Severe acute respiratory syndrome coronavirus 2
GATSAALQPEEEQE

SEQ ID NO: 15112 - protein, 16 aa, Severe acute respiratory syndrome-related coronavirus
  REGION 1..16: note = Table B: HLA-DRB1*13:03L HLA-DRB1*01:02L HLA-DPA1*01:03-B1*03:01L HLA-DRB1*08:01L HLA-DPA1*01:03-B1*04:02L HLA-DPA1*02:01-B1*13:01L
  source 1..16: note = Severe acute respiratory syndrome coronavirus 2
DDSQQTVGQQDGSEDN

SEQ ID NO: 15113 - protein, 10 aa, Severe acute respiratory syndrome-related coronavirus
  REGION 1..10: note = Table B: HLA-DRB1*13:03L HLA-DQA1*03:01-B1*03:02L HLA-DRB1*16:01L
  source 1..10: note = Severe acute respiratory syndrome coronavirus 2
KVKPTVVVNA

SEQ ID NO: 15114 - protein, 10 aa, Severe acute respiratory syndrome-related coronavirus
  REGION 1..10: note = Table B: HLA-DRB1*13:03L HLA-DQA1*01:02-B1*06:02L HLA-DRB1*08:77L HLA-DRB1*14:02L HLA-DQA1*05:05-B1*03:19L HLA-DQA1*05:01-B1*02:01L HLA-DPA1*03:01-B1*105:01L HLA-DQA1*02:01-B1*03:03L
  source 1..10: note = Severe acute respiratory syndrome coronavirus 2
TVVVNAANVY

SEQ ID NO: 15115 - protein, 10 aa, Severe acute respiratory syndrome-related coronavirus
  REGION 1..10: note = Table B: HLA-DRB1*13:03L HLA-DRB1*01:03L HLA-DQA1*03:01-B1*03:02L HLA-DQA1*02:01-B1*03:03L
  source 1..10: note = Severe acute respiratory syndrome coronavirus 2
VYLKHGGGVA

SEQ ID NO: 15116 - protein, 10 aa, Severe acute respiratory syndrome-related coronavirus
  REGION 1..10: note = Table B: HLA-DRB1*13:03L HLA-DRB4*03:01NL HLA-DRB1*12:01L HLA-DQA1*03:01-B1*03:02L HLA-DRB1*14:17L
  source 1..10: note = Severe acute respiratory syndrome coronavirus 2
LHVVGPNVNK

SEQ ID NO: 15117 - protein, 11 aa, Severe acute respiratory syndrome-related coronavirus
  REGION 1..11: note = Table B: HLA-DRB1*13:03L HLA-DRB1*01:03L HLA-DRB1*01:01L HLA-DRB1*14:01L HLA-DQA1*05:05-B1*03:01L HLA-DRB1*08:02L
  source 1..11: note = Severe acute respiratory syndrome coronavirus 2
VYLAVFDKNLY

SEQ ID NO: 15118 - protein, 12 aa, Severe acute respiratory syndrome-related coronavirus
  REGION 1..12: note = Table B: HLA-DRB1*13:03L HLA-DRB1*08:01L HLA-DRB1*12:01L HLA-DRB1*14:54L
  source 1..12: note = Severe acute respiratory syndrome coronavirus 2
QKIAEIPKEEVK

SEQ ID NO: 15119 - protein, 11 aa, Severe acute respiratory syndrome-related coronavirus
  REGION 1..11: note = Table B: HLA-DRB1*13:03L HLA-DRB1*14:54L
  source 1..11: note = Severe acute respiratory syndrome coronavirus 2
FITESKPSVEQ

SEQ ID NO: 15120 - protein, 12 aa, Severe acute respiratory syndrome-related coronavirus
  REGION 1..12: note = Table B: HLA-DRB1*13:03L HLA-DRB1*04:02L HLA-DRB1*08:04L HLA-DRB1*08:01L HLA-DRB1*12:01L HLA-DPA1*02:01-B1*13:01L HLA-DPA1*03:01-B1*105:01L HLA-DRB1*04:08L HLA-DRB1*15:03L
  source 1..12: note = Severe acute respiratory syndrome coronavirus 2
IDITFLKKDAPY

SEQ ID NO: 15121 - protein, 12 aa, Severe acute respiratory syndrome-related coronavirus
  REGION 1..12: note = Table B: HLA-DRB1*13:03L HLA-DRB1*01:03L HLA-DQA1*01:02-B1*06:02L HLA-DRB1*08:04L HLA-DRB1*14:01L HLA-DRB1*08:01L HLA-DRB1*14:54L
  source 1..12: note = Severe acute respiratory syndrome coronavirus 2
AVVIPTKKAGGT

SEQ ID NO: 15122 - protein, 11 aa, Severe acute respiratory syndrome-related coronavirus
  REGION 1..11: note = Table B: HLA-DRB1*13:03L HLA-DQA1*03:01-B1*03:02L
  source 1..11: note = Severe acute respiratory syndrome coronavirus 2
IPTKKAGGTTE

SEQ ID NO: 15123 - protein, 10 aa, Severe acute respiratory syndrome-related coronavirus
  REGION 1..10: note = Table B: HLA-DRB1*13:03L HLA-DQA1*01:02-B1*06:02L HLA-DPA1*03:01-B1*105:01L
  source 1..10: note = Severe acute respiratory syndrome coronavirus 2
VPTDNYITTY

SEQ ID NO: 15124 - protein, 14 aa, Severe acute respiratory syndrome-related coronavirus
  REGION 1..14: note = Table B: HLA-DRB1*13:03L HLA-DPA1*03:01-B1*04:02L HLA-DPA1*02:01-B1*13:01L
  source 1..14: note = Severe acute respiratory syndrome coronavirus 2
GQGLNGYTVEEAKT

SEQ ID NO: 15125 - protein, 10 aa, Severe acute respiratory syndrome-related coronavirus
  REGION 1..10: note = Table B: HLA-DRB1*13:03L HLA-DQA1*03:01-B1*03:02L HLA-DRB1*14:17L HLA-DQA1*02:01-B1*03:03L
  source 1..10: note = Severe acute respiratory syndrome coronavirus 2
VEEAKTVLKK

SEQ ID NO: 15126 - protein, 10 aa, Severe acute respiratory syndrome-related coronavirus
  REGION 1..10: note = Table B: HLA-DRB1*13:03L HLA-DRB1*08:01L HLA-DQA1*03:01-B1*03:02L HLA-DQA1*02:01-B1*03:03L
  source 1..10: note = Severe acute respiratory syndrome coronavirus 2
TKAIVSTIQR

SEQ ID NO: 15127 - protein, 13 aa, Severe acute respiratory syndrome-related coronavirus
  REGION 1..13: note = Table B: HLA-DRB1*13:03L HLA-DRB1*04:04L HLA-DQA1*01:02-B1*06:02L HLA-DRB1*14:01L HLA-DRB1*11:04L HLA-DRB1*12:01L HLA-DPA1*02:01-B1*13:01L HLA-DPA1*01:02-B1*04:01L HLA-DQA1*02:01-B1*03:03L
  REGION 1..13: note = CONT. FROM ABOVE: HLA-DRB1*15:03L
  source 1..13: note = Severe acute respiratory syndrome coronavirus 2
IQRKYKGIKIQEG

SEQ ID NO: 15128 - protein, 11 aa, Severe acute respiratory syndrome-related coronavirus
  REGION 1..11: note = Table B: HLA-DRB1*13:03L HLA-DRB4*03:01NL HLA-DRB1*08:77L HLA-DPA1*01:03-B1*03:01L HLA-DPA1*03:01-B1*04:02L HLA-DRB1*03:01L HLA-DQA1*01-B1*05L HLA-DRB4*01:01L HLA-DPA1*01:03-B1*04:01L HLA-DQA1*05:05-B1*03:116L
  REGION 1..11: note = CONT. FROM ABOVE: HLA-DPA1*01:03-B1*04:02L HLA-DRB1*12:01L HLA-D PA1*01:03-B1*104:01L HLA-DRB1*10:01L HLA-DRB1*16:01L
  source 1..11: note = Severe acute respiratory syndrome coronavirus 2
QEGVVDYGARF

SEQ ID NO: 15129 - protein, 11 aa, Severe acute respiratory syndrome-related coronavirus
  REGION 1..11: note = Table B: HLA-DRB1*13:03L HLA-DQA1*01-B1*05L HLA-DQA1*05:01-B1*02:01L HLA-DPA1*03:01-B1*105:01L HLA-DPA1*01:02-B1*04:01L HLA-DRB1*16:01L HLA-DQA1*01:03-B1*06:01L
  source 1..11: note = Severe acute respiratory syndrome coronavirus 2
YVTHGLNLEEA

SEQ ID NO: 15130 - protein, 15 aa, Severe acute respiratory syndrome-related coronavirus
  REGION 1..15: note = Table B: HLA-DRB1*13:03L HLA-DRB1*04:04L HLA-DRB1*03:01L HLA-DQA1*01:01-B1*05:01L HLA-DRB3*01:01L HLA-DRB1*14:54L HLA-DRB1*07:01L
  source 1..15: note = Severe acute respiratory syndrome coronavirus 2
RSLKVPATVSVSSPD

SEQ ID NO: 15131 - protein, 10 aa, Severe acute respiratory syndrome-related coronavirus
  REGION 1..10: note = Table B: HLA-DRB1*13:03L
  source 1..10: note = Severe acute respiratory syndrome coronavirus 2
SVSSPDAVTA

SEQ ID NO: 15132 - protein, 11 aa, Severe acute respiratory syndrome-related coronavirus
  REGION 1..11: note = Table B: HLA-DRB1*13:03L HLA-DRB4*03:01NL HLA-DQA1*02:01-B1*03:03L
  source 1..11: note = Severe acute respiratory syndrome coronavirus 2
AYNGYLTSSSK

SEQ ID NO: 15133 - protein, 10 aa, Severe acute respiratory syndrome-related coronavirus
  REGION 1..10: note = Table B: HLA-DRB1*13:03L HLA-DQA1*01:02-B1*06:02L HLA-DRB1*08:77L HLA-DPA1*01:03-B1*03:01L HLA-DRB1*03:01L HLA-DRB1*11:02L HLA-DQA1*01-B1*05L HLA-DQA1*05:05-B1*03:19L HLA-DQA1*05:01-B1*02:01L HLA-DRB4*01:01L
  REGION 1..10: note = CONT. FROM ABOVE: HLA-DPA1*01:03-B1*04:01L HLA-DPA1*01:03-B1*104 :01L HLA-DRB1*10:01L HLA-DRB1*16:01L
  source 1..10: note = Severe acute respiratory syndrome coronavirus 2
TQVVDMSMTY

SEQ ID NO: 15134 - protein, 14 aa, Severe acute respiratory syndrome-related coronavirus
  REGION 1..14: note = Table B: HLA-DRB1*13:03L HLA-DRB1*01:01L HLA-DRB3*02:01L HLA-DPA1*03:01-B1*04:02L HLA-DRB1*11:03L HLA-DRB1*11:04L HLA-DRB1*14:02L HLA-DRB5*01:01L HLA-DQA1*01-B1*05L HLA-DRB1*09:01L HLA-DPA1*02:01-B1*13:01L HLA-DRB1*04:08L
  REGION 1..14: note = CONT. FROM ABOVE: HLA-DRB1*15:01L
  source 1..14: note = Severe acute respiratory syndrome coronavirus 2
VDMSMTYGQQFGPT

SEQ ID NO: 15135 - protein, 13 aa, Severe acute respiratory syndrome-related coronavirus
  REGION 1..13: note = Table B: HLA-DRB1*13:03L HLA-DRB4*03:01NL HLA-DRB1*14:54L HLA-DQA1*01:03-B1*06:01L HLA-DRB1*15:03L
  source 1..13: note = Severe acute respiratory syndrome coronavirus 2
DVTKIKPHNSHEG

SEQ ID NO: 15136 - protein, 13 aa, Severe acute respiratory syndrome-related coronavirus
  REGION 1..13: note = Table B: HLA-DRB1*13:03L HLA-DRB4*03:01NL HLA-DRB1*11:04L HLA-DRB3*01:01L HLA-DRB1*14:54L HLA-DPA1*01:02-B1*04:01L HLA-DRB1*15:03L
  source 1..13: note = Severe acute respiratory syndrome coronavirus 2
VTKIKPHNSHEGK

SEQ ID NO: 15137 - protein, 12 aa, Severe acute respiratory syndrome-related coronavirus
  REGION 1..12: note = Table B: HLA-DRB1*13:03L HLA-DRB1*01:03L HLA-DRB1*01:02L HLA-DPA1*01:03-B1*03:01L HLA-DQA1*01:01-B1*05:01L HLA-DRB1*08:01L HLA-DRB1*12:01L HLA-DQA1*05:05-B1*03:01L HLA-DRB1*04:08L
  source 1..12: note = Severe acute respiratory syndrome coronavirus 2
KTFYVLPNDDTL

SEQ ID NO: 15138 - protein, 11 aa, Severe acute respiratory syndrome-related coronavirus
  REGION 1..11: note = Table B: HLA-DRB1*13:03L
  source 1..11: note = Severe acute respiratory syndrome coronavirus 2
LPNDDTLRVEA

SEQ ID NO: 15139 - protein, 10 aa, Severe acute respiratory syndrome-related coronavirus
  REGION 1..10: note = Table B: HLA-DRB1*13:03L HLA-DRB1*01:03L HLA-DQA1*03:01-B1*03:02L HLA-DRB1*14:17L HLA-DRB1*16:01L HLA-DQA1*02:01-B1*03:03L
  source 1..10: note = Severe acute respiratory syndrome coronavirus 2
YMSALNHTKK

SEQ ID NO: 15140 - protein, 14 aa, Severe acute respiratory syndrome-related coronavirus
  REGION 1..14: note = Table B: HLA-DRB1*13:03L HLA-DRB1*04:02L HLA-DRB1*04:05L
  source 1..14: note = Severe acute respiratory syndrome coronavirus 2
MSALNHTKKWKYPQ

SEQ ID NO: 15141 - protein, 13 aa, Severe acute respiratory syndrome-related coronavirus
  REGION 1..13: note = Table B: HLA-DRB1*13:03L HLA-DRB1*01:01L HLA-DRB1*08:01L HLA-DRB1*11:01L HLA-DRB3*01:01L HLA-DQA1*03:01-B1*03:02L HLA-DPA1*01:03-B1*104:01L HLA-DQA1*02:01-B1*03:03L HLA-DRB1*15:03L
  source 1..13: note = Severe acute respiratory syndrome coronavirus 2
NHTKKWKYPQVNG

SEQ ID NO: 15142 - protein, 13 aa, Severe acute respiratory syndrome-related coronavirus
  REGION 1..13: note = Table B: HLA-DRB1*13:03L HLA-DRB1*04:04L HLA-DRB1*11:03L HLA-DRB1*11:04L HLA-DRB1*14:02L HLA-DQA1*01:01-B1*05:01L HLA-DRB1*08:01L HLA-DRB1*11:01L HLA-DPA1*01:03-B1*02:01L HLA-DPA1*01:03-B1*104:01L HLA-DRB1*10:01L HLA-DRB1*08:03L
  source 1..13: note = Severe acute respiratory syndrome coronavirus 2
VNGLTSIKWADNN

SEQ ID NO: 15143 - protein, 10 aa, Severe acute respiratory syndrome-related coronavirus
  REGION 1..10: note = Table B: HLA-DRB1*13:03L HLA-DQA1*01:02-B1*06:02L HLA-DPA1*03:01-B1*105:01L
  source 1..10: note = Severe acute respiratory syndrome coronavirus 2
NPPALQDAYY

SEQ ID NO: 15144 - protein, 10 aa, Severe acute respiratory syndrome-related coronavirus
  REGION 1..10: note = Table B: HLA-DRB1*13:03L HLA-DQA1*01:02-B1*06:02L HLA-DRB1*08:77L HLA-DPA1*01:03-B1*03:01M HLA-DRB1*03:01L HLA-DRB1*11:02L HLA-DQA1*01-B1*05L HLA-DQA1*05:05-B1*03:19M HLA-DQA1*05:01-B1*02:01M HLA-DRB4*01:01L
  REGION 1..10: note = CONT. FROM ABOVE: HLA-DPA1*01:03-B1*04:01L HLA-DRB1*12:01L HLA-D PA1*01:03-B1*104:01M HLA-DRB1*10:01L HLA-DRB1*16:01M
  source 1..10: note = Severe acute respiratory syndrome coronavirus 2
LGDVRETMSY

SEQ ID NO: 15145 - protein, 11 aa, Severe acute respiratory syndrome-related coronavirus
  REGION 1..11: note = Table B: HLA-DRB1*13:03L HLA-DRB1*01:03L HLA-DQA1*01:02-B1*06:02L HLA-DRB1*01:02L HLA-DRB1*08:04L HLA-DPA1*03:01-B1*04:02L HLA-DRB1*14:01L HLA-DRB1*11:04L HLA-DRB1*11:01L HLA-DPA1*01:03-B1*04:01L
  REGION 1..11: note = CONT. FROM ABOVE: HLA-DPA1*01:03-B1*04:02L HLA-DRB1*12:01L HLA-D PA1*03:01-B1*105:01L HLA-DQA1*03:01-B1*03:02L HLA-DPA1*01:03-B1* 02:01L HLA-DRB1*16:01L HLA-DQA1*01:03-B1*06:01L HLA-DRB1*04:08L HLA-DQA1*02:01-B1*03:03L
  source 1..11: note = Severe acute respiratory syndrome coronavirus 2
LSYEQFKKGVQ

SEQ ID NO: 15146 - protein, 12 aa, Severe acute respiratory syndrome-related coronavirus
  REGION 1..12: note = Table B: HLA-DRB1*13:03L HLA-DRB1*04:02L HLA-DRB1*08:04L HLA-DRB1*14:01L HLA-DRB1*08:01L HLA-DRB1*12:01L HLA-DQA1*03:01-B1*03:02L HLA-DRB1*14:54L HLA-DRB1*04:08L
  source 1..12: note = Severe acute respiratory syndrome coronavirus 2
DNYYKKDNSYFT

SEQ ID NO: 15147 - protein, 14 aa, Severe acute respiratory syndrome-related coronavirus
  REGION 1..14: note = Table B: HLA-DRB1*13:03L HLA-DRB3*01:01L HLA-DQA1*05:05-B1*03:01L HLA-DRB1*07:01L
  source 1..14: note = Severe acute respiratory syndrome coronavirus 2
ADDLNQLTGYKKPA

SEQ ID NO: 15148 - protein, 10 aa, Severe acute respiratory syndrome-related coronavirus
  REGION 1..10: note = Table B: HLA-DRB1*13:03L HLA-DRB1*01:03L HLA-DRB1*08:01L HLA-DQA1*03:01-B1*03:02L HLA-DRB1*16:01L HLA-DQA1*02:01-B1*03:03L
  source 1..10: note = Severe acute respiratory syndrome coronavirus 2
LTGYKKPASR

SEQ ID NO: 15149 - protein, 11 aa, Severe acute respiratory syndrome-related coronavirus
  REGION 1..11: note = Table B: HLA-DRB1*13:03L HLA-DRB1*08:01L HLA-DRB1*11:01L HLA-DRB1*16:01L HLA-DRB1*04:08L
  source 1..11: note = Severe acute respiratory syndrome coronavirus 2
HYTPSFKKGAK

SEQ ID NO: 15150 - protein, 12 aa, Severe acute respiratory syndrome-related coronavirus
  REGION 1..12: note = Table B: HLA-DRB1*13:03L HLA-DRB1*01:03L HLA-DRB1*04:04L HLA-DRB1*04:05L HLA-DQA1*01:02-B1*06:02L HLA-DRB1*01:02L HLA-DRB4*03:01NL HLA-DRB1*14:01L HLA-DQA1*01-B1*05L HLA-DRB1*04:10L HLA-DRB1*12:01L HLA-DRB1*14:54L HLA-DRB1*16:01L
  REGION 1..12: note = CONT. FROM ABOVE: HLA-DRB1*04:08L HLA-DQA1*02:01-B1*03:03L HLA-D RB1*15:03L
  source 1..12: note = Severe acute respiratory syndrome coronavirus 2
KPIVWHVNNATN

SEQ ID NO: 15151 - protein, 13 aa, Severe acute respiratory syndrome-related coronavirus
  REGION 1..13: note = Table B: HLA-DRB1*13:03L HLA-DRB1*08:77L HLA-DRB3*02:01L HLA-DRB1*11:03L HLA-DRB1*14:02L
  source 1..13: note = Severe acute respiratory syndrome coronavirus 2
IVWHVNNATNKAT

SEQ ID NO: 15152 - protein, 10 aa, Severe acute respiratory syndrome-related coronavirus
  REGION 1..10: note = Table B: HLA-DRB1*13:03L HLA-DRB1*01:03L HLA-DQA1*01:02-B1*06:02L HLA-DQA1*02:01-B1*03:03L
  source 1..10: note = Severe acute respiratory syndrome coronavirus 2
TKPVETSNSF

SEQ ID NO: 15153 - protein, 11 aa, Severe acute respiratory syndrome-related coronavirus
  REGION 1..11: note = Table B: HLA-DRB1*13:03L HLA-DRB1*04:02L HLA-DRB1*04:05L HLA-DRB4*03:01NL HLA-DQA1*01-B1*05L HLA-DQA1*05:01-B1*02:01L HLA-DRB1*04:10L HLA-DRB1*12:01L HLA-DRB1*14:54L HLA-DRB1*16:01L
  source 1..11: note = Severe acute respiratory syndrome coronavirus 2
NSFDVLKSEDA

SEQ ID NO: 15154 - protein, 11 aa, Severe acute respiratory syndrome-related coronavirus
  REGION 1..11: note = Table B: HLA-DRB1*13:03L HLA-DQA1*05:01-B1*02:01L HLA-DRB1*12:01L HLA-DRB1*16:01L HLA-DRB1*15:03L
  source 1..11: note = Severe acute respiratory syndrome coronavirus 2
DVLKSEDAQGM

SEQ ID NO: 15155 - protein, 12 aa, Severe acute respiratory syndrome-related coronavirus
  REGION 1..12: note = Table B: HLA-DRB1*13:03L HLA-DRB1*01:03L HLA-DRB1*08:77L HLA-DPA1*01:03-B1*03:01L HLA-DPA1*03:01-B1*04:02L HLA-DPA1*01:03-B1*04:01L HLA-DRB1*09:01L HLA-DPA1*02:01-B1*13:01L HLA-DRB1*14:17L
  REGION 1..12: note = CONT. FROM ABOVE: HLA-DPA1*01:02-B1*04:01L HLA-DRB1*07:01L HLA-D RB1*04:08L
  source 1..12: note = Severe acute respiratory syndrome coronavirus 2
EDLKPVSEEVVE

SEQ ID NO: 15156 - protein, 14 aa, Severe acute respiratory syndrome-related coronavirus
  REGION 1..14: note = Table B: HLA-DRB1*13:03L HLA-DRB1*04:04L HLA-DRB1*08:77L HLA-DPA1*01:03-B1*03:01L HLA-DRB1*08:01L HLA-DQA1*05:05-B1*03:19L HLA-DRB3*01:01L HLA-DRB1*07:01L HLA-DRB1*04:08L
  source 1..14: note = Severe acute respiratory syndrome coronavirus 2
DLKPVSEEVVENPT

SEQ ID NO: 15157 - protein, 11 aa, Severe acute respiratory syndrome-related coronavirus
  REGION 1..11: note = Table B: HLA-DRB1*13:03L HLA-DRB1*04:02L HLA-DRB1*08:77L HLA-DPA1*03:01-B1*04:02L HLA-DRB1*14:01L HLA-DRB1*14:02L HLA-DRB1*08:01L HLA-DPA1*01:03-B1*04:01L HLA-DQA1*05:05-B1*03:116L HLA-DPA1*01:02-B1*04:01L
  REGION 1..11: note = CONT. FROM ABOVE: HLA-DRB1*15:03L
  source 1..11: note = Severe acute respiratory syndrome coronavirus 2
VENPTIQKDVL

SEQ ID NO: 15158 - protein, 11 aa, Severe acute respiratory syndrome-related coronavirus
  REGION 1..11: note = Table B: HLA-DRB1*13:03L HLA-DRB4*03:01NL HLA-DRB1*14:54L
  source 1..11: note = Severe acute respiratory syndrome coronavirus 2
GDIILKPANNS

SEQ ID NO: 15159 - protein, 10 aa, Severe acute respiratory syndrome-related coronavirus
  REGION 1..10: note = Table B: HLA-DRB1*13:03L HLA-DRB1*01:03L HLA-DQA1*01:02-B1*06:02L HLA-DRB1*03:01L HLA-DQA1*05:05-B1*03:19L HLA-DQA1*05:01-B1*02:01L HLA-DPA1*03:01-B1*105:01L HLA-DRB1*16:01L
  REGION 1..10: note = CONT. FROM ABOVE: HLA-DQA1*02:01-B1*03:03L
  source 1..10: note = Severe acute respiratory syndrome coronavirus 2
VGHTDLMAAY

SEQ ID NO: 15160 - protein, 13 aa, Severe acute respiratory syndrome-related coronavirus
  REGION 1..13: note = Table B: HLA-DRB1*13:03L HLA-DRB1*01:03L HLA-DRB1*04:04L HLA-DRB1*04:05L HLA-DRB1*01:02L HLA-DRB4*03:01NL HLA-DPA1*01:03-B1*03:01L HLA-DPA1*03:01-B1*04:02L HLA-DRB1*04:10L HLA-DRB1*12:01L HLA-DPA1*02:01-B1*13:01L
  REGION 1..13: note = CONT. FROM ABOVE: HLA-DPA1*03:01-B1*105:01L HLA-DRB1*14:54L HLA- DRB1*04:08L HLA-DRB1*15:03L
  source 1..13: note = Severe acute respiratory syndrome coronavirus 2
HTDLMAAYVDNSS

SEQ ID NO: 15161 - protein, 12 aa, Severe acute respiratory syndrome-related coronavirus
  REGION 1..12: note = Table B: HLA-DRB1*13:03L HLA-DRB1*01:03L HLA-DRB1*04:05L HLA-DRB1*01:02L HLA-DQA1*01:01-B1*05:01L HLA-DRB1*08:01L HLA-DQA1*05:05-B1*03:19L HLA-DRB1*12:01L HLA-DPA1*03:01-B1*105:01L HLA-DQA1*05:05-B1*03:01L
  REGION 1..12: note = CONT. FROM ABOVE: HLA-DRB1*16:01L
  source 1..12: note = Severe acute respiratory syndrome coronavirus 2
VDNSSLTIKKPN

SEQ ID NO: 15162 - protein, 12 aa, Severe acute respiratory syndrome-related coronavirus
  REGION 1..12: note = Table B: HLA-DRB1*13:03L HLA-DRB1*01:03L HLA-DQA1*01:01-B1*05:01L HLA-DRB1*08:01L HLA-DPA1*03:01-B1*105:01L HLA-DQA1*05:05-B1*03:01L HLA-DRB1*16:01L
  source 1..12: note = Severe acute respiratory syndrome coronavirus 2
DNSSLTIKKPNE

SEQ ID NO: 15163 - protein, 10 aa, Severe acute respiratory syndrome-related coronavirus
  REGION 1..10: note = Table B: HLA-DRB1*13:03L HLA-DRB1*01:03L HLA-DQA1*01:02-B1*06:02L HLA-DRB1*08:77L HLA-DPA1*01:03-B1*03:01L HLA-DRB1*03:01L HLA-DRB1*14:02L HLA-DQA1*01-B1*05L HLA-DQA1*05:05-B1*03:19L
  REGION 1..10: note = CONT. FROM ABOVE: HLA-DQA1*05:01-B1*02:01L HLA-DRB4*01:01L HLA-D PA1*01:03-B1*04:01L HLA-DPA1*02:01-B1*13:01L HLA-DPA1*03:01-B1*1 05:01L HLA-DPA1*01:03-B1*104:01L HLA-DRB1*10:01L HLA-DRB1*16:01L HLA-DQA1*02:01-B1*03:03L HLA-DRB1*15:03L
  source 1..10: note = Severe acute respiratory syndrome coronavirus 2
SVPWDTIANY

SEQ ID NO: 15164 - protein, 13 aa, Severe acute respiratory syndrome-related coronavirus
  REGION 1..13: note = Table B: HLA-DRB1*13:03L HLA-DRB1*04:04L HLA-DRB1*04:05L HLA-DRB1*08:04L HLA-DRB1*14:01L HLA-DRB1*08:01L HLA-DQA1*01-B1*05L HLA-DRB1*04:10L HLA-DRB1*12:01L HLA-DPA1*02:01-B1*13:01L HLA-DPA1*01:02-B1*04:01L
  REGION 1..13: note = CONT. FROM ABOVE: HLA-DRB1*08:03L
  source 1..13: note = Severe acute respiratory syndrome coronavirus 2
KPFLNKVVSTTTN

SEQ ID NO: 15165 - protein, 11 aa, Severe acute respiratory syndrome-related coronavirus
  REGION 1..11: note = Table B: HLA-DRB1*13:03L HLA-DRB1*01:03L HLA-DRB1*04:02L HLA-DRB4*03:01NL HLA-DRB1*12:01L HLA-DRB1*14:17L HLA-DRB1*16:01L HLA-DQA1*02:01-B1*03:03L
  source 1..11: note = Severe acute respiratory syndrome coronavirus 2
IAKNTVKSVGK

SEQ ID NO: 15166 - protein, 12 aa, Severe acute respiratory syndrome-related coronavirus
  REGION 1..12: note = Table B: HLA-DRB1*13:03L HLA-DRB4*03:01NL HLA-DRB1*08:04L HLA-DRB1*11:03L HLA-DRB1*04:10L HLA-DRB1*14:54L HLA-DRB1*04:08L
  source 1..12: note = Severe acute respiratory syndrome coronavirus 2
EASFNYLKSPNF

SEQ ID NO: 15167 - protein, 12 aa, Severe acute respiratory syndrome-related coronavirus
  REGION 1..12: note = Table B: HLA-DRB1*13:03L HLA-DRB1*04:04L HLA-DRB1*01:01L HLA-DRB4*03:01NL HLA-DRB1*08:04L HLA-DRB1*11:03L HLA-DRB1*11:04L HLA-DRB1*08:01L HLA-DRB4*01:01L HLA-DRB1*04:10L HLA-DPA1*01:03-B1*04:02L HLA-DRB3*01:01L HLA-DRB1*14:54L
  REGION 1..12: note = CONT. FROM ABOVE: HLA-DPA1*01:03-B1*104:01L HLA-DRB1*10:01L HLA- DRB1*04:08L HLA-DRB1*08:03L
  source 1..12: note = Severe acute respiratory syndrome coronavirus 2
ASFNYLKSPNFS

SEQ ID NO: 15168 - protein, 10 aa, Severe acute respiratory syndrome-related coronavirus
  REGION 1..10: note = Table B: HLA-DRB1*13:03L HLA-DQA1*01-B1*05L HLA-DQA1*05:05-B1*03:116L HLA-DPA1*02:01-B1*13:01L
  source 1..10: note = Severe acute respiratory syndrome coronavirus 2
SPNFSKLINI

SEQ ID NO: 15169 - protein, 13 aa, Severe acute respiratory syndrome-related coronavirus
  REGION 1..13: note = Table B: HLA-DRB1*13:03L HLA-DRB1*04:04L HLA-DRB1*01:01L HLA-DRB1*08:04L HLA-DRB1*11:02L HLA-DRB1*11:04L HLA-DRB1*14:02L HLA-DRB1*11:01L HLA-DRB5*01:01L HLA-DRB5*02:02L HLA-DRB4*01:01L HLA-DQA1*05:05-B1*03:116L HLA-DRB1*04:10L
  REGION 1..13: note = CONT. FROM ABOVE: HLA-DPA1*01:03-B1*04:02L HLA-DRB1*12:02L HLA-D RB1*14:54L HLA-DRB1*10:01L HLA-DRB1*08:03L
  source 1..13: note = Severe acute respiratory syndrome coronavirus 2
GSLIYSTAALGVL

SEQ ID NO: 15170 - protein, 12 aa, Severe acute respiratory syndrome-related coronavirus
  REGION 1..12: note = Table B: HLA-DRB1*13:03L HLA-DRB1*01:03L HLA-DRB1*04:04L HLA-DQA1*01:02-B1*06:02L HLA-DRB1*01:02L HLA-DRB4*03:01NL HLA-DRB1*14:01L HLA-DRB1*11:04L HLA-DRB1*12:01L HLA-DPA1*03:01-B1*105:01L HLA-DRB1*14:54L
  REGION 1..12: note = CONT. FROM ABOVE: HLA-DQA1*01:03-B1*06:01L HLA-DRB1*04:08L HLA-D QA1*02:01-B1*03:03L HLA-DRB1*15:03L
  source 1..12: note = Severe acute respiratory syndrome coronavirus 2
LDSLDTYPSLET

SEQ ID NO: 15171 - protein, 11 aa, Severe acute respiratory syndrome-related coronavirus
  REGION 1..11: note = Table B: HLA-DRB1*13:03L HLA-DRB1*04:05L HLA-DQA1*01:02-B1*06:02L HLA-DPA1*03:01-B1*105:01L HLA-DQA1*03:01-B1*03:02L HLA-DRB1*16:01L HLA-DQA1*01:03-B1*06:01L HLA-DRB1*04:08L
  REGION 1..11: note = CONT. FROM ABOVE: HLA-DQA1*02:01-B1*03:03L
  source 1..11: note = Severe acute respiratory syndrome coronavirus 2
VWKSYVHVVDG

SEQ ID NO: 15172 - protein, 10 aa, Severe acute respiratory syndrome-related coronavirus
  REGION 1..10: note = Table B: HLA-DRB1*13:03L HLA-DQA1*01-B1*05L
  source 1..10: note = Severe acute respiratory syndrome coronavirus 2
RPINPTDQSS

SEQ ID NO: 15173 - protein, 10 aa, Severe acute respiratory syndrome-related coronavirus
  REGION 1..10: note = Table B: HLA-DRB1*13:03L HLA-DQA1*03:01-B1*03:02L HLA-DQA1*02:01-B1*03:03L
  source 1..10: note = Severe acute respiratory syndrome coronavirus 2
SYIVDSVTVK

SEQ ID NO: 15174 - protein, 13 aa, Severe acute respiratory syndrome-related coronavirus
  REGION 1..13: note = Table B: HLA-DRB1*13:03L HLA-DRB1*01:03L HLA-DRB1*04:04L HLA-DRB1*04:05L HLA-DRB4*03:01NL HLA-DRB1*14:01L HLA-DQA1*01:01-B1*05:01L HLA-DRB1*08:01L HLA-DRB1*04:10L HLA-DRB1*12:01L HLA-DRB1*14:54L HLA-DPA1*01:02-B1*04:01L
  REGION 1..13: note = CONT. FROM ABOVE: HLA-DRB1*04:08L HLA-DRB1*15:03L
  source 1..13: note = Severe acute respiratory syndrome coronavirus 2
LPINVIVFDGKSK

SEQ ID NO: 15175 - protein, 13 aa, Severe acute respiratory syndrome-related coronavirus
  REGION 1..13: note = Table B: HLA-DRB1*13:03L HLA-DRB1*04:05L HLA-DQA1*01:02-B1*06:02L HLA-DRB1*14:02L HLA-DRB1*08:01L HLA-DRB1*11:01L HLA-DQA1*05:01-B1*02:01L HLA-DRB1*12:01L HLA-DPA1*03:01-B1*105:01L HLA-DQA1*03:01-B1*03:02L
  source 1..13: note = Severe acute respiratory syndrome coronavirus 2
IVFDGKSKCEESS

SEQ ID NO: 15176 - protein, 11 aa, Severe acute respiratory syndrome-related coronavirus
  REGION 1..11: note = Table B: HLA-DRB1*13:03L HLA-DRB1*01:03L HLA-DRB1*04:05L HLA-DQA1*01-B1*05L HLA-DQA1*05:01-B1*02:01L HLA-DRB1*12:01L HLA-DRB1*14:54L HLA-DQA1*05:05-B1*03:01L HLA-DRB1*16:01L
  source 1..11: note = Severe acute respiratory syndrome coronavirus 2
AELAKNVSLDN

SEQ ID NO: 15177 - protein, 11 aa, Severe acute respiratory syndrome-related coronavirus
  REGION 1..11: note = Table B: HLA-DRB1*13:03L HLA-DQA1*01:02-B1*06:02L HLA-DRB4*03:01NL HLA-DRB1*12:01L HLA-DRB1*14:17L
  source 1..11: note = Severe acute respiratory syndrome coronavirus 2
NVLSTFISAAR

SEQ ID NO: 15178 - protein, 13 aa, Severe acute respiratory syndrome-related coronavirus
  REGION 1..13: note = Table B: HLA-DRB1*13:03L HLA-DRB1*01:03L HLA-DRB1*04:02L HLA-DRB1*01:02L HLA-DRB1*08:04L HLA-DRB1*11:04L HLA-DRB1*11:01L HLA-DRB1*04:08L
  source 1..13: note = Severe acute respiratory syndrome coronavirus 2
TKDVVECLKLSHQ

SEQ ID NO: 15179 - protein, 10 aa, Severe acute respiratory syndrome-related coronavirus
  REGION 1..10: note = Table B: HLA-DRB1*13:03L HLA-DQA1*01:02-B1*06:02M HLA-DPA1*01:03-B1*03:01L HLA-DRB1*03:01L HLA-DQA1*05:05-B1*03:19L HLA-DQA1*05:01-B1*02:01L HLA-DPA1*01:03-B1*04:01L HLA-DPA1*03:01-B1*105:01L
  REGION 1..10: note = CONT. FROM ABOVE: HLA-DQA1*02:01-B1*03:03L HLA-DRB1*15:03L
  source 1..10: note = Severe acute respiratory syndrome coronavirus 2
EVTGDSCNNY

SEQ ID NO: 15180 - protein, 13 aa, Severe acute respiratory syndrome-related coronavirus
  REGION 1..13: note = Table B: HLA-DRB1*13:03L HLA-DRB1*04:05L HLA-DRB1*14:01L HLA-DRB1*11:04L HLA-DRB1*11:01L HLA-DRB1*12:01L HLA-DRB3*01:01L HLA-DRB1*16:01L
  source 1..13: note = Severe acute respiratory syndrome coronavirus 2
SEQLRKQIRSAAK

SEQ ID NO: 15181 - protein, 12 aa, Severe acute respiratory syndrome-related coronavirus
  REGION 1..12: note = Table B: HLA-DRB1*13:03L HLA-DRB1*04:02L HLA-DRB1*08:04L HLA-DRB1*08:01L HLA-DRB1*12:02L HLA-DRB1*14:17L
  source 1..12: note = Severe acute respiratory syndrome coronavirus 2
AIFYLITPVHVM

SEQ ID NO: 15182 - protein, 10 aa, Severe acute respiratory syndrome-related coronavirus
  REGION 1..10: note = Table B: HLA-DRB1*13:03L HLA-DQA1*03:01-B1*03:02L HLA-DQA1*02:01-B1*03:03L
  source 1..10: note = Severe acute respiratory syndrome coronavirus 2
LITPVHVMSK

SEQ ID NO: 15183 - protein, 11 aa, Severe acute respiratory syndrome-related coronavirus
  REGION 1..11: note = Table B: HLA-DRB1*13:03L HLA-DRB1*01:03L HLA-DRB1*04:02L HLA-DRB1*14:01L HLA-DRB1*08:01L HLA-DQA1*03:01-B1*03:02L HLA-DRB1*14:17L HLA-DRB1*16:01L
  source 1..11: note = Severe acute respiratory syndrome coronavirus 2
TPVHVMSKHTD

SEQ ID NO: 15184 - protein, 11 aa, Severe acute respiratory syndrome-related coronavirus
  REGION 1..11: note = Table B: HLA-DRB1*13:03L HLA-DRB1*04:04L HLA-DRB1*04:05L HLA-DRB4*03:01NL HLA-DRB1*04:10L HLA-DRB1*12:01L HLA-DRB1*14:54L HLA-DRB1*16:01L HLA-DRB1*04:08L HLA-DRB1*15:01L HLA-DRB1*15:03L
  source 1..11: note = Severe acute respiratory syndrome coronavirus 2
SEIIGYKAIDG

SEQ ID NO: 15185 - protein, 13 aa, Severe acute respiratory syndrome-related coronavirus
  REGION 1..13: note = Table B: HLA-DRB1*13:03L HLA-DRB1*04:05L HLA-DRB4*03:01NL HLA-DQA1*01-B1*05L HLA-DRB1*12:01L
  source 1..13: note = Severe acute respiratory syndrome coronavirus 2
IDGGVTRDIASTD

SEQ ID NO: 15186 - protein, 16 aa, Severe acute respiratory syndrome-related coronavirus
  REGION 1..16: note = Table B: HLA-DRB1*13:03L HLA-DRB1*03:01L HLA-DRB1*11:03L HLA-DPA1*01:03-B1*104:01L HLA-DPA1*01:02-B1*04:01L HLA-DRB1*07:01L HLA-DRB1*10:01L HLA-DRB1*08:03L
  source 1..16: note = Severe acute respiratory syndrome coronavirus 2
VTRDIASTDTCFANKH

SEQ ID NO: 15187 - protein, 13 aa, Severe acute respiratory syndrome-related coronavirus
  REGION 1..13: note = Table B: HLA-DRB1*13:03L HLA-DRB1*08:04L
  source 1..13: note = Severe acute respiratory syndrome coronavirus 2
DTCFANKHADFDT

SEQ ID NO: 15188 - protein, 13 aa, Severe acute respiratory syndrome-related coronavirus
  REGION 1..13: note = Table B: HLA-DRB1*13:03L HLA-DRB1*04:04L HLA-DRB1*12:02L HLA-DRB1*14:54L HLA-DPA1*01:02-B1*04:01L HLA-DRB1*10:01L HLA-DRB1*15:01L
  source 1..13: note = Severe acute respiratory syndrome coronavirus 2
AVITREVGFVVPG

SEQ ID NO: 15189 - protein, 15 aa, Severe acute respiratory syndrome-related coronavirus
  REGION 1..15: note = Table B: HLA-DRB1*13:03L HLA-DRB1*04:04L HLA-DRB1*08:01L HLA-DRB1*12:02L HLA-DPA1*01:02-B1*04:01L
  source 1..15: note = Severe acute respiratory syndrome coronavirus 2
VITREVGFVVPGLPG

SEQ ID NO: 15190 - protein, 10 aa, Severe acute respiratory syndrome-related coronavirus
  REGION 1..10: note = Table B: HLA-DRB1*13:03L HLA-DQA1*03:01-B1*03:02L
  source 1..10: note = Severe acute respiratory syndrome coronavirus 2
VPGLPGTILR

SEQ ID NO: 15191 - protein, 14 aa, Severe acute respiratory syndrome-related coronavirus
  REGION 1..14: note = Table B: HLA-DRB1*13:03L HLA-DRB1*01:03L HLA-DRB1*04:04L HLA-DQA1*01:02-B1*06:02L HLA-DRB1*01:02L HLA-DRB4*03:01NL HLA-DRB1*08:04L HLA-DRB1*14:01L HLA-DRB1*08:01L HLA-DRB1*12:01L HLA-DPA1*03:01-B1*105:01L HLA-DQA1*02:01-B1*03:03L
  source 1..14: note = Severe acute respiratory syndrome coronavirus 2
KPVPYCYDTNVLEG

SEQ ID NO: 15192 - protein, 11 aa, Severe acute respiratory syndrome-related coronavirus
  REGION 1..11: note = Table B: HLA-DRB1*13:03L HLA-DRB1*01:03L HLA-DQA1*01:02-B1*06:02L HLA-DRB1*08:77L HLA-DPA1*01:03-B1*03:01L HLA-DRB1*03:01L HLA-DQA1*01-B1*05L HLA-DPA1*01:03-B1*04:01L HLA-DPA1*03:01-B1*105:01L
  REGION 1..11: note = CONT. FROM ABOVE: HLA-DPA1*01:03-B1*104:01L HLA-DRB1*16:01L HLA- DQA1*02:01-B1*03:03L HLA-DRB1*15:03L
  source 1..11: note = Severe acute respiratory syndrome coronavirus 2
DTNVLEGSVAY

SEQ ID NO: 15193 - protein, 10 aa, Severe acute respiratory syndrome-related coronavirus
  REGION 1..10: note = Table B: HLA-DRB1*13:03L HLA-DQA1*03:01-B1*03:02L HLA-DQA1*02:01-B1*03:03L
  source 1..10: note = Severe acute respiratory syndrome coronavirus 2
AYESLRPDTR

SEQ ID NO: 15194 - protein, 14 aa, Severe acute respiratory syndrome-related coronavirus
  REGION 1..14: note = Table B: HLA-DRB1*13:03L HLA-DRB1*04:02L HLA-DRB1*04:05L HLA-DQA1*01:02-B1*06:02L HLA-DRB1*01:01L HLA-DRB4*03:01NL HLA-DRB1*08:04L HLA-DRB1*08:77L HLA-DPA1*03:01-B1*04:02L HLA-DRB1*11:02L HLA-DRB1*11:03L HLA-DRB1*11:04L HLA-DRB1*14:02L
  REGION 1..14: note = CONT. FROM ABOVE: HLA-DRB1*08:01L HLA-DRB1*11:01L HLA-DRB5*01:01 L HLA-DQA1*05:05-B1*03:19L HLA-DRB1*12:01L HLA-DPA1*03:01-B1*105 :01L HLA-DRB1*14:54L HLA-DRB1*14:17L HLA-DPA1*01:02-B1*04:01L HL A-DRB1*10:01L HLA-DRB1*15:03L
  source 1..14: note = Severe acute respiratory syndrome coronavirus 2
ESLRPDTRYVLMDG

SEQ ID NO: 15195 - protein, 10 aa, Severe acute respiratory syndrome-related coronavirus
  REGION 1..10: note = Table B: HLA-DRB1*13:03L HLA-DQA1*01:02-B1*06:02M HLA-DPA1*01:03-B1*04:01L HLA-DPA1*02:01-B1*13:01L HLA-DPA1*03:01-B1*105:01L HLA-DQA1*01:03-B1*06:01L HLA-DQA1*02:01-B1*03:03L HLA-DRB1*15:03L
  source 1..10: note = Severe acute respiratory syndrome coronavirus 2
DAVNLLTNMF

SEQ ID NO: 15196 - protein, 10 aa, Severe acute respiratory syndrome-related coronavirus
  REGION 1..10: note = Table B: HLA-DRB1*13:03L HLA-DQA1*01-B1*05L HLA-DQA1*03:01-B1*03:02L
  source 1..10: note = Severe acute respiratory syndrome coronavirus 2
TPLIQPIGAL

SEQ ID NO: 15197 - protein, 10 aa, Severe acute respiratory syndrome-related coronavirus
  REGION 1..10: note = Table B: HLA-DRB1*13:03L HLA-DQA1*01:02-B1*06:02L HLA-DRB1*08:77L HLA-DPA1*01:03-B1*03:01L HLA-DQA1*01-B1*05L HLA-DQA1*05:05-B1*03:19L HLA-DQA1*05:01-B1*02:01L HLA-DPA1*01:03-B1*04:01L HLA-DPA1*01:03-B1*104:01L
  REGION 1..10: note = CONT. FROM ABOVE: HLA-DRB1*16:01L HLA-DQA1*02:01-B1*03:03L
  source 1..10: note = Severe acute respiratory syndrome coronavirus 2
FSGAMDTTSY

SEQ ID NO: 15198 - protein, 15 aa, Severe acute respiratory syndrome-related coronavirus
  REGION 1..15: note = Table B: HLA-DRB1*13:03L HLA-DRB1*03:01L HLA-DPA1*01:03-B1*04:02L HLA-DPA1*01:03-B1*02:01L
  source 1..15: note = Severe acute respiratory syndrome coronavirus 2
DTTSYREAACCHLAK

SEQ ID NO: 15199 - protein, 10 aa, Severe acute respiratory syndrome-related coronavirus
  REGION 1..10: note = Table B: HLA-DRB1*13:03L HLA-DQA1*01:02-B1*06:02L HLA-DRB1*08:77L HLA-DPA1*01:03-B1*03:01L HLA-DRB1*03:01L HLA-DRB1*11:02L HLA-DQA1*01-B1*05L HLA-DQA1*05:05-B1*03:19L HLA-DQA1*05:01-B1*02:01L HLA-DRB4*01:01L
  REGION 1..10: note = CONT. FROM ABOVE: HLA-DPA1*01:03-B1*04:01L HLA-DPA1*01:03-B1*104 :01L HLA-DRB1*16:01L
  source 1..10: note = Severe acute respiratory syndrome coronavirus 2
FSNSGSDVLY

SEQ ID NO: 15200 - protein, 11 aa, Severe acute respiratory syndrome-related coronavirus
  REGION 1..11: note = Table B: HLA-DRB1*13:03L
  source 1..11: note = Severe acute respiratory syndrome coronavirus 2
YQPPQTSITSA

SEQ ID NO: 15201 - protein, 10 aa, Severe acute respiratory syndrome-related coronavirus
  REGION 1..10: note = Table B: HLA-DRB1*13:03L HLA-DQA1*01:02-B1*06:02L HLA-DRB1*08:77L HLA-DPA1*01:03-B1*03:01M HLA-DRB1*03:01L HLA-DRB1*11:02M HLA-DQA1*01-B1*05L HLA-DQA1*05:05-B1*03:19M HLA-DQA1*05:01-B1*02:01M HLA-DRB4*01:01L
  REGION 1..10: note = CONT. FROM ABOVE: HLA-DPA1*01:03-B1*04:01L HLA-DRB1*12:01L HLA-D PA1*01:03-B1*104:01M HLA-DRB1*10:01L HLA-DRB1*16:01M
  source 1..10: note = Severe acute respiratory syndrome coronavirus 2
TSEDMLNPNY

SEQ ID NO: 15202 - protein, 13 aa, Severe acute respiratory syndrome-related coronavirus
  REGION 1..13: note = Table B: HLA-DRB1*13:03L HLA-DRB1*01:03L HLA-DRB1*14:54L
  source 1..13: note = Severe acute respiratory syndrome coronavirus 2
GNVQLRVIGHSMQ

SEQ ID NO: 15203 - protein, 12 aa, Severe acute respiratory syndrome-related coronavirus
  REGION 1..12: note = Table B: HLA-DRB1*13:03L HLA-DRB1*01:03L HLA-DRB1*04:02L HLA-DRB1*04:05L HLA-DQA1*01:02-B1*06:02L HLA-DRB1*01:02L HLA-DRB1*14:01L HLA-DRB1*11:04L HLA-DRB1*08:01L HLA-DRB1*11:01L HLA-DRB1*12:01L HLA-DRB3*01:01L HLA-DQA1*03:01-B1*03:02L
  REGION 1..12: note = CONT. FROM ABOVE: HLA-DRB1*14:17L HLA-DPA1*01:02-B1*04:01L HLA-D RB1*16:01L HLA-DRB1*04:08L HLA-DQA1*02:01-B1*03:03L HLA-DRB1*15: 03L
  source 1..12: note = Severe acute respiratory syndrome coronavirus 2
TPKYKFVRIQPG

SEQ ID NO: 15204 - protein, 12 aa, Severe acute respiratory syndrome-related coronavirus
  REGION 1..12: note = Table B: HLA-DRB1*13:03L HLA-DRB1*08:04L HLA-DRB1*08:01L HLA-DRB1*04:08L
  source 1..12: note = Severe acute respiratory syndrome coronavirus 2
PNFTIKGSFLNG

SEQ ID NO: 15205 - protein, 12 aa, Severe acute respiratory syndrome-related coronavirus
  REGION 1..12: note = Table B: HLA-DRB1*13:03L HLA-DRB1*01:03L HLA-DRB1*04:05L HLA-DRB1*08:77L HLA-DPA1*01:03-B1*03:01L HLA-DPA1*03:01-B1*04:02L HLA-DRB1*14:02L HLA-DPA1*01:03-B1*04:01L HLA-DPA1*01:03-B1*04:02L
  REGION 1..12: note = CONT. FROM ABOVE: HLA-DRB1*12:01L HLA-DPA1*02:01-B1*13:01L HLA-D PA1*01:03-B1*104:01L
  source 1..12: note = Severe acute respiratory syndrome coronavirus 2
GVHAGTDLEGNF

SEQ ID NO: 15206 - protein, 10 aa, Severe acute respiratory syndrome-related coronavirus
  REGION 1..10: note = Table B: HLA-DRB1*13:03L HLA-DQA1*01:02-B1*06:02L HLA-DRB1*08:77L HLA-DPA1*01:03-B1*03:01L HLA-DRB1*03:01L HLA-DQA1*01-B1*05L HLA-DQA1*05:05-B1*03:19L HLA-DQA1*05:01-B1*02:01L HLA-DPA1*01:03-B1*104:01L
  REGION 1..10: note = CONT. FROM ABOVE: HLA-DRB1*16:01L
  source 1..10: note = Severe acute respiratory syndrome coronavirus 2
AGTDLEGNFY

SEQ ID NO: 15207 - protein, 10 aa, Severe acute respiratory syndrome-related coronavirus
  REGION 1..10: note = Table B: HLA-DRB1*13:03L HLA-DRB1*08:01L HLA-DRB1*12:01L HLA-DQA1*03:01-B1*03:02L HLA-DQA1*05:05-B1*03:01L HLA-DQA1*02:01-B1*03:03L
  source 1..10: note = Severe acute respiratory syndrome coronavirus 2
GNFYGPFVDR

SEQ ID NO: 15208 - protein, 12 aa, Severe acute respiratory syndrome-related coronavirus
  REGION 1..12: note = Table B: HLA-DRB1*13:03L HLA-DRB1*01:03L HLA-DRB1*04:02L HLA-DRB1*04:05L HLA-DRB4*03:01NL HLA-DRB1*08:01L HLA-DQA1*03:01-B1*03:02L HLA-DRB1*04:08L HLA-DQA1*02:01-B1*03:03L
  source 1..12: note = Severe acute respiratory syndrome coronavirus 2
PFVDRQTAQAAG

SEQ ID NO: 15209 - protein, 13 aa, Severe acute respiratory syndrome-related coronavirus
  REGION 1..13: note = Table B: HLA-DRB1*13:03L HLA-DRB1*08:04L HLA-DRB1*08:01L HLA-DPA1*01:03-B1*04:01L HLA-DPA1*01:03-B1*04:02L
  source 1..13: note = Severe acute respiratory syndrome coronavirus 2
LNRFTTTLNDFNL

SEQ ID NO: 15210 - protein, 10 aa, Severe acute respiratory syndrome-related coronavirus
  REGION 1..10: note = Table B: HLA-DRB1*13:03L HLA-DRB1*08:01L HLA-DRB1*12:01L HLA-DQA1*03:01-B1*03:02L HLA-DQA1*02:01-B1*03:03L
  source 1..10: note = Severe acute respiratory syndrome coronavirus 2
GVTFQSAVKR

SEQ ID NO: 15211 - protein, 13 aa, Severe acute respiratory syndrome-related coronavirus
  REGION 1..13: note = Table B: HLA-DRB1*13:03L HLA-DRB1*04:04L HLA-DRB1*01:01L HLA-DRB1*11:03L HLA-DRB1*14:02L HLA-DPA1*01:03-B1*04:02L HLA-DPA1*01:03-B1*104:01L
  source 1..13: note = Severe acute respiratory syndrome coronavirus 2
TLVYKVYYGNALD

SEQ ID NO: 15212 - protein, 11 aa, Severe acute respiratory syndrome-related coronavirus
  REGION 1..11: note = Table B: HLA-DRB1*13:03L HLA-DRB1*01:03L HLA-DRB1*04:05L HLA-DRB1*01:02L HLA-DRB4*03:01NL HLA-DRB1*14:01L HLA-DRB1*12:01L HLA-DQA1*01:03-B1*06:01L HLA-DRB1*04:08L HLA-DRB1*15:01L
  source 1..11: note = Severe acute respiratory syndrome coronavirus 2
YKVYYGNALDQ

SEQ ID NO: 15213 - protein, 11 aa, Severe acute respiratory syndrome-related coronavirus
  REGION 1..11: note = Table B: HLA-DRB1*13:03L HLA-DRB1*08:04L HLA-DRB1*14:01L HLA-DRB1*08:01L
  source 1..11: note = Severe acute respiratory syndrome coronavirus 2
DAFKLNIKLLG

SEQ ID NO: 15214 - protein, 11 aa, Severe acute respiratory syndrome-related coronavirus
  REGION 1..11: note = Table B: HLA-DRB1*13:03L HLA-DRB1*04:05L HLA-DRB4*03:01NL HLA-DRB1*04:10L HLA-DRB1*12:01L HLA-DRB1*14:54L HLA-DRB1*16:01L HLA-DQA1*01:03-B1*06:01L
  source 1..11: note = Severe acute respiratory syndrome coronavirus 2
NDILLAKDTTE

SEQ ID NO: 15215 - protein, 10 aa, Severe acute respiratory syndrome-related coronavirus
  REGION 1..10: note = Table B: HLA-DRB1*13:03L HLA-DRB4*03:01NL HLA-DRB1*12:01L HLA-DQA1*03:01-B1*03:02L HLA-DQA1*05:05-B1*03:01L HLA-DQA1*01:03-B1*06:01L HLA-DQA1*02:01-B1*03:03L
  source 1..10: note = Severe acute respiratory syndrome coronavirus 2
ANGDSEVVLK

SEQ ID NO: 15216 - protein, 13 aa, Severe acute respiratory syndrome-related coronavirus
  REGION 1..13: note = Table B: HLA-DRB1*13:03L HLA-DRB1*01:03L HLA-DRB1*04:02L HLA-DQA1*01:02-B1*06:02L HLA-DRB1*01:02L HLA-DRB1*08:04L HLA-DRB1*14:01L HLA-DRB1*11:04L HLA-DRB1*11:01L HLA-DRB1*12:01L HLA-DRB3*01:01L HLA-DRB1*16:01L HLA-DRB1*04:08L
  source 1..13: note = Severe acute respiratory syndrome coronavirus 2
VVLKKLKKSLNVA

SEQ ID NO: 15217 - protein, 15 aa, Severe acute respiratory syndrome-related coronavirus
  REGION 1..15: note = Table B: HLA-DRB1*13:03L HLA-DRB1*01:01L HLA-DRB1*03:01L HLA-DQA1*01:01-B1*05:01L HLA-DRB1*08:01L HLA-DRB1*11:01L
  source 1..15: note = Severe acute respiratory syndrome coronavirus 2
KKLKKSLNVAKSEFD

SEQ ID NO: 15218 - protein, 12 aa, Severe acute respiratory syndrome-related coronavirus
  REGION 1..12: note = Table B: HLA-DRB1*13:03L HLA-DRB4*03:01NL HLA-DRB1*08:01L HLA-DRB1*16:01L HLA-DRB1*04:08L HLA-DRB1*08:03L
  source 1..12: note = Severe acute respiratory syndrome coronavirus 2
KSLNVAKSEFDR

SEQ ID NO: 15219 - protein, 13 aa, Severe acute respiratory syndrome-related coronavirus
  REGION 1..13: note = Table B: HLA-DRB1*13:03L HLA-DRB1*01:03L HLA-DRB1*01:02L HLA-DRB1*12:01L HLA-DPA1*02:01-B1*13:01L HLA-DRB1*15:03L
  source 1..13: note = Severe acute respiratory syndrome coronavirus 2
SLNVAKSEFDRDA

SEQ ID NO: 15220 - protein, 13 aa, Severe acute respiratory syndrome-related coronavirus
  REGION 1..13: note = Table B: HLA-DRB1*13:03L HLA-DRB1*01:02L HLA-DRB4*03:01NL HLA-DRB1*14:01L HLA-DRB1*08:01L HLA-DRB1*12:01L HLA-DPA1*02:01-B1*13:01L HLA-DRB1*14:54L HLA-DRB1*15:03L
  source 1..13: note = Severe acute respiratory syndrome coronavirus 2
LNVAKSEFDRDAA

SEQ ID NO: 15221 - protein, 10 aa, Severe acute respiratory syndrome-related coronavirus
  REGION 1..10: note = Table B: HLA-DRB1*13:03L HLA-DRB1*08:01L HLA-DQA1*03:01-B1*03:02L HLA-DQA1*01:03-B1*06:01L HLA-DQA1*02:01-B1*03:03L
  source 1..10: note = Severe acute respiratory syndrome coronavirus 2
DAAMQRKLEK

SEQ ID NO: 15222 - protein, 13 aa, Severe acute respiratory syndrome-related coronavirus
  REGION 1..13: note = Table B: HLA-DRB1*13:03L HLA-DPA1*01:03-B1*02:01L HLA-DRB1*08:03L
  source 1..13: note = Severe acute respiratory syndrome coronavirus 2
QTMLFTMLRKLDN

SEQ ID NO: 15223 - protein, 13 aa, Severe acute respiratory syndrome-related coronavirus
  REGION 1..13: note = Table B: HLA-DRB1*13:03L HLA-DRB1*08:03L
  source 1..13: note = Severe acute respiratory syndrome coronavirus 2
TMLFTMLRKLDND

SEQ ID NO: 15224 - protein, 12 aa, Severe acute respiratory syndrome-related coronavirus
  REGION 1..12: note = Table B: HLA-DRB1*13:03L HLA-DRB1*08:04L HLA-DRB1*11:01L HLA-DRB1*08:03L
  source 1..12: note = Severe acute respiratory syndrome coronavirus 2
LFTMLRKLDNDA

SEQ ID NO: 15225 - protein, 12 aa, Severe acute respiratory syndrome-related coronavirus
  REGION 1..12: note = Table B: HLA-DRB1*13:03L HLA-DRB1*01:03L HLA-DRB1*04:02L HLA-DRB1*04:04L HLA-DRB1*04:05L HLA-DRB1*01:02L HLA-DRB4*03:01NL HLA-DQA1*01-B1*05L HLA-DRB1*04:10L HLA-DRB1*12:01L HLA-DRB1*14:54L HLA-DRB1*16:01L HLA-DRB1*04:08L HLA-DRB1*15:03L
  source 1..12: note = Severe acute respiratory syndrome coronavirus 2
SAVKLQNNELSP

SEQ ID NO: 15226 - protein, 16 aa, Severe acute respiratory syndrome-related coronavirus
  REGION 1..16: note = Table B: HLA-DRB1*13:03L HLA-DPA1*03:01-B1*04:02L HLA-DRB1*11:02L HLA-DRB1*11:03L HLA-DRB1*14:02L HLA-DRB4*01:01L HLA-DRB3*01:01L HLA-DPA1*01:03-B1*02:01L HLA-DPA1*01:02-B1*04:01L HLA-DRB1*07:01L HLA-DRB1*08:02L
  REGION 1..16: note = CONT. FROM ABOVE: HLA-DRB1*08:03L
  source 1..16: note = Severe acute respiratory syndrome coronavirus 2
SPVALRQMSCAAGTTQ

SEQ ID NO: 15227 - protein, 13 aa, Severe acute respiratory syndrome-related coronavirus
  REGION 1..13: note = Table B: HLA-DRB1*13:03L HLA-DRB1*04:05L HLA-DRB1*01:02L HLA-DRB1*08:04L HLA-DRB1*14:01L HLA-DRB1*11:04L HLA-DRB1*11:01L HLA-DRB1*12:01L HLA-DQA1*03:01-B1*03:02L HLA-DRB1*16:01L
  source 1..13: note = Severe acute respiratory syndrome coronavirus 2
LKWARFPKSDGTG

SEQ ID NO: 15228 - protein, 12 aa, Severe acute respiratory syndrome-related coronavirus
  REGION 1..12: note = Table B: HLA-DRB1*13:03L HLA-DRB1*01:03L HLA-DRB1*04:05L HLA-DQA1*01:02-B1*06:02L HLA-DRB1*01:02L HLA-DRB1*08:04L HLA-DPA1*03:01-B1*04:02L HLA-DRB1*14:01L HLA-DRB1*11:04L HLA-DRB1*08:01L HLA-DRB1*11:01L HLA-DPA1*01:03-B1*04:02L
  REGION 1..12: note = CONT. FROM ABOVE: HLA-DRB1*12:01L HLA-DPA1*02:01-B1*13:01L HLA-D PA1*03:01-B1*105:01L HLA-DPA1*01:02-B1*04:01L HLA-DRB1*16:01L HL A-DRB1*04:08L HLA-DRB1*08:03L HLA-DQA1*02:01-B1*03:03L HLA-DRB1* 15:03L
  source 1..12: note = Severe acute respiratory syndrome coronavirus 2
VKYLYFIKGLNN

SEQ ID NO: 15229 - protein, 10 aa, Severe acute respiratory syndrome-related coronavirus
  REGION 1..10: note = Table B: HLA-DRB1*13:03L HLA-DRB4*03:01NL HLA-DRB1*08:01L HLA-DRB1*12:01L HLA-DQA1*03:01-B1*03:02L HLA-DRB1*14:17L
  source 1..10: note = Severe acute respiratory syndrome coronavirus 2
FIKGLNNLNR

SEQ ID NO: 15230 - protein, 13 aa, Severe acute respiratory syndrome-related coronavirus
  REGION 1..13: note = Table B: HLA-DRB1*13:03L HLA-DQA1*01:02-B1*06:02L HLA-DRB1*08:04L HLA-DRB1*11:04L HLA-DRB1*08:01L HLA-DRB1*11:01L HLA-DRB1*14:54L
  source 1..13: note = Severe acute respiratory syndrome coronavirus 2
IKGLNNLNRGMVL

SEQ ID NO: 15231 - protein, 13 aa, Severe acute respiratory syndrome-related coronavirus
  REGION 1..13: note = Table B: HLA-DRB1*13:03L HLA-DRB1*04:05L HLA-DPA1*03:01-B1*04:02L HLA-DRB1*11:03L HLA-DRB1*09:01L HLA-DPA1*03:01-B1*105:01L
  source 1..13: note = Severe acute respiratory syndrome coronavirus 2
TGQAITVTPEANM

SEQ ID NO: 15232 - protein, 13 aa, Severe acute respiratory syndrome-related coronavirus
  REGION 1..13: note = Table B: HLA-DRB1*13:03L HLA-DRB1*01:03L HLA-DRB1*04:04L HLA-DRB1*01:02L HLA-DRB1*04:08L HLA-DRB1*15:03L
  source 1..13: note = Severe acute respiratory syndrome coronavirus 2
AITVTPEANMDQE

SEQ ID NO: 15233 - protein, 13 aa, Severe acute respiratory syndrome-related coronavirus
  REGION 1..13: note = Table B: HLA-DRB1*13:03L HLA-DRB1*04:04L HLA-DRB1*04:08L
  source 1..13: note = Severe acute respiratory syndrome coronavirus 2
ITVTPEANMDQES

SEQ ID NO: 15234 - protein, 11 aa, Severe acute respiratory syndrome-related coronavirus
  REGION 1..11: note = Table B: HLA-DRB1*13:03L HLA-DQA1*01:02-B1*06:02L HLA-DQA1*05:01-B1*02:01L HLA-DPA1*03:01-B1*105:01L
  source 1..11: note = Severe acute respiratory syndrome coronavirus 2
TPEANMDQESF

SEQ ID NO: 15235 - protein, 10 aa, Severe acute respiratory syndrome-related coronavirus
  REGION 1..10: note = Table B: HLA-DRB1*13:03L HLA-DQA1*01:02-B1*06:02L HLA-DRB1*14:02L HLA-DPA1*03:01-B1*105:01L HLA-DQA1*02:01-B1*03:03L HLA-DRB1*15:03L
  source 1..10: note = Severe acute respiratory syndrome coronavirus 2
MLQSADAQSF

SEQ ID NO: 15236 - protein, 10 aa, Severe acute respiratory syndrome-related coronavirus
  REGION 1..10: note = Table B: HLA-DRB1*13:03L HLA-DQA1*01:02-B1*06:02L HLA-DPA1*01:03-B1*03:01L HLA-DQA1*05:05-B1*03:19L HLA-DQA1*05:01-B1*02:01L HLA-DPA1*01:03-B1*04:01L HLA-DPA1*03:01-B1*105:01L HLA-DRB1*15:03L
  source 1..10: note = Severe acute respiratory syndrome coronavirus 2
DVVYRAFDIY

SEQ ID NO: 15237 - protein, 11 aa, Severe acute respiratory syndrome-related coronavirus
  REGION 1..11: note = Table B: HLA-DRB1*13:03L HLA-DRB1*01:03L HLA-DQA1*01:02-B1*06:02L HLA-DRB1*08:01L HLA-DRB1*16:01L HLA-DRB1*04:08L
  source 1..11: note = Severe acute respiratory syndrome coronavirus 2
IDSYFVVKRHT

SEQ ID NO: 15238 - protein, 12 aa, Severe acute respiratory syndrome-related coronavirus
  REGION 1..12: note = Table B: HLA-DRB1*13:03L HLA-DRB1*01:03L HLA-DRB1*04:02L HLA-DRB1*04:05L HLA-DQA1*01:02-B1*06:02L HLA-DRB4*03:01NL HLA-DRB1*08:04L HLA-DPA1*03:01-B1*04:02L HLA-DRB1*14:01L HLA-DRB1*08:01L HLA-DQA1*01-B1*05L HLA-DRB1*04:10L
  REGION 1..12: note = CONT. FROM ABOVE: HLA-DRB1*12:01L HLA-DPA1*03:01-B1*105:01L HLA- DQA1*03:01-B1*03:02L HLA-DRB1*14:54L HLA-DPA1*01:02-B1*04:01L HL A-DRB1*16:01L HLA-DRB1*04:08L HLA-DQA1*02:01-B1*03:03L HLA-DRB1* 15:03L
  source 1..12: note = Severe acute respiratory syndrome coronavirus 2
ETIYNLLKDCPA

SEQ ID NO: 15239 - protein, 12 aa, Severe acute respiratory syndrome-related coronavirus
  REGION 1..12: note = Table B: HLA-DRB1*13:03L HLA-DRB1*04:02L HLA-DRB1*04:05L HLA-DQA1*01:02-B1*06:02L HLA-DRB1*08:04L HLA-DRB1*14:01L HLA-DRB1*11:04L HLA-DRB1*11:01L HLA-DRB1*08:03L
  source 1..12: note = Severe acute respiratory syndrome coronavirus 2
ADLVYALRHFDE

SEQ ID NO: 15240 - protein, 12 aa, Severe acute respiratory syndrome-related coronavirus
  REGION 1..12: note = Table B: HLA-DRB1*13:03L HLA-DRB1*04:02L HLA-DRB1*04:05L HLA-DQA1*01:02-B1*06:02L HLA-DRB1*08:04L HLA-DRB1*14:01L HLA-DRB1*11:04L HLA-DRB1*11:01L HLA-DRB1*16:01L HLA-DRB1*04:08L HLA-DRB1*08:03L
  source 1..12: note = Severe acute respiratory syndrome coronavirus 2
DLVYALRHFDEG

SEQ ID NO: 15241 - protein, 14 aa, Severe acute respiratory syndrome-related coronavirus
  REGION 1..14: note = Table B: HLA-DRB1*13:03L HLA-DRB1*01:03L HLA-DRB1*01:02L HLA-DPA1*03:01-B1*04:02L HLA-DRB1*14:02L HLA-DPA1*01:03-B1*04:02L HLA-DRB1*12:01L HLA-DQA1*03:01-B1*03:02L HLA-DRB1*04:08L HLA-DRB1*08:02L
  REGION 1..14: note = CONT. FROM ABOVE: HLA-DRB1*15:03L
  source 1..14: note = Severe acute respiratory syndrome coronavirus 2
DDYFNKKDWYDFVE

SEQ ID NO: 15242 - protein, 14 aa, Severe acute respiratory syndrome-related coronavirus
  REGION 1..14: note = Table B: HLA-DRB1*13:03L HLA-DRB1*08:04L HLA-DRB1*14:01L HLA-DPA1*02:01-B1*13:01L
  source 1..14: note = Severe acute respiratory syndrome coronavirus 2
AGIVGVLTLDNQDL

SEQ ID NO: 15243 - protein, 13 aa, Severe acute respiratory syndrome-related coronavirus
  REGION 1..13: note = Table B: HLA-DRB1*13:03L
  source 1..13: note = Severe acute respiratory syndrome coronavirus 2
GVLTLDNQDLNGN

SEQ ID NO: 15244 - protein, 10 aa, Severe acute respiratory syndrome-related coronavirus
  REGION 1..10: note = Table B: HLA-DRB1*13:03L HLA-DQA1*01:02-B1*06:02L HLA-DQA1*05:05-B1*03:19L HLA-DQA1*05:01-B1*02:01L HLA-DPA1*03:01-B1*105:01L
  source 1..10: note = Severe acute respiratory syndrome coronavirus 2
DNQDLNGNWY

SEQ ID NO: 15245 - protein, 10 aa, Severe acute respiratory syndrome-related coronavirus
  REGION 1..10: note = Table B: HLA-DRB1*13:03L HLA-DQA1*01:02-B1*06:02L HLA-DPA1*01:03-B1*03:01L HLA-DRB1*14:02L HLA-DQA1*05:05-B1*03:19L HLA-DQA1*05:01-B1*02:01L HLA-DPA1*03:01-B1*105:01L HLA-DPA1*01:03-B1*104:01L
  REGION 1..10: note = CONT. FROM ABOVE: HLA-DRB1*16:01L HLA-DQA1*02:01-B1*03:03L
  source 1..10: note = Severe acute respiratory syndrome coronavirus 2
SGVPVVDSYY

SEQ ID NO: 15246 - protein, 12 aa, Severe acute respiratory syndrome-related coronavirus
  REGION 1..12: note = Table B: HLA-DRB1*13:03L HLA-DRB1*01:03L HLA-DRB1*01:02L HLA-DRB1*08:04L HLA-DRB1*11:04L HLA-DRB1*08:01L HLA-DRB1*12:01L HLA-DPA1*01:02-B1*04:01L HLA-DRB1*16:01L HLA-DRB1*04:08L HLA-DRB1*15:03L
  source 1..12: note = Severe acute respiratory syndrome coronavirus 2
MPILTLTRALTA

SEQ ID NO: 15247 - protein, 13 aa, Severe acute respiratory syndrome-related coronavirus
  REGION 1..13: note = Table B: HLA-DRB1*13:03L HLA-DRB1*01:03L HLA-DRB1*01:02L HLA-DRB1*14:01L HLA-DQA1*01:01-B1*05:01L HLA-DRB1*08:01L HLA-DRB1*12:01L HLA-DPA1*02:01-B1*13:01L HLA-DRB1*04:08L
  source 1..13: note = Severe acute respiratory syndrome coronavirus 2
TRALTAESHVDTD

SEQ ID NO: 15248 - protein, 12 aa, Severe acute respiratory syndrome-related coronavirus
  REGION 1..12: note = Table B: HLA-DRB1*13:03L HLA-DQA1*01:02-B1*06:02L HLA-DRB1*08:04L HLA-DPA1*01:03-B1*03:01L HLA-DPA1*03:01-B1*04:02L HLA-DRB1*14:02L HLA-DQA1*05:01-B1*02:01L HLA-DPA1*02:01-B1*13:01L
  REGION 1..12: note = CONT. FROM ABOVE: HLA-DPA1*03:01-B1*105:01L
  source 1..12: note = Severe acute respiratory syndrome coronavirus 2
LLKYDFTEERLK

SEQ ID NO: 15249 - protein, 10 aa, Severe acute respiratory syndrome-related coronavirus
  REGION 1..10: note = Table B: HLA-DRB1*13:03L HLA-DQA1*01:02-B1*06:02L HLA-DRB1*08:77L HLA-DPA1*01:03-B1*03:01L HLA-DRB1*03:01L HLA-DRB1*14:02L HLA-DQA1*05:05-B1*03:19L HLA-DQA1*05:01-B1*02:01L HLA-DPA1*01:03-B1*04:01L
  REGION 1..10: note = CONT. FROM ABOVE: HLA-DPA1*03:01-B1*105:01L HLA-DRB1*16:01L HLA- DQA1*02:01-B1*03:03L
  source 1..10: note = Severe acute respiratory syndrome coronavirus 2
GVPFVVSTGY

SEQ ID NO: 15250 - protein, 10 aa, Severe acute respiratory syndrome-related coronavirus
  REGION 1..10: note = Table B: HLA-DRB1*13:03L HLA-DRB1*12:01L HLA-DQA1*03:01-B1*03:02L HLA-DQA1*05:05-B1*03:01L HLA-DRB1*14:17L HLA-DQA1*01:03-B1*06:01L HLA-DQA1*02:01-B1*03:03L
  source 1..10: note = Severe acute respiratory syndrome coronavirus 2
NQDVNLHSSR

SEQ ID NO: 15251 - protein, 11 aa, Severe acute respiratory syndrome-related coronavirus
  REGION 1..11: note = Table B: HLA-DRB1*13:03L HLA-DRB1*08:01L
  source 1..11: note = Severe acute respiratory syndrome coronavirus 2
AASGNLLLDKR

SEQ ID NO: 15252 - protein, 12 aa, Severe acute respiratory syndrome-related coronavirus
  REGION 1..12: note = Table B: HLA-DRB1*13:03L HLA-DRB1*04:04L HLA-DRB1*04:05L HLA-DQA1*01:02-B1*06:02L HLA-DRB1*14:01L HLA-DQA1*01:01-B1*05:01L HLA-DRB1*08:01L HLA-DQA1*05:01-B1*02:01L HLA-DRB1*04:10L HLA-DRB1*12:01L
  REGION 1..12: note = CONT. FROM ABOVE: HLA-DRB1*14:54L HLA-DQA1*05:05-B1*03:01L HLA-D RB1*04:08L
  source 1..12: note = Severe acute respiratory syndrome coronavirus 2
TNNVAFQTVKPG

SEQ ID NO: 15253 - protein, 16 aa, Severe acute respiratory syndrome-related coronavirus
  REGION 1..16: note = Table B: HLA-DRB1*13:03L HLA-DRB1*11:04L HLA-DRB1*11:01L
  source 1..16: note = Severe acute respiratory syndrome coronavirus 2
KPGNFNKDFYDFAVSK

SEQ ID NO: 15254 - protein, 11 aa, Severe acute respiratory syndrome-related coronavirus
  REGION 1..11: note = Table B: HLA-DRB1*13:03L HLA-DRB4*03:01NL HLA-DPA1*01:03-B1*03:01L HLA-DRB1*03:01L HLA-DRB1*14:01L HLA-DRB1*11:03L HLA-DQA1*05:05-B1*03:01L HLA-DRB1*08:02L
  source 1..11: note = Severe acute respiratory syndrome coronavirus 2
DFYDFAVSKGF

SEQ ID NO: 15255 - protein, 13 aa, Severe acute respiratory syndrome-related coronavirus
  REGION 1..13: note = Table B: HLA-DRB1*13:03L HLA-DRB1*08:01L
  source 1..13: note = Severe acute respiratory syndrome coronavirus 2
SKGFFKEGSSVEL

SEQ ID NO: 15256 - protein, 12 aa, Severe acute respiratory syndrome-related coronavirus
  REGION 1..12: note = Table B: HLA-DRB1*13:03L HLA-DQA1*01:02-B1*06:02L HLA-DRB1*01:02L HLA-DRB1*08:01L HLA-DQA1*05:05-B1*03:19L HLA-DRB1*04:10L HLA-DRB1*12:01L HLA-DPA1*03:01-B1*105:01L HLA-DQA1*05:05-B1*03:01L HLA-DRB1*10:01L HLA-DRB1*04:08L
  source 1..12: note = Severe acute respiratory syndrome coronavirus 2
GFFKEGSSVELK

SEQ ID NO: 15257 - protein, 12 aa, Severe acute respiratory syndrome-related coronavirus
  REGION 1..12: note = Table B: HLA-DRB1*13:03L HLA-DRB1*01:03L HLA-DRB1*04:02L HLA-DRB1*01:02L HLA-DRB4*03:01NL HLA-DRB1*08:01L HLA-DRB1*04:10L HLA-DRB1*12:01L HLA-DRB1*14:54L HLA-DRB1*16:01L HLA-DRB1*04:08L HLA-DQA1*02:01-B1*03:03L
  source 1..12: note = Severe acute respiratory syndrome coronavirus 2
KHFFFAQDGNAA

SEQ ID NO: 15258 - protein, 10 aa, Severe acute respiratory syndrome-related coronavirus
  REGION 1..10: note = Table B: HLA-DRB1*13:03L HLA-DQA1*01:02-B1*06:02L HLA-DPA1*01:03-B1*03:01L HLA-DQA1*05:05-B1*03:19L HLA-DQA1*05:01-B1*02:01L HLA-DPA1*01:03-B1*104:01L HLA-DRB1*16:01L
  source 1..10: note = Severe acute respiratory syndrome coronavirus 2
NAAISDYDYY

SEQ ID NO: 15259 - protein, 10 aa, Severe acute respiratory syndrome-related coronavirus
  REGION 1..10: note = Table B: HLA-DRB1*13:03L HLA-DRB1*01:03L HLA-DRB1*08:01L HLA-DQA1*03:01-B1*03:02L HLA-DPA1*01:02-B1*04:01L HLA-DRB1*16:01L HLA-DQA1*02:01-B1*03:03L
  source 1..10: note = Severe acute respiratory syndrome coronavirus 2
FPFNKWGKAR

SEQ ID NO: 15260 - protein, 11 aa, Severe acute respiratory syndrome-related coronavirus
  REGION 1..11: note = Table B: HLA-DRB1*13:03L
  source 1..11: note = Severe acute respiratory syndrome coronavirus 2
IPTITQMNLKY

SEQ ID NO: 15261 - protein, 11 aa, Severe acute respiratory syndrome-related coronavirus
  REGION 1..11: note = Table B: HLA-DRB1*13:03L HLA-DRB1*01:02L HLA-DRB1*12:01L HLA-DRB1*04:08L
  source 1..11: note = Severe acute respiratory syndrome coronavirus 2
NLKYAISAKNR

SEQ ID NO: 15262 - protein, 15 aa, Severe acute respiratory syndrome-related coronavirus
  REGION 1..15: note = Table B: HLA-DRB1*13:03L HLA-DRB1*08:77L HLA-DRB1*03:01L HLA-DPA1*01:03-B1*04:01L HLA-DRB1*12:02L HLA-DRB1*14:54L HLA-DPA1*01:03-B1*02:01L
  source 1..15: note = Severe acute respiratory syndrome coronavirus 2
NSVFNICQAVTANVN

SEQ ID NO: 15263 - protein, 12 aa, Severe acute respiratory syndrome-related coronavirus
  REGION 1..12: note = Table B: HLA-DRB1*13:03L HLA-DRB1*01:03L HLA-DRB1*04:02L HLA-DRB1*04:05L HLA-DRB4*03:01NL HLA-DRB1*08:04L HLA-DRB3*02:01L HLA-DPA1*01:03-B1*03:01L HLA-DRB1*11:03L HLA-DRB1*11:04L HLA-DRB1*11:01L HLA-DRB5*01:01L HLA-DQA1*01-B1*05L
  REGION 1..12: note = CONT. FROM ABOVE: HLA-DRB1*04:10L HLA-DRB1*12:02M HLA-DRB3*01:01 L HLA-DRB1*14:54L HLA-DQA1*05:05-B1*03:01L HLA-DRB1*14:17L HLA-D RB1*04:08L
  source 1..12: note = Severe acute respiratory syndrome coronavirus 2
VNALLSTDGNKI

SEQ ID NO: 15264 - protein, 11 aa, Severe acute respiratory syndrome-related coronavirus
  REGION 1..11: note = Table B: HLA-DRB1*13:03L HLA-DRB1*01:03L HLA-DRB1*04:02L HLA-DRB1*04:05L HLA-DRB1*08:04L HLA-DPA1*01:03-B1*03:01L HLA-DRB1*11:03L HLA-DRB1*11:04L HLA-DRB5*01:01L HLA-DRB1*04:10L HLA-DRB1*12:02L HLA-DRB1*14:54L HLA-DQA1*05:05-B1*03:01L
  REGION 1..11: note = CONT. FROM ABOVE: HLA-DRB1*04:08L
  source 1..11: note = Severe acute respiratory syndrome coronavirus 2
ALLSTDGNKIA

SEQ ID NO: 15265 - protein, 13 aa, Severe acute respiratory syndrome-related coronavirus
  REGION 1..13: note = Table B: HLA-DRB1*13:03L HLA-DRB1*11:04L
  source 1..13: note = Severe acute respiratory syndrome coronavirus 2
HRLYECLYRNRDV

SEQ ID NO: 15266 - protein, 12 aa, Severe acute respiratory syndrome-related coronavirus
  REGION 1..12: note = Table B: HLA-DRB1*13:03L HLA-DQA1*01:02-B1*06:02L HLA-DRB1*08:04L HLA-DRB1*11:04L HLA-DRB1*11:01L HLA-DRB1*04:08L HLA-DRB1*08:03L
  source 1..12: note = Severe acute respiratory syndrome coronavirus 2
LYECLYRNRDVD

SEQ ID NO: 15267 - protein, 14 aa, Severe acute respiratory syndrome-related coronavirus
  REGION 1..14: note = Table B: HLA-DRB1*13:03L HLA-DRB1*01:01L HLA-DQA1*03:01-B1*03:02L
  source 1..14: note = Severe acute respiratory syndrome coronavirus 2
DTDFVNEFYAYLRK

SEQ ID NO: 15268 - protein, 14 aa, Severe acute respiratory syndrome-related coronavirus
  REGION 1..14: note = Table B: HLA-DRB1*13:03L HLA-DRB1*01:01L HLA-DRB1*11:02L HLA-DRB1*11:03L HLA-DRB1*11:04L HLA-DRB1*14:02L HLA-DPA1*01:03-B1*04:01L HLA-DRB1*09:01L HLA-DPA1*01:03-B1*04:02L HLA-DRB3*01:01L
  REGION 1..14: note = CONT. FROM ABOVE: HLA-DPA1*01:03-B1*104:01L HLA-DRB1*07:01L HLA- DRB1*10:01L HLA-DRB1*08:03L
  source 1..14: note = Severe acute respiratory syndrome coronavirus 2
KSVLYYQNNVFMSE

SEQ ID NO: 15269 - protein, 10 aa, Severe acute respiratory syndrome-related coronavirus
  REGION 1..10: note = Table B: HLA-DRB1*13:03L
  source 1..10: note = Severe acute respiratory syndrome coronavirus 2
YPDPSRILGA

SEQ ID NO: 15270 - protein, 10 aa, Severe acute respiratory syndrome-related coronavirus
  REGION 1..10: note = Table B: HLA-DRB1*13:03L HLA-DQA1*01:02-B1*06:02L HLA-DRB1*08:04L HLA-DRB1*14:01L HLA-DRB1*11:04L HLA-DRB1*08:01L HLA-DRB1*11:01L HLA-DRB1*04:08L
  source 1..10: note = Severe acute respiratory syndrome coronavirus 2
LQYIRKLHDE

SEQ ID NO: 15271 - protein, 16 aa, Severe acute respiratory syndrome-related coronavirus
  REGION 1..16: note = Table B: HLA-DRB1*13:03L HLA-DRB3*02:01L HLA-DRB1*03:01L HLA-DRB1*11:02L HLA-DRB1*09:01L HLA-DRB1*14:17L HLA-DRB1*07:01L HLA-DRB1*08:02L HLA-DRB1*08:03L HLA-DRB1*15:01L
  source 1..16: note = Severe acute respiratory syndrome coronavirus 2
HKLVLSVNPYVCNAPG

SEQ ID NO: 15272 - protein, 10 aa, Severe acute respiratory syndrome-related coronavirus
  REGION 1..10: note = Table B: HLA-DRB1*13:03L HLA-DRB1*01:03L HLA-DQA1*01:02-B1*06:02L HLA-DRB1*08:77L HLA-DPA1*01:03-B1*03:01L HLA-DRB1*03:01L HLA-DRB1*11:02L HLA-DRB1*14:02L HLA-DQA1*01-B1*05L HLA-DQA1*05:05-B1*03:19L
  REGION 1..10: note = CONT. FROM ABOVE: HLA-DQA1*05:01-B1*02:01L HLA-DRB4*01:01L HLA-D PA1*01:03-B1*04:01L HLA-DPA1*01:03-B1*04:02L HLA-DPA1*01:03-B1*1 04:01L HLA-DRB1*10:01L HLA-DRB1*16:01L HLA-DQA1*02:01-B1*03:03L HLA-DRB1*15:03L
  source 1..10: note = Severe acute respiratory syndrome coronavirus 2
TQLYLGGMSY

SEQ ID NO: 15273 - protein, 12 aa, Severe acute respiratory syndrome-related coronavirus
  REGION 1..12: note = Table B: HLA-DRB1*13:03L HLA-DRB1*01:03L HLA-DQA1*01:02-B1*06:02L HLA-DRB1*01:02L HLA-DRB1*08:04L HLA-DRB1*11:04L HLA-DRB1*08:01L HLA-DRB1*11:01L HLA-DRB1*12:01L HLA-DRB1*16:01L HLA-DRB1*04:08L
  source 1..12: note = Severe acute respiratory syndrome coronavirus 2
SYYCKSHKPPIS

SEQ ID NO: 15274 - protein, 11 aa, Severe acute respiratory syndrome-related coronavirus
  REGION 1..11: note = Table B: HLA-DRB1*13:03L HLA-DRB1*08:01L HLA-DRB1*12:01L
  source 1..11: note = Severe acute respiratory syndrome coronavirus 2
EVGKPRPPLNR

SEQ ID NO: 15275 - protein, 13 aa, Severe acute respiratory syndrome-related coronavirus
  REGION 1..13: note = Table B: HLA-DRB1*13:03L HLA-DRB1*04:02L HLA-DRB1*11:04L HLA-DRB1*08:01L HLA-DRB1*11:01L HLA-DPA1*01:03-B1*04:01L HLA-DPA1*01:03-B1*04:02L HLA-DRB3*01:01L HLA-DRB1*14:17L
  source 1..13: note = Severe acute respiratory syndrome coronavirus 2
GDYFVLTSHTVMP

SEQ ID NO: 15276 - protein, 10 aa, Severe acute respiratory syndrome-related coronavirus
  REGION 1..10: note = Table B: HLA-DRB1*13:03L HLA-DQA1*01:02-B1*06:02L HLA-DPA1*02:01-B1*13:01L HLA-DPA1*03:01-B1*105:01L HLA-DRB1*15:03L
  source 1..10: note = Severe acute respiratory syndrome coronavirus 2
YPTLNISDEF

SEQ ID NO: 15277 - protein, 11 aa, Severe acute respiratory syndrome-related coronavirus
  REGION 1..11: note = Table B: HLA-DRB1*13:03L HLA-DRB1*01:03L HLA-DRB4*03:01NL HLA-DRB1*14:01L HLA-DQA1*01:01-B1*05:01L HLA-DQA1*01-B1*05L HLA-DRB1*12:01L HLA-DRB1*14:54L HLA-DRB1*16:01L HLA-DRB1*15:03L
  source 1..11: note = Severe acute respiratory syndrome coronavirus 2
SSNVANYQKVG

SEQ ID NO: 15278 - protein, 11 aa, Severe acute respiratory syndrome-related coronavirus
  REGION 1..11: note = Table B: HLA-DRB1*13:03L HLA-DQA1*01:02-B1*06:02L HLA-DQA1*05:01-B1*02:01L HLA-DPA1*03:01-B1*105:01L HLA-DRB1*15:03L
  source 1..11: note = Severe acute respiratory syndrome coronavirus 2
LPETTADIVVF

SEQ ID NO: 15279 - protein, 14 aa, Severe acute respiratory syndrome-related coronavirus
  REGION 1..14: note = Table B: HLA-DRB1*13:03L HLA-DQA1*03:01-B1*03:02L HLA-DQA1*01:03-B1*06:01L HLA-DQA1*02:01-B1*03:03L
  source 1..14: note = Severe acute respiratory syndrome coronavirus 2
TADIVVFDEISMAT

SEQ ID NO: 15280 - protein, 11 aa, Severe acute respiratory syndrome-related coronavirus
  REGION 1..11: note = Table B: HLA-DRB1*13:03L HLA-DQA1*01:02-B1*06:02L HLA-DRB1*11:02L HLA-DRB4*01:01L HLA-DPA1*01:03-B1*04:01L HLA-DQA1*05:05-B1*03:116L HLA-DRB1*10:01L
  source 1..11: note = Severe acute respiratory syndrome coronavirus 2
VFDEISMATNY

SEQ ID NO: 15281 - protein, 14 aa, Severe acute respiratory syndrome-related coronavirus
  REGION 1..14: note = Table B: HLA-DRB1*13:03L HLA-DRB1*04:05L HLA-DQA1*01:02-B1*06:02L HLA-DRB1*08:01L HLA-DRB1*04:08L HLA-DQA1*02:01-B1*03:03L
  source 1..14: note = Severe acute respiratory syndrome coronavirus 2
APRTLLTKGTLEPE

SEQ ID NO: 15282 - protein, 10 aa, Severe acute respiratory syndrome-related coronavirus
  REGION 1..10: note = Table B: HLA-DRB1*13:03L HLA-DRB1*01:03L HLA-DRB1*11:04L HLA-DRB1*08:01L HLA-DRB3*01:01L HLA-DQA1*03:01-B1*03:02L HLA-DRB1*14:17L HLA-DRB1*16:01L HLA-DRB1*04:08L
  source 1..10: note = Severe acute respiratory syndrome coronavirus 2
VYDNKLKAHK

SEQ ID NO: 15283 - protein, 13 aa, Severe acute respiratory syndrome-related coronavirus
  REGION 1..13: note = Table B: HLA-DRB1*13:03L HLA-DRB4*03:01NL HLA-DRB1*08:01L HLA-DRB1*14:54L HLA-DRB1*08:03L
  source 1..13: note = Severe acute respiratory syndrome coronavirus 2
AVFISPYNSQNAV

SEQ ID NO: 15284 - protein, 10 aa, Severe acute respiratory syndrome-related coronavirus
  REGION 1..10: note = Table B: HLA-DRB1*13:03L HLA-DQA1*01-B1*05L
  source 1..10: note = Severe acute respiratory syndrome coronavirus 2
SPYNSQNAVA

SEQ ID NO: 15285 - protein, 10 aa, Severe acute respiratory syndrome-related coronavirus
  REGION 1..10: note = Table B: HLA-DRB1*13:03L HLA-DQA1*01:02-B1*06:02L HLA-DPA1*01:03-B1*03:01L HLA-DQA1*05:05-B1*03:19L HLA-DQA1*05:01-B1*02:01L HLA-DPA1*03:01-B1*105:01L HLA-DPA1*01:03-B1*104:01L HLA-DRB1*16:01L
  source 1..10: note = Severe acute respiratory syndrome coronavirus 2
DSSQGSEYDY

SEQ ID NO: 15286 - protein, 13 aa, Severe acute respiratory syndrome-related coronavirus
  REGION 1..13: note = Table B: HLA-DRB1*13:03L HLA-DRB1*04:05L HLA-DQA1*01:02-B1*06:02L HLA-DRB1*01:02L HLA-DRB1*08:04L HLA-DRB1*12:01L HLA-DRB1*16:01L HLA-DRB1*04:08L HLA-DRB1*15:03L
  source 1..13: note = Severe acute respiratory syndrome coronavirus 2
VTGLFKDCSKVIT

SEQ ID NO: 15287 - protein, 12 aa, Severe acute respiratory syndrome-related coronavirus
  REGION 1..12: note = Table B: HLA-DRB1*13:03L HLA-DRB1*01:03L HLA-DRB1*04:05L HLA-DQA1*01:02-B1*06:02L HLA-DRB1*01:02L HLA-DRB1*08:04L HLA-DRB1*14:01L HLA-DRB1*11:04L HLA-DRB1*08:01L HLA-DRB1*11:01L HLA-DRB1*16:01L HLA-DRB1*04:08L HLA-DRB1*08:03L
  source 1..12: note = Severe acute respiratory syndrome coronavirus 2
GLFKDCSKVITG

SEQ ID NO: 15288 - protein, 17 aa, Severe acute respiratory syndrome-related coronavirus
  REGION 1..17: note = Table B: HLA-DRB1*13:03L HLA-DPA1*01:03-B1*03:01L HLA-DPA1*03:01-B1*04:02L HLA-DRB1*11:03L HLA-DRB1*14:02L HLA-DPA1*01:03-B1*04:02L HLA-DPA1*01:03-B1*02:01L HLA-DQA1*05:05-B1*03:01L HLA-DQA1*01:03-B1*06:01L
  REGION 1..17: note = CONT. FROM ABOVE: HLA-DRB1*08:02L
  source 1..17: note = Severe acute respiratory syndrome coronavirus 2
IPKDMTYRRLISMMGFK

SEQ ID NO: 15289 - protein, 11 aa, Severe acute respiratory syndrome-related coronavirus
  REGION 1..11: note = Table B: HLA-DRB1*13:03L
  source 1..11: note = Severe acute respiratory syndrome coronavirus 2
GVNLVAVPTGY

SEQ ID NO: 15290 - protein, 15 aa, Severe acute respiratory syndrome-related coronavirus
  REGION 1..15: note = Table B: HLA-DRB1*13:03L HLA-DRB1*03:01L HLA-DRB1*11:04L HLA-DRB1*11:01L HLA-DPA1*01:03-B1*04:02L HLA-DPA1*01:03-B1*02:01L HLA-DQA1*05:05-B1*03:01L
  source 1..15: note = Severe acute respiratory syndrome coronavirus 2
IVQMLSDTLKNLSDR

SEQ ID NO: 15291 - protein, 14 aa, Severe acute respiratory syndrome-related coronavirus
  REGION 1..14: note = Table B: HLA-DRB1*13:03L HLA-DRB1*04:02L HLA-DRB1*11:02L HLA-DRB1*11:03L HLA-DRB1*11:04L HLA-DRB1*11:01L HLA-DRB4*01:01L HLA-DRB3*01:01L HLA-DRB1*07:01L HLA-DRB1*10:01L HLA-DRB1*08:02L HLA-DRB1*08:03L
  source 1..14: note = Severe acute respiratory syndrome coronavirus 2
SDRVVFVLWAHGFE

SEQ ID NO: 15292 - protein, 13 aa, Severe acute respiratory syndrome-related coronavirus
  REGION 1..13: note = Table B: HLA-DRB1*13:03L HLA-DRB1*01:03L HLA-DRB1*04:05L HLA-DRB1*01:02L HLA-DRB1*08:04L
  source 1..13: note = Severe acute respiratory syndrome coronavirus 2
LTSMKYFVKIGPE

SEQ ID NO: 15293 - protein, 10 aa, Severe acute respiratory syndrome-related coronavirus
  REGION 1..10: note = Table B: HLA-DRB1*13:03L HLA-DRB1*08:01L HLA-DQA1*03:01-B1*03:02L HLA-DQA1*02:01-B1*03:03L
  source 1..10: note = Severe acute respiratory syndrome coronavirus 2
KYFVKIGPER

SEQ ID NO: 15294 - protein, 14 aa, Severe acute respiratory syndrome-related coronavirus
  REGION 1..14: note = Table B: HLA-DRB1*13:03L HLA-DRB1*04:04L HLA-DRB1*11:03L HLA-DRB1*14:02L HLA-DRB1*09:01L HLA-DRB3*01:01L HLA-DPA1*01:03-B1*104:01L HLA-DRB1*07:01L HLA-DRB1*08:03L
  source 1..14: note = Severe acute respiratory syndrome coronavirus 2
VKRVDWTIEYPIIG

SEQ ID NO: 15295 - protein, 14 aa, Severe acute respiratory syndrome-related coronavirus
  REGION 1..14: note = Table B: HLA-DRB1*13:03L HLA-DRB1*04:04L HLA-DPA1*01:03-B1*03:01L HLA-DPA1*03:01-B1*04:02L HLA-DRB1*11:02L HLA-DRB1*14:02L HLA-DRB1*13:01L HLA-DPA1*02:01-B1*13:01L HLA-DPA1*03:01-B1*105:01L
  REGION 1..14: note = CONT. FROM ABOVE: HLA-DQA1*03:01-B1*03:02L HLA-DRB1*07:01L
  source 1..14: note = Severe acute respiratory syndrome coronavirus 2
GDELKINAACRKVQ

SEQ ID NO: 15296 - protein, 14 aa, Severe acute respiratory syndrome-related coronavirus
  REGION 1..14: note = Table B: HLA-DRB1*13:03L HLA-DRB1*04:04L HLA-DPA1*01:03-B1*03:01L HLA-DRB1*14:01L HLA-DRB1*11:02L HLA-DRB1*11:03L HLA-DRB1*11:01L HLA-DRB1*09:01L HLA-DPA1*01:03-B1*04:02L HLA-DRB3*01:01L HLA-DRB1*14:17L
  REGION 1..14: note = CONT. FROM ABOVE: HLA-DRB1*08:03L
  source 1..14: note = Severe acute respiratory syndrome coronavirus 2
DVEWKFYDAQPCSD

SEQ ID NO: 15297 - protein, 17 aa, Severe acute respiratory syndrome-related coronavirus
  REGION 1..17: note = Table B: HLA-DRB1*13:03L HLA-DRB1*09:01L
  source 1..17: note = Severe acute respiratory syndrome coronavirus 2
SDKAYKIEELFYSYATH

SEQ ID NO: 15298 - protein, 12 aa, Severe acute respiratory syndrome-related coronavirus
  REGION 1..12: note = Table B: HLA-DRB1*13:03L HLA-DRB1*04:02L HLA-DRB1*04:05L HLA-DQA1*01:02-B1*06:02L HLA-DRB1*14:01L HLA-DRB1*08:01L HLA-DRB1*12:01L HLA-DQA1*03:01-B1*03:02L HLA-DRB1*14:54L HLA-DRB1*04:08L HLA-DQA1*02:01-B1*03:03L
  source 1..12: note = Severe acute respiratory syndrome coronavirus 2
GGSLYVNKHAFH

SEQ ID NO: 15299 - protein, 10 aa, Severe acute respiratory syndrome-related coronavirus
  REGION 1..10: note = Table B: HLA-DRB1*13:03L HLA-DRB1*08:01L HLA-DQA1*03:01-B1*03:02L HLA-DQA1*02:01-B1*03:03L
  source 1..10: note = Severe acute respiratory syndrome coronavirus 2
HAFHTPAFDK

SEQ ID NO: 15300 - protein, 14 aa, Severe acute respiratory syndrome-related coronavirus
  REGION 1..14: note = Table B: HLA-DRB1*13:03L HLA-DRB1*08:04L HLA-DRB1*08:77L HLA-DRB3*02:01L HLA-DRB1*03:01L HLA-DRB1*11:02L HLA-DRB1*11:04L HLA-DRB1*08:01L HLA-DRB1*09:01L HLA-DPA1*01:03-B1*02:01L HLA-DPA1*01:03-B1*104:01L HLA-DRB1*08:03L HLA-DRB1*15:01L
  source 1..14: note = Severe acute respiratory syndrome coronavirus 2
DIDYVPLKSATCIT

SEQ ID NO: 15301 - protein, 14 aa, Severe acute respiratory syndrome-related coronavirus
  REGION 1..14: note = Table B: HLA-DRB1*13:03L HLA-DRB1*03:01L HLA-DRB1*13:01L HLA-DPA1*02:01-B1*13:01L HLA-DRB1*15:01L
  source 1..14: note = Severe acute respiratory syndrome coronavirus 2
IDYVPLKSATCITR

SEQ ID NO: 15302 - protein, 12 aa, Severe acute respiratory syndrome-related coronavirus
  REGION 1..12: note = Table B: HLA-DRB1*13:03L HLA-DRB1*04:04L HLA-DRB1*01:02L HLA-DRB1*08:04L HLA-DRB3*02:01L HLA-DRB1*14:01L HLA-DRB1*08:01L HLA-DPA1*02:01-B1*13:01L HLA-DPA1*03:01-B1*105:01L HLA-DRB1*14:54L HLA-DQA1*05:05-B1*03:01L
  REGION 1..12: note = CONT. FROM ABOVE: HLA-DQA1*01:03-B1*06:01L HLA-DRB1*04:08L HLA-D RB1*08:03L
  source 1..12: note = Severe acute respiratory syndrome coronavirus 2
ANEYRLYLDAYN

SEQ ID NO: 15303 - protein, 13 aa, Severe acute respiratory syndrome-related coronavirus
  REGION 1..13: note = Table B: HLA-DRB1*13:03L HLA-DRB1*11:04L HLA-DRB1*08:03L
  source 1..13: note = Severe acute respiratory syndrome coronavirus 2
YNLWNTFTRLQSL

SEQ ID NO: 15304 - protein, 11 aa, Severe acute respiratory syndrome-related coronavirus
  REGION 1..11: note = Table B: HLA-DRB1*13:03L HLA-DRB1*01:03L HLA-DPA1*03:01-B1*04:02L HLA-DRB1*14:01L HLA-DRB1*14:02L HLA-DQA1*05:05-B1*03:19L HLA-DRB1*12:01L HLA-DPA1*03:01-B1*105:01L HLA-DRB1*16:01L HLA-DRB1*15:03L
  source 1..11: note = Severe acute respiratory syndrome coronavirus 2
VAFNVVNKGHF

SEQ ID NO: 15305 - protein, 10 aa, Severe acute respiratory syndrome-related coronavirus
  REGION 1..10: note = Table B: HLA-DRB1*13:03L HLA-DRB1*04:02L HLA-DQA1*01:02-B1*06:02L HLA-DRB1*08:04L HLA-DRB1*14:01L HLA-DRB1*08:01L HLA-DRB1*14:54L
  source 1..10: note = Severe acute respiratory syndrome coronavirus 2
FNVVNKGHFD

SEQ ID NO: 15306 - protein, 11 aa, Severe acute respiratory syndrome-related coronavirus
  REGION 1..11: note = Table B: HLA-DRB1*13:03L HLA-DRB1*04:05L HLA-DRB1*15:03L
  source 1..11: note = Severe acute respiratory syndrome coronavirus 2
TVYTKVDGVDV

SEQ ID NO: 15307 - protein, 10 aa, Severe acute respiratory syndrome-related coronavirus
  REGION 1..10: note = Table B: HLA-DRB1*13:03L HLA-DQA1*01:02-B1*06:02M HLA-DPA1*02:01-B1*13:01L HLA-DPA1*03:01-B1*105:01M HLA-DQA1*01:03-B1*06:01L HLA-DRB1*15:03L
  source 1..10: note = Severe acute respiratory syndrome coronavirus 2
LPVNVAFELW

SEQ ID NO: 15308 - protein, 10 aa, Severe acute respiratory syndrome-related coronavirus
  REGION 1..10: note = Table B: HLA-DRB1*13:03L HLA-DQA1*01:02-B1*06:02L HLA-DRB1*08:77L HLA-DPA1*01:03-B1*03:01L HLA-DQA1*05:05-B1*03:19L HLA-DQA1*05:01-B1*02:01L HLA-DRB4*01:01L HLA-DPA1*01:03-B1*04:01L
  REGION 1..10: note = CONT. FROM ABOVE: HLA-DPA1*03:01-B1*105:01L HLA-DPA1*01:03-B1*10 4:01L HLA-DRB1*16:01L HLA-DQA1*02:01-B1*03:03L
  source 1..10: note = Severe acute respiratory syndrome coronavirus 2
IAANTVIWDY

SEQ ID NO: 15309 - protein, 10 aa, Severe acute respiratory syndrome-related coronavirus
  REGION 1..10: note = Table B: HLA-DRB1*13:03L HLA-DRB1*08:01L HLA-DQA1*03:01-B1*03:02L
  source 1..10: note = Severe acute respiratory syndrome coronavirus 2
WDYKRDAPAH

SEQ ID NO: 15310 - protein, 12 aa, Severe acute respiratory syndrome-related coronavirus
  REGION 1..12: note = Table B: HLA-DRB1*13:03L HLA-DRB1*01:03L HLA-DRB1*04:04L HLA-DRB1*04:05L HLA-DQA1*01:02-B1*06:02L HLA-DRB1*01:02L HLA-DRB4*03:01NL HLA-DRB1*14:01L HLA-DRB1*08:01L HLA-DRB1*04:10L HLA-DRB1*12:01L HLA-DRB1*14:54L HLA-DRB1*16:01L
  REGION 1..12: note = CONT. FROM ABOVE: HLA-DQA1*01:03-B1*06:01L HLA-DRB1*04:08L HLA-D QA1*02:01-B1*03:03L HLA-DRB1*15:03L
  source 1..12: note = Severe acute respiratory syndrome coronavirus 2
GQVDLFRNARNG

SEQ ID NO: 15311 - protein, 10 aa, Severe acute respiratory syndrome-related coronavirus
  REGION 1..10: note = Table B: HLA-DRB1*13:03L
  source 1..10: note = Severe acute respiratory syndrome coronavirus 2
QPSVGPKQAS

SEQ ID NO: 15312 - protein, 11 aa, Severe acute respiratory syndrome-related coronavirus
  REGION 1..11: note = Table B: HLA-DRB1*13:03L HLA-DRB1*01:03L HLA-DRB1*04:02L HLA-DRB1*04:05L HLA-DQA1*01:02-B1*06:02L HLA-DRB1*08:04L HLA-DRB1*14:01L HLA-DRB1*11:04L HLA-DRB1*11:01L HLA-DQA1*03:01-B1*03:02L HLA-DRB1*16:01L HLA-DRB1*04:08L
  REGION 1..11: note = CONT. FROM ABOVE: HLA-DRB1*08:03L HLA-DQA1*02:01-B1*03:03L
  source 1..11: note = Severe acute respiratory syndrome coronavirus 2
TQFNYYKKVDG

SEQ ID NO: 15313 - protein, 10 aa, Severe acute respiratory syndrome-related coronavirus
  REGION 1..10: note = Table B: HLA-DRB1*13:03L HLA-DRB1*01:03L HLA-DRB1*08:01L HLA-DQA1*01-B1*05L HLA-DQA1*03:01-B1*03:02L HLA-DRB1*16:01L HLA-DRB1*04:08L HLA-DQA1*02:01-B1*03:03L
  source 1..10: note = Severe acute respiratory syndrome coronavirus 2
YYKKVDGVVQ

SEQ ID NO: 15314 - protein, 10 aa, Severe acute respiratory syndrome-related coronavirus
  REGION 1..10: note = Table B: HLA-DRB1*13:03L HLA-DQA1*01:02-B1*06:02L HLA-DPA1*03:01-B1*105:01L
  source 1..10: note = Severe acute respiratory syndrome coronavirus 2
KPRSQMEIDF

SEQ ID NO: 15315 - protein, 11 aa, Severe acute respiratory syndrome-related coronavirus
  REGION 1..11: note = Table B: HLA-DRB1*13:03L HLA-DRB1*08:04L
  source 1..11: note = Severe acute respiratory syndrome coronavirus 2
DEFIERYKLEG

SEQ ID NO: 15316 - protein, 12 aa, Severe acute respiratory syndrome-related coronavirus
  REGION 1..12: note = Table B: HLA-DRB1*13:03L HLA-DRB1*04:05L HLA-DRB1*01:02L HLA-DRB4*03:01NL HLA-DRB1*08:04L HLA-DPA1*01:03-B1*03:01L HLA-DRB1*14:01L HLA-DRB1*08:01L HLA-DRB1*04:10L HLA-DRB1*12:01L HLA-DPA1*02:01-B1*13:01L HLA-DRB1*14:54L
  REGION 1..12: note = CONT. FROM ABOVE: HLA-DPA1*01:03-B1*02:01L HLA-DQA1*05:05-B1*03: 01L
  source 1..12: note = Severe acute respiratory syndrome coronavirus 2
EHIVYGDFSHSQ

SEQ ID NO: 15317 - protein, 11 aa, Severe acute respiratory syndrome-related coronavirus
  REGION 1..11: note = Table B: HLA-DRB1*13:03L HLA-DRB1*08:77L HLA-DRB3*02:01L HLA-DPA1*01:03-B1*03:01L HLA-DRB1*14:01L HLA-DRB1*08:01L HLA-DRB1*09:01L HLA-DRB1*12:01L HLA-DPA1*01:03-B1*104:01L HLA-DRB1*10:01L HLA-DRB1*08:03L
  source 1..11: note = Severe acute respiratory syndrome coronavirus 2
IVYGDFSHSQL

SEQ ID NO: 15318 - protein, 10 aa, Severe acute respiratory syndrome-related coronavirus
  REGION 1..10: note = Table B: HLA-DRB1*13:03L HLA-DQA1*01:02-B1*06:02L HLA-DQA1*05:05-B1*03:19L HLA-DQA1*05:01-B1*02:01L HLA-DPA1*03:01-B1*105:01L
  source 1..10: note = Severe acute respiratory syndrome coronavirus 2
QPGVAMPNLY

SEQ ID NO: 15319 - protein, 12 aa, Severe acute respiratory syndrome-related coronavirus
  REGION 1..12: note = Table B: HLA-DRB1*13:03L HLA-DRB1*08:04L HLA-DRB1*11:03L HLA-DRB1*11:04L HLA-DRB1*11:01L HLA-DRB1*12:02L HLA-DPA1*01:03-B1*02:01L HLA-DRB1*07:01L
  source 1..12: note = Severe acute respiratory syndrome coronavirus 2
GIMMNVAKYTQL

SEQ ID NO: 15320 - protein, 11 aa, Severe acute respiratory syndrome-related coronavirus
  REGION 1..11: note = Table B: HLA-DRB1*13:03L HLA-DRB1*01:03L HLA-DRB1*08:01L HLA-DRB1*16:01L
  source 1..11: note = Severe acute respiratory syndrome coronavirus 2
RVIHFGAGSDK

SEQ ID NO: 15321 - protein, 12 aa, Severe acute respiratory syndrome-related coronavirus
  REGION 1..12: note = Table B: HLA-DRB1*13:03L HLA-DRB1*04:02L HLA-DRB1*04:05L HLA-DRB1*04:10L HLA-DRB1*12:01L HLA-DRB1*16:01L HLA-DRB1*04:08L
  source 1..12: note = Severe acute respiratory syndrome coronavirus 2
GTLLVDSDLNDF

SEQ ID NO: 15322 - protein, 12 aa, Severe acute respiratory syndrome-related coronavirus
  REGION 1..12: note = Table B: HLA-DRB1*13:03L HLA-DRB1*01:03L HLA-DRB1*04:04L HLA-DQA1*01:02-B1*06:02L HLA-DRB1*01:02L HLA-DPA1*03:01-B1*04:02L HLA-DRB1*12:01L HLA-DPA1*02:01-B1*13:01L HLA-DPA1*03:01-B1*105:01L
  REGION 1..12: note = CONT. FROM ABOVE: HLA-DQA1*01:03-B1*06:01L HLA-DRB1*15:03L
  source 1..12: note = Severe acute respiratory syndrome coronavirus 2
DLIISDMYDPKT

SEQ ID NO: 15323 - protein, 11 aa, Severe acute respiratory syndrome-related coronavirus
  REGION 1..11: note = Table B: HLA-DRB1*13:03L HLA-DRB1*01:03L HLA-DRB1*04:04L HLA-DRB1*01:02L HLA-DRB4*03:01NL HLA-DRB1*04:10L HLA-DRB1*12:01L HLA-DRB1*14:54L HLA-DRB1*04:08L HLA-DQA1*02:01-B1*03:03L
  source 1..11: note = Severe acute respiratory syndrome coronavirus 2
IISDMYDPKTK

SEQ ID NO: 15324 - protein, 10 aa, Severe acute respiratory syndrome-related coronavirus
  REGION 1..10: note = Table B: HLA-DRB1*13:03L HLA-DRB1*08:01L HLA-DQA1*03:01-B1*03:02L
  source 1..10: note = Severe acute respiratory syndrome coronavirus 2
YDPKTKNVTK

SEQ ID NO: 15325 - protein, 13 aa, Severe acute respiratory syndrome-related coronavirus
  REGION 1..13: note = Table B: HLA-DRB1*13:03L HLA-DRB1*04:05L HLA-DQA1*01:02-B1*06:02L HLA-DRB1*08:01L HLA-DQA1*02:01-B1*03:03L
  source 1..13: note = Severe acute respiratory syndrome coronavirus 2
DPKTKNVTKENDS

SEQ ID NO: 15326 - protein, 13 aa, Severe acute respiratory syndrome-related coronavirus
  REGION 1..13: note = Table B: HLA-DRB1*13:03L HLA-DRB1*01:03L HLA-DRB1*04:04L HLA-DRB1*01:02L HLA-DRB4*03:01NL HLA-DRB1*08:01L HLA-DQA1*01-B1*05L HLA-DRB1*12:01L HLA-DRB1*14:54L HLA-DRB1*16:01L HLA-DRB1*04:08L
  source 1..13: note = Severe acute respiratory syndrome coronavirus 2
TKNVTKENDSKEG

SEQ ID NO: 15327 - protein, 15 aa, Severe acute respiratory syndrome-related coronavirus
  REGION 1..15: note = Table B: HLA-DRB1*13:03L HLA-DPA1*01:03-B1*104:01L HLA-DPA1*01:02-B1*04:01L
  source 1..15: note = Severe acute respiratory syndrome coronavirus 2
KLALGGSVAIKITEH

SEQ ID NO: 15328 - protein, 12 aa, Severe acute respiratory syndrome-related coronavirus
  REGION 1..12: note = Table B: HLA-DRB1*13:03L HLA-DRB1*01:03L HLA-DRB1*04:05L HLA-DRB1*01:02L HLA-DRB4*03:01NL HLA-DPA1*01:03-B1*03:01L HLA-DRB1*14:01L HLA-DQA1*01:01-B1*05:01L HLA-DRB1*08:01L HLA-DQA1*05:05-B1*03:19L HLA-DQA1*05:01-B1*02:01L
  REGION 1..12: note = CONT. FROM ABOVE: HLA-DRB1*04:10L HLA-DRB1*12:01L HLA-DPA1*03:01 -B1*105:01L HLA-DRB1*14:54L HLA-DRB1*16:01L HLA-DRB1*04:08L
  source 1..12: note = Severe acute respiratory syndrome coronavirus 2
GGSVAIKITEHS

SEQ ID NO: 15329 - protein, 11 aa, Severe acute respiratory syndrome-related coronavirus
  REGION 1..11: note = Table B: HLA-DRB1*13:03L HLA-DRB1*04:02L HLA-DRB4*03:01NL HLA-DRB1*16:01L
  source 1..11: note = Severe acute respiratory syndrome coronavirus 2
AFVTNVNASSS

SEQ ID NO: 15330 - protein, 16 aa, Severe acute respiratory syndrome-related coronavirus
  REGION 1..16: note = Table B: HLA-DRB1*13:03L HLA-DRB1*14:02L HLA-DPA1*02:01-B1*13:01L HLA-DRB1*07:01L HLA-DRB1*08:02L HLA-DRB1*08:03L
  source 1..16: note = Severe acute respiratory syndrome coronavirus 2
SSEAFLIGCNYLGKPR

SEQ ID NO: 15331 - protein, 11 aa, Severe acute respiratory syndrome-related coronavirus
  REGION 1..11: note = Table B: HLA-DRB1*13:03L HLA-DRB1*01:03L HLA-DQA1*01:02-B1*06:02L HLA-DRB1*08:77L HLA-DPA1*03:01-B1*04:02L HLA-DRB1*11:02L HLA-DRB1*14:02L HLA-DRB4*01:01L HLA-DPA1*01:03-B1*04:01L
  REGION 1..11: note = CONT. FROM ABOVE: HLA-DQA1*05:05-B1*03:116L HLA-DPA1*01:03-B1*04 :02L HLA-DRB1*12:01L HLA-DRB1*10:01L HLA-DRB1*15:03L
  source 1..11: note = Severe acute respiratory syndrome coronavirus 2
QIDGYVMHANY

SEQ ID NO: 15332 - protein, 14 aa, Severe acute respiratory syndrome-related coronavirus
  REGION 1..14: note = Table B: HLA-DRB1*13:03L HLA-DRB1*04:02L HLA-DRB1*11:03L HLA-DRB1*11:04L HLA-DRB1*08:01L HLA-DRB1*11:01L HLA-DRB3*01:01L
  source 1..14: note = Severe acute respiratory syndrome coronavirus 2
IDGYVMHANYIFWR

SEQ ID NO: 15333 - protein, 10 aa, Severe acute respiratory syndrome-related coronavirus
  REGION 1..10: note = Table B: HLA-DRB1*13:03L HLA-DRB1*04:05L HLA-DQA1*01:02-B1*06:02L HLA-DPA1*02:01-B1*13:01M HLA-DPA1*03:01-B1*105:01L HLA-DQA1*01:03-B1*06:01L HLA-DRB1*15:03L
  source 1..10: note = Severe acute respiratory syndrome coronavirus 2
LPFFSNVTWF

SEQ ID NO: 15334 - protein, 13 aa, Severe acute respiratory syndrome-related coronavirus
  REGION 1..13: note = Table B: HLA-DRB1*13:03L HLA-DRB1*04:04L HLA-DRB1*01:01L HLA-DRB3*02:01L HLA-DPA1*03:01-B1*04:02L HLA-DRB1*11:03L HLA-DRB3*01:01L HLA-DQA1*03:01-B1*03:02L HLA-DQA1*05:05-B1*03:01L HLA-DRB1*07:01L
  source 1..13: note = Severe acute respiratory syndrome coronavirus 2
SNVTWFHAIHVSG

SEQ ID NO: 15335 - protein, 11 aa, Severe acute respiratory syndrome-related coronavirus
  REGION 1..11: note = Table B: HLA-DRB1*13:03L HLA-DRB1*12:01L HLA-DRB1*16:01L HLA-DQA1*02:01-B1*03:03L
  source 1..11: note = Severe acute respiratory syndrome coronavirus 2
AIHVSGTNGTK

SEQ ID NO: 15336 - protein, 11 aa, Severe acute respiratory syndrome-related coronavirus
  REGION 1..11: note = Table B: HLA-DRB1*13:03L HLA-DRB1*01:03L HLA-DRB1*04:02L HLA-DRB1*04:05L HLA-DQA1*01:02-B1*06:02L HLA-DRB4*03:01NL HLA-DPA1*01:03-B1*03:01L HLA-DRB1*04:10L HLA-DRB1*12:01L HLA-DPA1*03:01-B1*105:01L HLA-DRB1*14:54L HLA-DRB1*14:17L
  REGION 1..11: note = CONT. FROM ABOVE: HLA-DRB1*16:01L
  source 1..11: note = Severe acute respiratory syndrome coronavirus 2
FDNPVLPFNDG

SEQ ID NO: 15337 - protein, 13 aa, Severe acute respiratory syndrome-related coronavirus
  REGION 1..13: note = Table B: HLA-DRB1*13:03L HLA-DRB1*11:04L HLA-DRB3*01:01L
  source 1..13: note = Severe acute respiratory syndrome coronavirus 2
GVYYHKNNKSWME

SEQ ID NO: 15338 - protein, 12 aa, Severe acute respiratory syndrome-related coronavirus
  REGION 1..12: note = Table B: HLA-DRB1*13:03L HLA-DRB1*01:03L HLA-DRB1*04:05L HLA-DQA1*01:02-B1*06:02L HLA-DRB1*01:02L HLA-DRB1*08:04L HLA-DRB1*14:01L HLA-DRB1*08:01L HLA-DRB1*11:01L HLA-DRB1*12:01L HLA-DQA1*03:01-B1*03:02L HLA-DPA1*01:02-B1*04:01L
  REGION 1..12: note = CONT. FROM ABOVE: HLA-DRB1*16:01L HLA-DRB1*04:08L HLA-DQA1*02:01 -B1*03:03L HLA-DRB1*15:03L
  source 1..12: note = Severe acute respiratory syndrome coronavirus 2
DGYFKIYSKHTP

SEQ ID NO: 15339 - protein, 12 aa, Severe acute respiratory syndrome-related coronavirus
  REGION 1..12: note = Table B: HLA-DRB1*13:03L HLA-DRB1*01:03L HLA-DRB1*01:02L HLA-DRB1*14:01L HLA-DRB1*08:01L HLA-DRB1*11:01L HLA-DPA1*01:02-B1*04:01L HLA-DRB1*16:01L HLA-DRB1*04:08L
  source 1..12: note = Severe acute respiratory syndrome coronavirus 2
GYFKIYSKHTPI

SEQ ID NO: 15340 - protein, 11 aa, Severe acute respiratory syndrome-related coronavirus
  REGION 1..11: note = Table B: HLA-DRB1*13:03L HLA-DRB1*01:03L HLA-DRB1*04:04L HLA-DRB1*04:05L HLA-DRB4*03:01NL HLA-DRB1*14:01L HLA-DRB1*11:04L HLA-DQA1*01-B1*05L HLA-DQA1*05:01-B1*02:01L HLA-DRB1*04:10L HLA-DRB1*12:01L HLA-DQA1*03:01-B1*03:02L HLA-DRB1*14:54L
  REGION 1..11: note = CONT. FROM ABOVE: HLA-DRB1*16:01L HLA-DRB1*04:08L HLA-DRB1*08:03 L HLA-DQA1*02:01-B1*03:03L
  source 1..11: note = Severe acute respiratory syndrome coronavirus 2
TPINLVRDLPQ

SEQ ID NO: 15341 - protein, 14 aa, Severe acute respiratory syndrome-related coronavirus
  REGION 1..14: note = Table B: HLA-DRB1*13:03L HLA-DRB1*04:05L HLA-DRB1*11:02L HLA-DRB1*11:03L HLA-DRB1*11:01L HLA-DRB3*01:01L HLA-DRB1*14:54L
  source 1..14: note = Severe acute respiratory syndrome coronavirus 2
QTLLALHRSYLTPG

SEQ ID NO: 15342 - protein, 14 aa, Severe acute respiratory syndrome-related coronavirus
  REGION 1..14: note = Table B: HLA-DRB1*13:03L HLA-DPA1*03:01-B1*04:02L HLA-DQA1*05:05-B1*03:19L HLA-DRB1*07:01L
  source 1..14: note = Severe acute respiratory syndrome coronavirus 2
LALHRSYLTPGDSS

SEQ ID NO: 15343 - protein, 10 aa, Severe acute respiratory syndrome-related coronavirus
  REGION 1..10: note = Table B: HLA-DRB1*13:03L HLA-DQA1*01:02-B1*06:02L HLA-DPA1*03:01-B1*105:01L
  source 1..10: note = Severe acute respiratory syndrome coronavirus 2
LTPGDSSSGW

SEQ ID NO: 15344 - protein, 10 aa, Severe acute respiratory syndrome-related coronavirus
  REGION 1..10: note = Table B: HLA-DRB1*13:03L HLA-DQA1*01:02-B1*06:02L HLA-DQA1*05:05-B1*03:19L HLA-DQA1*05:01-B1*02:01L
  source 1..10: note = Severe acute respiratory syndrome coronavirus 2
SGWTAGAAAY

SEQ ID NO: 15345 - protein, 10 aa, Severe acute respiratory syndrome-related coronavirus
  REGION 1..10: note = Table B: HLA-DRB1*13:03L HLA-DQA1*01:02-B1*06:02L HLA-DRB1*08:77L HLA-DPA1*01:03-B1*03:01L HLA-DRB1*03:01L HLA-DRB1*14:02L HLA-DQA1*05:05-B1*03:19L HLA-DQA1*05:01-B1*02:01L HLA-DRB4*01:01L
  REGION 1..10: note = CONT. FROM ABOVE: HLA-DPA1*01:03-B1*04:01L HLA-DRB1*16:01L HLA-D QA1*02:01-B1*03:03L HLA-DRB1*15:03L
  source 1..10: note = Severe acute respiratory syndrome coronavirus 2
GWTAGAAAYY

SEQ ID NO: 15346 - protein, 10 aa, Severe acute respiratory syndrome-related coronavirus
  REGION 1..10: note = Table B: HLA-DRB1*13:03L HLA-DRB1*04:02L HLA-DQA1*01-B1*05L HLA-DRB1*12:01L HLA-DQA1*03:01-B1*03:02L HLA-DPA1*01:02-B1*04:01L HLA-DRB1*16:01L HLA-DQA1*01:03-B1*06:01L HLA-DQA1*02:01-B1*03:03L
  source 1..10: note = Severe acute respiratory syndrome coronavirus 2
AYYVGYLQPR

SEQ ID NO: 15347 - protein, 13 aa, Severe acute respiratory syndrome-related coronavirus
  REGION 1..13: note = Table B: HLA-DRB1*13:03L HLA-DRB1*01:03L HLA-DRB1*04:05L HLA-DQA1*01:02-B1*06:02L HLA-DRB1*08:04L HLA-DQA1*03:01-B1*03:02L HLA-DRB1*16:01L HLA-DRB1*04:08L HLA-DRB1*08:03L
  source 1..13: note = Severe acute respiratory syndrome coronavirus 2
QPRTFLLKYNENG

SEQ ID NO: 15348 - protein, 14 aa, Severe acute respiratory syndrome-related coronavirus
  REGION 1..14: note = Table B: HLA-DRB1*13:03L HLA-DRB1*04:04L HLA-DRB4*03:01NL HLA-DRB1*08:04L HLA-DPA1*01:03-B1*03:01L HLA-DRB1*14:01L HLA-DRB1*11:04L HLA-DQA1*01:01-B1*05:01L HLA-DRB1*08:01L HLA-DQA1*05:05-B1*03:19L HLA-DRB1*12:01L HLA-DRB3*01:01L
  REGION 1..14: note = CONT. FROM ABOVE: HLA-DPA1*02:01-B1*13:01L HLA-DRB1*08:03L
  source 1..14: note = Severe acute respiratory syndrome coronavirus 2
DAVDCALDPLSETK

SEQ ID NO: 15349 - protein, 13 aa, Severe acute respiratory syndrome-related coronavirus
  REGION 1..13: note = Table B: HLA-DRB1*13:03L HLA-DRB1*08:01L
  source 1..13: note = Severe acute respiratory syndrome coronavirus 2
EKGIYQTSNFRVQ

SEQ ID NO: 15350 - protein, 11 aa, Severe acute respiratory syndrome-related coronavirus
  REGION 1..11: note = Table B: HLA-DRB1*13:03L HLA-DQA1*01:02-B1*06:02L HLA-DRB1*01:02L HLA-DRB1*08:04L HLA-DRB1*14:01L HLA-DRB1*11:04L HLA-DRB1*11:01L HLA-DRB3*01:01L HLA-DRB1*16:01L HLA-DRB1*04:08L
  source 1..11: note = Severe acute respiratory syndrome coronavirus 2
VYAWNRKRISN

SEQ ID NO: 15351 - protein, 11 aa, Severe acute respiratory syndrome-related coronavirus
  REGION 1..11: note = Table B: HLA-DRB1*13:03L HLA-DRB1*08:01L HLA-DQA1*02:01-B1*03:03L
  source 1..11: note = Severe acute respiratory syndrome coronavirus 2
DSFVIRGDEVR

SEQ ID NO: 15352 - protein, 10 aa, Severe acute respiratory syndrome-related coronavirus
  REGION 1..10: note = Table B: HLA-DRB1*13:03L HLA-DQA1*01-B1*05L
  source 1..10: note = Severe acute respiratory syndrome coronavirus 2
APGQTGKIAD

SEQ ID NO: 15353 - protein, 11 aa, Severe acute respiratory syndrome-related coronavirus
  REGION 1..11: note = Table B: HLA-DRB1*13:03L HLA-DRB1*04:02L HLA-DRB4*03:01NL HLA-DQA1*02:01-B1*03:03L
  source 1..11: note = Severe acute respiratory syndrome coronavirus 2
SNNLDSKVGGN

SEQ ID NO: 15354 - protein, 13 aa, Severe acute respiratory syndrome-related coronavirus
  REGION 1..13: note = Table B: HLA-DRB1*13:03L HLA-DRB1*01:03L HLA-DRB1*04:05L HLA-DRB1*01:02L HLA-DRB1*08:04L HLA-DRB1*11:04L HLA-DRB1*11:01L HLA-DRB1*12:01L HLA-DPA1*01:02-B1*04:01L
  source 1..13: note = Severe acute respiratory syndrome coronavirus 2
VGGNYNYLYRLFR

SEQ ID NO: 15355 - protein, 12 aa, Severe acute respiratory syndrome-related coronavirus
  REGION 1..12: note = Table B: HLA-DRB1*13:03L HLA-DRB1*01:03L HLA-DRB1*01:02L HLA-DRB1*14:01L HLA-DRB1*11:04L HLA-DRB1*11:01L HLA-DRB1*12:01L HLA-DRB3*01:01L HLA-DRB1*16:01L HLA-DRB1*04:08L
  source 1..12: note = Severe acute respiratory syndrome coronavirus 2
GNYNYLYRLFRK

SEQ ID NO: 15356 - protein, 12 aa, Severe acute respiratory syndrome-related coronavirus
  REGION 1..12: note = Table B: HLA-DRB1*13:03L HLA-DRB1*04:02L HLA-DRB1*14:01L HLA-DRB1*08:01L HLA-DRB1*16:01L
  source 1..12: note = Severe acute respiratory syndrome coronavirus 2
SNLKPFERDIST

SEQ ID NO: 15357 - protein, 13 aa, Severe acute respiratory syndrome-related coronavirus
  REGION 1..13: note = Table B: HLA-DRB1*13:03L HLA-DRB1*01:03L HLA-DRB1*04:04L HLA-DRB1*04:05L HLA-DRB1*08:04L HLA-DRB1*11:03L HLA-DRB1*11:04L HLA-DRB1*14:02L HLA-DRB1*04:10L HLA-DRB1*09:01L HLA-DRB1*10:01L
  source 1..13: note = Severe acute respiratory syndrome coronavirus 2
STEIYQAGSTPCN

SEQ ID NO: 15358 - protein, 11 aa, Severe acute respiratory syndrome-related coronavirus
  REGION 1..11: note = Table B: HLA-DRB1*13:03L HLA-DRB1*01:03L HLA-DRB1*01:02L HLA-DPA1*03:01-B1*04:02L HLA-DRB1*04:08L
  source 1..11: note = Severe acute respiratory syndrome coronavirus 2
LSFELLHAPAT

SEQ ID NO: 15359 - protein, 15 aa, Severe acute respiratory syndrome-related coronavirus
  REGION 1..15: note = Table B: HLA-DRB1*13:03L HLA-DRB1*08:04L HLA-DRB3*02:01L HLA-DRB1*03:01L HLA-DRB1*11:03L HLA-DPA1*01:03-B1*02:01L HLA-DRB1*08:02L
  source 1..15: note = Severe acute respiratory syndrome coronavirus 2
SFELLHAPATVCGPK

SEQ ID NO: 15360 - protein, 15 aa, Severe acute respiratory syndrome-related coronavirus
  REGION 1..15: note = Table B: HLA-DRB1*13:03L HLA-DPA1*03:01-B1*04:02L HLA-DRB1*11:04L HLA-DRB1*14:02L HLA-DQA1*01-B1*05L HLA-DPA1*01:03-B1*04:01L HLA-DRB3*01:01L HLA-DPA1*01:03-B1*02:01L HLA-DPA1*01:02-B1*04:01L
  REGION 1..15: note = CONT. FROM ABOVE: HLA-DRB1*07:01L
  source 1..15: note = Severe acute respiratory syndrome coronavirus 2
FNGLTGTGVLTESNK

SEQ ID NO: 15361 - protein, 14 aa, Severe acute respiratory syndrome-related coronavirus
  REGION 1..14: note = Table B: HLA-DRB1*13:03L HLA-DRB1*04:04L HLA-DPA1*01:03-B1*03:01L HLA-DRB1*11:04L HLA-DQA1*01:01-B1*05:01L HLA-DRB1*11:01L HLA-DRB3*01:01L HLA-DPA1*01:03-B1*104:01L HLA-DRB1*07:01L
  source 1..14: note = Severe acute respiratory syndrome coronavirus 2
SNKKFLPFQQFGRD

SEQ ID NO: 15362 - protein, 12 aa, Severe acute respiratory syndrome-related coronavirus
  REGION 1..12: note = Table B: HLA-DRB1*13:03L HLA-DRB1*01:03L HLA-DRB1*04:02L HLA-DRB1*04:05L HLA-DQA1*01:02-B1*06:02L HLA-DRB1*08:04L HLA-DRB1*14:01L HLA-DRB1*08:01L HLA-DQA1*03:01-B1*03:02L HLA-DPA1*01:02-B1*04:01L HLA-DRB1*16:01L HLA-DRB1*04:08L
  REGION 1..12: note = CONT. FROM ABOVE: HLA-DQA1*02:01-B1*03:03L
  source 1..12: note = Severe acute respiratory syndrome coronavirus 2
LPFQQFGRDIAD

SEQ ID NO: 15363 - protein, 10 aa, Severe acute respiratory syndrome-related coronavirus
  REGION 1..10: note = Table B: HLA-DRB1*13:03L
  source 1..10: note = Severe acute respiratory syndrome coronavirus 2
TPGTNTSNQV

SEQ ID NO: 15364 - protein, 10 aa, Severe acute respiratory syndrome-related coronavirus
  REGION 1..10: note = Table B: HLA-DRB1*13:03L HLA-DRB1*01:03L HLA-DQA1*01:02-B1*06:02L HLA-DRB1*08:77L HLA-DRB1*14:02L HLA-DQA1*05:05-B1*03:19L HLA-DQA1*05:01-B1*02:01L HLA-DPA1*03:01-B1*105:01L HLA-DQA1*02:01-B1*03:03L
  source 1..10: note = Severe acute respiratory syndrome coronavirus 2
SLGAENSVAY

SEQ ID NO: 15365 - protein, 11 aa, Severe acute respiratory syndrome-related coronavirus
  REGION 1..11: note = Table B: HLA-DRB1*13:03L HLA-DRB1*01:03L HLA-DRB4*03:01NL HLA-DRB1*08:01L HLA-DQA1*01-B1*05L HLA-DRB1*12:01L HLA-DPA1*03:01-B1*105:01L HLA-DRB1*14:17L HLA-DRB1*04:08L
  source 1..11: note = Severe acute respiratory syndrome coronavirus 2
ALTGIAVEQDK

SEQ ID NO: 15366 - protein, 12 aa, Severe acute respiratory syndrome-related coronavirus
  REGION 1..12: note = Table B: HLA-DRB1*13:03L HLA-DRB1*12:01L HLA-DPA1*03:01-B1*105:01L
  source 1..12: note = Severe acute respiratory syndrome coronavirus 2
TGIAVEQDKNTQ

SEQ ID NO: 15367 - protein, 10 aa, Severe acute respiratory syndrome-related coronavirus
  REGION 1..10: note = Table B: HLA-DRB1*13:03L HLA-DQA1*01:02-B1*06:02L HLA-DPA1*03:01-B1*105:01L
  source 1..10: note = Severe acute respiratory syndrome coronavirus 2
TPPIKDFGGF

SEQ ID NO: 15368 - protein, 12 aa, Severe acute respiratory syndrome-related coronavirus
  REGION 1..12: note = Table B: HLA-DRB1*13:03L HLA-DRB1*04:02L HLA-DRB1*04:05L HLA-DRB1*01:02L HLA-DPA1*01:03-B1*03:01L HLA-DRB1*08:01L HLA-DRB1*12:01L HLA-DPA1*02:01-B1*13:01L HLA-DPA1*01:03-B1*02:01L HLA-DRB1*15:03L
  source 1..12: note = Severe acute respiratory syndrome coronavirus 2
GFNFSQILPDPS

SEQ ID NO: 15369 - protein, 10 aa, Severe acute respiratory syndrome-related coronavirus
  REGION 1..10: note = Table B: HLA-DRB1*13:03L HLA-DRB1*01:03L HLA-DRB1*08:01L HLA-DQA1*03:01-B1*03:02L HLA-DRB1*14:17L
  source 1..10: note = Severe acute respiratory syndrome coronavirus 2
LPDPSKPSKR

SEQ ID NO: 15370 - protein, 10 aa, Severe acute respiratory syndrome-related coronavirus
  REGION 1..10: note = Table B: HLA-DRB1*13:03L HLA-DQA1*01:02-B1*06:02L HLA-DPA1*03:01-B1*105:01L
  source 1..10: note = Severe acute respiratory syndrome coronavirus 2
DPSKPSKRSF

SEQ ID NO: 15371 - protein, 10 aa, Severe acute respiratory syndrome-related coronavirus
  REGION 1..10: note = Table B: HLA-DRB1*13:03L HLA-DRB1*01:03L HLA-DQA1*01:02-B1*06:02L HLA-DRB1*08:77L HLA-DPA1*01:03-B1*03:01L HLA-DRB1*03:01L HLA-DRB1*11:02L HLA-DRB1*14:02L HLA-DQA1*01-B1*05L HLA-DQA1*05:05-B1*03:19M
  REGION 1..10: note = CONT. FROM ABOVE: HLA-DQA1*05:01-B1*02:01M HLA-DRB4*01:01L HLA-D PA1*01:03-B1*04:01L HLA-DQA1*05:05-B1*03:116L HLA-DPA1*01:03-B1* 04:02L HLA-DPA1*01:03-B1*104:01L HLA-DRB1*10:01L HLA-DRB1*16:01L
  source 1..10: note = Severe acute respiratory syndrome coronavirus 2
LLTDEMIAQY

SEQ ID NO: 15372 - protein, 15 aa, Severe acute respiratory syndrome-related coronavirus
  REGION 1..15: note = Table B: HLA-DRB1*13:03L HLA-DRB1*04:02L HLA-DPA1*01:03-B1*03:01L HLA-DRB1*03:01L HLA-DRB1*11:02L HLA-DRB1*11:03L HLA-DRB1*11:04L HLA-DRB1*14:02L HLA-DRB1*08:01L HLA-DRB1*11:01L HLA-DPA1*01:03-B1*04:01L
  REGION 1..15: note = CONT. FROM ABOVE: HLA-DQA1*05:05-B1*03:116L HLA-DPA1*01:03-B1*04 :02L HLA-DRB3*01:01L HLA-DPA1*01:03-B1*02:01L HLA-DPA1*01:03-B1* 104:01L HLA-DQA1*05:05-B1*03:01L HLA-DRB1*08:02L HLA-DRB1*08:03L
  source 1..15: note = Severe acute respiratory syndrome coronavirus 2
IPFAMQMAYRFNGIG

SEQ ID NO: 15373 - protein, 11 aa, Severe acute respiratory syndrome-related coronavirus
  REGION 1..11: note = Table B: HLA-DRB1*13:03L HLA-DRB1*01:03L HLA-DRB1*04:02L HLA-DRB1*04:05L HLA-DQA1*01:02-B1*06:02L HLA-DRB1*01:02L HLA-DRB4*03:01NL HLA-DRB1*14:01L HLA-DQA1*01-B1*05L HLA-DQA1*05:01-B1*02:01L HLA-DRB1*12:01L HLA-DRB1*14:54L
  REGION 1..11: note = CONT. FROM ABOVE: HLA-DQA1*05:05-B1*03:01L HLA-DRB1*14:17L HLA-D RB1*04:08L
  source 1..11: note = Severe acute respiratory syndrome coronavirus 2
NQFNSAIGKIQ

SEQ ID NO: 15374 - protein, 12 aa, Severe acute respiratory syndrome-related coronavirus
  REGION 1..12: note = Table B: HLA-DRB1*13:03L HLA-DRB1*01:02L HLA-DRB1*14:01L HLA-DRB1*11:04L HLA-DQA1*05:01-B1*02:01L HLA-DRB1*12:01L
  source 1..12: note = Severe acute respiratory syndrome coronavirus 2
IGKIQDSLSSTA

SEQ ID NO: 15375 - protein, 12 aa, Severe acute respiratory syndrome-related coronavirus
  REGION 1..12: note = Table B: HLA-DRB1*13:03L HLA-DRB1*04:05L HLA-DRB1*01:02L HLA-DPA1*01:03-B1*03:01L HLA-DPA1*01:03-B1*04:02L HLA-DRB1*14:54L HLA-DRB1*04:08L
  source 1..12: note = Severe acute respiratory syndrome coronavirus 2
SSTASALGKLQD

SEQ ID NO: 15376 - protein, 12 aa, Severe acute respiratory syndrome-related coronavirus
  REGION 1..12: note = Table B: HLA-DRB1*13:03L HLA-DRB1*01:03L HLA-DRB1*01:02L HLA-DRB4*03:01NL HLA-DPA1*01:03-B1*03:01L HLA-DRB1*08:01L HLA-DQA1*01-B1*05L HLA-DRB1*12:01L HLA-DRB1*14:54L HLA-DRB1*04:08L HLA-DRB1*15:03L
  source 1..12: note = Severe acute respiratory syndrome coronavirus 2
ASALGKLQDVVN

SEQ ID NO: 15377 - protein, 13 aa, Severe acute respiratory syndrome-related coronavirus
  REGION 1..13: note = Table B: HLA-DRB1*13:03L HLA-DRB1*04:05L HLA-DRB1*11:04L HLA-DRB1*08:01L HLA-DRB1*11:01L
  source 1..13: note = Severe acute respiratory syndrome coronavirus 2
AQALNTLVKQLSS

SEQ ID NO: 15378 - protein, 12 aa, Severe acute respiratory syndrome-related coronavirus
  REGION 1..12: note = Table B: HLA-DRB1*13:03L HLA-DRB1*01:02L HLA-DRB1*08:04L HLA-DRB1*11:04L HLA-DRB1*08:01L HLA-DRB1*11:01L HLA-DQA1*05:05-B1*03:19L HLA-DPA1*03:01-B1*105:01L HLA-DRB1*14:54L HLA-DQA1*05:05-B1*03:01L
  source 1..12: note = Severe acute respiratory syndrome coronavirus 2
ALNTLVKQLSSN

SEQ ID NO: 15379 - protein, 13 aa, Severe acute respiratory syndrome-related coronavirus
  REGION 1..13: note = Table B: HLA-DRB1*13:03L HLA-DRB1*01:03L HLA-DRB1*04:04L HLA-DQA1*01-B1*05L HLA-DRB1*15:03L
  source 1..13: note = Severe acute respiratory syndrome coronavirus 2
SSNFGAISSVLND

SEQ ID NO: 15380 - protein, 12 aa, Severe acute respiratory syndrome-related coronavirus
  REGION 1..12: note = Table B: HLA-DRB1*13:03L HLA-DRB1*01:03L HLA-DRB1*04:05L HLA-DQA1*01:02-B1*06:02L HLA-DRB1*01:02L HLA-DRB1*08:04L HLA-DRB1*14:01L HLA-DRB1*11:04L HLA-DRB1*08:01L HLA-DRB1*12:01L HLA-DRB1*14:54L HLA-DRB1*14:17L HLA-DRB1*16:01L HLA-DRB1*04:08L
  REGION 1..12: note = CONT. FROM ABOVE: HLA-DRB1*08:03L HLA-DQA1*02:01-B1*03:03L
  source 1..12: note = Severe acute respiratory syndrome coronavirus 2
DILSRLDKVEAE

SEQ ID NO: 15381 - protein, 11 aa, Severe acute respiratory syndrome-related coronavirus
  REGION 1..11: note = Table B: HLA-DRB1*13:03L HLA-DQA1*01-B1*05L
  source 1..11: note = Severe acute respiratory syndrome coronavirus 2
VPAQEKNFTTA

SEQ ID NO: 15382 - protein, 13 aa, Severe acute respiratory syndrome-related coronavirus
  REGION 1..13: note = Table B: HLA-DRB1*13:03L HLA-DRB1*01:03L HLA-DRB1*04:05L HLA-DRB1*01:02L HLA-DRB1*08:04L HLA-DRB1*14:01L HLA-DRB1*04:08L HLA-DRB1*15:03L
  source 1..13: note = Severe acute respiratory syndrome coronavirus 2
THWFVTQRNFYEP

SEQ ID NO: 15383 - protein, 11 aa, Severe acute respiratory syndrome-related coronavirus
  REGION 1..11: note = Table B: HLA-DRB1*13:03L HLA-DQA1*01:02-B1*06:02L HLA-DQA1*05:01-B1*02:01L HLA-DQA1*02:01-B1*03:03L
  source 1..11: note = Severe acute respiratory syndrome coronavirus 2
EPQIITTDNTF

SEQ ID NO: 15384 - protein, 11 aa, Severe acute respiratory syndrome-related coronavirus
  REGION 1..11: note = Table B: HLA-DRB1*13:03L HLA-DRB1*01:03L HLA-DRB1*04:02L HLA-DRB4*03:01NL HLA-DRB1*04:10L HLA-DRB1*12:01L HLA-DRB1*14:54L HLA-DRB1*14:17L HLA-DRB1*04:08L
  source 1..11: note = Severe acute respiratory syndrome coronavirus 2
VYDPLQPELDS

SEQ ID NO: 15385 - protein, 11 aa, Severe acute respiratory syndrome-related coronavirus
  REGION 1..11: note = Table B: HLA-DRB1*13:03L HLA-DRB1*04:05L HLA-DRB4*03:01NL HLA-DRB1*14:01L HLA-DQA1*01:01-B1*05:01L HLA-DRB1*08:01L HLA-DQA1*01-B1*05L HLA-DRB1*04:10L HLA-DRB1*12:01L HLA-DRB1*14:54L HLA-DRB1*16:01L
  source 1..11: note = Severe acute respiratory syndrome coronavirus 2
ASVVNIQKEID

SEQ ID NO: 15386 - protein, 10 aa, Severe acute respiratory syndrome-related coronavirus
  REGION 1..10: note = Table B: HLA-DRB1*13:03L HLA-DQA1*03:01-B1*03:02L
  source 1..10: note = Severe acute respiratory syndrome coronavirus 2
EIDRLNEVAK

SEQ ID NO: 15387 - protein, 12 aa, Severe acute respiratory syndrome-related coronavirus
  REGION 1..12: note = Table B: HLA-DRB1*13:03L HLA-DRB1*01:03L HLA-DRB1*04:02L HLA-DRB1*04:05L HLA-DQA1*01:02-B1*06:02L HLA-DRB1*08:04L HLA-DRB1*14:01L HLA-DRB1*08:01L HLA-DRB1*12:01L HLA-DRB1*14:54L HLA-DRB1*04:08L HLA-DQA1*02:01-B1*03:03L
  source 1..12: note = Severe acute respiratory syndrome coronavirus 2
DRLNEVAKNLNE

SEQ ID NO: 15388 - protein, 12 aa, Severe acute respiratory syndrome-related coronavirus
  REGION 1..12: note = Table B: HLA-DRB1*13:03L HLA-DQA1*01:02-B1*06:02L HLA-DRB1*14:01L HLA-DRB1*08:01L
  source 1..12: note = Severe acute respiratory syndrome coronavirus 2
RLNEVAKNLNES

SEQ ID NO: 15389 - protein, 11 aa, Severe acute respiratory syndrome-related coronavirus
  REGION 1..11: note = Table B: HLA-DRB1*13:03L HLA-DPA1*03:01-B1*105:01L
  source 1..11: note = Severe acute respiratory syndrome coronavirus 2
DLQELGKYEQY

SEQ ID NO: 15390 - protein, 10 aa, Severe acute respiratory syndrome-related coronavirus
  REGION 1..10: note = Table B: HLA-DRB1*13:03L
  source 1..10: note = Severe acute respiratory syndrome coronavirus 2
TPSDFVRATA

SEQ ID NO: 15391 - protein, 11 aa, Severe acute respiratory syndrome-related coronavirus
  REGION 1..11: note = Table B: HLA-DRB1*13:03L HLA-DRB1*01:03L HLA-DRB1*04:02L HLA-DQA1*01:02-B1*06:02L HLA-DRB1*01:02L HLA-DRB1*08:04L HLA-DRB1*11:04L HLA-DRB1*11:01L HLA-DRB1*16:01L HLA-DRB1*04:08L
  source 1..11: note = Severe acute respiratory syndrome coronavirus 2
SKIITLKKRWQ

SEQ ID NO: 15392 - protein, 10 aa, Severe acute respiratory syndrome-related coronavirus
  REGION 1..10: note = Table B: HLA-DRB1*13:03L HLA-DRB1*08:01L HLA-DRB1*12:01L HLA-DQA1*03:01-B1*03:02L HLA-DPA1*01:02-B1*04:01L HLA-DQA1*01:03-B1*06:01L HLA-DQA1*02:01-B1*03:03L
  source 1..10: note = Severe acute respiratory syndrome coronavirus 2
SINFVRIIMR

SEQ ID NO: 15393 - protein, 15 aa, Severe acute respiratory syndrome-related coronavirus
  REGION 1..15: note = Table B: HLA-DRB1*13:03L HLA-DRB1*04:04L HLA-DRB1*04:05L HLA-DRB1*08:77L HLA-DPA1*01:03-B1*03:01L HLA-DRB1*11:03L HLA-DRB1*11:04L HLA-DRB1*04:10L HLA-DRB1*12:02L HLA-DRB1*04:08L
  source 1..15: note = Severe acute respiratory syndrome coronavirus 2
SSIVITSGDGTTSPI

SEQ ID NO: 15394 - protein, 13 aa, Severe acute respiratory syndrome-related coronavirus
  REGION 1..13: note = Table B: HLA-DRB1*13:03L HLA-DRB1*04:02L HLA-DRB4*03:01NL HLA-DPA1*01:03-B1*04:02L HLA-DRB1*12:01L
  source 1..13: note = Severe acute respiratory syndrome coronavirus 2
TSGDGTTSPISEH

SEQ ID NO: 15395 - protein, 12 aa, Severe acute respiratory syndrome-related coronavirus
  REGION 1..12: note = Table B: HLA-DRB1*13:03L HLA-DPA1*01:03-B1*03:01L HLA-DRB1*08:01L HLA-DQA1*05:05-B1*03:116L HLA-DPA1*01:03-B1*04:02L HLA-DPA1*03:01-B1*105:01L
  source 1..12: note = Severe acute respiratory syndrome coronavirus 2
GDGTTSPISEHD

SEQ ID NO: 15396 - protein, 13 aa, Severe acute respiratory syndrome-related coronavirus
  REGION 1..13: note = Table B: HLA-DRB1*13:03L HLA-DRB1*04:02L HLA-DRB1*04:05L HLA-DRB4*03:01NL HLA-DRB1*08:77L HLA-DRB1*11:03L HLA-DRB1*14:02L HLA-DRB1*14:54L HLA-DQA1*05:05-B1*03:01L HLA-DRB1*10:01L
  source 1..13: note = Severe acute respiratory syndrome coronavirus 2
SDYYQLYSTQLST

SEQ ID NO: 15397 - protein, 13 aa, Severe acute respiratory syndrome-related coronavirus
  REGION 1..13: note = Table B: HLA-DRB1*13:03L HLA-DRB1*04:05L
  source 1..13: note = Severe acute respiratory syndrome coronavirus 2
HVTFFIYNKIVDE

SEQ ID NO: 15398 - protein, 11 aa, Severe acute respiratory syndrome-related coronavirus
  REGION 1..11: note = Table B: HLA-DRB1*13:03L HLA-DRB1*01:03L HLA-DRB4*03:01NL HLA-DRB1*12:01L HLA-DPA1*02:01-B1*13:01L HLA-DRB1*14:54L
  source 1..11: note = Severe acute respiratory syndrome coronavirus 2
YNKIVDEPEEH

SEQ ID NO: 15399 - protein, 11 aa, Severe acute respiratory syndrome-related coronavirus
  REGION 1..11: note = Table B: HLA-DRB1*13:03L HLA-DRB1*01:03L HLA-DQA1*01:02-B1*06:02L HLA-DRB1*08:01L HLA-DQA1*03:01-B1*03:02L HLA-DPA1*01:02-B1*04:01L HLA-DRB1*16:01L HLA-DRB1*04:08L HLA-DQA1*02:01-B1*03:03L
  source 1..11: note = Severe acute respiratory syndrome coronavirus 2
PSFYVYSRVKN

SEQ ID NO: 15400 - protein, 12 aa, Severe acute respiratory syndrome-related coronavirus
  REGION 1..12: note = Table B: HLA-DRB1*13:03L HLA-DRB1*01:03L HLA-DRB1*04:02L HLA-DRB1*04:05L HLA-DQA1*01:02-B1*06:02L HLA-DRB1*01:02L HLA-DRB1*14:01L HLA-DRB1*11:04L HLA-DRB1*11:01L HLA-DRB1*16:01L HLA-DRB1*04:08L HLA-DRB1*08:03L
  source 1..12: note = Severe acute respiratory syndrome coronavirus 2
ITVEELKKLLEQ

SEQ ID NO: 15401 - protein, 12 aa, Severe acute respiratory syndrome-related coronavirus
  REGION 1..12: note = Table B: HLA-DRB1*13:03L HLA-DRB1*08:04L HLA-DRB1*14:01L HLA-DRB1*04:08L
  source 1..12: note = Severe acute respiratory syndrome coronavirus 2
SYFIASFRLFAR

SEQ ID NO: 15402 - protein, 12 aa, Severe acute respiratory syndrome-related coronavirus
  REGION 1..12: note = Table B: HLA-DRB1*13:03L HLA-DRB1*04:05L HLA-DQA1*01:02-B1*06:02L HLA-DRB1*01:02L HLA-DRB1*14:01L HLA-DRB1*11:04L HLA-DRB1*11:01L HLA-DRB1*12:01L HLA-DRB3*01:01L HLA-DRB1*16:01L HLA-DRB1*04:08L HLA-DRB1*15:03L
  source 1..12: note = Severe acute respiratory syndrome coronavirus 2
IASFRLFARTRS

SEQ ID NO: 15403 - protein, 12 aa, Severe acute respiratory syndrome-related coronavirus
  REGION 1..12: note = Table B: HLA-DRB1*13:03L HLA-DRB1*01:03L HLA-DRB1*04:05L HLA-DQA1*01:02-B1*06:02L HLA-DRB1*01:02L HLA-DRB1*08:04L HLA-DRB1*14:01L HLA-DRB1*11:04L HLA-DRB1*11:01L HLA-DRB3*01:01L HLA-DRB1*16:01L HLA-DRB1*04:08L
  source 1..12: note = Severe acute respiratory syndrome coronavirus 2
ASFRLFARTRSM

SEQ ID NO: 15404 - protein, 10 aa, Severe acute respiratory syndrome-related coronavirus
  REGION 1..10: note = Table B: HLA-DRB1*13:03L HLA-DQA1*03:01-B1*03:02L
  source 1..10: note = Severe acute respiratory syndrome coronavirus 2
VPLHGTILTR

SEQ ID NO: 15405 - protein, 16 aa, Severe acute respiratory syndrome-related coronavirus
  REGION 1..16: note = Table B: HLA-DRB1*13:03L HLA-DRB1*04:02L HLA-DRB1*11:02L
  source 1..16: note = Severe acute respiratory syndrome coronavirus 2
IGAVILRGHLRIAGHH

SEQ ID NO: 15406 - protein, 11 aa, Severe acute respiratory syndrome-related coronavirus
  REGION 1..11: note = Table B: HLA-DRB1*13:03L HLA-DRB1*01:03L HLA-DRB1*04:02L HLA-DRB1*04:05L HLA-DRB1*14:01L HLA-DRB1*11:04L HLA-DRB1*08:01L HLA-DRB1*11:01L HLA-DRB1*16:01L HLA-DRB1*04:08L
  source 1..11: note = Severe acute respiratory syndrome coronavirus 2
GHLRIAGHHLG

SEQ ID NO: 15407 - protein, 10 aa, Severe acute respiratory syndrome-related coronavirus
  REGION 1..10: note = Table B: HLA-DRB1*13:03L HLA-DRB1*01:03L HLA-DRB1*11:04L HLA-DRB1*08:01L HLA-DRB1*11:01L HLA-DRB1*12:01L HLA-DQA1*03:01-B1*03:02L HLA-DRB1*16:01L
  source 1..10: note = Severe acute respiratory syndrome coronavirus 2
LRIAGHHLGR

SEQ ID NO: 15408 - protein, 11 aa, Severe acute respiratory syndrome-related coronavirus
  REGION 1..11: note = Table B: HLA-DRB1*13:03L
  source 1..11: note = Severe acute respiratory syndrome coronavirus 2
LPKEITVATSR

SEQ ID NO: 15409 - protein, 10 aa, Severe acute respiratory syndrome-related coronavirus
  REGION 1..10: note = Table B: HLA-DRB1*13:03L HLA-DRB1*01:03L HLA-DQA1*01:02-B1*06:02L HLA-DRB1*14:02L HLA-DQA1*02:01-B1*03:03L
  source 1..10: note = Severe acute respiratory syndrome coronavirus 2
SQRVAGDSGF

SEQ ID NO: 15410 - protein, 10 aa, Severe acute respiratory syndrome-related coronavirus
  REGION 1..10: note = Table B: HLA-DRB1*13:03L HLA-DQA1*01:02-B1*06:02L HLA-DQA1*05:05-B1*03:19L HLA-DQA1*05:01-B1*02:01L HLA-DPA1*03:01-B1*105:01L HLA-DRB1*16:01L HLA-DQA1*02:01-B1*03:03L HLA-DRB1*15:03L
  source 1..10: note = Severe acute respiratory syndrome coronavirus 2
VAGDSGFAAY

SEQ ID NO: 15411 - protein, 11 aa, Severe acute respiratory syndrome-related coronavirus
  REGION 1..11: note = Table B: HLA-DRB1*13:03L HLA-DQA1*05:05-B1*03:01L HLA-DQA1*01:03-B1*06:01L
  source 1..11: note = Severe acute respiratory syndrome coronavirus 2
AGDSGFAAYSR

SEQ ID NO: 15412 - protein, 15 aa, Severe acute respiratory syndrome-related coronavirus
  REGION 1..15: note = Table B: HLA-DRB1*13:03L HLA-DPA1*03:01-B1*04:02L HLA-DRB1*14:01L HLA-DPA1*01:03-B1*04:02L HLA-DPA1*01:03-B1*02:01L
  source 1..15: note = Severe acute respiratory syndrome coronavirus 2
YSRYRIGNYKLNTDH

SEQ ID NO: 15413 - protein, 11 aa, Severe acute respiratory syndrome-related coronavirus
  REGION 1..11: note = Table B: HLA-DRB1*13:03L HLA-DRB1*01:03L HLA-DRB1*04:04L HLA-DRB1*04:05L HLA-DQA1*01:02-B1*06:02L HLA-DRB1*01:02L HLA-DRB4*03:01NL HLA-DRB1*08:04L HLA-DRB1*14:01L HLA-DRB1*11:04L HLA-DRB1*08:01L HLA-DRB1*11:01L HLA-DRB1*12:01L
  REGION 1..11: note = CONT. FROM ABOVE: HLA-DQA1*03:01-B1*03:02L HLA-DRB1*14:54L HLA-D PA1*01:02-B1*04:01L HLA-DRB1*16:01L HLA-DRB1*04:08L HLA-DQA1*02: 01-B1*03:03L
  source 1..11: note = Severe acute respiratory syndrome coronavirus 2
IINLIIKNLSK

SEQ ID NO: 15414 - protein, 13 aa, Severe acute respiratory syndrome-related coronavirus
  REGION 1..13: note = Table B: HLA-DRB1*13:03L HLA-DRB1*01:03L HLA-DRB1*04:02L HLA-DQA1*01:02-B1*06:02L HLA-DRB1*01:02L HLA-DQA1*01:01-B1*05:01L HLA-DRB1*08:01L HLA-DRB1*04:10L HLA-DRB1*12:01L HLA-DPA1*02:01-B1*13:01L
  REGION 1..13: note = CONT. FROM ABOVE: HLA-DQA1*05:05-B1*03:01L HLA-DQA1*01:03-B1*06: 01L HLA-DRB1*04:08L HLA-DRB1*15:03L
  source 1..13: note = Severe acute respiratory syndrome coronavirus 2
NKYSQLDEEQPME

SEQ ID NO: 15415 - protein, 10 aa, Severe acute respiratory syndrome-related coronavirus
  REGION 1..10: note = Table B: HLA-DRB1*13:03L HLA-DRB1*01:03L HLA-DRB1*01:02L HLA-DRB1*08:01L HLA-DRB1*11:01L HLA-DRB1*12:01L HLA-DQA1*03:01-B1*03:02L HLA-DRB1*14:17L HLA-DPA1*01:02-B1*04:01L HLA-DRB1*16:01L HLA-DRB1*04:08L
  REGION 1..10: note = CONT. FROM ABOVE: HLA-DQA1*02:01-B1*03:03L
  source 1..10: note = Severe acute respiratory syndrome coronavirus 2
QLRARSVSPK

SEQ ID NO: 15416 - protein, 10 aa, Severe acute respiratory syndrome-related coronavirus
  REGION 1..10: note = Table B: HLA-DRB1*13:03L HLA-DRB1*01:03L HLA-DQA1*03:01-B1*03:02L HLA-DRB1*14:17L HLA-DQA1*02:01-B1*03:03L
  source 1..10: note = Severe acute respiratory syndrome coronavirus 2
GPQNQRNAPR

SEQ ID NO: 15417 - protein, 10 aa, Severe acute respiratory syndrome-related coronavirus
  REGION 1..10: note = Table B: HLA-DRB1*13:03L HLA-DRB1*08:01L HLA-DRB1*12:01L HLA-DQA1*03:01-B1*03:02L HLA-DQA1*05:05-B1*03:01L
  source 1..10: note = Severe acute respiratory syndrome coronavirus 2
STGSNQNGER

SEQ ID NO: 15418 - protein, 10 aa, Severe acute respiratory syndrome-related coronavirus
  REGION 1..10: note = Table B: HLA-DRB1*13:03L HLA-DQA1*03:01-B1*03:02L
  source 1..10: note = Severe acute respiratory syndrome coronavirus 2
SPDDQIGYYR

SEQ ID NO: 15419 - protein, 10 aa, Severe acute respiratory syndrome-related coronavirus
  REGION 1..10: note = Table B: HLA-DRB1*13:03L HLA-DRB1*04:02L HLA-DRB4*03:01NL HLA-DRB1*12:01L HLA-DQA1*03:01-B1*03:02L HLA-DRB1*14:17L
  source 1..10: note = Severe acute respiratory syndrome coronavirus 2
ATEGALNTPK

SEQ ID NO: 15420 - protein, 10 aa, Severe acute respiratory syndrome-related coronavirus
  REGION 1..10: note = Table B: HLA-DRB1*13:03L
  source 1..10: note = Severe acute respiratory syndrome coronavirus 2
NPANNAAIVL

SEQ ID NO: 15421 - protein, 10 aa, Severe acute respiratory syndrome-related coronavirus
  REGION 1..10: note = Table B: HLA-DRB1*13:03L HLA-DRB1*01:03L HLA-DQA1*03:01-B1*03:02L
  source 1..10: note = Severe acute respiratory syndrome coronavirus 2
SRNSTPGSSR

SEQ ID NO: 15422 - protein, 10 aa, Severe acute respiratory syndrome-related coronavirus
  REGION 1..10: note = Table B: HLA-DRB1*13:03L
  source 1..10: note = Severe acute respiratory syndrome coronavirus 2
TPGSSRGTSP

SEQ ID NO: 15423 - protein, 11 aa, Severe acute respiratory syndrome-related coronavirus
  REGION 1..11: note = Table B: HLA-DRB1*13:03L HLA-DRB1*04:02L HLA-DRB1*08:04L HLA-DRB1*08:01L HLA-DQA1*05:01-B1*02:01L HLA-DPA1*01:03-B1*04:01L HLA-DRB1*12:01L HLA-DPA1*02:01-B1*13:01L HLA-DRB1*16:01L
  REGION 1..11: note = CONT. FROM ABOVE: HLA-DQA1*01:03-B1*06:01L
  source 1..11: note = Severe acute respiratory syndrome coronavirus 2
ALLLLDRLNQL

SEQ ID NO: 15424 - protein, 12 aa, Severe acute respiratory syndrome-related coronavirus
  REGION 1..12: note = Table B: HLA-DRB1*13:03L HLA-DRB1*01:02L HLA-DRB1*11:04L HLA-DRB1*08:01L HLA-DRB1*11:01L HLA-DRB1*14:54L
  source 1..12: note = Severe acute respiratory syndrome coronavirus 2
LLLLDRLNQLES

SEQ ID NO: 15425 - protein, 12 aa, Severe acute respiratory syndrome-related coronavirus
  REGION 1..12: note = Table B: HLA-DRB1*13:03L HLA-DRB1*04:02L HLA-DQA1*02:01-B1*03:03L
  source 1..12: note = Severe acute respiratory syndrome coronavirus 2
GQTVTKKSAAEA

SEQ ID NO: 15426 - protein, 10 aa, Severe acute respiratory syndrome-related coronavirus
  REGION 1..10: note = Table B: HLA-DRB1*13:03L HLA-DRB1*08:01L HLA-DRB1*12:01L HLA-DQA1*03:01-B1*03:02L HLA-DQA1*05:05-B1*03:01L HLA-DQA1*02:01-B1*03:03L
  source 1..10: note = Severe acute respiratory syndrome coronavirus 2
ELIRQGTDYK

SEQ ID NO: 15427 - protein, 10 aa, Severe acute respiratory syndrome-related coronavirus
  REGION 1..10: note = Table B: HLA-DRB1*13:03L HLA-DRB1*08:01L HLA-DRB1*12:01L HLA-DQA1*03:01-B1*03:02L HLA-DQA1*05:05-B1*03:01L HLA-DQA1*01:03-B1*06:01L HLA-DQA1*02:01-B1*03:03L
  source 1..10: note = Severe acute respiratory syndrome coronavirus 2
SASAFFGMSR

SEQ ID NO: 15428 - protein, 10 aa, Severe acute respiratory syndrome-related coronavirus
  REGION 1..10: note = Table B: HLA-DRB1*13:03L HLA-DRB1*01:03L HLA-DRB1*04:02L HLA-DRB1*08:01L HLA-DQA1*03:01-B1*03:02L HLA-DQA1*01:03-B1*06:01L HLA-DQA1*02:01-B1*03:03L
  source 1..10: note = Severe acute respiratory syndrome coronavirus 2
YTGAIKLDDK

SEQ ID NO: 15429 - protein, 10 aa, Severe acute respiratory syndrome-related coronavirus
  REGION 1..10: note = Table B: HLA-DRB1*13:03L HLA-DRB4*03:01NL HLA-DRB1*12:01L HLA-DQA1*03:01-B1*03:02L HLA-DQA1*05:05-B1*03:01L HLA-DQA1*02:01-B1*03:03L
  source 1..10: note = Severe acute respiratory syndrome coronavirus 2
ADETQALPQR

SEQ ID NO: 15430 - protein, 10 aa, Severe acute respiratory syndrome-related coronavirus
  REGION 1..10: note = Table B: HLA-DRB1*13:03L HLA-DRB1*08:01L HLA-DRB1*12:01L HLA-DQA1*03:01-B1*03:02L HLA-DQA1*05:05-B1*03:01L HLA-DQA1*02:01-B1*03:03L
  source 1..10: note = Severe acute respiratory syndrome coronavirus 2
TQALPQRQKK

SEQ ID NO: 15431 - protein, 11 aa, Severe acute respiratory syndrome-related coronavirus
  REGION 1..11: note = Table B: HLA-DRB1*13:03L HLA-DRB1*01:03L HLA-DRB1*04:02L HLA-DRB1*01:02L HLA-DRB4*03:01NL HLA-DPA1*01:03-B1*03:01L HLA-DQA1*01:01-B1*05:01L HLA-DRB1*08:01L HLA-DQA1*05:05-B1*03:19L HLA-DRB1*04:10L HLA-DRB1*12:01L
  REGION 1..11: note = CONT. FROM ABOVE: HLA-DPA1*02:01-B1*13:01L HLA-DPA1*03:01-B1*105 :01L HLA-DRB1*14:54L HLA-DQA1*05:05-B1*03:01L HLA-DRB1*14:17L HL A-DPA1*01:02-B1*04:01L HLA-DRB1*16:01L HLA-DRB1*04:08L HLA-DRB1* 15:03L
  source 1..11: note = Severe acute respiratory syndrome coronavirus 2
RNYIAQVDVVN

SEQ ID NO: 15432 - protein, 15 aa, Severe acute respiratory syndrome-related coronavirus
  REGION 1..15: note = Table B: HLA-DRB1*01:03L HLA-DRB1*04:05L HLA-DRB1*16:01L
  source 1..15: note = Severe acute respiratory syndrome coronavirus 2
EKTHVQLSLPVLQVR

SEQ ID NO: 15433 - protein, 13 aa, Severe acute respiratory syndrome-related coronavirus
  REGION 1..13: note = Table B: HLA-DRB1*01:03L HLA-DRB1*01:02L HLA-DRB1*14:01L HLA-DRB1*14:54L HLA-DRB1*04:08L HLA-DRB1*15:03L
  source 1..13: note = Severe acute respiratory syndrome coronavirus 2
DSVEEVLSEARQH

SEQ ID NO: 15434 - protein, 11 aa, Severe acute respiratory syndrome-related coronavirus
  REGION 1..11: note = Table B: HLA-DRB1*01:03L
  source 1..11: note = Severe acute respiratory syndrome coronavirus 2
VLSEARQHLKD

SEQ ID NO: 15435 - protein, 14 aa, Severe acute respiratory syndrome-related coronavirus
  REGION 1..14: note = Table B: HLA-DRB1*01:03L HLA-DRB1*04:08L
  source 1..14: note = Severe acute respiratory syndrome coronavirus 2
VLPQLEQPYVFIKR

SEQ ID NO: 15436 - protein, 15 aa, Severe acute respiratory syndrome-related coronavirus
  REGION 1..15: note = Table B: HLA-DRB1*01:03L HLA-DRB1*04:05L HLA-DRB1*12:01L HLA-DRB1*16:01L HLA-DRB1*04:08L
  source 1..15: note = Severe acute respiratory syndrome coronavirus 2
LPQLEQPYVFIKRSD

SEQ ID NO: 15437 - protein, 12 aa, Severe acute respiratory syndrome-related coronavirus
  REGION 1..12: note = Table B: HLA-DRB1*01:03L HLA-DRB1*04:02L HLA-DRB1*04:05L HLA-DQA1*01:02-B1*06:02L HLA-DRB1*08:04L HLA-DRB1*14:01L HLA-DRB1*11:04L HLA-DRB1*11:01L HLA-DRB1*14:54L HLA-DPA1*01:02-B1*04:01L HLA-DRB1*16:01L HLA-DRB1*04:08L
  REGION 1..12: note = CONT. FROM ABOVE: HLA-DRB1*08:03L HLA-DQA1*02:01-B1*03:03L
  source 1..12: note = Severe acute respiratory syndrome coronavirus 2
EQPYVFIKRSDA

SEQ ID NO: 15438 - protein, 11 aa, Severe acute respiratory syndrome-related coronavirus
  REGION 1..11: note = Table B: HLA-DRB1*01:03L HLA-DRB1*14:01L HLA-DRB1*11:04L HLA-DRB1*11:01L HLA-DRB1*16:01L HLA-DRB1*04:08L
  source 1..11: note = Severe acute respiratory syndrome coronavirus 2
PYVFIKRSDAR

SEQ ID NO: 15439 - protein, 11 aa, Severe acute respiratory syndrome-related coronavirus
  REGION 1..11: note = Table B: HLA-DRB1*01:03L HLA-DQA1*03:01-B1*03:02L HLA-DRB1*16:01L HLA-DQA1*02:01-B1*03:03L
  source 1..11: note = Severe acute respiratory syndrome coronavirus 2
IKRSDARTAPH

SEQ ID NO: 15440 - protein, 13 aa, Severe acute respiratory syndrome-related coronavirus
  REGION 1..13: note = Table B: HLA-DRB1*01:03L HLA-DRB1*04:02L HLA-DRB1*04:04L HLA-DRB1*04:05L HLA-DRB1*08:04L HLA-DPA1*01:03-B1*03:01L HLA-DRB1*11:03L HLA-DRB1*11:04L HLA-DRB1*14:02L HLA-DQA1*01:01-B1*05:01L HLA-DRB1*11:01L HLA-DQA1*01-B1*05L
  REGION 1..13: note = CONT. FROM ABOVE: HLA-DQA1*05:05-B1*03:19L HLA-DPA1*01:03-B1*04: 01L HLA-DRB1*04:10L HLA-DRB1*12:02L HLA-DPA1*02:01-B1*13:01L HLA -DPA1*01:03-B1*02:01L HLA-DPA1*01:03-B1*104:01L HLA-DRB1*10:01L HLA-DRB1*04:08L HLA-DRB1*08:03L
  source 1..13: note = Severe acute respiratory syndrome coronavirus 2
VAELEGIQYGRSG

SEQ ID NO: 15441 - protein, 12 aa, Severe acute respiratory syndrome-related coronavirus
  REGION 1..12: note = Table B: HLA-DRB1*01:03L HLA-DQA1*01:02-B1*06:02L HLA-DPA1*01:03-B1*03:01L HLA-DQA1*01:01-B1*05:01L HLA-DQA1*05:01-B1*02:01L HLA-DPA1*01:03-B1*04:02L HLA-DPA1*03:01-B1*105:01L HLA-DRB1*16:01L HLA-DRB1*04:08L
  source 1..12: note = Severe acute respiratory syndrome coronavirus 2
LEGIQYGRSGET

SEQ ID NO: 15442 - protein, 16 aa, Severe acute respiratory syndrome-related coronavirus
  REGION 1..16: note = Table B: HLA-DRB1*01:03L HLA-DRB1*01:01L HLA-DRB1*10:01L
  source 1..16: note = Severe acute respiratory syndrome coronavirus 2
GETLGVLVPHVGEIPV

SEQ ID NO: 15443 - protein, 14 aa, Severe acute respiratory syndrome-related coronavirus
  REGION 1..14: note = Table B: HLA-DRB1*01:03L HLA-DRB1*01:02L HLA-DRB1*11:04L HLA-DRB1*08:01L
  source 1..14: note = Severe acute respiratory syndrome coronavirus 2
VGEIPVAYRKVLLR

SEQ ID NO: 15444 - protein, 12 aa, Severe acute respiratory syndrome-related coronavirus
  REGION 1..12: note = Table B: HLA-DRB1*01:03L HLA-DRB1*01:02L HLA-DRB1*16:01L HLA-DRB1*04:08L
  source 1..12: note = Severe acute respiratory syndrome coronavirus 2
IPVAYRKVLLRK

SEQ ID NO: 15445 - protein, 14 aa, Severe acute respiratory syndrome-related coronavirus
  REGION 1..14: note = Table B: HLA-DRB1*01:03L HLA-DRB1*04:08L
  source 1..14: note = Severe acute respiratory syndrome coronavirus 2
PVAYRKVLLRKNGN

SEQ ID NO: 15446 - protein, 13 aa, Severe acute respiratory syndrome-related coronavirus
  REGION 1..13: note = Table B: HLA-DRB1*01:03L HLA-DRB1*01:02L HLA-DRB1*04:08L
  source 1..13: note = Severe acute respiratory syndrome coronavirus 2
YRKVLLRKNGNKG

SEQ ID NO: 15447 - protein, 13 aa, Severe acute respiratory syndrome-related coronavirus
  REGION 1..13: note = Table B: HLA-DRB1*01:03L HLA-DRB1*01:02L HLA-DRB1*04:08L
  source 1..13: note = Severe acute respiratory syndrome coronavirus 2
KVLLRKNGNKGAG

SEQ ID NO: 15448 - protein, 14 aa, Severe acute respiratory syndrome-related coronavirus
  REGION 1..14: note = Table B: HLA-DRB1*01:03L HLA-DRB1*01:02L
  source 1..14: note = Severe acute respiratory syndrome coronavirus 2
VLLRKNGNKGAGGH

SEQ ID NO: 15449 - protein, 12 aa, Severe acute respiratory syndrome-related coronavirus
  REGION 1..12: note = Table B: HLA-DRB1*01:03L HLA-DQA1*01:02-B1*06:02L HLA-DQA1*05:05-B1*03:19L HLA-DQA1*05:05-B1*03:01L HLA-DRB1*04:08L
  source 1..12: note = Severe acute respiratory syndrome coronavirus 2
GAGGHSYGADLK

SEQ ID NO: 15450 - protein, 14 aa, Severe acute respiratory syndrome-related coronavirus
  REGION 1..14: note = Table B: HLA-DRB1*01:03L HLA-DRB1*04:02L HLA-DRB1*04:05L HLA-DRB1*01:02L HLA-DPA1*01:03-B1*03:01L HLA-DRB1*14:01L HLA-DRB1*14:02L HLA-DQA1*01:01-B1*05:01L HLA-DRB1*08:01L
  source 1..14: note = Severe acute respiratory syndrome coronavirus 2
DELGTDPYEDFQEN

SEQ ID NO: 15451 - protein, 14 aa, Severe acute respiratory syndrome-related coronavirus
  REGION 1..14: note = Table B: HLA-DRB1*01:03L HLA-DRB1*04:05L HLA-DRB1*01:02L HLA-DRB1*08:01L HLA-DRB1*04:08L
  source 1..14: note = Severe acute respiratory syndrome coronavirus 2
DPYEDFQENWNTKH

SEQ ID NO: 15452 - protein, 11 aa, Severe acute respiratory syndrome-related coronavirus
  REGION 1..11: note = Table B: HLA-DRB1*01:03L
  source 1..11: note = Severe acute respiratory syndrome coronavirus 2
WNTKHSSGVTR

SEQ ID NO: 15453 - protein, 11 aa, Severe acute respiratory syndrome-related coronavirus
  REGION 1..11: note = Table B: HLA-DRB1*01:03L HLA-DQA1*02:01-B1*03:03L
  source 1..11: note = Severe acute respiratory syndrome coronavirus 2
NTKHSSGVTRE

SEQ ID NO: 15454 - protein, 12 aa, Severe acute respiratory syndrome-related coronavirus
  REGION 1..12: note = Table B: HLA-DRB1*01:03L HLA-DPA1*01:03-B1*04:02L HLA-DRB1*04:08L
  source 1..12: note = Severe acute respiratory syndrome coronavirus 2
LNGGAYTRYVDN

SEQ ID NO: 15455 - protein, 12 aa, Severe acute respiratory syndrome-related coronavirus
  REGION 1..12: note = Table B: HLA-DRB1*01:03L HLA-DQA1*01:01-B1*05:01L HLA-DRB1*08:01L HLA-DQA1*05:01-B1*02:01L HLA-DPA1*01:03-B1*04:02L
  source 1..12: note = Severe acute respiratory syndrome coronavirus 2
NGGAYTRYVDNN

SEQ ID NO: 15456 - protein, 14 aa, Severe acute respiratory syndrome-related coronavirus
  REGION 1..14: note = Table B: HLA-DRB1*01:03L HLA-DRB1*01:02L HLA-DQA1*01-B1*05L HLA-DRB1*12:01L HLA-DPA1*02:01-B1*13:01L HLA-DPA1*03:01-B1*105:01L HLA-DRB1*16:01L HLA-DRB1*15:03L
  source 1..14: note = Severe acute respiratory syndrome coronavirus 2
YTRYVDNNFCGPDG

SEQ ID NO: 15457 - protein, 12 aa, Severe acute respiratory syndrome-related coronavirus
  REGION 1..12: note = Table B: HLA-DRB1*01:03L HLA-DRB1*04:02L HLA-DRB1*04:04L HLA-DRB1*04:05L HLA-DQA1*01:02-B1*06:02L HLA-DRB1*01:02L HLA-DRB1*08:01L HLA-DRB1*16:01L
  source 1..12: note = Severe acute respiratory syndrome coronavirus 2
YPLECIKDLLAR

SEQ ID NO: 15458 - protein, 14 aa, Severe acute respiratory syndrome-related coronavirus
  REGION 1..14: note = Table B: HLA-DRB1*01:03L
  source 1..14: note = Severe acute respiratory syndrome coronavirus 2
PLECIKDLLARAGK

SEQ ID NO: 15459 - protein, 13 aa, Severe acute respiratory syndrome-related coronavirus
  REGION 1..13: note = Table B: HLA-DRB1*01:03L HLA-DRB1*04:05L HLA-DRB1*16:01L
  source 1..13: note = Severe acute respiratory syndrome coronavirus 2
KRGVYCCREHEHE

SEQ ID NO: 15460 - protein, 13 aa, Severe acute respiratory syndrome-related coronavirus
  REGION 1..13: note = Table B: HLA-DRB1*01:03L HLA-DRB1*04:08L
  source 1..13: note = Severe acute respiratory syndrome coronavirus 2
EIKLAKKFDTFNG

SEQ ID NO: 15461 - protein, 10 aa, Severe acute respiratory syndrome-related coronavirus
  REGION 1..10: note = Table B: HLA-DRB1*01:03L HLA-DQA1*03:01-B1*03:02L
  source 1..10: note = Severe acute respiratory syndrome coronavirus 2
TIQPRVEKKK

SEQ ID NO: 15462 - protein, 16 aa, Severe acute respiratory syndrome-related coronavirus
  REGION 1..16: note = Table B: HLA-DRB1*01:03L HLA-DRB1*04:08L
  source 1..16: note = Severe acute respiratory syndrome coronavirus 2
IQPRVEKKKLDGFMGR

SEQ ID NO: 15463 - protein, 14 aa, Severe acute respiratory syndrome-related coronavirus
  REGION 1..14: note = Table B: HLA-DRB1*01:03L HLA-DRB1*04:05L HLA-DQA1*01:02-B1*06:02L HLA-DRB1*08:01L HLA-DRB1*12:01L HLA-DPA1*02:01-B1*13:01L HLA-DRB1*04:08L HLA-DQA1*02:01-B1*03:03L HLA-DRB1*15:03L
  source 1..14: note = Severe acute respiratory syndrome coronavirus 2
VEKKKLDGFMGRIR

SEQ ID NO: 15464 - protein, 16 aa, Severe acute respiratory syndrome-related coronavirus
  REGION 1..16: note = Table B: HLA-DRB1*01:03L HLA-DRB1*12:01L HLA-DRB1*04:08L
  source 1..16: note = Severe acute respiratory syndrome coronavirus 2
KKKLDGFMGRIRSVYP

SEQ ID NO: 15465 - protein, 12 aa, Severe acute respiratory syndrome-related coronavirus
  REGION 1..12: note = Table B: HLA-DRB1*01:03L HLA-DRB1*04:04L HLA-DRB1*04:05L HLA-DRB1*01:02L HLA-DRB1*12:01L HLA-DRB1*16:01L HLA-DRB1*04:08L HLA-DRB1*15:03L
  source 1..12: note = Severe acute respiratory syndrome coronavirus 2
RIRSVYPVASPN

SEQ ID NO: 15466 - protein, 12 aa, Severe acute respiratory syndrome-related coronavirus
  REGION 1..12: note = Table B: HLA-DRB1*01:03L HLA-DRB1*01:02L HLA-DPA1*01:03-B1*03:01L HLA-DRB1*14:01L HLA-DPA1*01:03-B1*04:02L HLA-DPA1*02:01-B1*13:01L HLA-DRB1*04:08L HLA-DRB1*15:03L
  source 1..12: note = Severe acute respiratory syndrome coronavirus 2
ETSWQTGDFVKA

SEQ ID NO: 15467 - protein, 17 aa, Severe acute respiratory syndrome-related coronavirus
  REGION 1..17: note = Table B: HLA-DRB1*01:03L HLA-DPA1*03:01-B1*105:01L HLA-DRB1*08:03L
  source 1..17: note = Severe acute respiratory syndrome coronavirus 2
VVKIYCPACHNSEVGPE

SEQ ID NO: 15468 - protein, 13 aa, Severe acute respiratory syndrome-related coronavirus
  REGION 1..13: note = Table B: HLA-DRB1*01:03L HLA-DRB1*04:04L HLA-DQA1*01:02-B1*06:02L HLA-DRB1*01:02L HLA-DRB1*12:01L HLA-DRB1*04:08L HLA-DRB1*15:01L
  source 1..13: note = Severe acute respiratory syndrome coronavirus 2
HSLAEYHNESGLK

SEQ ID NO: 15469 - protein, 12 aa, Severe acute respiratory syndrome-related coronavirus
  REGION 1..12: note = Table B: HLA-DRB1*01:03L HLA-DRB1*04:08L
  source 1..12: note = Severe acute respiratory syndrome coronavirus 2
EYHNESGLKTIL

SEQ ID NO: 15470 - protein, 12 aa, Severe acute respiratory syndrome-related coronavirus
  REGION 1..12: note = Table B: HLA-DRB1*01:03L HLA-DRB1*04:08L
  source 1..12: note = Severe acute respiratory syndrome coronavirus 2
YHNESGLKTILR

SEQ ID NO: 15471 - protein, 12 aa, Severe acute respiratory syndrome-related coronavirus
  REGION 1..12: note = Table B: HLA-DRB1*01:03L HLA-DQA1*01:02-B1*06:02L HLA-DRB1*01:02L HLA-DRB1*14:01L HLA-DRB1*11:04L HLA-DRB1*08:01L HLA-DRB1*11:01L HLA-DRB1*04:08L
  source 1..12: note = Severe acute respiratory syndrome coronavirus 2
GLKTILRKGGRT

SEQ ID NO: 15472 - protein, 13 aa, Severe acute respiratory syndrome-related coronavirus
  REGION 1..13: note = Table B: HLA-DRB1*01:03L HLA-DRB1*01:02L HLA-DRB1*14:01L HLA-DRB1*12:01L HLA-DRB1*16:01L HLA-DRB1*04:08L HLA-DRB1*15:03L
  source 1..13: note = Severe acute respiratory syndrome coronavirus 2
LKTILRKGGRTIA

SEQ ID NO: 15473 - protein, 13 aa, Severe acute respiratory syndrome-related coronavirus
  REGION 1..13: note = Table B: HLA-DRB1*01:03L HLA-DQA1*01:02-B1*06:02L HLA-DRB1*01:02L
  source 1..13: note = Severe acute respiratory syndrome coronavirus 2
TILRKGGRTIAFG

SEQ ID NO: 15474 - protein, 14 aa, Severe acute respiratory syndrome-related coronavirus
  REGION 1..14: note = Table B: HLA-DRB1*01:03L HLA-DRB1*14:54L
  source 1..14: note = Severe acute respiratory syndrome coronavirus 2
HTGVVGEGSEGLND

SEQ ID NO: 15475 - protein, 14 aa, Severe acute respiratory syndrome-related coronavirus
  REGION 1..14: note = Table B: HLA-DRB1*01:03L HLA-DRB1*04:08L HLA-DRB1*15:03L
  source 1..14: note = Severe acute respiratory syndrome coronavirus 2
GLNDNLLEILQKEK

SEQ ID NO: 15476 - protein, 13 aa, Severe acute respiratory syndrome-related coronavirus
  REGION 1..13: note = Table B: HLA-DRB1*01:03L HLA-DRB1*04:04L HLA-DRB1*04:05L HLA-DRB1*04:08L
  source 1..13: note = Severe acute respiratory syndrome coronavirus 2
KVNINIVGDFKLN

SEQ ID NO: 15477 - protein, 14 aa, Severe acute respiratory syndrome-related coronavirus
  REGION 1..14: note = Table B: HLA-DRB1*01:03L HLA-DRB1*11:02L HLA-DPA1*01:03-B1*04:02L
  source 1..14: note = Severe acute respiratory syndrome coronavirus 2
VGDFKLNEEIAIIL

SEQ ID NO: 15478 - protein, 14 aa, Severe acute respiratory syndrome-related coronavirus
  REGION 1..14: note = Table B: HLA-DRB1*01:03L HLA-DRB1*04:05L HLA-DRB1*11:04L HLA-DRB1*04:10L HLA-DRB1*14:54L HLA-DQA1*05:05-B1*03:01L HLA-DRB1*04:08L HLA-DQA1*02:01-B1*03:03L
  source 1..14: note = Severe acute respiratory syndrome coronavirus 2
NEEIAIILASFSAS

SEQ ID NO: 15479 - protein, 10 aa, Severe acute respiratory syndrome-related coronavirus
  REGION 1..10: note = Table B: HLA-DRB1*01:03L HLA-DQA1*01:02-B1*06:02L HLA-DRB1*14:02L HLA-DQA1*05:01-B1*02:01L HLA-DPA1*01:03-B1*04:01L HLA-DPA1*03:01-B1*105:01L HLA-DQA1*01:03-B1*06:01L HLA-DQA1*02:01-B1*03:03L
  source 1..10: note = Severe acute respiratory syndrome coronavirus 2
TVKGLDYKAF

SEQ ID NO: 15480 - protein, 12 aa, Severe acute respiratory syndrome-related coronavirus
  REGION 1..12: note = Table B: HLA-DRB1*01:03L HLA-DPA1*01:03-B1*04:01L HLA-DPA1*01:03-B1*04:02L HLA-DRB1*04:08L
  source 1..12: note = Severe acute respiratory syndrome coronavirus 2
KGLDYKAFKQIV

SEQ ID NO: 15481 - protein, 14 aa, Severe acute respiratory syndrome-related coronavirus
  REGION 1..14: note = Table B: HLA-DRB1*01:03L HLA-DRB1*12:01L HLA-DRB1*16:01L HLA-DRB1*04:08L
  source 1..14: note = Severe acute respiratory syndrome coronavirus 2
QIVESCGNFKVTKG

SEQ ID NO: 15482 - protein, 10 aa, Severe acute respiratory syndrome-related coronavirus
  REGION 1..10: note = Table B: HLA-DRB1*01:03L HLA-DRB1*01:02L HLA-DQA1*03:01-B1*03:02L HLA-DRB1*16:01L HLA-DRB1*04:08L
  source 1..10: note = Severe acute respiratory syndrome coronavirus 2
NFKVTKGKAK

SEQ ID NO: 15483 - protein, 10 aa, Severe acute respiratory syndrome-related coronavirus
  REGION 1..10: note = Table B: HLA-DRB1*01:03L HLA-DRB1*01:02L HLA-DRB1*12:01L HLA-DRB1*16:01L HLA-DRB1*04:08L
  source 1..10: note = Severe acute respiratory syndrome coronavirus 2
FKVTKGKAKK

SEQ ID NO: 15484 - protein, 14 aa, Severe acute respiratory syndrome-related coronavirus
  REGION 1..14: note = Table B: HLA-DRB1*01:03L HLA-DRB1*04:05L HLA-DQA1*01:02-B1*06:02L HLA-DRB1*01:02L HLA-DRB1*08:01L HLA-DRB1*12:01L HLA-DPA1*02:01-B1*13:01L HLA-DRB1*16:01L HLA-DRB1*04:08L HLA-DQA1*02:01-B1*03:03L
  source 1..14: note = Severe acute respiratory syndrome coronavirus 2
GKAKKGAWNIGEQK

SEQ ID NO: 15485 - protein, 13 aa, Severe acute respiratory syndrome-related coronavirus
  REGION 1..13: note = Table B: HLA-DRB1*01:03L HLA-DRB1*04:05L HLA-DPA1*03:01-B1*04:02L HLA-DRB1*08:01L
  source 1..13: note = Severe acute respiratory syndrome coronavirus 2
AARVVRSIFSRTL

SEQ ID NO: 15486 - protein, 12 aa, Severe acute respiratory syndrome-related coronavirus
  REGION 1..12: note = Table B: HLA-DRB1*01:03L HLA-DQA1*01:02-B1*06:02L HLA-DRB1*04:08L
  source 1..12: note = Severe acute respiratory syndrome coronavirus 2
RVVRSIFSRTLE

SEQ ID NO: 15487 - protein, 11 aa, Severe acute respiratory syndrome-related coronavirus
  REGION 1..11: note = Table B: HLA-DRB1*01:03L HLA-DRB1*04:02L
  source 1..11: note = Severe acute respiratory syndrome coronavirus 2
TAQNSVRVLQK

SEQ ID NO: 15488 - protein, 13 aa, Severe acute respiratory syndrome-related coronavirus
  REGION 1..13: note = Table B: HLA-DRB1*01:03L HLA-DRB1*04:05L HLA-DRB1*01:02L HLA-DRB4*03:01NL HLA-DRB1*08:04L HLA-DQA1*01:01-B1*05:01L HLA-DRB1*08:01L HLA-DRB1*04:10L HLA-DPA1*02:01-B1*13:01L HLA-DRB1*14:54L HLA-DQA1*05:05-B1*03:01L HLA-DRB1*04:08L
  source 1..13: note = Severe acute respiratory syndrome coronavirus 2
DGISQYSLRLIDA

SEQ ID NO: 15489 - protein, 12 aa, Severe acute respiratory syndrome-related coronavirus
  REGION 1..12: note = Table B: HLA-DRB1*01:03L HLA-DQA1*01:02-B1*06:02L HLA-DRB1*01:01L HLA-DQA1*05:05-B1*03:19L HLA-DRB1*10:01L HLA-DQA1*01:03-B1*06:01L HLA-DRB1*04:08L
  source 1..12: note = Severe acute respiratory syndrome coronavirus 2
GVVQLTSQWLTN

SEQ ID NO: 15490 - protein, 13 aa, Severe acute respiratory syndrome-related coronavirus
  REGION 1..13: note = Table B: HLA-DRB1*01:03L HLA-DRB1*01:02L HLA-DRB1*04:08L
  source 1..13: note = Severe acute respiratory syndrome coronavirus 2
TSQWLTNIFGTVY

SEQ ID NO: 15491 - protein, 12 aa, Severe acute respiratory syndrome-related coronavirus
  REGION 1..12: note = Table B: HLA-DRB1*01:03L HLA-DRB1*01:02L HLA-DPA1*01:03-B1*02:01L HLA-DPA1*01:02-B1*04:01L HLA-DQA1*01:03-B1*06:01L HLA-DRB1*04:08L
  source 1..12: note = Severe acute respiratory syndrome coronavirus 2
WLTNIFGTVYEK

SEQ ID NO: 15492 - protein, 10 aa, Severe acute respiratory syndrome-related coronavirus
  REGION 1..10: note = Table B: HLA-DRB1*01:03L HLA-DPA1*03:01-B1*04:02L HLA-DPA1*01:03-B1*04:01L HLA-DPA1*01:03-B1*04:02L HLA-DPA1*03:01-B1*105:01L HLA-DPA1*01:02-B1*04:01L HLA-DRB1*16:01L HLA-DQA1*01:03-B1*06:01L HLA-DRB1*04:08L
  source 1..10: note = Severe acute respiratory syndrome coronavirus 2
IFGTVYEKLK

SEQ ID NO: 15493 - protein, 14 aa, Severe acute respiratory syndrome-related coronavirus
  REGION 1..14: note = Table B: HLA-DRB1*01:03L HLA-DRB1*04:04L HLA-DRB1*12:01L HLA-DPA1*02:01-B1*13:01L
  source 1..14: note = Severe acute respiratory syndrome coronavirus 2
YEKLKPVLDWLEEK

SEQ ID NO: 15494 - protein, 13 aa, Severe acute respiratory syndrome-related coronavirus
  REGION 1..13: note = Table B: HLA-DRB1*01:03L
  source 1..13: note = Severe acute respiratory syndrome coronavirus 2
LKPVLDWLEEKFK

SEQ ID NO: 15495 - protein, 11 aa, Severe acute respiratory syndrome-related coronavirus
  REGION 1..11: note = Table B: HLA-DRB1*01:03L HLA-DQA1*01:02-B1*06:02L HLA-DPA1*03:01-B1*04:02L HLA-DQA1*01-B1*05L HLA-DPA1*01:03-B1*04:01L HLA-DPA1*01:03-B1*04:02L HLA-DPA1*03:01-B1*105:01L HLA-DPA1*01:02-B1*04:01L
  REGION 1..11: note = CONT. FROM ABOVE: HLA-DRB1*16:01L HLA-DRB1*04:08L
  source 1..11: note = Severe acute respiratory syndrome coronavirus 2
WLEEKFKEGVE

SEQ ID NO: 15496 - protein, 13 aa, Severe acute respiratory syndrome-related coronavirus
  REGION 1..13: note = Table B: HLA-DRB1*01:03L HLA-DRB1*04:04L HLA-DQA1*01:02-B1*06:02L HLA-DRB1*08:01L HLA-DRB1*11:01L HLA-DPA1*01:03-B1*104:01L HLA-DRB1*07:01L HLA-DQA1*02:01-B1*03:03L HLA-DRB1*15:03L
  source 1..13: note = Severe acute respiratory syndrome coronavirus 2
EKFKEGVEFLRDG

SEQ ID NO: 15497 - protein, 14 aa, Severe acute respiratory syndrome-related coronavirus
  REGION 1..14: note = Table B: HLA-DRB1*01:03L HLA-DRB1*04:04L HLA-DRB1*08:01L HLA-DPA1*01:03-B1*04:02L HLA-DPA1*01:03-B1*104:01L HLA-DQA1*02:01-B1*03:03L
  source 1..14: note = Severe acute respiratory syndrome coronavirus 2
KFKEGVEFLRDGWE

SEQ ID NO: 15498 - protein, 10 aa, Severe acute respiratory syndrome-related coronavirus
  REGION 1..10: note = Table B: HLA-DRB1*01:03L HLA-DQA1*01:02-B1*06:02L HLA-DPA1*02:01-B1*13:01L HLA-DRB1*16:01L HLA-DQA1*01:03-B1*06:01L HLA-DQA1*02:01-B1*03:03L
  source 1..10: note = Severe acute respiratory syndrome coronavirus 2
LRDGWEIVKF

SEQ ID NO: 15499 - protein, 10 aa, Severe acute respiratory syndrome-related coronavirus
  REGION 1..10: note = Table B: HLA-DRB1*01:03L HLA-DPA1*03:01-B1*04:02L HLA-DQA1*01-B1*05L HLA-DPA1*01:03-B1*04:01L HLA-DPA1*01:03-B1*04:02L HLA-DPA1*03:01-B1*105:01L HLA-DPA1*01:02-B1*04:01L HLA-DRB1*16:01L
  REGION 1..10: note = CONT. FROM ABOVE: HLA-DQA1*01:03-B1*06:01L HLA-DRB1*04:08L
  source 1..10: note = Severe acute respiratory syndrome coronavirus 2
GWEIVKFIST

SEQ ID NO: 15500 - protein, 12 aa, Severe acute respiratory syndrome-related coronavirus
  REGION 1..12: note = Table B: HLA-DRB1*01:03L HLA-DRB1*01:02L HLA-DPA1*01:03-B1*04:02L HLA-DRB1*04:08L
  source 1..12: note = Severe acute respiratory syndrome coronavirus 2
EIVGGQIVTCAK

SEQ ID NO: 15501 - protein, 12 aa, Severe acute respiratory syndrome-related coronavirus
  REGION 1..12: note = Table B: HLA-DRB1*01:03L HLA-DRB1*01:02L HLA-DPA1*01:03-B1*03:01L HLA-DRB1*08:01L HLA-DPA1*01:03-B1*04:02L HLA-DRB1*04:08L
  source 1..12: note = Severe acute respiratory syndrome coronavirus 2
IVGGQIVTCAKE

SEQ ID NO: 15502 - protein, 13 aa, Severe acute respiratory syndrome-related coronavirus
  REGION 1..13: note = Table B: HLA-DRB1*01:03L HLA-DRB1*04:02L HLA-DRB1*04:05L HLA-DRB1*01:02L HLA-DRB1*08:04L HLA-DRB1*12:01L HLA-DQA1*03:01-B1*03:02L HLA-DPA1*01:02-B1*04:01L HLA-DRB1*16:01L HLA-DRB1*04:08L HLA-DRB1*15:03L
  source 1..13: note = Severe acute respiratory syndrome coronavirus 2
VGGQIVTCAKEIK

SEQ ID NO: 15503 - protein, 10 aa, Severe acute respiratory syndrome-related coronavirus
  REGION 1..10: note = Table B: HLA-DRB1*01:03L HLA-DRB1*08:01L HLA-DPA1*03:01-B1*105:01L HLA-DQA1*03:01-B1*03:02L HLA-DPA1*01:02-B1*04:01L HLA-DRB1*16:01L HLA-DQA1*01:03-B1*06:01L HLA-DRB1*04:08L
  REGION 1..10: note = CONT. FROM ABOVE: HLA-DQA1*02:01-B1*03:03L
  source 1..10: note = Severe acute respiratory syndrome coronavirus 2
VQTFFKLVNK

SEQ ID NO: 15504 - protein, 15 aa, Severe acute respiratory syndrome-related coronavirus
  REGION 1..15: note = Table B: HLA-DRB1*01:03L HLA-DQA1*01:02-B1*06:02L HLA-DRB1*01:01L HLA-DQA1*05:05-B1*03:01L HLA-DRB1*10:01L HLA-DRB1*04:08L
  source 1..15: note = Severe acute respiratory syndrome coronavirus 2
VNKFLALCADSIIIG

SEQ ID NO: 15505 - protein, 12 aa, Severe acute respiratory syndrome-related coronavirus
  REGION 1..12: note = Table B: HLA-DRB1*01:03L HLA-DRB1*04:05L HLA-DQA1*01:02-B1*06:02L HLA-DRB1*01:02L HLA-DRB1*12:01L HLA-DRB1*16:01L HLA-DQA1*01:03-B1*06:01L
  source 1..12: note = Severe acute respiratory syndrome coronavirus 2
GAKLKALNLGET

SEQ ID NO: 15506 - protein, 15 aa, Severe acute respiratory syndrome-related coronavirus
  REGION 1..15: note = Table B: HLA-DRB1*01:03L HLA-DRB1*04:04L HLA-DRB1*16:01L
  source 1..15: note = Severe acute respiratory syndrome coronavirus 2
LKALNLGETFVTHSK

SEQ ID NO: 15507 - protein, 12 aa, Severe acute respiratory syndrome-related coronavirus
  REGION 1..12: note = Table B: HLA-DRB1*01:03L HLA-DRB1*11:04L HLA-DRB1*11:01L HLA-DRB1*16:01L HLA-DRB1*04:08L
  source 1..12: note = Severe acute respiratory syndrome coronavirus 2
KGLYRKCVKSRE

SEQ ID NO: 15508 - protein, 15 aa, Severe acute respiratory syndrome-related coronavirus
  REGION 1..15: note = Table B: HLA-DRB1*01:03L HLA-DRB1*04:04L HLA-DRB1*08:04L HLA-DRB1*08:77L HLA-DPA1*03:01-B1*04:02L HLA-DRB1*03:01L HLA-DRB1*11:03L HLA-DRB4*01:01L HLA-DPA1*01:03-B1*04:01L HLA-DRB3*01:01L HLA-DPA1*01:03-B1*104:01L HLA-DRB1*10:01L
  REGION 1..15: note = CONT. FROM ABOVE: HLA-DRB1*04:08L
  source 1..15: note = Severe acute respiratory syndrome coronavirus 2
LPTEVLTEEVVLKTG

SEQ ID NO: 15509 - protein, 14 aa, Severe acute respiratory syndrome-related coronavirus
  REGION 1..14: note = Table B: HLA-DRB1*01:03L HLA-DRB1*01:02L HLA-DRB1*08:04L
  source 1..14: note = Severe acute respiratory syndrome coronavirus 2
TEEVVLKTGDLQPL

SEQ ID NO: 15510 - protein, 14 aa, Severe acute respiratory syndrome-related coronavirus
  REGION 1..14: note = Table B: HLA-DRB1*01:03L HLA-DRB1*08:04L HLA-DRB1*14:01L HLA-DPA1*02:01-B1*13:01L HLA-DPA1*01:03-B1*02:01L
  source 1..14: note = Severe acute respiratory syndrome coronavirus 2
INGLMLLEIKDTEK

SEQ ID NO: 15511 - protein, 14 aa, Severe acute respiratory syndrome-related coronavirus
  REGION 1..14: note = Table B: HLA-DRB1*01:03L HLA-DRB1*01:01L HLA-DRB1*10:01L HLA-DRB1*04:08L
  source 1..14: note = Severe acute respiratory syndrome coronavirus 2
TEKYCALAPNMMVT

SEQ ID NO: 15512 - protein, 14 aa, Severe acute respiratory syndrome-related coronavirus
  REGION 1..14: note = Table B: HLA-DRB1*01:03L HLA-DRB1*01:01L HLA-DRB1*12:01L HLA-DQA1*05:05-B1*03:01L HLA-DRB1*10:01L HLA-DRB1*04:08L
  source 1..14: note = Severe acute respiratory syndrome coronavirus 2
EKYCALAPNMMVTN

SEQ ID NO: 15513 - protein, 12 aa, Severe acute respiratory syndrome-related coronavirus
  REGION 1..12: note = Table B: HLA-DRB1*01:03L HLA-DRB1*04:02L HLA-DRB1*04:05L HLA-DPA1*01:03-B1*04:02L HLA-DPA1*03:01-B1*105:01L HLA-DRB1*04:08L
  source 1..12: note = Severe acute respiratory syndrome coronavirus 2
GDDTVIEVQGYK

SEQ ID NO: 15514 - protein, 12 aa, Severe acute respiratory syndrome-related coronavirus
  REGION 1..12: note = Table B: HLA-DRB1*01:03L HLA-DRB1*04:05L HLA-DRB1*01:02L HLA-DRB1*14:01L HLA-DQA1*01-B1*05L HLA-DRB1*04:10L HLA-DRB1*12:02L HLA-DPA1*03:01-B1*105:01L HLA-DRB1*14:54L HLA-DRB1*15:03L
  source 1..12: note = Severe acute respiratory syndrome coronavirus 2
DDTVIEVQGYKS

SEQ ID NO: 15515 - protein, 10 aa, Severe acute respiratory syndrome-related coronavirus
  REGION 1..10: note = Table B: HLA-DRB1*01:03L HLA-DRB1*04:05L HLA-DQA1*01:02-B1*06:02L HLA-DPA1*02:01-B1*13:01L HLA-DPA1*03:01-B1*105:01L HLA-DRB1*16:01L HLA-DQA1*01:03-B1*06:01L HLA-DQA1*02:01-B1*03:03L
  REGION 1..10: note = CONT. FROM ABOVE: HLA-DRB1*15:03L
  source 1..10: note = Severe acute respiratory syndrome coronavirus 2
QGYKSVNITF

SEQ ID NO: 15516 - protein, 15 aa, Severe acute respiratory syndrome-related coronavirus
  REGION 1..15: note = Table B: HLA-DRB1*01:03L HLA-DRB1*04:04L HLA-DRB1*08:04L HLA-DRB1*08:01L HLA-DRB1*04:08L
  source 1..15: note = Severe acute respiratory syndrome coronavirus 2
IKTLQPVSELLTPLG

SEQ ID NO: 15517 - protein, 16 aa, Severe acute respiratory syndrome-related coronavirus
  REGION 1..16: note = Table B: HLA-DRB1*01:03L HLA-DPA1*01:03-B1*03:01L HLA-DPA1*01:03-B1*04:01L HLA-DRB1*12:01L HLA-DRB1*16:01L HLA-DRB1*04:08L HLA-DRB1*15:03L
  source 1..16: note = Severe acute respiratory syndrome coronavirus 2
EFKLASHMYCSFYPPD

SEQ ID NO: 15518 - protein, 11 aa, Severe acute respiratory syndrome-related coronavirus
  REGION 1..11: note = Table B: HLA-DRB1*01:03L HLA-DRB1*04:02L HLA-DRB1*11:03L HLA-DRB1*14:02L HLA-DRB1*14:54L HLA-DRB1*08:02L HLA-DQA1*02:01-B1*03:03L
  source 1..11: note = Severe acute respiratory syndrome coronavirus 2
EEEEFEPSTQY

SEQ ID NO: 15519 - protein, 13 aa, Severe acute respiratory syndrome-related coronavirus
  REGION 1..13: note = Table B: HLA-DRB1*01:03L HLA-DRB4*03:01NL HLA-DRB1*14:54L HLA-DRB1*14:17L
  source 1..13: note = Severe acute respiratory syndrome coronavirus 2
SAALQPEEEQEED

SEQ ID NO: 15520 - protein, 14 aa, Severe acute respiratory syndrome-related coronavirus
  REGION 1..14: note = Table B: HLA-DRB1*01:03L HLA-DRB1*04:05L HLA-DQA1*01:02-B1*06:02L HLA-DQA1*01-B1*05L HLA-DRB1*04:08L
  source 1..14: note = Severe acute respiratory syndrome coronavirus 2
LDDDSQQTVGQQDG

SEQ ID NO: 15521 - protein, 15 aa, Severe acute respiratory syndrome-related coronavirus
  REGION 1..15: note = Table B: HLA-DRB1*01:03L HLA-DRB4*03:01NL HLA-DQA1*01-B1*05L HLA-DRB1*12:01L HLA-DPA1*03:01-B1*105:01L HLA-DRB1*04:08L
  source 1..15: note = Severe acute respiratory syndrome coronavirus 2
DSQQTVGQQDGSEDN

SEQ ID NO: 15522 - protein, 10 aa, Severe acute respiratory syndrome-related coronavirus
  REGION 1..10: note = Table B: HLA-DRB1*01:03L HLA-DQA1*03:01-B1*03:02L HLA-DRB1*16:01L
  source 1..10: note = Severe acute respiratory syndrome coronavirus 2
IVEEAKKVKP

SEQ ID NO: 15523 - protein, 13 aa, Severe acute respiratory syndrome-related coronavirus
  REGION 1..13: note = Table B: HLA-DRB1*01:03L HLA-DRB1*04:04L HLA-DRB1*01:02L HLA-DRB1*12:01L HLA-DRB1*04:08L
  source 1..13: note = Severe acute respiratory syndrome coronavirus 2
KKVKPTVVVNAAN

SEQ ID NO: 15524 - protein, 11 aa, Severe acute respiratory syndrome-related coronavirus
  REGION 1..11: note = Table B: HLA-DRB1*01:03L HLA-DRB1*04:05L HLA-DRB1*08:04L HLA-DRB1*11:03L HLA-DRB1*11:04L HLA-DRB1*04:10L HLA-DRB1*12:02L HLA-DRB1*14:54L HLA-DQA1*01:03-B1*06:01L HLA-DRB1*04:08L
  source 1..11: note = Severe acute respiratory syndrome coronavirus 2
VVVNAANVYLK

SEQ ID NO: 15525 - protein, 14 aa, Severe acute respiratory syndrome-related coronavirus
  REGION 1..14: note = Table B: HLA-DRB1*01:03L HLA-DRB1*04:05L HLA-DRB1*16:01L HLA-DRB1*04:08L HLA-DRB1*15:03L
  source 1..14: note = Severe acute respiratory syndrome coronavirus 2
VVNAANVYLKHGGG

SEQ ID NO: 15526 - protein, 15 aa, Severe acute respiratory syndrome-related coronavirus
  REGION 1..15: note = Table B: HLA-DRB1*01:03L HLA-DRB1*04:02L HLA-DRB1*04:08L
  source 1..15: note = Severe acute respiratory syndrome coronavirus 2
NKATNNAMQVESDDY

SEQ ID NO: 15527 - protein, 14 aa, Severe acute respiratory syndrome-related coronavirus
  REGION 1..14: note = Table B: HLA-DRB1*01:03L HLA-DRB1*04:04L HLA-DRB1*01:02L HLA-DRB4*03:01NL HLA-DRB1*14:54L HLA-DRB1*10:01L HLA-DRB1*04:08L HLA-DRB1*08:03L
  source 1..14: note = Severe acute respiratory syndrome coronavirus 2
NNAMQVESDDYIAT

SEQ ID NO: 15528 - protein, 14 aa, Severe acute respiratory syndrome-related coronavirus
  REGION 1..14: note = Table B: HLA-DRB1*01:03L HLA-DRB1*04:05L HLA-DRB1*01:02L HLA-DPA1*03:01-B1*04:02L HLA-DRB1*12:01L HLA-DPA1*02:01-B1*13:01L HLA-DRB1*04:08L
  source 1..14: note = Severe acute respiratory syndrome coronavirus 2
NAMQVESDDYIATN

SEQ ID NO: 15529 - protein, 14 aa, Severe acute respiratory syndrome-related coronavirus
  REGION 1..14: note = Table B: HLA-DRB1*01:03L HLA-DRB1*01:02L
  source 1..14: note = Severe acute respiratory syndrome coronavirus 2
VGGSCVLSGHNLAK

SEQ ID NO: 15530 - protein, 15 aa, Severe acute respiratory syndrome-related coronavirus
  REGION 1..15: note = Table B: HLA-DRB1*01:03L HLA-DQA1*01:03-B1*06:01L HLA-DRB1*04:08L HLA-DQA1*02:01-B1*03:03L
  source 1..15: note = Severe acute respiratory syndrome coronavirus 2
GHNLAKHCLHVVGPN

SEQ ID NO: 15531 - protein, 14 aa, Severe acute respiratory syndrome-related coronavirus
  REGION 1..14: note = Table B: HLA-DRB1*01:03L HLA-DRB1*04:05L HLA-DRB1*01:02L HLA-DPA1*01:03-B1*03:01L HLA-DRB1*08:01L HLA-DRB1*12:01L HLA-DPA1*02:01-B1*13:01L HLA-DPA1*01:02-B1*04:01L HLA-DRB1*04:08L HLA-DRB1*15:03L
  source 1..14: note = Severe acute respiratory syndrome coronavirus 2
GPNVNKGEDIQLLK

SEQ ID NO: 15532 - protein, 15 aa, Severe acute respiratory syndrome-related coronavirus
  REGION 1..15: note = Table B: HLA-DRB1*01:03L HLA-DRB1*04:02L HLA-DRB1*04:05L HLA-DRB1*01:02L HLA-DPA1*01:03-B1*03:01L HLA-DPA1*03:01-B1*04:02L HLA-DQA1*01:01-B1*05:01L HLA-DRB1*08:01L HLA-DPA1*01:03-B1*04:01L HLA-DRB1*12:01L
  REGION 1..15: note = CONT. FROM ABOVE: HLA-DPA1*02:01-B1*13:01L HLA-DPA1*01:03-B1*104 :01L HLA-DPA1*01:02-B1*04:01L HLA-DRB1*16:01L HLA-DRB1*04:08L HL A-DRB1*15:03L
  source 1..15: note = Severe acute respiratory syndrome coronavirus 2
APLLSAGIFGADPIH

SEQ ID NO: 15533 - protein, 14 aa, Severe acute respiratory syndrome-related coronavirus
  REGION 1..14: note = Table B: HLA-DRB1*01:03L HLA-DRB1*04:05L HLA-DRB1*01:02L HLA-DRB1*08:01L HLA-DPA1*02:01-B1*13:01L HLA-DQA1*03:01-B1*03:02L HLA-DRB1*16:01L HLA-DRB1*04:08L HLA-DQA1*02:01-B1*03:03L
  source 1..14: note = Severe acute respiratory syndrome coronavirus 2
DPIHSLRVCVDTVR

SEQ ID NO: 15534 - protein, 14 aa, Severe acute respiratory syndrome-related coronavirus
  REGION 1..14: note = Table B: HLA-DRB1*01:03L HLA-DRB1*04:08L
  source 1..14: note = Severe acute respiratory syndrome coronavirus 2
IHSLRVCVDTVRTN

SEQ ID NO: 15535 - protein, 13 aa, Severe acute respiratory syndrome-related coronavirus
  REGION 1..13: note = Table B: HLA-DRB1*01:03L HLA-DRB1*01:02L HLA-DPA1*03:01-B1*04:02L HLA-DRB1*12:01L HLA-DRB1*16:01L HLA-DRB1*04:08L HLA-DRB1*15:03L
  source 1..13: note = Severe acute respiratory syndrome coronavirus 2
TVRTNVYLAVFDK

SEQ ID NO: 15536 - protein, 11 aa, Severe acute respiratory syndrome-related coronavirus
  REGION 1..11: note = Table B: HLA-DRB1*01:03L HLA-DPA1*01:03-B1*03:01L HLA-DPA1*03:01-B1*04:02L HLA-DQA1*01-B1*05L HLA-DPA1*01:03-B1*04:01L HLA-DPA1*01:03-B1*04:02L HLA-DRB1*12:01L HLA-DRB1*16:01L HLA-DQA1*01:03-B1*06:01L
  REGION 1..11: note = CONT. FROM ABOVE: HLA-DRB1*04:08L HLA-DQA1*02:01-B1*03:03L
  source 1..11: note = Severe acute respiratory syndrome coronavirus 2
DKLVSSFLEMK

SEQ ID NO: 15537 - protein, 13 aa, Severe acute respiratory syndrome-related coronavirus
  REGION 1..13: note = Table B: HLA-DRB1*01:03L HLA-DRB1*04:02L HLA-DRB1*04:05L HLA-DRB1*08:01L HLA-DQA1*02:01-B1*03:03L
  source 1..13: note = Severe acute respiratory syndrome coronavirus 2
EKQVEQKIAEIPK

SEQ ID NO: 15538 - protein, 15 aa, Severe acute respiratory syndrome-related coronavirus
  REGION 1..15: note = Table B: HLA-DRB1*01:03L HLA-DRB1*04:04L HLA-DRB1*04:05L HLA-DRB1*14:01L HLA-DQA1*01:01-B1*05:01L HLA-DRB1*04:10L HLA-DPA1*02:01-B1*13:01L HLA-DPA1*03:01-B1*105:01L HLA-DPA1*01:02-B1*04:01L
  source 1..15: note = Severe acute respiratory syndrome coronavirus 2
IPKEEVKPFITESKP

SEQ ID NO: 15539 - protein, 13 aa, Severe acute respiratory syndrome-related coronavirus
  REGION 1..13: note = Table B: HLA-DRB1*01:03L HLA-DRB1*04:04L HLA-DRB1*04:05L HLA-DRB4*03:01NL HLA-DRB1*14:01L HLA-DRB1*04:10L HLA-DPA1*03:01-B1*105:01L HLA-DRB1*14:54L HLA-DPA1*01:02-B1*04:01L
  source 1..13: note = Severe acute respiratory syndrome coronavirus 2
EEVKPFITESKPS

SEQ ID NO: 15540 - protein, 12 aa, Severe acute respiratory syndrome-related coronavirus
  REGION 1..12: note = Table B: HLA-DRB1*01:03L HLA-DRB1*04:05L HLA-DQA1*01:02-B1*06:02L HLA-DRB1*01:02L HLA-DRB1*08:04L HLA-DRB1*14:01L HLA-DRB1*11:04L HLA-DRB1*14:02L HLA-DRB1*08:01L HLA-DRB1*12:01L HLA-DPA1*03:01-B1*105:01L HLA-DRB1*04:08L
  REGION 1..12: note = CONT. FROM ABOVE: HLA-DRB1*15:03L
  source 1..12: note = Severe acute respiratory syndrome coronavirus 2
PFITESKPSVEQ

SEQ ID NO: 15541 - protein, 11 aa, Severe acute respiratory syndrome-related coronavirus
  REGION 1..11: note = Table B: HLA-DRB1*01:03L HLA-DRB1*14:01L HLA-DRB1*12:02L
  source 1..11: note = Severe acute respiratory syndrome coronavirus 2
ITESKPSVEQR

SEQ ID NO: 15542 - protein, 12 aa, Severe acute respiratory syndrome-related coronavirus
  REGION 1..12: note = Table B: HLA-DRB1*01:03L HLA-DRB1*08:01L HLA-DRB1*04:08L
  source 1..12: note = Severe acute respiratory syndrome coronavirus 2
PSVEQRKQDDKK

SEQ ID NO: 15543 - protein, 15 aa, Severe acute respiratory syndrome-related coronavirus
  REGION 1..15: note = Table B: HLA-DRB1*01:03L HLA-DRB1*04:05L HLA-DQA1*01:02-B1*06:02L HLA-DPA1*03:01-B1*04:02L HLA-DRB1*14:01L HLA-DRB1*12:01L HLA-DRB1*04:08L
  source 1..15: note = Severe acute respiratory syndrome coronavirus 2
ENLLLYIDINGNLHP

SEQ ID NO: 15544 - protein, 12 aa, Severe acute respiratory syndrome-related coronavirus
  REGION 1..12: note = Table B: HLA-DRB1*01:03L HLA-DRB1*04:05L HLA-DRB1*01:02L HLA-DRB4*03:01NL HLA-DRB1*08:04L HLA-DRB1*08:77L HLA-DRB3*02:01L HLA-DPA1*01:03-B1*03:01L HLA-DRB1*03:01L HLA-DRB1*11:03L HLA-DRB1*11:04L HLA-DRB1*14:02L HLA-DRB1*11:01L HLA-DRB5*01:01L
  REGION 1..12: note = CONT. FROM ABOVE: HLA-DRB1*13:01L HLA-DRB1*04:10L HLA-DRB1*09:01 L HLA-DRB1*12:02L HLA-DRB3*01:01L HLA-DPA1*03:01-B1*105:01L HLA- DRB1*14:54L HLA-DRB1*14:17L HLA-DRB1*07:01L HLA-DRB1*10:01L HLA- DRB1*04:08L HLA-DRB1*08:03L HLA-DRB1*15:03L
  source 1..12: note = Severe acute respiratory syndrome coronavirus 2
GNLHPDSATLVS

SEQ ID NO: 15545 - protein, 12 aa, Severe acute respiratory syndrome-related coronavirus
  REGION 1..12: note = Table B: HLA-DRB1*01:03L HLA-DRB1*04:02L HLA-DRB1*01:02L HLA-DRB4*03:01NL HLA-DRB1*08:04L HLA-DRB1*08:77L HLA-DRB3*02:01L HLA-DPA1*01:03-B1*03:01L HLA-DRB1*03:01L HLA-DRB1*11:03L HLA-DRB1*11:04L HLA-DRB1*14:02L HLA-DRB1*12:01L HLA-DRB1*12:02L
  REGION 1..12: note = CONT. FROM ABOVE: HLA-DRB3*01:01L HLA-DQA1*03:01-B1*03:02L HLA-D RB1*14:54L HLA-DQA1*02:01-B1*03:03L HLA-DRB1*15:03L
  source 1..12: note = Severe acute respiratory syndrome coronavirus 2
NLHPDSATLVSD

SEQ ID NO: 15546 - protein, 14 aa, Severe acute respiratory syndrome-related coronavirus
  REGION 1..14: note = Table B: HLA-DRB1*01:03L HLA-DRB1*04:02L HLA-DRB1*04:05L HLA-DRB1*08:01L HLA-DRB1*12:01L HLA-DPA1*02:01-B1*13:01L HLA-DRB1*04:08L
  source 1..14: note = Severe acute respiratory syndrome coronavirus 2
HPDSATLVSDIDIT

SEQ ID NO: 15547 - protein, 12 aa, Severe acute respiratory syndrome-related coronavirus
  REGION 1..12: note = Table B: HLA-DRB1*01:03L HLA-DRB1*01:02L HLA-DRB1*04:10L HLA-DRB1*04:08L
  source 1..12: note = Severe acute respiratory syndrome coronavirus 2
IVGDVVQEGVLT

SEQ ID NO: 15548 - protein, 15 aa, Severe acute respiratory syndrome-related coronavirus
  REGION 1..15: note = Table B: HLA-DRB1*01:03L HLA-DRB1*04:05L HLA-DPA1*01:03-B1*03:01L HLA-DQA1*01:01-B1*05:01L HLA-DRB1*12:01L HLA-DRB1*04:08L
  source 1..15: note = Severe acute respiratory syndrome coronavirus 2
DVVQEGVLTAVVIPT

SEQ ID NO: 15549 - protein, 13 aa, Severe acute respiratory syndrome-related coronavirus
  REGION 1..13: note = Table B: HLA-DRB1*01:03L HLA-DRB1*16:01L HLA-DRB1*04:08L
  source 1..13: note = Severe acute respiratory syndrome coronavirus 2
GGTTEMLAKALRK

SEQ ID NO: 15550 - protein, 13 aa, Severe acute respiratory syndrome-related coronavirus
  REGION 1..13: note = Table B: HLA-DRB1*01:03L HLA-DQA1*01:02-B1*06:02L HLA-DRB1*14:01L HLA-DRB1*08:01L HLA-DRB1*04:08L
  source 1..13: note = Severe acute respiratory syndrome coronavirus 2
TEMLAKALRKVPT

SEQ ID NO: 15551 - protein, 13 aa, Severe acute respiratory syndrome-related coronavirus
  REGION 1..13: note = Table B: HLA-DRB1*01:03L HLA-DRB1*04:04L HLA-DRB1*01:02L HLA-DRB1*12:01L HLA-DRB1*14:54L HLA-DRB1*04:08L HLA-DRB1*15:03L
  source 1..13: note = Severe acute respiratory syndrome coronavirus 2
QGLNGYTVEEAKT

SEQ ID NO: 15552 - protein, 16 aa, Severe acute respiratory syndrome-related coronavirus
  REGION 1..16: note = Table B: HLA-DRB1*01:03L HLA-DRB1*14:01L HLA-DRB1*04:08L
  source 1..16: note = Severe acute respiratory syndrome coronavirus 2
KTVLKKCKSAFYILPS

SEQ ID NO: 15553 - protein, 15 aa, Severe acute respiratory syndrome-related coronavirus
  REGION 1..15: note = Table B: HLA-DRB1*01:03L HLA-DPA1*02:01-B1*13:01L HLA-DPA1*03:01-B1*105:01L HLA-DRB1*16:01L HLA-DRB1*15:03L
  source 1..15: note = Severe acute respiratory syndrome coronavirus 2
VSWNLREMLAHAEET

SEQ ID NO: 15554 - protein, 12 aa, Severe acute respiratory syndrome-related coronavirus
  REGION 1..12: note = Table B: HLA-DRB1*01:03L HLA-DQA1*01:02-B1*06:02L HLA-DRB1*01:02L HLA-DRB1*14:01L HLA-DPA1*03:01-B1*105:01L HLA-DRB1*04:08L HLA-DRB1*15:03L
  source 1..12: note = Severe acute respiratory syndrome coronavirus 2
EMLAHAEETRKL

SEQ ID NO: 15555 - protein, 15 aa, Severe acute respiratory syndrome-related coronavirus
  REGION 1..15: note = Table B: HLA-DRB1*01:03L HLA-DRB1*01:01L HLA-DRB3*01:01L HLA-DRB1*16:01L
  source 1..15: note = Severe acute respiratory syndrome coronavirus 2
AEETRKLMPVCVETK

SEQ ID NO: 15556 - protein, 12 aa, Severe acute respiratory syndrome-related coronavirus
  REGION 1..12: note = Table B: HLA-DRB1*01:03L HLA-DRB1*04:02L HLA-DRB1*04:05L HLA-DQA1*01:01-B1*05:01L HLA-DRB1*14:17L HLA-DRB1*04:08L
  source 1..12: note = Severe acute respiratory syndrome coronavirus 2
VETKAIVSTIQR

SEQ ID NO: 15557 - protein, 11 aa, Severe acute respiratory syndrome-related coronavirus
  REGION 1..11: note = Table B: HLA-DRB1*01:03L HLA-DRB1*01:02L HLA-DRB1*08:01L HLA-DQA1*03:01-B1*03:02L HLA-DRB1*16:01L HLA-DRB1*04:08L
  source 1..11: note = Severe acute respiratory syndrome coronavirus 2
RKYKGIKIQEG

SEQ ID NO: 15558 - protein, 11 aa, Severe acute respiratory syndrome-related coronavirus
  REGION 1..11: note = Table B: HLA-DRB1*01:03L HLA-DRB1*04:05L HLA-DRB1*01:02L HLA-DRB4*03:01NL HLA-DRB1*14:01L HLA-DQA1*01:01-B1*05:01L HLA-DQA1*05:05-B1*03:19L HLA-DRB1*04:10L HLA-DRB1*12:01L HLA-DRB1*14:54L HLA-DRB1*14:17L HLA-DRB1*16:01L HLA-DRB1*04:08L
  REGION 1..11: note = CONT. FROM ABOVE: HLA-DRB1*15:03L
  source 1..11: note = Severe acute respiratory syndrome coronavirus 2
KGIKIQEGVVD

SEQ ID NO: 15559 - protein, 10 aa, Severe acute respiratory syndrome-related coronavirus
  REGION 1..10: note = Table B: HLA-DRB1*01:03L HLA-DQA1*01:02-B1*06:02L HLA-DPA1*01:03-B1*03:01L HLA-DQA1*05:05-B1*03:19L HLA-DQA1*05:01-B1*02:01L HLA-DRB1*16:01L HLA-DQA1*02:01-B1*03:03L
  source 1..10: note = Severe acute respiratory syndrome coronavirus 2
IKIQEGVVDY

SEQ ID NO: 15560 - protein, 12 aa, Severe acute respiratory syndrome-related coronavirus
  REGION 1..12: note = Table B: HLA-DRB1*01:03L HLA-DRB1*04:05L HLA-DRB1*01:02L HLA-DRB1*08:01L HLA-DQA1*01-B1*05L HLA-DRB1*12:01L HLA-DQA1*03:01-B1*03:02L HLA-DPA1*01:02-B1*04:01L HLA-DRB1*16:01L HLA-DRB1*04:08L HLA-DQA1*02:01-B1*03:03L
  REGION 1..12: note = CONT. FROM ABOVE: HLA-DRB1*15:03L
  source 1..12: note = Severe acute respiratory syndrome coronavirus 2
GARFYFYTSKTT

SEQ ID NO: 15561 - protein, 14 aa, Severe acute respiratory syndrome-related coronavirus
  REGION 1..14: note = Table B: HLA-DRB1*01:03L HLA-DPA1*01:03-B1*04:02L HLA-DRB1*12:01L HLA-DRB1*04:08L
  source 1..14: note = Severe acute respiratory syndrome coronavirus 2
MPLGYVTHGLNLEE

SEQ ID NO: 15562 - protein, 14 aa, Severe acute respiratory syndrome-related coronavirus
  REGION 1..14: note = Table B: HLA-DRB1*01:03L HLA-DRB1*01:02L HLA-DRB1*16:01L HLA-DRB1*15:03L
  source 1..14: note = Severe acute respiratory syndrome coronavirus 2
EEAARYMRSLKVPA

SEQ ID NO: 15563 - protein, 12 aa, Severe acute respiratory syndrome-related coronavirus
  REGION 1..12: note = Table B: HLA-DRB1*01:03L HLA-DRB1*04:05L HLA-DRB1*01:02L HLA-DRB1*08:01L HLA-DQA1*01-B1*05L HLA-DRB1*04:10L HLA-DRB1*12:01L HLA-DRB1*14:54L HLA-DQA1*05:05-B1*03:01L HLA-DRB1*10:01L HLA-DRB1*16:01L HLA-DRB1*04:08L HLA-DRB1*15:03L
  source 1..12: note = Severe acute respiratory syndrome coronavirus 2
TAYNGYLTSSSK

SEQ ID NO: 15564 - protein, 13 aa, Severe acute respiratory syndrome-related coronavirus
  REGION 1..13: note = Table B: HLA-DRB1*01:03L HLA-DRB1*04:02L HLA-DRB1*04:04L HLA-DRB1*04:05L HLA-DRB1*08:04L HLA-DRB3*02:01L HLA-DRB1*14:01L HLA-DPA1*01:02-B1*04:01L HLA-DRB1*04:08L
  source 1..13: note = Severe acute respiratory syndrome coronavirus 2
EHFIETISLAGSY

SEQ ID NO: 15565 - protein, 12 aa, Severe acute respiratory syndrome-related coronavirus
  REGION 1..12: note = Table B: HLA-DRB1*01:03L HLA-DRB1*04:04L HLA-DRB1*04:05L HLA-DRB1*08:04L HLA-DRB1*04:10L HLA-DRB1*10:01L HLA-DRB1*04:08L HLA-DRB1*15:03L
  source 1..12: note = Severe acute respiratory syndrome coronavirus 2
FIETISLAGSYK

SEQ ID NO: 15566 - protein, 12 aa, Severe acute respiratory syndrome-related coronavirus
  REGION 1..12: note = Table B: HLA-DRB1*01:03L HLA-DRB1*04:04L HLA-DRB1*04:05L HLA-DRB1*08:04L HLA-DPA1*01:03-B1*03:01L HLA-DQA1*01:01-B1*05:01L HLA-DQA1*01-B1*05L HLA-DRB1*04:10L HLA-DRB1*10:01L HLA-DRB1*16:01L HLA-DRB1*04:08L HLA-DRB1*08:03L
  REGION 1..12: note = CONT. FROM ABOVE: HLA-DRB1*15:03L
  source 1..12: note = Severe acute respiratory syndrome coronavirus 2
IETISLAGSYKD

SEQ ID NO: 15567 - protein, 15 aa, Severe acute respiratory syndrome-related coronavirus
  REGION 1..15: note = Table B: HLA-DRB1*01:03L HLA-DRB1*08:04L HLA-DRB1*08:01L
  source 1..15: note = Severe acute respiratory syndrome coronavirus 2
ISLAGSYKDWSYSGQ

SEQ ID NO: 15568 - protein, 13 aa, Severe acute respiratory syndrome-related coronavirus
  REGION 1..13: note = Table B: HLA-DRB1*01:03L HLA-DRB1*04:02L HLA-DRB1*04:05L HLA-DRB1*01:02L HLA-DPA1*01:03-B1*03:01L HLA-DQA1*01:01-B1*05:01L HLA-DRB1*08:01L HLA-DPA1*01:03-B1*04:02L HLA-DRB1*16:01L HLA-DRB1*04:08L
  source 1..13: note = Severe acute respiratory syndrome coronavirus 2
KDWSYSGQSTQLG

SEQ ID NO: 15569 - protein, 13 aa, Severe acute respiratory syndrome-related coronavirus
  REGION 1..13: note = Table B: HLA-DRB1*01:03L HLA-DRB1*01:02L HLA-DRB1*16:01L HLA-DQA1*01:03-B1*06:01L HLA-DQA1*02:01-B1*03:03L
  source 1..13: note = Severe acute respiratory syndrome coronavirus 2
TQLGIEFLKRGDK

SEQ ID NO: 15570 - protein, 12 aa, Severe acute respiratory syndrome-related coronavirus
  REGION 1..12: note = Table B: HLA-DRB1*01:03L HLA-DQA1*01:02-B1*06:02L HLA-DRB1*01:02L HLA-DRB1*14:01L HLA-DRB1*16:01L
  source 1..12: note = Severe acute respiratory syndrome coronavirus 2
LGIEFLKRGDKS

SEQ ID NO: 15571 - protein, 10 aa, Severe acute respiratory syndrome-related coronavirus
  REGION 1..10: note = Table B: HLA-DRB1*01:03L HLA-DQA1*01:02-B1*06:02L HLA-DRB1*03:01L HLA-DRB1*14:02L HLA-DRB1*11:01L HLA-DPA1*01:03-B1*04:02L HLA-DQA1*02:01-B1*03:03L
  source 1..10: note = Severe acute respiratory syndrome coronavirus 2
FLKRGDKSVY

SEQ ID NO: 15572 - protein, 13 aa, Severe acute respiratory syndrome-related coronavirus
  REGION 1..13: note = Table B: HLA-DRB1*01:03L HLA-DRB1*04:04L HLA-DQA1*01:02-B1*06:02L HLA-DRB1*01:02L HLA-DRB1*08:01L HLA-DRB1*16:01L HLA-DRB1*04:08L HLA-DQA1*02:01-B1*03:03L HLA-DRB1*15:03L
  source 1..13: note = Severe acute respiratory syndrome coronavirus 2
DNLKTLLSLREVR

SEQ ID NO: 15573 - protein, 13 aa, Severe acute respiratory syndrome-related coronavirus
  REGION 1..13: note = Table B: HLA-DRB1*01:03L HLA-DRB1*12:01L HLA-DRB1*16:01L HLA-DRB1*04:08L
  source 1..13: note = Severe acute respiratory syndrome coronavirus 2
KTLLSLREVRTIK

SEQ ID NO: 15574 - protein, 13 aa, Severe acute respiratory syndrome-related coronavirus
  REGION 1..13: note = Table B: HLA-DRB1*01:03L HLA-DRB1*12:01L HLA-DRB1*04:08L
  source 1..13: note = Severe acute respiratory syndrome coronavirus 2
LSLREVRTIKVFT

SEQ ID NO: 15575 - protein, 12 aa, Severe acute respiratory syndrome-related coronavirus
  REGION 1..12: note = Table B: HLA-DRB1*01:03L HLA-DRB1*01:02L HLA-DRB1*16:01L HLA-DRB1*04:08L
  source 1..12: note = Severe acute respiratory syndrome coronavirus 2
TKIKPHNSHEGK

SEQ ID NO: 15576 - protein, 10 aa, Severe acute respiratory syndrome-related coronavirus
  REGION 1..10: note = Table B: HLA-DRB1*01:03L HLA-DPA1*03:01-B1*04:02L HLA-DPA1*01:03-B1*04:01L HLA-DPA1*01:03-B1*04:02L HLA-DPA1*03:01-B1*105:01L HLA-DPA1*01:02-B1*04:01L HLA-DRB1*16:01L HLA-DRB1*04:08L
  source 1..10: note = Severe acute respiratory syndrome coronavirus 2
LRVEAFEYYH

SEQ ID NO: 15577 - protein, 14 aa, Severe acute respiratory syndrome-related coronavirus
  REGION 1..14: note = Table B: HLA-DRB1*01:03L HLA-DRB1*01:02L HLA-DRB1*08:01L HLA-DRB1*12:01L HLA-DRB1*16:01L HLA-DRB1*04:08L HLA-DQA1*02:01-B1*03:03L HLA-DRB1*15:03L
  source 1..14: note = Severe acute respiratory syndrome coronavirus 2
DPSFLGRYMSALNH

SEQ ID NO: 15578 - protein, 11 aa, Severe acute respiratory syndrome-related coronavirus
  REGION 1..11: note = Table B: HLA-DRB1*01:03L
  source 1..11: note = Severe acute respiratory syndrome coronavirus 2
GRYMSALNHTK

SEQ ID NO: 15579 - protein, 14 aa, Severe acute respiratory syndrome-related coronavirus
  REGION 1..14: note = Table B: HLA-DRB1*01:03L HLA-DQA1*01:02-B1*06:02L HLA-DRB1*08:04L HLA-DRB1*11:01L
  source 1..14: note = Severe acute respiratory syndrome coronavirus 2
ALNHTKKWKYPQVN

SEQ ID NO: 15580 - protein, 14 aa, Severe acute respiratory syndrome-related coronavirus
  REGION 1..14: note = Table B: HLA-DRB1*01:03L HLA-DQA1*01:02-B1*06:02L HLA-DRB1*14:01L HLA-DRB1*11:04L
  source 1..14: note = Severe acute respiratory syndrome coronavirus 2
LNHTKKWKYPQVNG

SEQ ID NO: 15581 - protein, 14 aa, Severe acute respiratory syndrome-related coronavirus
  REGION 1..14: note = Table B: HLA-DRB1*01:03L HLA-DRB1*04:05L HLA-DQA1*01:02-B1*06:02L HLA-DRB1*15:03L
  source 1..14: note = Severe acute respiratory syndrome coronavirus 2
TKKWKYPQVNGLTS

SEQ ID NO: 15582 - protein, 14 aa, Severe acute respiratory syndrome-related coronavirus
  REGION 1..14: note = Table B: HLA-DRB1*01:03L HLA-DRB1*04:05L HLA-DRB1*04:08L
  source 1..14: note = Severe acute respiratory syndrome coronavirus 2
LTSIKWADNNCYLA

SEQ ID NO: 15583 - protein, 13 aa, Severe acute respiratory syndrome-related coronavirus
  REGION 1..13: note = Table B: HLA-DRB1*01:03L HLA-DRB1*04:04L HLA-DPA1*01:03-B1*03:01L HLA-DRB1*11:03L HLA-DQA1*01-B1*05L HLA-DRB1*04:10L HLA-DPA1*02:01-B1*13:01L HLA-DRB1*14:54L HLA-DRB1*07:01L HLA-DRB1*10:01L
  source 1..13: note = Severe acute respiratory syndrome coronavirus 2
ATALLTLQQIELK

SEQ ID NO: 15584 - protein, 16 aa, Severe acute respiratory syndrome-related coronavirus
  REGION 1..16: note = Table B: HLA-DRB1*01:03L HLA-DPA1*01:03-B1*03:01L HLA-DRB1*14:02L HLA-DPA1*01:03-B1*04:02L HLA-DPA1*02:01-B1*13:01L
  source 1..16: note = Severe acute respiratory syndrome coronavirus 2
TALLTLQQIELKFNPP

SEQ ID NO: 15585 - protein, 13 aa, Severe acute respiratory syndrome-related coronavirus
  REGION 1..13: note = Table B: HLA-DRB1*01:03L HLA-DRB1*04:04L HLA-DQA1*01:02-B1*06:02L HLA-DRB1*01:02L HLA-DRB1*11:04L HLA-DRB1*08:01L HLA-DQA1*01-B1*05L HLA-DRB1*04:10L HLA-DRB1*12:01L HLA-DRB1*14:54L HLA-DRB1*04:08L HLA-DRB1*15:03L
  source 1..13: note = Severe acute respiratory syndrome coronavirus 2
QQIELKFNPPALQ

SEQ ID NO: 15586 - protein, 15 aa, Severe acute respiratory syndrome-related coronavirus
  REGION 1..15: note = Table B: HLA-DRB1*01:03L HLA-DRB1*01:02L HLA-DRB1*08:01L HLA-DPA1*01:02-B1*04:01L HLA-DRB1*16:01L HLA-DQA1*01:03-B1*06:01L HLA-DRB1*04:08L HLA-DQA1*02:01-B1*03:03L
  source 1..15: note = Severe acute respiratory syndrome coronavirus 2
NPPALQDAYYRARAG

SEQ ID NO: 15587 - protein, 16 aa, Severe acute respiratory syndrome-related coronavirus
  REGION 1..16: note = Table B: HLA-DRB1*01:03L HLA-DRB1*01:02L HLA-DRB1*04:08L
  source 1..16: note = Severe acute respiratory syndrome coronavirus 2
ILAYCNKTVGELGDVR

SEQ ID NO: 15588 - protein, 14 aa, Severe acute respiratory syndrome-related coronavirus
  REGION 1..14: note = Table B: HLA-DRB1*01:03L HLA-DRB1*04:08L
  source 1..14: note = Severe acute respiratory syndrome coronavirus 2
LGDVRETMSYLFQH

SEQ ID NO: 15589 - protein, 14 aa, Severe acute respiratory syndrome-related coronavirus
  REGION 1..14: note = Table B: HLA-DRB1*01:03L HLA-DPA1*02:01-B1*13:01L HLA-DRB1*04:08L
  source 1..14: note = Severe acute respiratory syndrome coronavirus 2
GDVRETMSYLFQHA

SEQ ID NO: 15590 - protein, 11 aa, Severe acute respiratory syndrome-related coronavirus
  REGION 1..11: note = Table B: HLA-DRB1*01:03L HLA-DQA1*01:02-B1*06:02L HLA-DRB1*01:02L HLA-DQA1*03:01-B1*03:02L HLA-DRB1*16:01L HLA-DRB1*04:08L HLA-DQA1*02:01-B1*03:03L
  source 1..11: note = Severe acute respiratory syndrome coronavirus 2
FQHANLDSCKR

SEQ ID NO: 15591 - protein, 10 aa, Severe acute respiratory syndrome-related coronavirus
  REGION 1..10: note = Table B: HLA-DRB1*01:03L HLA-DPA1*03:01-B1*04:02L HLA-DPA1*01:03-B1*04:01L HLA-DPA1*03:01-B1*105:01L HLA-DQA1*03:01-B1*03:02L HLA-DPA1*01:02-B1*04:01L HLA-DRB1*16:01L HLA-DQA1*01:03-B1*06:01L HLA-DRB1*04:08L
  REGION 1..10: note = CONT. FROM ABOVE: HLA-DQA1*02:01-B1*03:03L
  source 1..10: note = Severe acute respiratory syndrome coronavirus 2
TLSYEQFKKG

SEQ ID NO: 15592 - protein, 14 aa, Severe acute respiratory syndrome-related coronavirus
  REGION 1..14: note = Table B: HLA-DRB1*01:03L HLA-DRB1*15:03L
  source 1..14: note = Severe acute respiratory syndrome coronavirus 2
SYEQFKKGVQIPCT

SEQ ID NO: 15593 - protein, 14 aa, Severe acute respiratory syndrome-related coronavirus
  REGION 1..14: note = Table B: HLA-DRB1*01:03L HLA-DRB1*01:02L HLA-DRB1*08:01L HLA-DRB1*04:08L
  source 1..14: note = Severe acute respiratory syndrome coronavirus 2
SEYTGNYQCGHYKH

SEQ ID NO: 15594 - protein, 12 aa, Severe acute respiratory syndrome-related coronavirus
  REGION 1..12: note = Table B: HLA-DRB1*01:03L HLA-DQA1*01:02-B1*06:02L HLA-DRB1*01:02L HLA-DRB1*08:01L HLA-DRB1*11:01L HLA-DPA1*01:03-B1*04:01L HLA-DPA1*01:03-B1*04:02L HLA-DRB1*12:01L HLA-DPA1*01:03-B1*02:01L
  REGION 1..12: note = CONT. FROM ABOVE: HLA-DQA1*01:03-B1*06:01L HLA-DRB1*15:03L
  source 1..12: note = Severe acute respiratory syndrome coronavirus 2
GNYQCGHYKHIT

SEQ ID NO: 15595 - protein, 12 aa, Severe acute respiratory syndrome-related coronavirus
  REGION 1..12: note = Table B: HLA-DRB1*01:03L
  source 1..12: note = Severe acute respiratory syndrome coronavirus 2
NYQCGHYKHITS

SEQ ID NO: 15596 - protein, 10 aa, Severe acute respiratory syndrome-related coronavirus
  REGION 1..10: note = Table B: HLA-DRB1*01:03L HLA-DRB1*04:05L HLA-DRB1*01:02L HLA-DRB1*08:01L HLA-DQA1*03:01-B1*03:02L HLA-DPA1*01:02-B1*04:01L HLA-DRB1*16:01L HLA-DRB1*04:08L HLA-DQA1*02:01-B1*03:03L
  source 1..10: note = Severe acute respiratory syndrome coronavirus 2
HYKHITSKET

SEQ ID NO: 15597 - protein, 15 aa, Severe acute respiratory syndrome-related coronavirus
  REGION 1..15: note = Table B: HLA-DRB1*01:03L HLA-DRB1*04:05L HLA-DRB1*08:04L HLA-DRB1*08:01L HLA-DRB1*12:01L HLA-DPA1*02:01-B1*13:01L HLA-DRB1*16:01L HLA-DRB1*04:08L
  source 1..15: note = Severe acute respiratory syndrome coronavirus 2
GALLTKSSEYKGPIT

SEQ ID NO: 15598 - protein, 14 aa, Severe acute respiratory syndrome-related coronavirus
  REGION 1..14: note = Table B: HLA-DRB1*01:03L HLA-DRB1*04:08L
  source 1..14: note = Severe acute respiratory syndrome coronavirus 2
DVFYKENSYTTTIK

SEQ ID NO: 15599 - protein, 14 aa, Severe acute respiratory syndrome-related coronavirus
  REGION 1..14: note = Table B: HLA-DRB1*01:03L HLA-DRB1*01:02L HLA-DRB1*12:01L HLA-DRB1*16:01L HLA-DRB1*04:08L HLA-DRB1*15:03L
  source 1..14: note = Severe acute respiratory syndrome coronavirus 2
KPVTYKLDGVVCTE

SEQ ID NO: 15600 - protein, 14 aa, Severe acute respiratory syndrome-related coronavirus
  REGION 1..14: note = Table B: HLA-DRB1*01:03L HLA-DRB1*01:02L HLA-DPA1*03:01-B1*105:01L
  source 1..14: note = Severe acute respiratory syndrome coronavirus 2
YKLDGVVCTEIDPK

SEQ ID NO: 15601 - protein, 14 aa, Severe acute respiratory syndrome-related coronavirus
  REGION 1..14: note = Table B: HLA-DRB1*01:03L HLA-DRB1*08:04L HLA-DPA1*03:01-B1*04:02L HLA-DPA1*01:03-B1*04:02L HLA-DPA1*02:01-B1*13:01L HLA-DRB1*15:03L
  source 1..14: note = Severe acute respiratory syndrome coronavirus 2
ASFDNFKFVCDNIK

SEQ ID NO: 15602 - protein, 13 aa, Severe acute respiratory syndrome-related coronavirus
  REGION 1..13: note = Table B: HLA-DRB1*01:03L HLA-DQA1*01:02-B1*06:02L HLA-DRB1*14:01L HLA-DQA1*01-B1*05L HLA-DRB1*12:01L HLA-DPA1*03:01-B1*105:01L HLA-DRB1*16:01L HLA-DRB1*04:08L
  source 1..13: note = Severe acute respiratory syndrome coronavirus 2
DNFKFVCDNIKFA

SEQ ID NO: 15603 - protein, 12 aa, Severe acute respiratory syndrome-related coronavirus
  REGION 1..12: note = Table B: HLA-DRB1*01:03L HLA-DRB1*04:04L HLA-DRB1*04:10L HLA-DRB1*04:08L
  source 1..12: note = Severe acute respiratory syndrome coronavirus 2
NIKFADDLNQLT

SEQ ID NO: 15604 - protein, 10 aa, Severe acute respiratory syndrome-related coronavirus
  REGION 1..10: note = Table B: HLA-DRB1*01:03L HLA-DQA1*03:01-B1*03:02L HLA-DRB1*16:01L HLA-DQA1*02:01-B1*03:03L
  source 1..10: note = Severe acute respiratory syndrome coronavirus 2
TGYKKPASRE

SEQ ID NO: 15605 - protein, 10 aa, Severe acute respiratory syndrome-related coronavirus
  REGION 1..10: note = Table B: HLA-DRB1*01:03L HLA-DQA1*03:01-B1*03:02L
  source 1..10: note = Severe acute respiratory syndrome coronavirus 2
YKKPASRELK

SEQ ID NO: 15606 - protein, 12 aa, Severe acute respiratory syndrome-related coronavirus
  REGION 1..12: note = Table B: HLA-DRB1*01:03L HLA-DPA1*01:03-B1*04:02L HLA-DRB1*12:01L HLA-DRB1*04:08L HLA-DRB1*15:03L
  source 1..12: note = Severe acute respiratory syndrome coronavirus 2
SRELKVTFFPDL

SEQ ID NO: 15607 - protein, 12 aa, Severe acute respiratory syndrome-related coronavirus
  REGION 1..12: note = Table B: HLA-DRB1*01:03L HLA-DQA1*01:02-B1*06:02L HLA-DRB1*01:02L HLA-DPA1*01:03-B1*03:01L HLA-DRB1*08:01L HLA-DRB1*12:01L HLA-DPA1*02:01-B1*13:01L HLA-DRB1*04:08L HLA-DQA1*02:01-B1*03:03L HLA-DRB1*15:03L
  source 1..12: note = Severe acute respiratory syndrome coronavirus 2
RELKVTFFPDLN

SEQ ID NO: 15608 - protein, 12 aa, Severe acute respiratory syndrome-related coronavirus
  REGION 1..12: note = Table B: HLA-DRB1*01:03L HLA-DRB1*04:04L HLA-DQA1*01:02-B1*06:02L HLA-DRB1*01:02L HLA-DPA1*03:01-B1*04:02L HLA-DRB1*14:01L HLA-DRB1*12:01L HLA-DPA1*02:01-B1*13:01L HLA-DPA1*03:01-B1*105:01L
  REGION 1..12: note = CONT. FROM ABOVE: HLA-DRB1*14:54L HLA-DRB1*04:08L
  source 1..12: note = Severe acute respiratory syndrome coronavirus 2
KVTFFPDLNGDV

SEQ ID NO: 15609 - protein, 13 aa, Severe acute respiratory syndrome-related coronavirus
  REGION 1..13: note = Table B: HLA-DRB1*01:03L HLA-DRB1*04:02L HLA-DRB1*04:05L HLA-DRB1*04:08L
  source 1..13: note = Severe acute respiratory syndrome coronavirus 2
PDLNGDVVAIDYK

SEQ ID NO: 15610 - protein, 11 aa, Severe acute respiratory syndrome-related coronavirus
  REGION 1..11: note = Table B: HLA-DRB1*01:03L HLA-DRB1*08:01L HLA-DPA1*01:02-B1*04:01L HLA-DRB1*04:08L
  source 1..11: note = Severe acute respiratory syndrome coronavirus 2
IDYKHYTPSFK

SEQ ID NO: 15611 - protein, 11 aa, Severe acute respiratory syndrome-related coronavirus
  REGION 1..11: note = Table B: HLA-DRB1*01:03L HLA-DRB1*01:02L HLA-DRB1*16:01L
  source 1..11: note = Severe acute respiratory syndrome coronavirus 2
YKHYTPSFKKG

SEQ ID NO: 15612 - protein, 10 aa, Severe acute respiratory syndrome-related coronavirus
  REGION 1..10: note = Table B: HLA-DRB1*01:03L
  source 1..10: note = Severe acute respiratory syndrome coronavirus 2
YTPSFKKGAK

SEQ ID NO: 15613 - protein, 13 aa, Severe acute respiratory syndrome-related coronavirus
  REGION 1..13: note = Table B: HLA-DRB1*01:03L HLA-DRB1*01:02L HLA-DRB1*11:04L HLA-DRB1*08:01L HLA-DRB1*11:01L HLA-DRB1*16:01L HLA-DRB1*04:08L
  source 1..13: note = Severe acute respiratory syndrome coronavirus 2
TPSFKKGAKLLHK

SEQ ID NO: 15614 - protein, 13 aa, Severe acute respiratory syndrome-related coronavirus
  REGION 1..13: note = Table B: HLA-DRB1*01:03L HLA-DRB1*08:01L HLA-DRB1*11:01L HLA-DRB1*04:08L
  source 1..13: note = Severe acute respiratory syndrome coronavirus 2
PSFKKGAKLLHKP

SEQ ID NO: 15615 - protein, 14 aa, Severe acute respiratory syndrome-related coronavirus
  REGION 1..14: note = Table B: HLA-DRB1*01:03L HLA-DRB1*04:08L
  source 1..14: note = Severe acute respiratory syndrome coronavirus 2
KKGAKLLHKPIVWH

SEQ ID NO: 15616 - protein, 12 aa, Severe acute respiratory syndrome-related coronavirus
  REGION 1..12: note = Table B: HLA-DRB1*01:03L HLA-DRB1*04:05L HLA-DRB1*01:02L HLA-DRB1*12:01L HLA-DRB1*16:01L HLA-DRB1*04:08L HLA-DQA1*02:01-B1*03:03L HLA-DRB1*15:03L
  source 1..12: note = Severe acute respiratory syndrome coronavirus 2
PIVWHVNNATNK

SEQ ID NO: 15617 - protein, 13 aa, Severe acute respiratory syndrome-related coronavirus
  REGION 1..13: note = Table B: HLA-DRB1*01:03L HLA-DRB1*04:02L HLA-DRB1*04:05L HLA-DRB1*01:02L HLA-DPA1*01:03-B1*03:01L HLA-DQA1*01:01-B1*05:01L HLA-DPA1*02:01-B1*13:01L HLA-DRB1*07:01L HLA-DRB1*04:08L HLA-DRB1*15:03L
  source 1..13: note = Severe acute respiratory syndrome coronavirus 2
KPVETSNSFDVLK

SEQ ID NO: 15618 - protein, 12 aa, Severe acute respiratory syndrome-related coronavirus
  REGION 1..12: note = Table B: HLA-DRB1*01:03L HLA-DPA1*03:01-B1*04:02L HLA-DQA1*05:01-B1*02:01L HLA-DPA1*01:03-B1*04:01L HLA-DPA1*01:03-B1*04:02L HLA-DQA1*03:01-B1*03:02L HLA-DQA1*05:05-B1*03:01L HLA-DRB1*16:01L HLA-DRB1*04:08L
  REGION 1..12: note = CONT. FROM ABOVE: HLA-DQA1*02:01-B1*03:03L
  source 1..12: note = Severe acute respiratory syndrome coronavirus 2
DNLACEDLKPVS

SEQ ID NO: 15619 - protein, 13 aa, Severe acute respiratory syndrome-related coronavirus
  REGION 1..13: note = Table B: HLA-DRB1*01:03L HLA-DRB1*04:02L HLA-DQA1*01:02-B1*06:02L HLA-DRB4*03:01NL HLA-DRB1*04:10L HLA-DRB1*12:01L HLA-DPA1*02:01-B1*13:01L HLA-DRB1*14:17L
  source 1..13: note = Severe acute respiratory syndrome coronavirus 2
LKPVSEEVVENPT

SEQ ID NO: 15620 - protein, 15 aa, Severe acute respiratory syndrome-related coronavirus
  REGION 1..15: note = Table B: HLA-DRB1*01:03L HLA-DRB1*04:02L HLA-DRB1*04:05L HLA-DRB1*03:01L HLA-DRB1*11:02L HLA-DRB1*11:03L HLA-DRB1*11:04L HLA-DRB1*11:01L HLA-DRB3*01:01L HLA-DRB1*04:08L
  source 1..15: note = Severe acute respiratory syndrome coronavirus 2
KDVLECNVKTTEVVG

SEQ ID NO: 15621 - protein, 12 aa, Severe acute respiratory syndrome-related coronavirus
  REGION 1..12: note = Table B: HLA-DRB1*01:03L HLA-DRB1*04:05L HLA-DRB4*03:01NL HLA-DQA1*01:01-B1*05:01L HLA-DRB1*14:17L HLA-DRB1*16:01L HLA-DRB1*04:08L
  source 1..12: note = Severe acute respiratory syndrome coronavirus 2
EVVGDIILKPAN

SEQ ID NO: 15622 - protein, 12 aa, Severe acute respiratory syndrome-related coronavirus
  REGION 1..12: note = Table B: HLA-DRB1*01:03L HLA-DQA1*01:01-B1*05:01L HLA-DRB1*08:01L HLA-DRB1*04:08L
  source 1..12: note = Severe acute respiratory syndrome coronavirus 2
VVGDIILKPANN

SEQ ID NO: 15623 - protein, 15 aa, Severe acute respiratory syndrome-related coronavirus
  REGION 1..15: note = Table B: HLA-DRB1*01:03L HLA-DRB1*04:08L
  source 1..15: note = Severe acute respiratory syndrome coronavirus 2
IKKPNELSRVLGLKT

SEQ ID NO: 15624 - protein, 15 aa, Severe acute respiratory syndrome-related coronavirus
  REGION 1..15: note = Table B: HLA-DRB1*01:03L HLA-DRB1*12:01L HLA-DRB1*04:08L
  source 1..15: note = Severe acute respiratory syndrome coronavirus 2
KPNELSRVLGLKTLA

SEQ ID NO: 15625 - protein, 11 aa, Severe acute respiratory syndrome-related coronavirus
  REGION 1..11: note = Table B: HLA-DRB1*01:03L HLA-DRB1*04:08L
  source 1..11: note = Severe acute respiratory syndrome coronavirus 2
RVLGLKTLATH

SEQ ID NO: 15626 - protein, 12 aa, Severe acute respiratory syndrome-related coronavirus
  REGION 1..12: note = Table B: HLA-DRB1*01:03L HLA-DRB1*04:02L HLA-DRB1*01:01L HLA-DRB1*04:08L
  source 1..12: note = Severe acute respiratory syndrome coronavirus 2
GLKTLATHGLAA

SEQ ID NO: 15627 - protein, 14 aa, Severe acute respiratory syndrome-related coronavirus
  REGION 1..14: note = Table B: HLA-DRB1*01:03L HLA-DRB1*12:01L HLA-DRB1*16:01L HLA-DRB1*04:08L HLA-DRB1*15:03L
  source 1..14: note = Severe acute respiratory syndrome coronavirus 2
TNIVTRCLNRVCTN

SEQ ID NO: 15628 - protein, 14 aa, Severe acute respiratory syndrome-related coronavirus
  REGION 1..14: note = Table B: HLA-DRB1*01:03L HLA-DRB1*01:02L HLA-DRB1*04:08L
  source 1..14: note = Severe acute respiratory syndrome coronavirus 2
LLQLCTFTRSTNSR

SEQ ID NO: 15629 - protein, 16 aa, Severe acute respiratory syndrome-related coronavirus
  REGION 1..16: note = Table B: HLA-DRB1*01:03L HLA-DRB1*08:04L HLA-DRB1*15:03L
  source 1..16: note = Severe acute respiratory syndrome coronavirus 2
AKNTVKSVGKFCLEAS

SEQ ID NO: 15630 - protein, 14 aa, Severe acute respiratory syndrome-related coronavirus
  REGION 1..14: note = Table B: HLA-DRB1*01:03L HLA-DQA1*01:02-B1*06:02L HLA-DRB1*01:02L HLA-DRB1*14:01L HLA-DPA1*02:01-B1*13:01L HLA-DPA1*03:01-B1*105:01L HLA-DRB1*16:01L HLA-DRB1*04:08L
  source 1..14: note = Severe acute respiratory syndrome coronavirus 2
VGKFCLEASFNYLK

SEQ ID NO: 15631 - protein, 13 aa, Severe acute respiratory syndrome-related coronavirus
  REGION 1..13: note = Table B: HLA-DRB1*01:03L HLA-DRB1*04:05L HLA-DRB1*14:02L HLA-DPA1*01:03-B1*04:01L HLA-DPA1*01:03-B1*04:02L HLA-DPA1*01:03-B1*104:01L HLA-DRB1*07:01L HLA-DRB1*10:01L HLA-DRB1*04:08L
  source 1..13: note = Severe acute respiratory syndrome coronavirus 2
SPNFSKLINIIIW

SEQ ID NO: 15632 - protein, 14 aa, Severe acute respiratory syndrome-related coronavirus
  REGION 1..14: note = Table B: HLA-DRB1*01:03L HLA-DRB1*04:04L HLA-DRB1*04:05L HLA-DRB1*01:02L HLA-DRB4*03:01NL HLA-DRB1*11:04L HLA-DRB1*12:01L HLA-DPA1*03:01-B1*105:01L HLA-DRB1*10:01L HLA-DRB1*16:01L HLA-DRB1*04:08L HLA-DRB1*15:03L
  source 1..14: note = Severe acute respiratory syndrome coronavirus 2
AALGVLMSNLGMPS

SEQ ID NO: 15633 - protein, 15 aa, Severe acute respiratory syndrome-related coronavirus
  REGION 1..15: note = Table B: HLA-DRB1*01:03L HLA-DRB1*04:02L HLA-DRB1*04:04L HLA-DRB1*04:05L HLA-DRB1*08:04L HLA-DRB3*02:01L HLA-DRB1*04:10L HLA-DPA1*01:03-B1*104:01L HLA-DRB1*16:01L HLA-DRB1*04:08L
  source 1..15: note = Severe acute respiratory syndrome coronavirus 2
YPSLETIQITISSFK

SEQ ID NO: 15634 - protein, 13 aa, Severe acute respiratory syndrome-related coronavirus
  REGION 1..13: note = Table B: HLA-DRB1*01:03L HLA-DRB1*04:02L HLA-DRB1*04:04L HLA-DRB1*04:05L HLA-DRB1*07:01L HLA-DRB1*04:08L
  source 1..13: note = Severe acute respiratory syndrome coronavirus 2
ETIQITISSFKWD

SEQ ID NO: 15635 - protein, 10 aa, Severe acute respiratory syndrome-related coronavirus
  REGION 1..10: note = Table B: HLA-DRB1*01:03L HLA-DQA1*01:02-B1*06:02L HLA-DRB1*14:02L HLA-DQA1*05:01-B1*02:01L HLA-DPA1*02:01-B1*13:01L HLA-DPA1*03:01-B1*105:01L HLA-DQA1*01:03-B1*06:01L HLA-DQA1*02:01-B1*03:03L
  REGION 1..10: note = CONT. FROM ABOVE: HLA-DRB1*15:03L
  source 1..10: note = Severe acute respiratory syndrome coronavirus 2
SSFKWDLTAF

SEQ ID NO: 15636 - protein, 12 aa, Severe acute respiratory syndrome-related coronavirus
  REGION 1..12: note = Table B: HLA-DRB1*01:03L HLA-DQA1*01:02-B1*06:02L HLA-DRB1*01:02L HLA-DPA1*01:03-B1*03:01L HLA-DRB1*14:01L HLA-DRB1*12:01L HLA-DPA1*01:03-B1*02:01L HLA-DRB1*04:08L HLA-DRB1*15:03L
  source 1..12: note = Severe acute respiratory syndrome coronavirus 2
FKWDLTAFGLVA

SEQ ID NO: 15637 - protein, 12 aa, Severe acute respiratory syndrome-related coronavirus
  REGION 1..12: note = Table B: HLA-DRB1*01:03L HLA-DQA1*01:02-B1*06:02L HLA-DRB1*01:02L HLA-DPA1*01:03-B1*03:01L HLA-DRB1*12:01L HLA-DPA1*01:03-B1*02:01L HLA-DRB1*04:08L HLA-DRB1*15:03L
  source 1..12: note = Severe acute respiratory syndrome coronavirus 2
KWDLTAFGLVAE

SEQ ID NO: 15638 - protein, 13 aa, Severe acute respiratory syndrome-related coronavirus
  REGION 1..13: note = Table B: HLA-DRB1*01:03L HLA-DRB1*01:02L HLA-DPA1*01:03-B1*03:01L HLA-DQA1*01-B1*05L HLA-DRB1*12:01L HLA-DPA1*01:03-B1*02:01L HLA-DRB1*16:01L HLA-DRB1*04:08L HLA-DRB1*15:03L
  source 1..13: note = Severe acute respiratory syndrome coronavirus 2
VAEWFLAYILFTR

SEQ ID NO: 15639 - protein, 12 aa, Severe acute respiratory syndrome-related coronavirus
  REGION 1..12: note = Table B: HLA-DRB1*01:03L HLA-DRB1*08:04L HLA-DPA1*01:03-B1*03:01L HLA-DRB1*08:01L HLA-DPA1*02:01-B1*13:01L HLA-DPA1*01:03-B1*02:01L
  source 1..12: note = Severe acute respiratory syndrome coronavirus 2
FSYFAVHFISNS

SEQ ID NO: 15640 - protein, 11 aa, Severe acute respiratory syndrome-related coronavirus
  REGION 1..11: note = Table B: HLA-DRB1*01:03L HLA-DRB1*08:01L HLA-DRB1*04:08L
  source 1..11: note = Severe acute respiratory syndrome coronavirus 2
SFYYVWKSYVH

SEQ ID NO: 15641 - protein, 12 aa, Severe acute respiratory syndrome-related coronavirus
  REGION 1..12: note = Table B: HLA-DRB1*01:03L HLA-DPA1*01:03-B1*04:02L HLA-DRB1*04:08L
  source 1..12: note = Severe acute respiratory syndrome coronavirus 2
FYYVWKSYVHVV

SEQ ID NO: 15642 - protein, 11 aa, Severe acute respiratory syndrome-related coronavirus
  REGION 1..11: note = Table B: HLA-DRB1*01:03L HLA-DQA1*01:02-B1*06:02L HLA-DRB1*01:02L HLA-DRB1*08:01L HLA-DPA1*01:03-B1*04:02L HLA-DRB1*12:01L HLA-DPA1*01:03-B1*02:01L HLA-DRB1*04:08L HLA-DQA1*02:01-B1*03:03L HLA-DRB1*15:03L
  source 1..11: note = Severe acute respiratory syndrome coronavirus 2
YVWKSYVHVVD

SEQ ID NO: 15643 - protein, 14 aa, Severe acute respiratory syndrome-related coronavirus
  REGION 1..14: note = Table B: HLA-DRB1*01:03L HLA-DRB1*04:04L HLA-DRB1*08:01L HLA-DRB1*12:01L HLA-DPA1*02:01-B1*13:01L HLA-DRB1*16:01L
  source 1..14: note = Severe acute respiratory syndrome coronavirus 2
KSYVHVVDGCNSST

SEQ ID NO: 15644 - protein, 14 aa, Severe acute respiratory syndrome-related coronavirus
  REGION 1..14: note = Table B: HLA-DRB1*01:03L HLA-DRB1*01:02L HLA-DRB1*14:01L HLA-DRB1*11:04L HLA-DRB1*08:01L HLA-DRB1*11:01L HLA-DRB3*01:01L HLA-DRB1*16:01L HLA-DRB1*04:08L
  source 1..14: note = Severe acute respiratory syndrome coronavirus 2
STCMMCYKRNRATR

SEQ ID NO: 15645 - protein, 14 aa, Severe acute respiratory syndrome-related coronavirus
  REGION 1..14: note = Table B: HLA-DRB1*01:03L HLA-DRB1*04:04L HLA-DRB1*04:05L HLA-DPA1*01:03-B1*03:01L HLA-DRB1*08:01L HLA-DRB1*12:01L HLA-DPA1*02:01-B1*13:01L HLA-DPA1*01:02-B1*04:01L HLA-DRB1*07:01L HLA-DRB1*16:01L HLA-DRB1*15:03L
  source 1..14: note = Severe acute respiratory syndrome coronavirus 2
ATRVECTTIVNGVR

SEQ ID NO: 15646 - protein, 14 aa, Severe acute respiratory syndrome-related coronavirus
  REGION 1..14: note = Table B: HLA-DRB1*01:03L
  source 1..14: note = Severe acute respiratory syndrome coronavirus 2
TRVECTTIVNGVRR

SEQ ID NO: 15647 - protein, 13 aa, Severe acute respiratory syndrome-related coronavirus
  REGION 1..13: note = Table B: HLA-DRB1*01:03L HLA-DRB1*04:05L HLA-DRB1*01:02L HLA-DRB1*16:01L HLA-DRB1*04:08L HLA-DQA1*02:01-B1*03:03L
  source 1..13: note = Severe acute respiratory syndrome coronavirus 2
VRRSFYVYANGGK

SEQ ID NO: 15648 - protein, 13 aa, Severe acute respiratory syndrome-related coronavirus
  REGION 1..13: note = Table B: HLA-DRB1*01:03L HLA-DRB1*01:02L HLA-DRB1*16:01L
  source 1..13: note = Severe acute respiratory syndrome coronavirus 2
KGFCKLHNWNCVN

SEQ ID NO: 15649 - protein, 15 aa, Severe acute respiratory syndrome-related coronavirus
  REGION 1..15: note = Table B: HLA-DRB1*01:03L HLA-DRB1*01:02L HLA-DRB1*11:01L HLA-DRB1*04:08L
  source 1..15: note = Severe acute respiratory syndrome coronavirus 2
VARDLSLQFKRPINP

SEQ ID NO: 15650 - protein, 14 aa, Severe acute respiratory syndrome-related coronavirus
  REGION 1..14: note = Table B: HLA-DRB1*01:03L HLA-DRB1*01:02L HLA-DRB1*04:08L HLA-DRB1*15:03L
  source 1..14: note = Severe acute respiratory syndrome coronavirus 2
DLSLQFKRPINPTD

SEQ ID NO: 15651 - protein, 12 aa, Severe acute respiratory syndrome-related coronavirus
  REGION 1..12: note = Table B: HLA-DRB1*01:03L HLA-DQA1*01:02-B1*06:02L HLA-DRB1*08:04L HLA-DRB1*04:10L HLA-DRB1*16:01L HLA-DRB1*04:08L HLA-DRB1*08:03L
  source 1..12: note = Severe acute respiratory syndrome coronavirus 2
LQFKRPINPTDQ

SEQ ID NO: 15652 - protein, 13 aa, Severe acute respiratory syndrome-related coronavirus
  REGION 1..13: note = Table B: HLA-DRB1*01:03L HLA-DRB1*04:04L HLA-DRB1*04:05L HLA-DRB1*01:02L HLA-DRB1*14:01L HLA-DRB1*12:01L HLA-DRB1*04:08L HLA-DRB1*15:01L
  source 1..13: note = Severe acute respiratory syndrome coronavirus 2
NGSIHLYFDKAGQ

SEQ ID NO: 15653 - protein, 10 aa, Severe acute respiratory syndrome-related coronavirus
  REGION 1..10: note = Table B: HLA-DRB1*01:03L HLA-DRB1*04:05L HLA-DQA1*01:02-B1*06:02L HLA-DPA1*02:01-B1*13:01L HLA-DRB1*16:01L HLA-DQA1*01:03-B1*06:01L HLA-DQA1*02:01-B1*03:03L
  source 1..10: note = Severe acute respiratory syndrome coronavirus 2
TYERHSLSHF

SEQ ID NO: 15654 - protein, 14 aa, Severe acute respiratory syndrome-related coronavirus
  REGION 1..14: note = Table B: HLA-DRB1*01:03L HLA-DRB1*04:04L HLA-DRB1*12:01L
  source 1..14: note = Severe acute respiratory syndrome coronavirus 2
RHSLSHFVNLDNLR

SEQ ID NO: 15655 - protein, 14 aa, Severe acute respiratory syndrome-related coronavirus
  REGION 1..14: note = Table B: HLA-DRB1*01:03L HLA-DRB1*04:02L HLA-DQA1*01:02-B1*06:02L HLA-DRB1*01:02L
  source 1..14: note = Severe acute respiratory syndrome coronavirus 2
DNLRANNTKGSLPI

SEQ ID NO: 15656 - protein, 14 aa, Severe acute respiratory syndrome-related coronavirus
  REGION 1..14: note = Table B: HLA-DRB1*01:03L HLA-DRB1*01:02L HLA-DRB1*12:01L
  source 1..14: note = Severe acute respiratory syndrome coronavirus 2
NLRANNTKGSLPIN

SEQ ID NO: 15657 - protein, 11 aa, Severe acute respiratory syndrome-related coronavirus
  REGION 1..11: note = Table B: HLA-DRB1*01:03L HLA-DRB1*03:01L HLA-DRB1*16:01L
  source 1..11: note = Severe acute respiratory syndrome coronavirus 2
IVFDGKSKCEE

SEQ ID NO: 15658 - protein, 15 aa, Severe acute respiratory syndrome-related coronavirus
  REGION 1..15: note = Table B: HLA-DRB1*01:03L HLA-DPA1*01:03-B1*04:01L HLA-DRB1*16:01L HLA-DRB1*04:08L
  source 1..15: note = Severe acute respiratory syndrome coronavirus 2
YSQLMCQPILLLDQA

SEQ ID NO: 15659 - protein, 12 aa, Severe acute respiratory syndrome-related coronavirus
  REGION 1..12: note = Table B: HLA-DRB1*01:03L HLA-DRB1*04:05L HLA-DPA1*01:03-B1*03:01L HLA-DRB1*14:01L HLA-DRB1*11:03L HLA-DRB1*11:04L HLA-DRB1*14:02L HLA-DRB5*01:01L HLA-DQA1*05:05-B1*03:19L HLA-DPA1*01:03-B1*04:01L
  REGION 1..12: note = CONT. FROM ABOVE: HLA-DRB1*04:10L HLA-DRB1*09:01L HLA-DRB1*12:02 L HLA-DRB1*14:54L HLA-DQA1*05:05-B1*03:01L HLA-DPA1*01:02-B1*04: 01L HLA-DRB1*04:08L
  source 1..12: note = Severe acute respiratory syndrome coronavirus 2
NTFSSTFNVPME

SEQ ID NO: 15660 - protein, 14 aa, Severe acute respiratory syndrome-related coronavirus
  REGION 1..14: note = Table B: HLA-DRB1*01:03L HLA-DRB1*04:04L HLA-DQA1*01:02-B1*06:02L HLA-DRB1*01:02L HLA-DRB1*16:01L HLA-DRB1*04:08L
  source 1..14: note = Severe acute respiratory syndrome coronavirus 2
NVPMEKLKTLVATA

SEQ ID NO: 15661 - protein, 11 aa, Severe acute respiratory syndrome-related coronavirus
  REGION 1..11: note = Table B: HLA-DRB1*01:03L
  source 1..11: note = Severe acute respiratory syndrome coronavirus 2
ISAARQGFVDS

SEQ ID NO: 15662 - protein, 12 aa, Severe acute respiratory syndrome-related coronavirus
  REGION 1..12: note = Table B: HLA-DRB1*01:03L HLA-DRB1*04:02L HLA-DRB1*04:05L HLA-DQA1*01:02-B1*06:02L HLA-DRB1*01:02L HLA-DQA1*01:01-B1*05:01L HLA-DRB1*12:01L HLA-DPA1*02:01-B1*13:01L HLA-DPA1*03:01-B1*105:01L
  REGION 1..12: note = CONT. FROM ABOVE: HLA-DRB1*04:08L HLA-DQA1*02:01-B1*03:03L HLA-D RB1*15:03L
  source 1..12: note = Severe acute respiratory syndrome coronavirus 2
AARQGFVDSDVE

SEQ ID NO: 15663 - protein, 13 aa, Severe acute respiratory syndrome-related coronavirus
  REGION 1..13: note = Table B: HLA-DRB1*01:03L HLA-DRB1*01:02L HLA-DQA1*01:01-B1*05:01L HLA-DRB1*04:10L HLA-DPA1*02:01-B1*13:01L HLA-DRB1*15:03L
  source 1..13: note = Severe acute respiratory syndrome coronavirus 2
ARQGFVDSDVETK

SEQ ID NO: 15664 - protein, 13 aa, Severe acute respiratory syndrome-related coronavirus
  REGION 1..13: note = Table B: HLA-DRB1*01:03L HLA-DRB1*04:05L HLA-DRB1*04:10L
  source 1..13: note = Severe acute respiratory syndrome coronavirus 2
LSHQSDIEVTGDS

SEQ ID NO: 15665 - protein, 14 aa, Severe acute respiratory syndrome-related coronavirus
  REGION 1..14: note = Table B: HLA-DRB1*01:03L HLA-DRB1*01:02L HLA-DRB1*08:04L HLA-DRB1*14:01L HLA-DRB1*11:04L HLA-DRB1*08:01L HLA-DRB1*11:01L HLA-DRB3*01:01L HLA-DRB1*04:08L
  source 1..14: note = Severe acute respiratory syndrome coronavirus 2
GACIDCSARHINAQ

SEQ ID NO: 15666 - protein, 12 aa, Severe acute respiratory syndrome-related coronavirus
  REGION 1..12: note = Table B: HLA-DRB1*01:03L HLA-DRB1*04:04L HLA-DRB1*01:02L HLA-DRB1*08:04L HLA-DPA1*01:03-B1*03:01L HLA-DRB1*08:01L HLA-DRB1*04:10L HLA-DRB1*04:08L
  source 1..12: note = Severe acute respiratory syndrome coronavirus 2
HNIALIWNVKDF

SEQ ID NO: 15667 - protein, 12 aa, Severe acute respiratory syndrome-related coronavirus
  REGION 1..12: note = Table B: HLA-DRB1*01:03L HLA-DQA1*01:02-B1*06:02L HLA-DRB1*01:02L HLA-DPA1*01:03-B1*03:01L HLA-DRB1*08:01L HLA-DQA1*05:01-B1*02:01L HLA-DPA1*01:03-B1*04:01L HLA-DRB1*12:01L HLA-DPA1*01:03-B1*02:01L HLA-DRB1*16:01L
  REGION 1..12: note = CONT. FROM ABOVE: HLA-DQA1*01:03-B1*06:01L HLA-DRB1*04:08L HLA-D RB1*15:03L
  source 1..12: note = Severe acute respiratory syndrome coronavirus 2
WNVKDFMSLSEQ

SEQ ID NO: 15668 - protein, 14 aa, Severe acute respiratory syndrome-related coronavirus
  REGION 1..14: note = Table B: HLA-DRB1*01:03L HLA-DRB1*14:01L HLA-DRB3*01:01L
  source 1..14: note = Severe acute respiratory syndrome coronavirus 2
FMSLSEQLRKQIRS

SEQ ID NO: 15669 - protein, 12 aa, Severe acute respiratory syndrome-related coronavirus
  REGION 1..12: note = Table B: HLA-DRB1*01:03L HLA-DRB1*01:02L HLA-DRB1*08:01L HLA-DRB1*04:08L
  source 1..12: note = Severe acute respiratory syndrome coronavirus 2
EQLRKQIRSAAK

SEQ ID NO: 15670 - protein, 11 aa, Severe acute respiratory syndrome-related coronavirus
  REGION 1..11: note = Table B: HLA-DRB1*01:03L HLA-DRB1*04:08L
  source 1..11: note = Severe acute respiratory syndrome coronavirus 2
LRKQIRSAAKK

SEQ ID NO: 15671 - protein, 12 aa, Severe acute respiratory syndrome-related coronavirus
  REGION 1..12: note = Table B: HLA-DRB1*01:03L HLA-DRB1*04:05L HLA-DRB1*01:02L HLA-DRB1*14:01L HLA-DRB1*08:01L HLA-DRB1*12:01L HLA-DRB1*16:01L HLA-DRB1*04:08L
  source 1..12: note = Severe acute respiratory syndrome coronavirus 2
RKQIRSAAKKNN

SEQ ID NO: 15672 - protein, 10 aa, Severe acute respiratory syndrome-related coronavirus
  REGION 1..10: note = Table B: HLA-DRB1*01:03L HLA-DQA1*03:01-B1*03:02L
  source 1..10: note = Severe acute respiratory syndrome coronavirus 2
AAKKNNLPFK

SEQ ID NO: 15673 - protein, 12 aa, Severe acute respiratory syndrome-related coronavirus
  REGION 1..12: note = Table B: HLA-DRB1*01:03L HLA-DRB1*01:02L HLA-DRB1*12:01L HLA-DRB1*16:01L HLA-DRB1*04:08L HLA-DRB1*15:03L
  source 1..12: note = Severe acute respiratory syndrome coronavirus 2
LPFKLTCATTRQ

SEQ ID NO: 15674 - protein, 14 aa, Severe acute respiratory syndrome-related coronavirus
  REGION 1..14: note = Table B: HLA-DRB1*01:03L HLA-DRB1*15:03L
  source 1..14: note = Severe acute respiratory syndrome coronavirus 2
PFKLTCATTRQVVN

SEQ ID NO: 15675 - protein, 12 aa, Severe acute respiratory syndrome-related coronavirus
  REGION 1..12: note = Table B: HLA-DRB1*01:03L HLA-DRB1*04:10L HLA-DRB1*04:08L
  source 1..12: note = Severe acute respiratory syndrome coronavirus 2
RQVVNVVTTKIA

SEQ ID NO: 15676 - protein, 13 aa, Severe acute respiratory syndrome-related coronavirus
  REGION 1..13: note = Table B: HLA-DRB1*01:03L HLA-DRB1*04:04L HLA-DRB1*04:08L
  source 1..13: note = Severe acute respiratory syndrome coronavirus 2
QVVNVVTTKIALK

SEQ ID NO: 15677 - protein, 12 aa, Severe acute respiratory syndrome-related coronavirus
  REGION 1..12: note = Table B: HLA-DRB1*01:03L HLA-DRB1*04:05L HLA-DQA1*01:02-B1*06:02L HLA-DRB1*01:02L HLA-DRB1*14:01L HLA-DRB1*08:01L HLA-DRB1*04:10L HLA-DRB1*12:01L HLA-DRB1*14:54L HLA-DRB1*16:01L HLA-DRB1*04:08L
  source 1..12: note = Severe acute respiratory syndrome coronavirus 2
VNVVTTKIALKG

SEQ ID NO: 15678 - protein, 12 aa, Severe acute respiratory syndrome-related coronavirus
  REGION 1..12: note = Table B: HLA-DRB1*01:03L HLA-DRB1*04:02L HLA-DRB1*04:05L HLA-DQA1*01:02-B1*06:02L HLA-DPA1*03:01-B1*04:02L HLA-DQA1*01-B1*05L HLA-DQA1*05:01-B1*02:01L HLA-DPA1*01:03-B1*04:01L HLA-DPA1*01:03-B1*04:02L
  REGION 1..12: note = CONT. FROM ABOVE: HLA-DRB1*12:01L HLA-DPA1*03:01-B1*105:01L HLA- DRB1*14:17L HLA-DPA1*01:02-B1*04:01L HLA-DRB1*16:01L HLA-DQA1*01 :03-B1*06:01L HLA-DRB1*04:08L HLA-DQA1*02:01-B1*03:03L HLA-DRB1* 15:03L
  source 1..12: note = Severe acute respiratory syndrome coronavirus 2
VAAIFYLITPVH

SEQ ID NO: 15679 - protein, 11 aa, Severe acute respiratory syndrome-related coronavirus
  REGION 1..11: note = Table B: HLA-DRB1*01:03L HLA-DRB1*04:05L HLA-DRB1*11:03L HLA-DRB1*14:02L HLA-DPA1*01:03-B1*04:02L HLA-DPA1*02:01-B1*13:01L HLA-DPA1*03:01-B1*105:01L HLA-DPA1*01:02-B1*04:01L HLA-DRB1*08:02L
  REGION 1..11: note = CONT. FROM ABOVE: HLA-DQA1*02:01-B1*03:03L
  source 1..11: note = Severe acute respiratory syndrome coronavirus 2
HTDFSSEIIGY

SEQ ID NO: 15680 - protein, 12 aa, Severe acute respiratory syndrome-related coronavirus
  REGION 1..12: note = Table B: HLA-DRB1*01:03L HLA-DPA1*01:03-B1*03:01L HLA-DRB1*08:01L HLA-DPA1*01:03-B1*04:02L HLA-DPA1*03:01-B1*105:01L HLA-DRB1*16:01L HLA-DRB1*04:08L
  source 1..12: note = Severe acute respiratory syndrome coronavirus 2
IDGGVTRDIAST

SEQ ID NO: 15681 - protein, 13 aa, Severe acute respiratory syndrome-related coronavirus
  REGION 1..13: note = Table B: HLA-DRB1*01:03L HLA-DRB1*04:04L HLA-DRB1*04:05L HLA-DRB1*01:02L HLA-DRB1*16:01L HLA-DRB1*04:08L
  source 1..13: note = Severe acute respiratory syndrome coronavirus 2
RDIASTDTCFANK

SEQ ID NO: 15682 - protein, 14 aa, Severe acute respiratory syndrome-related coronavirus
  REGION 1..14: note = Table B: HLA-DRB1*01:03L HLA-DRB1*04:04L HLA-DQA1*01:02-B1*06:02L HLA-DRB1*01:02L HLA-DRB1*12:01L HLA-DPA1*03:01-B1*105:01L HLA-DQA1*02:01-B1*03:03L
  source 1..14: note = Severe acute respiratory syndrome coronavirus 2
HADFDTWFSQRGGS

SEQ ID NO: 15683 - protein, 11 aa, Severe acute respiratory syndrome-related coronavirus
  REGION 1..11: note = Table B: HLA-DRB1*01:03L HLA-DRB1*04:02L HLA-DRB1*01:02L
  source 1..11: note = Severe acute respiratory syndrome coronavirus 2
ILRTTNGDFLH

SEQ ID NO: 15684 - protein, 12 aa, Severe acute respiratory syndrome-related coronavirus
  REGION 1..12: note = Table B: HLA-DRB1*01:03L HLA-DQA1*01:02-B1*06:02L HLA-DRB1*01:02L HLA-DRB1*08:04L HLA-DPA1*03:01-B1*04:02L HLA-DRB1*11:04L HLA-DRB1*08:01L HLA-DRB1*11:01L HLA-DPA1*01:03-B1*04:01L HLA-DPA1*01:03-B1*04:02L
  REGION 1..12: note = CONT. FROM ABOVE: HLA-DRB1*12:01L HLA-DPA1*03:01-B1*105:01L HLA- DPA1*01:03-B1*02:01L HLA-DRB1*16:01L HLA-DRB1*04:08L HLA-DRB1*15 :03L
  source 1..12: note = Severe acute respiratory syndrome coronavirus 2
LHFLPRVFSAVG

SEQ ID NO: 15685 - protein, 12 aa, Severe acute respiratory syndrome-related coronavirus
  REGION 1..12: note = Table B: HLA-DRB1*01:03L HLA-DQA1*01:02-B1*06:02L HLA-DPA1*03:01-B1*105:01L HLA-DRB1*16:01L HLA-DRB1*04:08L
  source 1..12: note = Severe acute respiratory syndrome coronavirus 2
HFLPRVFSAVGN

SEQ ID NO: 15686 - protein, 14 aa, Severe acute respiratory syndrome-related coronavirus
  REGION 1..14: note = Table B: HLA-DRB1*01:03L
  source 1..14: note = Severe acute respiratory syndrome coronavirus 2
GNICYTPSKLIEYT

SEQ ID NO: 15687 - protein, 14 aa, Severe acute respiratory syndrome-related coronavirus
  REGION 1..14: note = Table B: HLA-DRB1*01:03L HLA-DPA1*01:03-B1*03:01L HLA-DQA1*01:01-B1*05:01L HLA-DRB1*08:01L HLA-DQA1*05:01-B1*02:01L HLA-DPA1*01:03-B1*04:02L HLA-DPA1*03:01-B1*105:01L HLA-DQA1*03:01-B1*03:02L
  REGION 1..14: note = CONT. FROM ABOVE: HLA-DRB1*04:08L
  source 1..14: note = Severe acute respiratory syndrome coronavirus 2
DASGKPVPYCYDTN

SEQ ID NO: 15688 - protein, 13 aa, Severe acute respiratory syndrome-related coronavirus
  REGION 1..13: note = Table B: HLA-DRB1*01:03L HLA-DRB1*04:02L HLA-DRB1*01:02L HLA-DPA1*01:03-B1*04:02L
  source 1..13: note = Severe acute respiratory syndrome coronavirus 2
NVLEGSVAYESLR

SEQ ID NO: 15689 - protein, 12 aa, Severe acute respiratory syndrome-related coronavirus
  REGION 1..12: note = Table B: HLA-DRB1*01:03L HLA-DRB1*04:05L HLA-DRB4*03:01NL HLA-DQA1*01:01-B1*05:01L HLA-DRB1*08:01L HLA-DQA1*05:05-B1*03:19L HLA-DRB1*04:10L HLA-DPA1*01:03-B1*04:02L HLA-DRB1*12:01L HLA-DRB1*14:17L
  REGION 1..12: note = CONT. FROM ABOVE: HLA-DRB1*16:01L HLA-DRB1*04:08L
  source 1..12: note = Severe acute respiratory syndrome coronavirus 2
EGSVAYESLRPD

SEQ ID NO: 15690 - protein, 10 aa, Severe acute respiratory syndrome-related coronavirus
  REGION 1..10: note = Table B: HLA-DRB1*01:03L HLA-DRB1*14:01L HLA-DQA1*03:01-B1*03:02L HLA-DRB1*16:01L HLA-DQA1*02:01-B1*03:03L
  source 1..10: note = Severe acute respiratory syndrome coronavirus 2
SLRPDTRYVL

SEQ ID NO: 15691 - protein, 11 aa, Severe acute respiratory syndrome-related coronavirus
  REGION 1..11: note = Table B: HLA-DRB1*01:03L HLA-DRB1*04:04L HLA-DRB1*04:05L HLA-DRB4*03:01NL HLA-DRB1*04:10L HLA-DRB1*12:02L HLA-DRB1*14:54L HLA-DRB1*04:08L HLA-DRB1*15:01L
  source 1..11: note = Severe acute respiratory syndrome coronavirus 2
GSIIQFPNTYL

SEQ ID NO: 15692 - protein, 12 aa, Severe acute respiratory syndrome-related coronavirus
  REGION 1..12: note = Table B: HLA-DRB1*01:03L HLA-DRB1*04:05L HLA-DQA1*01:02-B1*06:02L HLA-DRB1*01:02L HLA-DQA1*01-B1*05L HLA-DRB1*12:01L HLA-DPA1*03:01-B1*105:01L HLA-DQA1*03:01-B1*03:02L HLA-DRB1*16:01L
  REGION 1..12: note = CONT. FROM ABOVE: HLA-DQA1*01:03-B1*06:01L HLA-DRB1*04:08L HLA-D QA1*02:01-B1*03:03L HLA-DRB1*15:03L
  source 1..12: note = Severe acute respiratory syndrome coronavirus 2
VTTFDSEYCRHG

SEQ ID NO: 15693 - protein, 14 aa, Severe acute respiratory syndrome-related coronavirus
  REGION 1..14: note = Table B: HLA-DRB1*01:03L HLA-DRB1*01:02L HLA-DRB1*08:01L HLA-DRB1*04:08L
  source 1..14: note = Severe acute respiratory syndrome coronavirus 2
ERSEAGVCVSTSGR

SEQ ID NO: 15694 - protein, 13 aa, Severe acute respiratory syndrome-related coronavirus
  REGION 1..13: note = Table B: HLA-DRB1*01:03L HLA-DRB1*04:08L
  source 1..13: note = Severe acute respiratory syndrome coronavirus 2
RWVLNNDYYRSLP

SEQ ID NO: 15695 - protein, 12 aa, Severe acute respiratory syndrome-related coronavirus
  REGION 1..12: note = Table B: HLA-DRB1*01:03L HLA-DQA1*01:02-B1*06:02L HLA-DRB1*12:01L HLA-DPA1*03:01-B1*105:01L HLA-DRB1*04:08L HLA-DRB1*15:03L
  source 1..12: note = Severe acute respiratory syndrome coronavirus 2
YRSLPGVFCGVD

SEQ ID NO: 15696 - protein, 14 aa, Severe acute respiratory syndrome-related coronavirus
  REGION 1..14: note = Table B: HLA-DRB1*01:03L HLA-DPA1*01:03-B1*04:02L
  source 1..14: note = Severe acute respiratory syndrome coronavirus 2
AVNLLTNMFTPLIQ

SEQ ID NO: 15697 - protein, 14 aa, Severe acute respiratory syndrome-related coronavirus
  REGION 1..14: note = Table B: HLA-DRB1*01:03L HLA-DPA1*01:03-B1*03:01L HLA-DPA1*01:03-B1*04:02L HLA-DRB1*12:01L HLA-DRB1*16:01L
  source 1..14: note = Severe acute respiratory syndrome coronavirus 2
ALDISASIVAGGIV

SEQ ID NO: 15698 - protein, 13 aa, Severe acute respiratory syndrome-related coronavirus
  REGION 1..13: note = Table B: HLA-DRB1*01:03L HLA-DRB1*04:02L HLA-DRB1*01:02L HLA-DPA1*01:03-B1*03:01L HLA-DQA1*01:01-B1*05:01L HLA-DPA1*01:03-B1*04:02L HLA-DRB1*12:01L HLA-DRB1*16:01L
  source 1..13: note = Severe acute respiratory syndrome coronavirus 2
DISASIVAGGIVA

SEQ ID NO: 15699 - protein, 12 aa, Severe acute respiratory syndrome-related coronavirus
  REGION 1..12: note = Table B: HLA-DRB1*01:03L HLA-DQA1*01:02-B1*06:02L HLA-DRB1*01:02L HLA-DRB1*08:01L HLA-DRB1*11:01L HLA-DPA1*01:02-B1*04:01L HLA-DRB1*16:01L HLA-DRB1*04:08L
  source 1..12: note = Severe acute respiratory syndrome coronavirus 2
AYYFMRFRRAFG

SEQ ID NO: 15700 - protein, 11 aa, Severe acute respiratory syndrome-related coronavirus
  REGION 1..11: note = Table B: HLA-DRB1*01:03L
  source 1..11: note = Severe acute respiratory syndrome coronavirus 2
RFRRAFGEYSH

SEQ ID NO: 15701 - protein, 13 aa, Severe acute respiratory syndrome-related coronavirus
  REGION 1..13: note = Table B: HLA-DRB1*01:03L HLA-DQA1*01:02-B1*06:02L HLA-DPA1*02:01-B1*13:01L HLA-DRB1*15:03L
  source 1..13: note = Severe acute respiratory syndrome coronavirus 2
FRRAFGEYSHVVA

SEQ ID NO: 15702 - protein, 14 aa, Severe acute respiratory syndrome-related coronavirus
  REGION 1..14: note = Table B: HLA-DRB1*01:03L HLA-DRB1*11:04L HLA-DRB1*11:01L HLA-DRB1*15:03L
  source 1..14: note = Severe acute respiratory syndrome coronavirus 2
RRAFGEYSHVVAFN

SEQ ID NO: 15703 - protein, 14 aa, Severe acute respiratory syndrome-related coronavirus
  REGION 1..14: note = Table B: HLA-DRB1*01:03L HLA-DRB1*08:01L
  source 1..14: note = Severe acute respiratory syndrome coronavirus 2
RAFGEYSHVVAFNT

SEQ ID NO: 15704 - protein, 13 aa, Severe acute respiratory syndrome-related coronavirus
  REGION 1..13: note = Table B: HLA-DRB1*01:03L HLA-DPA1*01:03-B1*04:02L HLA-DRB1*04:08L
  source 1..13: note = Severe acute respiratory syndrome coronavirus 2
PVYSFLPGVYSVI

SEQ ID NO: 15705 - protein, 12 aa, Severe acute respiratory syndrome-related coronavirus
  REGION 1..12: note = Table B: HLA-DRB1*01:03L HLA-DRB1*04:05L HLA-DRB1*01:02L HLA-DRB1*12:01L HLA-DRB1*04:08L
  source 1..12: note = Severe acute respiratory syndrome coronavirus 2
KHFYWFFSNYLK

SEQ ID NO: 15706 - protein, 10 aa, Severe acute respiratory syndrome-related coronavirus
  REGION 1..10: note = Table B: HLA-DRB1*01:03L HLA-DRB1*16:01L HLA-DRB1*15:03L
  source 1..10: note = Severe acute respiratory syndrome coronavirus 2
YWFFSNYLKR

SEQ ID NO: 15707 - protein, 10 aa, Severe acute respiratory syndrome-related coronavirus
  REGION 1..10: note = Table B: HLA-DRB1*01:03L HLA-DRB1*01:02L HLA-DRB1*08:01L HLA-DQA1*03:01-B1*03:02L HLA-DPA1*01:02-B1*04:01L HLA-DRB1*16:01L HLA-DRB1*04:08L HLA-DQA1*02:01-B1*03:03L
  source 1..10: note = Severe acute respiratory syndrome coronavirus 2
WFFSNYLKRR

SEQ ID NO: 15708 - protein, 14 aa, Severe acute respiratory syndrome-related coronavirus
  REGION 1..14: note = Table B: HLA-DRB1*01:03L HLA-DQA1*01:02-B1*06:02L HLA-DRB1*01:02L HLA-DRB1*16:01L HLA-DRB1*04:08L
  source 1..14: note = Severe acute respiratory syndrome coronavirus 2
FFSNYLKRRVVFNG

SEQ ID NO: 15709 - protein, 14 aa, Severe acute respiratory syndrome-related coronavirus
  REGION 1..14: note = Table B: HLA-DRB1*01:03L HLA-DRB1*04:05L HLA-DQA1*01:02-B1*06:02L HLA-DRB1*01:02L HLA-DRB1*08:04L HLA-DRB1*14:01L HLA-DRB1*11:01L HLA-DRB1*16:01L HLA-DRB1*04:08L HLA-DRB1*15:03L
  source 1..14: note = Severe acute respiratory syndrome coronavirus 2
SNYLKRRVVFNGVS

SEQ ID NO: 15710 - protein, 10 aa, Severe acute respiratory syndrome-related coronavirus
  REGION 1..10: note = Table B: HLA-DRB1*01:03L HLA-DQA1*02:01-B1*03:03L
  source 1..10: note = Severe acute respiratory syndrome coronavirus 2
RRVVFNGVSF

SEQ ID NO: 15711 - protein, 12 aa, Severe acute respiratory syndrome-related coronavirus
  REGION 1..12: note = Table B: HLA-DRB1*01:03L HLA-DRB1*04:05L HLA-DRB1*01:02L HLA-DPA1*01:03-B1*03:01L HLA-DQA1*05:05-B1*03:01L HLA-DRB1*04:08L
  source 1..12: note = Severe acute respiratory syndrome coronavirus 2
GVSFSTFEEAAL

SEQ ID NO: 15712 - protein, 11 aa, Severe acute respiratory syndrome-related coronavirus
  REGION 1..11: note = Table B: HLA-DRB1*01:03L HLA-DQA1*01:03-B1*06:01L HLA-DRB1*04:08L
  source 1..11: note = Severe acute respiratory syndrome coronavirus 2
LLNKEMYLKLR

SEQ ID NO: 15713 - protein, 12 aa, Severe acute respiratory syndrome-related coronavirus
  REGION 1..12: note = Table B: HLA-DRB1*01:03L HLA-DRB1*04:08L
  source 1..12: note = Severe acute respiratory syndrome coronavirus 2
LNKEMYLKLRSD

SEQ ID NO: 15714 - protein, 15 aa, Severe acute respiratory syndrome-related coronavirus
  REGION 1..15: note = Table B: HLA-DRB1*01:03L HLA-DRB1*04:08L
  source 1..15: note = Severe acute respiratory syndrome coronavirus 2
KEMYLKLRSDVLLPL

SEQ ID NO: 15715 - protein, 13 aa, Severe acute respiratory syndrome-related coronavirus
  REGION 1..13: note = Table B: HLA-DRB1*01:03L HLA-DQA1*01:02-B1*06:02L HLA-DRB1*01:02L HLA-DPA1*01:03-B1*03:01L HLA-DRB1*14:01L HLA-DQA1*01-B1*05L HLA-DQA1*05:01-B1*02:01L HLA-DPA1*01:03-B1*04:01L HLA-DPA1*01:03-B1*04:02L
  REGION 1..13: note = CONT. FROM ABOVE: HLA-DRB1*12:01L HLA-DPA1*02:01-B1*13:01L
  source 1..13: note = Severe acute respiratory syndrome coronavirus 2
YLKLRSDVLLPLT

SEQ ID NO: 15716 - protein, 12 aa, Severe acute respiratory syndrome-related coronavirus
  REGION 1..12: note = Table B: HLA-DRB1*01:03L HLA-DRB1*01:02L HLA-DRB1*12:01L HLA-DRB1*16:01L HLA-DRB1*04:08L
  source 1..12: note = Severe acute respiratory syndrome coronavirus 2
KLRSDVLLPLTQ

SEQ ID NO: 15717 - protein, 11 aa, Severe acute respiratory syndrome-related coronavirus
  REGION 1..11: note = Table B: HLA-DRB1*01:03L HLA-DRB1*14:02L HLA-DRB1*08:02L HLA-DQA1*02:01-B1*03:03L
  source 1..11: note = Severe acute respiratory syndrome coronavirus 2
RSDVLLPLTQY

SEQ ID NO: 15718 - protein, 13 aa, Severe acute respiratory syndrome-related coronavirus
  REGION 1..13: note = Table B: HLA-DRB1*01:03L HLA-DRB1*01:02L HLA-DRB1*16:01L HLA-DRB1*04:08L HLA-DRB1*15:03L
  source 1..13: note = Severe acute respiratory syndrome coronavirus 2
TTSYREAACCHLA

SEQ ID NO: 15719 - protein, 12 aa, Severe acute respiratory syndrome-related coronavirus
  REGION 1..12: note = Table B: HLA-DRB1*01:03L HLA-DRB1*04:05L HLA-DRB1*01:02L HLA-DRB1*12:01L HLA-DRB1*16:01L HLA-DRB1*04:08L HLA-DRB1*15:03L
  source 1..12: note = Severe acute respiratory syndrome coronavirus 2
SYREAACCHLAK

SEQ ID NO: 15720 - protein, 14 aa, Severe acute respiratory syndrome-related coronavirus
  REGION 1..14: note = Table B: HLA-DRB1*01:03L HLA-DQA1*01:02-B1*06:02L HLA-DRB1*01:02L HLA-DRB1*14:01L HLA-DRB1*11:04L HLA-DPA1*02:01-B1*13:01L HLA-DPA1*03:01-B1*105:01L HLA-DRB1*10:01L HLA-DQA1*01:03-B1*06:01L HLA-DRB1*08:03L
  source 1..14: note = Severe acute respiratory syndrome coronavirus 2
AKALNDFSNSGSDV

SEQ ID NO: 15721 - protein, 16 aa, Severe acute respiratory syndrome-related coronavirus
  REGION 1..16: note = Table B: HLA-DRB1*01:03L HLA-DRB1*01:02L HLA-DPA1*01:03-B1*04:02L HLA-DRB1*12:01L HLA-DRB1*15:03L
  source 1..16: note = Severe acute respiratory syndrome coronavirus 2
NDFSNSGSDVLYQPPQ

SEQ ID NO: 15722 - protein, 15 aa, Severe acute respiratory syndrome-related coronavirus
  REGION 1..15: note = Table B: HLA-DRB1*01:03L HLA-DRB1*04:02L HLA-DRB1*04:05L HLA-DRB1*01:02L HLA-DRB4*03:01NL HLA-DPA1*01:03-B1*03:01L HLA-DQA1*01:01-B1*05:01L HLA-DRB1*12:01L HLA-DRB1*14:17L HLA-DRB1*16:01L HLA-DRB1*04:08L
  source 1..15: note = Severe acute respiratory syndrome coronavirus 2
QPPQTSITSAVLQSG

SEQ ID NO: 15723 - protein, 14 aa, Severe acute respiratory syndrome-related coronavirus
  REGION 1..14: note = Table B: HLA-DRB1*01:03L HLA-DQA1*01:02-B1*06:02L HLA-DRB1*14:01L HLA-DRB1*04:08L
  source 1..14: note = Severe acute respiratory syndrome coronavirus 2
AVLQSGFRKMAFPS

SEQ ID NO: 15724 - protein, 12 aa, Severe acute respiratory syndrome-related coronavirus
  REGION 1..12: note = Table B: HLA-DRB1*01:03L HLA-DRB1*04:05L HLA-DRB1*01:02L HLA-DRB1*08:01L HLA-DRB1*12:01L HLA-DQA1*03:01-B1*03:02L HLA-DPA1*01:02-B1*04:01L HLA-DRB1*16:01L HLA-DRB1*04:08L
  source 1..12: note = Severe acute respiratory syndrome coronavirus 2
SGFRKMAFPSGK

SEQ ID NO: 15725 - protein, 12 aa, Severe acute respiratory syndrome-related coronavirus
  REGION 1..12: note = Table B: HLA-DRB1*01:03L HLA-DQA1*01:02-B1*06:02L HLA-DRB1*01:02L HLA-DRB1*16:01L HLA-DRB1*04:08L HLA-DRB1*15:03L
  source 1..12: note = Severe acute respiratory syndrome coronavirus 2
LWLDDVVYCPRH

SEQ ID NO: 15726 - protein, 14 aa, Severe acute respiratory syndrome-related coronavirus
  REGION 1..14: note = Table B: HLA-DRB1*01:03L
  source 1..14: note = Severe acute respiratory syndrome coronavirus 2
DMLNPNYEDLLIRK

SEQ ID NO: 15727 - protein, 15 aa, Severe acute respiratory syndrome-related coronavirus
  REGION 1..15: note = Table B: HLA-DRB1*01:03L HLA-DRB1*04:04L HLA-DPA1*01:03-B1*104:01L HLA-DQA1*05:05-B1*03:01L HLA-DRB1*07:01L
  source 1..15: note = Severe acute respiratory syndrome coronavirus 2
LIRKSNHNFLVQAGN

SEQ ID NO: 15728 - protein, 14 aa, Severe acute respiratory syndrome-related coronavirus
  REGION 1..14: note = Table B: HLA-DRB1*01:03L HLA-DRB1*01:02L HLA-DRB1*08:01L HLA-DRB1*04:08L
  source 1..14: note = Severe acute respiratory syndrome coronavirus 2
VQAGNVQLRVIGHS

SEQ ID NO: 15729 - protein, 13 aa, Severe acute respiratory syndrome-related coronavirus
  REGION 1..13: note = Table B: HLA-DRB1*01:03L HLA-DRB1*04:08L
  source 1..13: note = Severe acute respiratory syndrome coronavirus 2
RVIGHSMQNCVLK

SEQ ID NO: 15730 - protein, 15 aa, Severe acute respiratory syndrome-related coronavirus
  REGION 1..15: note = Table B: HLA-DRB1*01:03L HLA-DRB1*16:01L HLA-DRB1*15:03L
  source 1..15: note = Severe acute respiratory syndrome coronavirus 2
GQTFSVLACYNGSPS

SEQ ID NO: 15731 - protein, 13 aa, Severe acute respiratory syndrome-related coronavirus
  REGION 1..13: note = Table B: HLA-DRB1*01:03L HLA-DPA1*01:03-B1*03:01L HLA-DRB1*12:01L HLA-DPA1*01:03-B1*02:01L HLA-DQA1*01:03-B1*06:01L
  source 1..13: note = Severe acute respiratory syndrome coronavirus 2
NIDYDCVSFCYMH

SEQ ID NO: 15732 - protein, 12 aa, Severe acute respiratory syndrome-related coronavirus
  REGION 1..12: note = Table B: HLA-DRB1*01:03L HLA-DQA1*01:02-B1*06:02L HLA-DPA1*03:01-B1*04:02L HLA-DPA1*01:03-B1*04:02L HLA-DPA1*01:03-B1*02:01L HLA-DRB1*16:01L HLA-DRB1*04:08L
  source 1..12: note = Severe acute respiratory syndrome coronavirus 2
DYDCVSFCYMHH

SEQ ID NO: 15733 - protein, 14 aa, Severe acute respiratory syndrome-related coronavirus
  REGION 1..14: note = Table B: HLA-DRB1*01:03L HLA-DRB1*04:05L HLA-DRB1*01:02L HLA-DPA1*03:01-B1*04:02L HLA-DPA1*01:03-B1*04:01L HLA-DPA1*01:03-B1*04:02L HLA-DPA1*02:01-B1*13:01L HLA-DRB1*04:08L HLA-DRB1*15:03L
  source 1..14: note = Severe acute respiratory syndrome coronavirus 2
TDLEGNFYGPFVDR

SEQ ID NO: 15734 - protein, 14 aa, Severe acute respiratory syndrome-related coronavirus
  REGION 1..14: note = Table B: HLA-DRB1*01:03L HLA-DRB1*04:05L HLA-DRB1*01:02L HLA-DPA1*01:03-B1*03:01L HLA-DPA1*03:01-B1*04:02L HLA-DPA1*01:03-B1*04:01L HLA-DPA1*01:03-B1*04:02L HLA-DPA1*02:01-B1*13:01L HLA-DRB1*04:08L HLA-DRB1*15:03L
  source 1..14: note = Severe acute respiratory syndrome coronavirus 2
DLEGNFYGPFVDRQ

SEQ ID NO: 15735 - protein, 13 aa, Severe acute respiratory syndrome-related coronavirus
  REGION 1..13: note = Table B: HLA-DRB1*01:03L HLA-DRB1*01:02L HLA-DPA1*03:01-B1*04:02L
  source 1..13: note = Severe acute respiratory syndrome coronavirus 2
GNFYGPFVDRQTA

SEQ ID NO: 15736 - protein, 11 aa, Severe acute respiratory syndrome-related coronavirus
  REGION 1..11: note = Table B: HLA-DRB1*01:03L HLA-DRB4*03:01NL HLA-DQA1*05:01-B1*02:01L HLA-DRB1*14:54L HLA-DPA1*01:02-B1*04:01L
  source 1..11: note = Severe acute respiratory syndrome coronavirus 2
YGPFVDRQTAQ

SEQ ID NO: 15737 - protein, 13 aa, Severe acute respiratory syndrome-related coronavirus
  REGION 1..13: note = Table B: HLA-DRB1*01:03L HLA-DRB4*03:01NL HLA-DPA1*01:03-B1*03:01L HLA-DRB1*16:01L HLA-DRB1*04:08L
  source 1..13: note = Severe acute respiratory syndrome coronavirus 2
DRQTAQAAGTDTT

SEQ ID NO: 15738 - protein, 12 aa, Severe acute respiratory syndrome-related coronavirus
  REGION 1..12: note = Table B: HLA-DRB1*01:03L HLA-DRB1*12:01L HLA-DRB1*16:01L HLA-DRB1*04:08L
  source 1..12: note = Severe acute respiratory syndrome coronavirus 2
AVINGDRWFLNR

SEQ ID NO: 15739 - protein, 11 aa, Severe acute respiratory syndrome-related coronavirus
  REGION 1..11: note = Table B: HLA-DRB1*01:03L HLA-DPA1*03:01-B1*04:02L HLA-DQA1*01-B1*05L HLA-DPA1*01:03-B1*04:01L HLA-DPA1*03:01-B1*105:01L HLA-DRB1*16:01L HLA-DRB1*04:08L
  source 1..11: note = Severe acute respiratory syndrome coronavirus 2
DRWFLNRFTTT

SEQ ID NO: 15740 - protein, 12 aa, Severe acute respiratory syndrome-related coronavirus
  REGION 1..12: note = Table B: HLA-DRB1*01:03L HLA-DRB1*04:08L
  source 1..12: note = Severe acute respiratory syndrome coronavirus 2
RWFLNRFTTTLN

SEQ ID NO: 15741 - protein, 12 aa, Severe acute respiratory syndrome-related coronavirus
  REGION 1..12: note = Table B: HLA-DRB1*01:03L HLA-DQA1*01-B1*05L HLA-DPA1*01:03-B1*02:01L HLA-DRB1*04:08L
  source 1..12: note = Severe acute respiratory syndrome coronavirus 2
WFLNRFTTTLND

SEQ ID NO: 15742 - protein, 12 aa, Severe acute respiratory syndrome-related coronavirus
  REGION 1..12: note = Table B: HLA-DRB1*01:03L HLA-DRB1*08:02L
  source 1..12: note = Severe acute respiratory syndrome coronavirus 2
TLNDFNLVAMKY

SEQ ID NO: 15743 - protein, 13 aa, Severe acute respiratory syndrome-related coronavirus
  REGION 1..13: note = Table B: HLA-DRB1*01:03L HLA-DRB1*08:77L HLA-DRB3*01:01L
  source 1..13: note = Severe acute respiratory syndrome coronavirus 2
YEPLTQDHVDILG

SEQ ID NO: 15744 - protein, 13 aa, Severe acute respiratory syndrome-related coronavirus
  REGION 1..13: note = Table B: HLA-DRB1*01:03L HLA-DRB1*04:04L HLA-DRB1*04:05L HLA-DRB1*04:10L HLA-DRB1*10:01L HLA-DRB1*04:08L
  source 1..13: note = Severe acute respiratory syndrome coronavirus 2
DHVDILGPLSAQT

SEQ ID NO: 15745 - protein, 15 aa, Severe acute respiratory syndrome-related coronavirus
  REGION 1..15: note = Table B: HLA-DRB1*01:03L HLA-DRB1*15:03L
  source 1..15: note = Severe acute respiratory syndrome coronavirus 2
AQTGIAVLDMCASLK

SEQ ID NO: 15746 - protein, 13 aa, Severe acute respiratory syndrome-related coronavirus
  REGION 1..13: note = Table B: HLA-DRB1*01:03L HLA-DPA1*01:03-B1*04:01L HLA-DRB1*04:08L HLA-DRB1*15:03L
  source 1..13: note = Severe acute respiratory syndrome coronavirus 2
LLEDEFTPFDVVR

SEQ ID NO: 15747 - protein, 16 aa, Severe acute respiratory syndrome-related coronavirus
  REGION 1..16: note = Table B: HLA-DRB1*01:03L HLA-DPA1*01:03-B1*03:01L HLA-DPA1*02:01-B1*13:01L HLA-DPA1*01:03-B1*104:01L
  source 1..16: note = Severe acute respiratory syndrome coronavirus 2
DVVRQCSGVTFQSAVK

SEQ ID NO: 15748 - protein, 12 aa, Severe acute respiratory syndrome-related coronavirus
  REGION 1..12: note = Table B: HLA-DRB1*01:03L HLA-DQA1*01:02-B1*06:02L HLA-DRB1*01:02L HLA-DRB1*08:04L HLA-DRB1*14:01L HLA-DRB1*11:04L HLA-DRB1*11:01L HLA-DRB1*16:01L HLA-DRB1*04:08L
  source 1..12: note = Severe acute respiratory syndrome coronavirus 2
TFQSAVKRTIKG

SEQ ID NO: 15749 - protein, 11 aa, Severe acute respiratory syndrome-related coronavirus
  REGION 1..11: note = Table B: HLA-DRB1*01:03L
  source 1..11: note = Severe acute respiratory syndrome coronavirus 2
AVKRTIKGTHH

SEQ ID NO: 15750 - protein, 10 aa, Severe acute respiratory syndrome-related coronavirus
  REGION 1..10: note = Table B: HLA-DRB1*01:03L HLA-DQA1*02:01-B1*03:03L
  source 1..10: note = Severe acute respiratory syndrome coronavirus 2
KRTIKGTHHW

SEQ ID NO: 15751 - protein, 10 aa, Severe acute respiratory syndrome-related coronavirus
  REGION 1..10: note = Table B: HLA-DRB1*01:03L HLA-DQA1*03:01-B1*03:02L HLA-DPA1*01:02-B1*04:01L HLA-DRB1*16:01L
  source 1..10: note = Severe acute respiratory syndrome coronavirus 2
FAMMFVKHKH

SEQ ID NO: 15752 - protein, 15 aa, Severe acute respiratory syndrome-related coronavirus
  REGION 1..15: note = Table B: HLA-DRB1*01:03L HLA-DPA1*01:02-B1*04:01L HLA-DRB1*16:01L
  source 1..15: note = Severe acute respiratory syndrome coronavirus 2
HKHAFLCLFLLPSLA

SEQ ID NO: 15753 - protein, 14 aa, Severe acute respiratory syndrome-related coronavirus
  REGION 1..14: note = Table B: HLA-DRB1*01:03L HLA-DQA1*01:02-B1*06:02L HLA-DRB1*01:02L HLA-DRB4*01:01L HLA-DRB1*12:01L HLA-DRB1*10:01L
  source 1..14: note = Severe acute respiratory syndrome coronavirus 2
IMTWLDMVDTSLSG

SEQ ID NO: 15754 - protein, 12 aa, Severe acute respiratory syndrome-related coronavirus
  REGION 1..12: note = Table B: HLA-DRB1*01:03L HLA-DRB1*04:05L HLA-DQA1*01:01-B1*05:01L HLA-DRB1*08:01L HLA-DRB1*04:08L
  source 1..12: note = Severe acute respiratory syndrome coronavirus 2
MTARTVYDDGAR

SEQ ID NO: 15755 - protein, 13 aa, Severe acute respiratory syndrome-related coronavirus
  REGION 1..13: note = Table B: HLA-DRB1*01:03L HLA-DRB1*04:04L HLA-DRB1*04:05L HLA-DRB4*03:01NL HLA-DPA1*01:03-B1*03:01L HLA-DPA1*03:01-B1*04:02L HLA-DRB1*14:01L HLA-DRB1*08:01L HLA-DQA1*05:01-B1*02:01L HLA-DPA1*01:03-B1*04:02L
  REGION 1..13: note = CONT. FROM ABOVE: HLA-DPA1*01:03-B1*02:01L HLA-DRB1*15:03L
  source 1..13: note = Severe acute respiratory syndrome coronavirus 2
SGVVTTVMFLARG

SEQ ID NO: 15756 - protein, 10 aa, Severe acute respiratory syndrome-related coronavirus
  REGION 1..10: note = Table B: HLA-DRB1*01:03L HLA-DQA1*01:02-B1*06:02L HLA-DRB1*03:01L HLA-DRB1*14:02L HLA-DQA1*05:05-B1*03:19L HLA-DPA1*01:03-B1*04:01L HLA-DPA1*02:01-B1*13:01L HLA-DRB1*16:01L HLA-DQA1*01:03-B1*06:01L
  REGION 1..10: note = CONT. FROM ABOVE: HLA-DQA1*02:01-B1*03:03L
  source 1..10: note = Severe acute respiratory syndrome coronavirus 2
RYFRLTLGVY

SEQ ID NO: 15757 - protein, 12 aa, Severe acute respiratory syndrome-related coronavirus
  REGION 1..12: note = Table B: HLA-DRB1*01:03L HLA-DRB1*04:04L HLA-DQA1*01:02-B1*06:02L HLA-DRB1*12:01L HLA-DPA1*03:01-B1*105:01L HLA-DRB1*10:01L HLA-DRB1*04:08L HLA-DRB1*15:03L
  source 1..12: note = Severe acute respiratory syndrome coronavirus 2
LGVYDYLVSTQE

SEQ ID NO: 15758 - protein, 13 aa, Severe acute respiratory syndrome-related coronavirus
  REGION 1..13: note = Table B: HLA-DRB1*01:03L
  source 1..13: note = Severe acute respiratory syndrome coronavirus 2
QEFRYMNSQGLLP

SEQ ID NO: 15759 - protein, 15 aa, Severe acute respiratory syndrome-related coronavirus
  REGION 1..15: note = Table B: HLA-DRB1*01:03L HLA-DRB1*04:04L HLA-DRB1*08:01L HLA-DRB1*07:01L HLA-DRB1*04:08L
  source 1..15: note = Severe acute respiratory syndrome coronavirus 2
LPPKNSIDAFKLNIK

SEQ ID NO: 15760 - protein, 12 aa, Severe acute respiratory syndrome-related coronavirus
  REGION 1..12: note = Table B: HLA-DRB1*01:03L HLA-DRB1*04:05L HLA-DQA1*01:02-B1*06:02L HLA-DRB1*11:04L HLA-DRB1*11:01L HLA-DRB1*14:54L HLA-DRB1*16:01L HLA-DRB1*04:08L HLA-DRB1*08:03L
  source 1..12: note = Severe acute respiratory syndrome coronavirus 2
IDAFKLNIKLLG

SEQ ID NO: 15761 - protein, 14 aa, Severe acute respiratory syndrome-related coronavirus
  REGION 1..14: note = Table B: HLA-DRB1*01:03L HLA-DRB1*04:02L HLA-DQA1*05:05-B1*03:19L HLA-DRB1*12:01L HLA-DRB1*16:01L
  source 1..14: note = Severe acute respiratory syndrome coronavirus 2
DAFKLNIKLLGVGG

SEQ ID NO: 15762 - protein, 13 aa, Severe acute respiratory syndrome-related coronavirus
  REGION 1..13: note = Table B: HLA-DRB1*01:03L HLA-DRB1*04:08L
  source 1..13: note = Severe acute respiratory syndrome coronavirus 2
KLNIKLLGVGGKP

SEQ ID NO: 15763 - protein, 12 aa, Severe acute respiratory syndrome-related coronavirus
  REGION 1..12: note = Table B: HLA-DRB1*01:03L HLA-DRB1*01:02L
  source 1..12: note = Severe acute respiratory syndrome coronavirus 2
KLLGVGGKPCIK

SEQ ID NO: 15764 - protein, 13 aa, Severe acute respiratory syndrome-related coronavirus
  REGION 1..13: note = Table B: HLA-DRB1*01:03L HLA-DRB1*04:05L HLA-DQA1*01:02-B1*06:02L HLA-DRB1*01:02L HLA-DRB1*04:08L
  source 1..13: note = Severe acute respiratory syndrome coronavirus 2
GKPCIKVATVQSK

SEQ ID NO: 15765 - protein, 12 aa, Severe acute respiratory syndrome-related coronavirus
  REGION 1..12: note = Table B: HLA-DRB1*01:03L HLA-DRB1*04:04L HLA-DRB1*04:05L HLA-DRB1*01:02L HLA-DRB1*14:01L HLA-DPA1*01:03-B1*04:02L HLA-DQA1*05:05-B1*03:01L HLA-DRB1*16:01L HLA-DRB1*04:08L
  source 1..12: note = Severe acute respiratory syndrome coronavirus 2
SVVLLSVLQQLR

SEQ ID NO: 15766 - protein, 12 aa, Severe acute respiratory syndrome-related coronavirus
  REGION 1..12: note = Table B: HLA-DRB1*01:03L HLA-DRB1*04:04L HLA-DRB1*04:05L HLA-DQA1*01:02-B1*06:02L HLA-DRB1*01:02L HLA-DRB1*08:04L HLA-DRB1*04:10L HLA-DRB1*12:01L HLA-DPA1*03:01-B1*105:01L HLA-DRB1*14:54L HLA-DRB1*04:08L HLA-DRB1*15:03L
  source 1..12: note = Severe acute respiratory syndrome coronavirus 2
SVLQQLRVESSS

SEQ ID NO: 15767 - protein, 13 aa, Severe acute respiratory syndrome-related coronavirus
  REGION 1..13: note = Table B: HLA-DRB1*01:03L HLA-DRB1*01:01L HLA-DRB1*04:08L
  source 1..13: note = Severe acute respiratory syndrome coronavirus 2
QQLRVESSSKLWA

SEQ ID NO: 15768 - protein, 12 aa, Severe acute respiratory syndrome-related coronavirus
  REGION 1..12: note = Table B: HLA-DRB1*01:03L HLA-DRB1*04:04L HLA-DRB1*04:05L HLA-DRB1*01:02L HLA-DRB1*12:01L HLA-DPA1*03:01-B1*105:01L HLA-DQA1*05:05-B1*03:01L HLA-DRB1*04:08L
  source 1..12: note = Severe acute respiratory syndrome coronavirus 2
LRVESSSKLWAQ

SEQ ID NO: 15769 - protein, 14 aa, Severe acute respiratory syndrome-related coronavirus
  REGION 1..14: note = Table B: HLA-DRB1*01:03L HLA-DRB1*01:02L HLA-DPA1*01:03-B1*03:01L HLA-DRB1*08:01L HLA-DPA1*01:03-B1*04:02L HLA-DPA1*02:01-B1*13:01L HLA-DRB1*04:08L
  source 1..14: note = Severe acute respiratory syndrome coronavirus 2
RVESSSKLWAQCVQ

SEQ ID NO: 15770 - protein, 14 aa, Severe acute respiratory syndrome-related coronavirus
  REGION 1..14: note = Table B: HLA-DRB1*01:03L HLA-DPA1*03:01-B1*04:02L HLA-DPA1*01:03-B1*04:02L HLA-DQA1*05:05-B1*03:01L HLA-DPA1*01:02-B1*04:01L HLA-DQA1*01:03-B1*06:01L HLA-DRB1*15:03L
  source 1..14: note = Severe acute respiratory syndrome coronavirus 2
SSKLWAQCVQLHND

SEQ ID NO: 15771 - protein, 12 aa, Severe acute respiratory syndrome-related coronavirus
  REGION 1..12: note = Table B: HLA-DRB1*01:03L HLA-DRB1*04:04L HLA-DQA1*01:02-B1*06:02L HLA-DRB1*14:01L HLA-DRB1*04:08L
  source 1..12: note = Severe acute respiratory syndrome coronavirus 2
HNDILLAKDTTE

SEQ ID NO: 15772 - protein, 10 aa, Severe acute respiratory syndrome-related coronavirus
  REGION 1..10: note = Table B: HLA-DRB1*01:03L HLA-DQA1*01:02-B1*06:02L HLA-DRB1*14:02L HLA-DPA1*02:01-B1*13:01L HLA-DPA1*03:01-B1*105:01L HLA-DQA1*01:03-B1*06:01L HLA-DQA1*02:01-B1*03:03L HLA-DRB1*15:03L
  source 1..10: note = Severe acute respiratory syndrome coronavirus 2
LLAKDTTEAF

SEQ ID NO: 15773 - protein, 12 aa, Severe acute respiratory syndrome-related coronavirus
  REGION 1..12: note = Table B: HLA-DRB1*01:03L HLA-DPA1*01:03-B1*04:02L HLA-DQA1*05:05-B1*03:01L HLA-DRB1*10:01L
  source 1..12: note = Severe acute respiratory syndrome coronavirus 2
AFEKMVSLLSVL

SEQ ID NO: 15774 - protein, 13 aa, Severe acute respiratory syndrome-related coronavirus
  REGION 1..13: note = Table B: HLA-DRB1*01:03L
  source 1..13: note = Severe acute respiratory syndrome coronavirus 2
ASEFSSLPSYAAF

SEQ ID NO: 15775 - protein, 11 aa, Severe acute respiratory syndrome-related coronavirus
  REGION 1..11: note = Table B: HLA-DRB1*01:03L HLA-DRB1*04:02L HLA-DRB1*04:04L HLA-DRB1*01:02L HLA-DRB4*03:01NL HLA-DQA1*01-B1*05L HLA-DQA1*03:01-B1*03:02L HLA-DRB1*14:54L HLA-DQA1*05:05-B1*03:01L HLA-DRB1*14:17L HLA-DRB1*10:01L
  REGION 1..11: note = CONT. FROM ABOVE: HLA-DRB1*04:08L
  source 1..11: note = Severe acute respiratory syndrome coronavirus 2
FSSLPSYAAFA

SEQ ID NO: 15776 - protein, 14 aa, Severe acute respiratory syndrome-related coronavirus
  REGION 1..14: note = Table B: HLA-DRB1*01:03L HLA-DRB1*01:02L
  source 1..14: note = Severe acute respiratory syndrome coronavirus 2
ANGDSEVVLKKLKK

SEQ ID NO: 15777 - protein, 13 aa, Severe acute respiratory syndrome-related coronavirus
  REGION 1..13: note = Table B: HLA-DRB1*01:03L HLA-DRB1*04:05L HLA-DRB1*01:02L HLA-DRB1*14:01L HLA-DRB1*16:01L HLA-DRB1*04:08L
  source 1..13: note = Severe acute respiratory syndrome coronavirus 2
GDSEVVLKKLKKS

SEQ ID NO: 15778 - protein, 13 aa, Severe acute respiratory syndrome-related coronavirus
  REGION 1..13: note = Table B: HLA-DRB1*01:03L HLA-DRB1*01:02L HLA-DRB1*08:04L HLA-DRB1*12:01L HLA-DRB3*01:01L HLA-DRB1*04:08L HLA-DRB1*15:03L
  source 1..13: note = Severe acute respiratory syndrome coronavirus 2
SEVVLKKLKKSLN

SEQ ID NO: 15779 - protein, 13 aa, Severe acute respiratory syndrome-related coronavirus
  REGION 1..13: note = Table B: HLA-DRB1*01:03L HLA-DRB1*01:02L HLA-DRB1*16:01L HLA-DRB1*04:08L
  source 1..13: note = Severe acute respiratory syndrome coronavirus 2
VLKKLKKSLNVAK

SEQ ID NO: 15780 - protein, 13 aa, Severe acute respiratory syndrome-related coronavirus
  REGION 1..13: note = Table B: HLA-DRB1*01:03L HLA-DRB1*15:03L
  source 1..13: note = Severe acute respiratory syndrome coronavirus 2
LKKLKKSLNVAKS

SEQ ID NO: 15781 - protein, 11 aa, Severe acute respiratory syndrome-related coronavirus
  REGION 1..11: note = Table B: HLA-DRB1*01:03L HLA-DRB1*04:02L HLA-DRB1*01:01L HLA-DRB3*02:01L HLA-DRB1*14:01L HLA-DRB1*11:04L HLA-DPA1*01:03-B1*04:02L HLA-DRB1*12:02L HLA-DRB3*01:01L HLA-DRB1*16:01L HLA-DRB1*08:02L HLA-DQA1*02:01-B1*03:03L
  source 1..11: note = Severe acute respiratory syndrome coronavirus 2
SEFDRDAAMQR

SEQ ID NO: 15782 - protein, 15 aa, Severe acute respiratory syndrome-related coronavirus
  REGION 1..15: note = Table B: HLA-DRB1*01:03L HLA-DRB1*16:01L HLA-DRB1*04:08L
  source 1..15: note = Severe acute respiratory syndrome coronavirus 2
RDAAMQRKLEKMADQ

SEQ ID NO: 15783 - protein, 15 aa, Severe acute respiratory syndrome-related coronavirus
  REGION 1..15: note = Table B: HLA-DRB1*01:03L HLA-DRB1*08:04L HLA-DRB1*16:01L HLA-DRB1*04:08L HLA-DRB1*15:03L
  source 1..15: note = Severe acute respiratory syndrome coronavirus 2
DAAMQRKLEKMADQA

SEQ ID NO: 15784 - protein, 13 aa, Severe acute respiratory syndrome-related coronavirus
  REGION 1..13: note = Table B: HLA-DRB1*01:03L HLA-DRB1*04:02L HLA-DRB1*04:04L HLA-DRB1*08:01L HLA-DRB1*14:17L HLA-DQA1*02:01-B1*03:03L
  source 1..13: note = Severe acute respiratory syndrome coronavirus 2
QRKLEKMADQAMT

SEQ ID NO: 15785 - protein, 10 aa, Severe acute respiratory syndrome-related coronavirus
  REGION 1..10: note = Table B: HLA-DRB1*01:03L
  source 1..10: note = Severe acute respiratory syndrome coronavirus 2
YKQARSEDKR

SEQ ID NO: 15786 - protein, 14 aa, Severe acute respiratory syndrome-related coronavirus
  REGION 1..14: note = Table B: HLA-DRB1*01:03L HLA-DRB1*04:05L HLA-DRB1*01:02L HLA-DPA1*02:01-B1*13:01L HLA-DRB1*04:08L
  source 1..14: note = Severe acute respiratory syndrome coronavirus 2
SEDKRAKVTSAMQT

SEQ ID NO: 15787 - protein, 12 aa, Severe acute respiratory syndrome-related coronavirus
  REGION 1..12: note = Table B: HLA-DRB1*01:03L HLA-DPA1*01:03-B1*04:01L HLA-DRB1*12:01L HLA-DRB1*16:01L HLA-DRB1*04:08L HLA-DQA1*02:01-B1*03:03L
  source 1..12: note = Severe acute respiratory syndrome coronavirus 2
SAMQTMLFTMLR

SEQ ID NO: 15788 - protein, 12 aa, Severe acute respiratory syndrome-related coronavirus
  REGION 1..12: note = Table B: HLA-DRB1*01:03L HLA-DPA1*01:03-B1*04:02L HLA-DRB1*12:01L HLA-DRB1*16:01L HLA-DRB1*04:08L
  source 1..12: note = Severe acute respiratory syndrome coronavirus 2
MQTMLFTMLRKL

SEQ ID NO: 15789 - protein, 12 aa, Severe acute respiratory syndrome-related coronavirus
  REGION 1..12: note = Table B: HLA-DRB1*01:03L HLA-DRB1*04:05L HLA-DRB1*01:02L HLA-DRB1*08:04L HLA-DRB1*14:01L HLA-DRB1*11:04L HLA-DRB1*11:01L HLA-DPA1*01:03-B1*04:02L HLA-DRB1*12:01L HLA-DPA1*03:01-B1*105:01L HLA-DRB1*16:01L HLA-DRB1*15:03L
  source 1..12: note = Severe acute respiratory syndrome coronavirus 2
TMLFTMLRKLDN

SEQ ID NO: 15790 - protein, 12 aa, Severe acute respiratory syndrome-related coronavirus
  REGION 1..12: note = Table B: HLA-DRB1*01:03L HLA-DRB1*08:04L HLA-DRB1*11:01L HLA-DPA1*01:03-B1*04:02L HLA-DPA1*03:01-B1*105:01L HLA-DRB1*16:01L
  source 1..12: note = Severe acute respiratory syndrome coronavirus 2
MLFTMLRKLDND

SEQ ID NO: 15791 - protein, 14 aa, Severe acute respiratory syndrome-related coronavirus
  REGION 1..14: note = Table B: HLA-DRB1*01:03L
  source 1..14: note = Severe acute respiratory syndrome coronavirus 2
LFTMLRKLDNDALN

SEQ ID NO: 15792 - protein, 12 aa, Severe acute respiratory syndrome-related coronavirus
  REGION 1..12: note = Table B: HLA-DRB1*01:03L HLA-DRB1*04:04L HLA-DRB1*04:05L HLA-DRB1*01:02L HLA-DRB1*04:10L HLA-DRB1*12:01L HLA-DPA1*02:01-B1*13:01L HLA-DRB1*04:08L HLA-DQA1*02:01-B1*03:03L HLA-DRB1*15:03L
  source 1..12: note = Severe acute respiratory syndrome coronavirus 2
MLRKLDNDALNN

SEQ ID NO: 15793 - protein, 13 aa, Severe acute respiratory syndrome-related coronavirus
  REGION 1..13: note = Table B: HLA-DRB1*01:03L HLA-DRB1*04:05L HLA-DRB1*01:02L HLA-DPA1*01:03-B1*03:01L HLA-DPA1*03:01-B1*04:02L HLA-DRB1*12:01L HLA-DPA1*02:01-B1*13:01L HLA-DPA1*01:02-B1*04:01L HLA-DRB1*04:08L
  source 1..13: note = Severe acute respiratory syndrome coronavirus 2
LRKLDNDALNNII

SEQ ID NO: 15794 - protein, 13 aa, Severe acute respiratory syndrome-related coronavirus
  REGION 1..13: note = Table B: HLA-DRB1*01:03L HLA-DRB1*04:05L HLA-DRB1*14:17L
  source 1..13: note = Severe acute respiratory syndrome coronavirus 2
KLDNDALNNIINN

SEQ ID NO: 15795 - protein, 14 aa, Severe acute respiratory syndrome-related coronavirus
  REGION 1..14: note = Table B: HLA-DRB1*01:03L HLA-DPA1*01:03-B1*03:01L HLA-DQA1*01:01-B1*05:01L HLA-DQA1*05:05-B1*03:19L
  source 1..14: note = Severe acute respiratory syndrome coronavirus 2
DNDALNNIINNARD

SEQ ID NO: 15796 - protein, 14 aa, Severe acute respiratory syndrome-related coronavirus
  REGION 1..14: note = Table B: HLA-DRB1*01:03L HLA-DRB1*04:02L HLA-DRB1*04:04L HLA-DRB1*01:02L HLA-DRB4*03:01NL HLA-DRB1*08:04L HLA-DRB1*12:01L HLA-DPA1*02:01-B1*13:01L HLA-DRB1*14:54L HLA-DRB1*10:01L HLA-DRB1*16:01L HLA-DQA1*02:01-B1*03:03L HLA-DRB1*15:03L
  source 1..14: note = Severe acute respiratory syndrome coronavirus 2
SALWEIQQVVDADS

SEQ ID NO: 15797 - protein, 13 aa, Severe acute respiratory syndrome-related coronavirus
  REGION 1..13: note = Table B: HLA-DRB1*01:03L HLA-DRB1*08:04L HLA-DPA1*01:03-B1*03:01L HLA-DRB1*14:02L HLA-DQA1*01-B1*05L HLA-DQA1*05:05-B1*03:19L HLA-DPA1*02:01-B1*13:01L
  source 1..13: note = Severe acute respiratory syndrome coronavirus 2
ADSKIVQLSEISM

SEQ ID NO: 15798 - protein, 13 aa, Severe acute respiratory syndrome-related coronavirus
  REGION 1..13: note = Table B: HLA-DRB1*01:03L HLA-DRB1*04:04L HLA-DRB1*08:04L HLA-DPA1*01:03-B1*03:01L HLA-DRB1*14:02L HLA-DQA1*01-B1*05L HLA-DQA1*05:05-B1*03:19L HLA-DPA1*02:01-B1*13:01L HLA-DQA1*01:03-B1*06:01L HLA-DRB1*04:08L
  source 1..13: note = Severe acute respiratory syndrome coronavirus 2
DSKIVQLSEISMD

SEQ ID NO: 15799 - protein, 11 aa, Severe acute respiratory syndrome-related coronavirus
  REGION 1..11: note = Table B: HLA-DRB1*01:03L HLA-DRB1*01:02L HLA-DRB1*08:04L HLA-DRB1*12:02L
  source 1..11: note = Severe acute respiratory syndrome coronavirus 2
ALRANSAVKLQ

SEQ ID NO: 15800 - protein, 11 aa, Severe acute respiratory syndrome-related coronavirus
  REGION 1..11: note = Table B: HLA-DRB1*01:03L HLA-DRB1*04:04L HLA-DQA1*01:02-B1*06:02L HLA-DRB1*04:10L HLA-DRB1*04:08L
  source 1..11: note = Severe acute respiratory syndrome coronavirus 2
LALLSDLQDLK

SEQ ID NO: 15801 - protein, 13 aa, Severe acute respiratory syndrome-related coronavirus
  REGION 1..13: note = Table B: HLA-DRB1*01:03L HLA-DRB1*01:02L HLA-DPA1*01:03-B1*03:01L HLA-DRB1*14:01L HLA-DQA1*01-B1*05L HLA-DQA1*05:01-B1*02:01L HLA-DPA1*01:03-B1*04:01L HLA-DPA1*01:03-B1*04:02L HLA-DRB1*12:01L
  REGION 1..13: note = CONT. FROM ABOVE: HLA-DPA1*02:01-B1*13:01L HLA-DQA1*01:03-B1*06: 01L HLA-DRB1*04:08L HLA-DRB1*15:03L
  source 1..13: note = Severe acute respiratory syndrome coronavirus 2
LSDLQDLKWARFP

SEQ ID NO: 15802 - protein, 12 aa, Severe acute respiratory syndrome-related coronavirus
  REGION 1..12: note = Table B: HLA-DRB1*01:03L HLA-DRB1*08:01L HLA-DRB1*16:01L HLA-DRB1*04:08L
  source 1..12: note = Severe acute respiratory syndrome coronavirus 2
DLQDLKWARFPK

SEQ ID NO: 15803 - protein, 12 aa, Severe acute respiratory syndrome-related coronavirus
  REGION 1..12: note = Table B: HLA-DRB1*01:03L HLA-DRB1*01:02L HLA-DRB1*12:01L HLA-DRB1*16:01L HLA-DRB1*04:08L
  source 1..12: note = Severe acute respiratory syndrome coronavirus 2
LQDLKWARFPKS

SEQ ID NO: 15804 - protein, 11 aa, Severe acute respiratory syndrome-related coronavirus
  REGION 1..11: note = Table B: HLA-DRB1*01:03L HLA-DQA1*01:02-B1*06:02L HLA-DRB1*08:01L HLA-DRB1*04:08L
  source 1..11: note = Severe acute respiratory syndrome coronavirus 2
LKWARFPKSDG

SEQ ID NO: 15805 - protein, 14 aa, Severe acute respiratory syndrome-related coronavirus
  REGION 1..14: note = Table B: HLA-DRB1*01:03L HLA-DRB1*16:01L HLA-DRB1*04:08L
  source 1..14: note = Severe acute respiratory syndrome coronavirus 2
SDGTGTIYTELEPP

SEQ ID NO: 15806 - protein, 12 aa, Severe acute respiratory syndrome-related coronavirus
  REGION 1..12: note = Table B: HLA-DRB1*01:03L HLA-DRB1*08:01L HLA-DPA1*01:02-B1*04:01L HLA-DRB1*16:01L HLA-DRB1*04:08L
  source 1..12: note = Severe acute respiratory syndrome coronavirus 2
GPKVKYLYFIKG

SEQ ID NO: 15807 - protein, 11 aa, Severe acute respiratory syndrome-related coronavirus
  REGION 1..11: note = Table B: HLA-DRB1*01:03L HLA-DRB1*04:08L HLA-DQA1*02:01-B1*03:03L
  source 1..11: note = Severe acute respiratory syndrome coronavirus 2
YFIKGLNNLNR

SEQ ID NO: 15808 - protein, 14 aa, Severe acute respiratory syndrome-related coronavirus
  REGION 1..14: note = Table B: HLA-DRB1*01:03L HLA-DRB1*04:02L HLA-DRB1*08:01L HLA-DPA1*01:03-B1*04:02L HLA-DRB1*12:01L HLA-DPA1*01:03-B1*104:01L HLA-DRB1*16:01L
  source 1..14: note = Severe acute respiratory syndrome coronavirus 2
LNNLNRGMVLGSLA

SEQ ID NO: 15809 - protein, 13 aa, Severe acute respiratory syndrome-related coronavirus
  REGION 1..13: note = Table B: HLA-DRB1*01:03L HLA-DRB1*04:04L HLA-DRB1*04:05L HLA-DRB1*16:01L HLA-DRB1*04:08L HLA-DRB1*15:03L
  source 1..13: note = Severe acute respiratory syndrome coronavirus 2
AATVRLQAGNATE

SEQ ID NO: 15810 - protein, 14 aa, Severe acute respiratory syndrome-related coronavirus
  REGION 1..14: note = Table B: HLA-DRB1*01:03L HLA-DRB1*04:05L HLA-DPA1*01:03-B1*03:01L HLA-DQA1*05:01-B1*02:01L HLA-DPA1*02:01-B1*13:01L HLA-DPA1*03:01-B1*105:01L HLA-DRB1*16:01L HLA-DRB1*04:08L
  source 1..14: note = Severe acute respiratory syndrome coronavirus 2
ATVRLQAGNATEVP

SEQ ID NO: 15811 - protein, 12 aa, Severe acute respiratory syndrome-related coronavirus
  REGION 1..12: note = Table B: HLA-DRB1*01:03L HLA-DRB1*04:05L HLA-DQA1*01:02-B1*06:02L HLA-DRB4*03:01NL HLA-DPA1*01:03-B1*03:01L HLA-DQA1*01:01-B1*05:01L HLA-DQA1*05:05-B1*03:01L HLA-DRB1*14:17L
  source 1..12: note = Severe acute respiratory syndrome coronavirus 2
NATEVPANSTVL

SEQ ID NO: 15812 - protein, 14 aa, Severe acute respiratory syndrome-related coronavirus
  REGION 1..14: note = Table B: HLA-DRB1*01:03L HLA-DRB1*01:02L HLA-DRB1*11:04L HLA-DRB1*08:01L HLA-DRB1*11:01L HLA-DRB3*01:01L HLA-DRB1*04:08L
  source 1..14: note = Severe acute respiratory syndrome coronavirus 2
GQPITNCVKMLCTH

SEQ ID NO: 15813 - protein, 13 aa, Severe acute respiratory syndrome-related coronavirus
  REGION 1..13: note = Table B: HLA-DRB1*01:03L HLA-DRB1*04:02L HLA-DRB1*04:05L HLA-DRB4*03:01NL HLA-DPA1*01:03-B1*03:01L HLA-DRB1*04:10L HLA-DRB1*12:01L HLA-DPA1*03:01-B1*105:01L HLA-DRB1*14:17L HLA-DRB1*04:08L
  source 1..13: note = Severe acute respiratory syndrome coronavirus 2
GTGQAITVTPEAN

SEQ ID NO: 15814 - protein, 16 aa, Severe acute respiratory syndrome-related coronavirus
  REGION 1..16: note = Table B: HLA-DRB1*01:03L HLA-DRB1*01:02L
  source 1..16: note = Severe acute respiratory syndrome coronavirus 2
PKGFCDLKGKYVQIPT

SEQ ID NO: 15815 - protein, 14 aa, Severe acute respiratory syndrome-related coronavirus
  REGION 1..14: note = Table B: HLA-DRB1*01:03L HLA-DPA1*01:03-B1*03:01L HLA-DRB1*12:01L HLA-DPA1*02:01-B1*13:01L HLA-DRB1*15:03L
  source 1..14: note = Severe acute respiratory syndrome coronavirus 2
KYVQIPTTCANDPV

SEQ ID NO: 15816 - protein, 11 aa, Severe acute respiratory syndrome-related coronavirus
  REGION 1..11: note = Table B: HLA-DRB1*01:03L HLA-DRB1*04:04L HLA-DQA1*01:02-B1*06:02L HLA-DPA1*03:01-B1*105:01L HLA-DRB1*08:03L
  source 1..11: note = Severe acute respiratory syndrome coronavirus 2
QSADAQSFLNR

SEQ ID NO: 15817 - protein, 15 aa, Severe acute respiratory syndrome-related coronavirus
  REGION 1..15: note = Table B: HLA-DRB1*01:03L HLA-DRB1*01:02L HLA-DRB1*04:08L
  source 1..15: note = Severe acute respiratory syndrome coronavirus 2
DAQSFLNRVCGVSAA

SEQ ID NO: 15818 - protein, 14 aa, Severe acute respiratory syndrome-related coronavirus
  REGION 1..14: note = Table B: HLA-DRB1*01:03L HLA-DRB1*04:08L
  source 1..14: note = Severe acute respiratory syndrome coronavirus 2
QSFLNRVCGVSAAR

SEQ ID NO: 15819 - protein, 14 aa, Severe acute respiratory syndrome-related coronavirus
  REGION 1..14: note = Table B: HLA-DRB1*01:03L HLA-DRB1*08:04L HLA-DRB1*14:01L HLA-DPA1*02:01-B1*13:01L
  source 1..14: note = Severe acute respiratory syndrome coronavirus 2
STDVVYRAFDIYND

SEQ ID NO: 15820 - protein, 12 aa, Severe acute respiratory syndrome-related coronavirus
  REGION 1..12: note = Table B: HLA-DRB1*01:03L HLA-DRB1*01:02L HLA-DRB1*14:01L HLA-DRB1*12:01L HLA-DRB1*16:01L HLA-DRB1*04:08L HLA-DRB1*15:03L
  source 1..12: note = Severe acute respiratory syndrome coronavirus 2
DKVAGFAKFLKT

SEQ ID NO: 15821 - protein, 13 aa, Severe acute respiratory syndrome-related coronavirus
  REGION 1..13: note = Table B: HLA-DRB1*01:03L HLA-DRB1*01:02L HLA-DPA1*03:01-B1*04:02L HLA-DRB1*12:01L HLA-DPA1*03:01-B1*105:01L HLA-DPA1*01:02-B1*04:01L HLA-DRB1*16:01L HLA-DRB1*04:08L HLA-DRB1*15:03L
  source 1..13: note = Severe acute respiratory syndrome coronavirus 2
FAKFLKTNCCRFQ

SEQ ID NO: 15822 - protein, 14 aa, Severe acute respiratory syndrome-related coronavirus
  REGION 1..14: note = Table B: HLA-DRB1*01:03L HLA-DRB1*01:02L HLA-DRB1*16:01L HLA-DRB1*04:08L
  source 1..14: note = Severe acute respiratory syndrome coronavirus 2
AKFLKTNCCRFQEK

SEQ ID NO: 15823 - protein, 12 aa, Severe acute respiratory syndrome-related coronavirus
  REGION 1..12: note = Table B: HLA-DRB1*01:03L HLA-DQA1*01:02-B1*06:02L HLA-DRB1*04:08L
  source 1..12: note = Severe acute respiratory syndrome coronavirus 2
DNLIDSYFVVKR

SEQ ID NO: 15824 - protein, 12 aa, Severe acute respiratory syndrome-related coronavirus
  REGION 1..12: note = Table B: HLA-DRB1*01:03L HLA-DRB1*01:02L HLA-DRB1*04:08L HLA-DRB1*15:03L
  source 1..12: note = Severe acute respiratory syndrome coronavirus 2
NLIDSYFVVKRH

SEQ ID NO: 15825 - protein, 10 aa, Severe acute respiratory syndrome-related coronavirus
  REGION 1..10: note = Table B: HLA-DRB1*01:03L HLA-DQA1*01:02-B1*06:02L HLA-DRB1*03:01L HLA-DQA1*02:01-B1*03:03L
  source 1..10: note = Severe acute respiratory syndrome coronavirus 2
VVKRHTFSNY

SEQ ID NO: 15826 - protein, 12 aa, Severe acute respiratory syndrome-related coronavirus
  REGION 1..12: note = Table B: HLA-DRB1*01:03L HLA-DRB1*04:05L HLA-DRB1*15:03L
  source 1..12: note = Severe acute respiratory syndrome coronavirus 2
YNLLKDCPAVAK

SEQ ID NO: 15827 - protein, 12 aa, Severe acute respiratory syndrome-related coronavirus
  REGION 1..12: note = Table B: HLA-DRB1*01:03L HLA-DRB1*04:05L HLA-DRB1*01:02L HLA-DRB1*12:01L HLA-DRB1*16:01L HLA-DRB1*04:08L HLA-DRB1*15:03L
  source 1..12: note = Severe acute respiratory syndrome coronavirus 2
NLLKDCPAVAKH

SEQ ID NO: 15828 - protein, 12 aa, Severe acute respiratory syndrome-related coronavirus
  REGION 1..12: note = Table B: HLA-DRB1*01:03L HLA-DRB1*04:05L HLA-DQA1*01:02-B1*06:02L HLA-DRB1*01:02L HLA-DRB1*12:01L HLA-DQA1*03:01-B1*03:02L HLA-DRB1*16:01L HLA-DRB1*04:08L HLA-DQA1*02:01-B1*03:03L HLA-DRB1*15:03L
  source 1..12: note = Severe acute respiratory syndrome coronavirus 2
LLKDCPAVAKHD

SEQ ID NO: 15829 - protein, 10 aa, Severe acute respiratory syndrome-related coronavirus
  REGION 1..10: note = Table B: HLA-DRB1*01:03L HLA-DQA1*02:01-B1*03:03L
  source 1..10: note = Severe acute respiratory syndrome coronavirus 2
HISRQRLTKY

SEQ ID NO: 15830 - protein, 15 aa, Severe acute respiratory syndrome-related coronavirus
  REGION 1..15: note = Table B: HLA-DRB1*01:03L HLA-DRB1*04:08L
  source 1..15: note = Severe acute respiratory syndrome coronavirus 2
RQRLTKYTMADLVYA

SEQ ID NO: 15831 - protein, 13 aa, Severe acute respiratory syndrome-related coronavirus
  REGION 1..13: note = Table B: HLA-DRB1*01:03L HLA-DRB1*04:05L HLA-DPA1*01:03-B1*04:02L HLA-DRB1*16:01L
  source 1..13: note = Severe acute respiratory syndrome coronavirus 2
TKYTMADLVYALR

SEQ ID NO: 15832 - protein, 13 aa, Severe acute respiratory syndrome-related coronavirus
  REGION 1..13: note = Table B: HLA-DRB1*01:03L HLA-DRB1*16:01L HLA-DRB1*04:08L
  source 1..13: note = Severe acute respiratory syndrome coronavirus 2
MADLVYALRHFDE

SEQ ID NO: 15833 - protein, 13 aa, Severe acute respiratory syndrome-related coronavirus
  REGION 1..13: note = Table B: HLA-DRB1*01:03L HLA-DRB1*01:02L HLA-DPA1*03:01-B1*04:02L HLA-DRB1*12:01L HLA-DPA1*02:01-B1*13:01L HLA-DPA1*03:01-B1*105:01L HLA-DQA1*03:01-B1*03:02L HLA-DRB1*15:03L
  source 1..13: note = Severe acute respiratory syndrome coronavirus 2
DLVYALRHFDEGN

SEQ ID NO: 15834 - protein, 14 aa, Severe acute respiratory syndrome-related coronavirus
  REGION 1..14: note = Table B: HLA-DRB1*01:03L HLA-DQA1*01:02-B1*06:02L
  source 1..14: note = Severe acute respiratory syndrome coronavirus 2
VYALRHFDEGNCDT

SEQ ID NO: 15835 - protein, 14 aa, Severe acute respiratory syndrome-related coronavirus
  REGION 1..14: note = Table B: HLA-DRB1*01:03L HLA-DRB1*04:05L HLA-DQA1*01:02-B1*06:02L HLA-DRB1*12:01L HLA-DRB1*04:08L
  source 1..14: note = Severe acute respiratory syndrome coronavirus 2
ALRHFDEGNCDTLK

SEQ ID NO: 15836 - protein, 14 aa, Severe acute respiratory syndrome-related coronavirus
  REGION 1..14: note = Table B: HLA-DRB1*01:03L
  source 1..14: note = Severe acute respiratory syndrome coronavirus 2
NKKDWYDFVENPDI

SEQ ID NO: 15837 - protein, 13 aa, Severe acute respiratory syndrome-related coronavirus
  REGION 1..13: note = Table B: HLA-DRB1*01:03L
  source 1..13: note = Severe acute respiratory syndrome coronavirus 2
NPDILRVYANLGE

SEQ ID NO: 15838 - protein, 10 aa, Severe acute respiratory syndrome-related coronavirus
  REGION 1..10: note = Table B: HLA-DRB1*01:03L HLA-DRB1*01:02L HLA-DQA1*03:01-B1*03:02L HLA-DRB1*16:01L HLA-DQA1*02:01-B1*03:03L
  source 1..10: note = Severe acute respiratory syndrome coronavirus 2
YANLGERVRQ

SEQ ID NO: 15839 - protein, 13 aa, Severe acute respiratory syndrome-related coronavirus
  REGION 1..13: note = Table B: HLA-DRB1*01:03L HLA-DPA1*01:03-B1*02:01L HLA-DRB1*16:01L
  source 1..13: note = Severe acute respiratory syndrome coronavirus 2
ALLKTVQFCDAMR

SEQ ID NO: 15840 - protein, 12 aa, Severe acute respiratory syndrome-related coronavirus
  REGION 1..12: note = Table B: HLA-DRB1*01:03L HLA-DQA1*01:02-B1*06:02L HLA-DRB1*01:02L HLA-DPA1*03:01-B1*04:02L HLA-DRB1*08:01L HLA-DPA1*01:03-B1*04:02L HLA-DRB1*12:01L HLA-DPA1*03:01-B1*105:01L HLA-DRB1*16:01L
  REGION 1..12: note = CONT. FROM ABOVE: HLA-DQA1*01:03-B1*06:01L HLA-DRB1*04:08L HLA-D RB1*15:03L
  source 1..12: note = Severe acute respiratory syndrome coronavirus 2
LKTVQFCDAMRN

SEQ ID NO: 15841 - protein, 13 aa, Severe acute respiratory syndrome-related coronavirus
  REGION 1..13: note = Table B: HLA-DRB1*01:03L HLA-DRB1*04:02L HLA-DRB1*04:04L HLA-DRB1*04:05L HLA-DRB1*12:01L HLA-DQA1*03:01-B1*03:02L HLA-DRB1*10:01L HLA-DRB1*16:01L
  source 1..13: note = Severe acute respiratory syndrome coronavirus 2
KTVQFCDAMRNAG

SEQ ID NO: 15842 - protein, 12 aa, Severe acute respiratory syndrome-related coronavirus
  REGION 1..12: note = Table B: HLA-DRB1*01:03L HLA-DRB1*01:02L HLA-DRB4*03:01NL HLA-DRB1*12:01L HLA-DPA1*03:01-B1*105:01L HLA-DRB1*16:01L HLA-DRB1*04:08L HLA-DQA1*02:01-B1*03:03L HLA-DRB1*15:03L
  source 1..12: note = Severe acute respiratory syndrome coronavirus 2
VLTLDNQDLNGN

SEQ ID NO: 15843 - protein, 14 aa, Severe acute respiratory syndrome-related coronavirus
  REGION 1..14: note = Table B: HLA-DRB1*01:03L HLA-DRB1*10:01L HLA-DRB1*16:01L HLA-DRB1*04:08L
  source 1..14: note = Severe acute respiratory syndrome coronavirus 2
SYYSLLMPILTLTR

SEQ ID NO: 15844 - protein, 12 aa, Severe acute respiratory syndrome-related coronavirus
  REGION 1..12: note = Table B: HLA-DRB1*01:03L HLA-DQA1*01:02-B1*06:02L HLA-DRB1*01:02L HLA-DRB1*08:04L HLA-DRB1*14:01L HLA-DRB1*12:01L HLA-DRB1*16:01L HLA-DRB1*04:08L HLA-DRB1*15:03L
  source 1..12: note = Severe acute respiratory syndrome coronavirus 2
PILTLTRALTAE

SEQ ID NO: 15845 - protein, 10 aa, Severe acute respiratory syndrome-related coronavirus
  REGION 1..10: note = Table B: HLA-DRB1*01:03L HLA-DRB1*04:05L HLA-DQA1*01:02-B1*06:02L HLA-DQA1*05:05-B1*03:19L HLA-DRB4*01:01L HLA-DPA1*01:03-B1*04:01L HLA-DPA1*02:01-B1*13:01M HLA-DRB1*16:01L
  REGION 1..10: note = CONT. FROM ABOVE: HLA-DQA1*01:03-B1*06:01L HLA-DQA1*02:01-B1*03: 03L
  source 1..10: note = Severe acute respiratory syndrome coronavirus 2
PYIKWDLLKY

SEQ ID NO: 15846 - protein, 14 aa, Severe acute respiratory syndrome-related coronavirus
  REGION 1..14: note = Table B: HLA-DRB1*01:03L HLA-DRB1*04:05L HLA-DQA1*01:02-B1*06:02L HLA-DRB1*01:02L HLA-DPA1*03:01-B1*04:02L HLA-DPA1*01:03-B1*04:02L HLA-DRB1*12:01L HLA-DPA1*02:01-B1*13:01L HLA-DRB1*04:08L
  REGION 1..14: note = CONT. FROM ABOVE: HLA-DRB1*15:03L
  source 1..14: note = Severe acute respiratory syndrome coronavirus 2
IKWDLLKYDFTEER

SEQ ID NO: 15847 - protein, 10 aa, Severe acute respiratory syndrome-related coronavirus
  REGION 1..10: note = Table B: HLA-DRB1*01:03L HLA-DRB1*01:02L HLA-DQA1*01-B1*05L HLA-DQA1*03:01-B1*03:02L HLA-DPA1*01:02-B1*04:01L HLA-DRB1*16:01L
  source 1..10: note = Severe acute respiratory syndrome coronavirus 2
KYDFTEERLK

SEQ ID NO: 15848 - protein, 11 aa, Severe acute respiratory syndrome-related coronavirus
  REGION 1..11: note = Table B: HLA-DRB1*01:03L HLA-DQA1*01:02-B1*06:02L HLA-DPA1*01:03-B1*03:01L
  source 1..11: note = Severe acute respiratory syndrome coronavirus 2
TEERLKLFDRY

SEQ ID NO: 15849 - protein, 13 aa, Severe acute respiratory syndrome-related coronavirus
  REGION 1..13: note = Table B: HLA-DRB1*01:03L HLA-DRB1*01:02L HLA-DRB1*12:01L HLA-DRB1*04:08L HLA-DRB1*15:03L
  source 1..13: note = Severe acute respiratory syndrome coronavirus 2
EERLKLFDRYFKY

SEQ ID NO: 15850 - protein, 10 aa, Severe acute respiratory syndrome-related coronavirus
  REGION 1..10: note = Table B: HLA-DRB1*01:03L HLA-DQA1*01:02-B1*06:02L HLA-DRB1*03:01L HLA-DRB1*14:02L HLA-DPA1*01:03-B1*04:01L HLA-DPA1*01:03-B1*04:02L HLA-DPA1*02:01-B1*13:01L HLA-DQA1*01:03-B1*06:01L HLA-DQA1*02:01-B1*03:03L
  source 1..10: note = Severe acute respiratory syndrome coronavirus 2
KLFDRYFKYW

SEQ ID NO: 15851 - protein, 10 aa, Severe acute respiratory syndrome-related coronavirus
  REGION 1..10: note = Table B: HLA-DRB1*01:03L HLA-DRB1*04:05L HLA-DQA1*01:02-B1*06:02L HLA-DRB1*03:01L HLA-DRB1*14:02L HLA-DQA1*05:05-B1*03:19L HLA-DQA1*05:01-B1*02:01L HLA-DRB4*01:01L HLA-DPA1*01:03-B1*04:01L
  REGION 1..10: note = CONT. FROM ABOVE: HLA-DQA1*05:05-B1*03:116L HLA-DPA1*01:03-B1*04 :02L HLA-DPA1*02:01-B1*13:01L HLA-DPA1*03:01-B1*105:01L HLA-DRB1 *16:01L HLA-DQA1*01:03-B1*06:01L HLA-DQA1*02:01-B1*03:03L
  source 1..10: note = Severe acute respiratory syndrome coronavirus 2
RYFKYWDQTY

SEQ ID NO: 15852 - protein, 12 aa, Severe acute respiratory syndrome-related coronavirus
  REGION 1..12: note = Table B: HLA-DRB1*01:03L HLA-DQA1*01:02-B1*06:02L HLA-DPA1*03:01-B1*105:01L HLA-DPA1*01:02-B1*04:01L HLA-DQA1*01:03-B1*06:01L
  source 1..12: note = Severe acute respiratory syndrome coronavirus 2
VFPPTSFGPLVR

SEQ ID NO: 15853 - protein, 11 aa, Severe acute respiratory syndrome-related coronavirus
  REGION 1..11: note = Table B: HLA-DRB1*01:03L HLA-DQA1*02:01-B1*03:03L
  source 1..11: note = Severe acute respiratory syndrome coronavirus 2
PPTSFGPLVRK

SEQ ID NO: 15854 - protein, 13 aa, Severe acute respiratory syndrome-related coronavirus
  REGION 1..13: note = Table B: HLA-DRB1*01:03L HLA-DRB1*04:05L HLA-DRB1*01:02L HLA-DQA1*01:01-B1*05:01L HLA-DRB1*08:01L HLA-DPA1*01:03-B1*04:02L HLA-DRB1*12:01L HLA-DQA1*05:05-B1*03:01L HLA-DRB1*14:17L
  REGION 1..13: note = CONT. FROM ABOVE: HLA-DPA1*01:02-B1*04:01L HLA-DRB1*04:08L
  source 1..13: note = Severe acute respiratory syndrome coronavirus 2
VDGVPFVVSTGYH

SEQ ID NO: 15855 - protein, 12 aa, Severe acute respiratory syndrome-related coronavirus
  REGION 1..12: note = Table B: HLA-DRB1*01:03L
  source 1..12: note = Severe acute respiratory syndrome coronavirus 2
TGYHFRELGVVH

SEQ ID NO: 15856 - protein, 11 aa, Severe acute respiratory syndrome-related coronavirus
  REGION 1..11: note = Table B: HLA-DRB1*01:03L HLA-DRB1*08:01L HLA-DRB1*16:01L HLA-DRB1*04:08L
  source 1..11: note = Severe acute respiratory syndrome coronavirus 2
YHFRELGVVHN

SEQ ID NO: 15857 - protein, 11 aa, Severe acute respiratory syndrome-related coronavirus
  REGION 1..11: note = Table B: HLA-DRB1*01:03L HLA-DPA1*01:03-B1*03:01L HLA-DRB1*04:10L HLA-DRB1*12:02L HLA-DPA1*03:01-B1*105:01L
  source 1..11: note = Severe acute respiratory syndrome coronavirus 2
ELGVVHNQDVN

SEQ ID NO: 15858 - protein, 12 aa, Severe acute respiratory syndrome-related coronavirus
  REGION 1..12: note = Table B: HLA-DRB1*01:03L HLA-DRB1*01:02L HLA-DRB1*16:01L HLA-DRB1*04:08L HLA-DRB1*15:03L
  source 1..12: note = Severe acute respiratory syndrome coronavirus 2
DVNLHSSRLSFK

SEQ ID NO: 15859 - protein, 14 aa, Severe acute respiratory syndrome-related coronavirus
  REGION 1..14: note = Table B: HLA-DRB1*01:03L HLA-DRB1*01:02L HLA-DPA1*01:03-B1*04:02L HLA-DRB1*16:01L HLA-DRB1*04:08L HLA-DRB1*15:03L
  source 1..14: note = Severe acute respiratory syndrome coronavirus 2
RLSFKELLVYAADP

SEQ ID NO: 15860 - protein, 12 aa, Severe acute respiratory syndrome-related coronavirus
  REGION 1..12: note = Table B: HLA-DRB1*01:03L HLA-DRB1*01:01L HLA-DRB1*01:02M HLA-DQA1*05:05-B1*03:19L HLA-DPA1*03:01-B1*105:01L HLA-DRB1*10:01L HLA-DRB1*16:01L HLA-DRB1*04:08L HLA-DRB1*15:03L
  source 1..12: note = Severe acute respiratory syndrome coronavirus 2
MHAASGNLLLDK

SEQ ID NO: 15861 - protein, 12 aa, Severe acute respiratory syndrome-related coronavirus
  REGION 1..12: note = Table B: HLA-DRB1*01:03L HLA-DRB1*01:02L HLA-DRB1*16:01L HLA-DRB1*04:08L
  source 1..12: note = Severe acute respiratory syndrome coronavirus 2
HAASGNLLLDKR

SEQ ID NO: 15862 - protein, 14 aa, Severe acute respiratory syndrome-related coronavirus
  REGION 1..14: note = Table B: HLA-DRB1*01:03L HLA-DQA1*01:02-B1*06:02L HLA-DRB1*08:04L HLA-DPA1*01:03-B1*03:01L HLA-DRB1*14:02L HLA-DQA1*05:01-B1*02:01L HLA-DPA1*03:01-B1*105:01L HLA-DRB1*04:08L
  source 1..14: note = Severe acute respiratory syndrome coronavirus 2
NLLLDKRTTCFSVA

SEQ ID NO: 15863 - protein, 14 aa, Severe acute respiratory syndrome-related coronavirus
  REGION 1..14: note = Table B: HLA-DRB1*01:03L
  source 1..14: note = Severe acute respiratory syndrome coronavirus 2
GNFNKDFYDFAVSK

SEQ ID NO: 15864 - protein, 13 aa, Severe acute respiratory syndrome-related coronavirus
  REGION 1..13: note = Table B: HLA-DRB1*01:03L HLA-DRB1*01:02L HLA-DPA1*03:01-B1*04:02L HLA-DQA1*01:01-B1*05:01L HLA-DRB1*08:01L HLA-DRB1*12:01L HLA-DQA1*01:03-B1*06:01L HLA-DRB1*15:03L
  source 1..13: note = Severe acute respiratory syndrome coronavirus 2
FNKDFYDFAVSKG

SEQ ID NO: 15865 - protein, 11 aa, Severe acute respiratory syndrome-related coronavirus
  REGION 1..11: note = Table B: HLA-DRB1*01:03L HLA-DRB1*01:02L HLA-DRB1*12:01L
  source 1..11: note = Severe acute respiratory syndrome coronavirus 2
YDFAVSKGFFK

SEQ ID NO: 15866 - protein, 12 aa, Severe acute respiratory syndrome-related coronavirus
  REGION 1..12: note = Table B: HLA-DRB1*01:03L HLA-DRB1*04:10L HLA-DRB1*12:01L HLA-DRB1*04:08L
  source 1..12: note = Severe acute respiratory syndrome coronavirus 2
KGFFKEGSSVEL

SEQ ID NO: 15867 - protein, 11 aa, Severe acute respiratory syndrome-related coronavirus
  REGION 1..11: note = Table B: HLA-DRB1*01:03L HLA-DRB1*04:02L HLA-DRB1*14:17L
  source 1..11: note = Severe acute respiratory syndrome coronavirus 2
FFKEGSSVELK

SEQ ID NO: 15868 - protein, 11 aa, Severe acute respiratory syndrome-related coronavirus
  REGION 1..11: note = Table B: HLA-DRB1*01:03L HLA-DRB1*01:02L
  source 1..11: note = Severe acute respiratory syndrome coronavirus 2
FKEGSSVELKH

SEQ ID NO: 15869 - protein, 11 aa, Severe acute respiratory syndrome-related coronavirus
  REGION 1..11: note = Table B: HLA-DRB1*01:03L HLA-DRB1*08:77L HLA-DPA1*03:01-B1*04:02L HLA-DRB1*03:01L HLA-DRB4*01:01L HLA-DPA1*01:03-B1*04:02L HLA-DPA1*01:02-B1*04:01L HLA-DRB1*16:01L
  source 1..11: note = Severe acute respiratory syndrome coronavirus 2
KEGSSVELKHF

SEQ ID NO: 15870 - protein, 15 aa, Severe acute respiratory syndrome-related coronavirus
  REGION 1..15: note = Table B: HLA-DRB1*01:03L HLA-DRB1*01:02L HLA-DRB1*08:04L HLA-DPA1*03:01-B1*04:02L HLA-DRB1*14:01L HLA-DRB1*08:01L HLA-DRB1*12:01L HLA-DPA1*03:01-B1*105:01L HLA-DPA1*01:02-B1*04:01L HLA-DRB1*16:01L HLA-DRB1*15:03L
  source 1..15: note = Severe acute respiratory syndrome coronavirus 2
GSSVELKHFFFAQDG

SEQ ID NO: 15871 - protein, 14 aa, Severe acute respiratory syndrome-related coronavirus
  REGION 1..14: note = Table B: HLA-DRB1*01:03L HLA-DRB1*04:05L HLA-DRB1*01:02L HLA-DRB1*08:04L HLA-DPA1*03:01-B1*04:02L HLA-DRB1*08:01L HLA-DRB1*12:01L HLA-DPA1*02:01-B1*13:01L HLA-DRB1*16:01L HLA-DRB1*04:08L HLA-DQA1*02:01-B1*03:03L HLA-DRB1*15:03L
  source 1..14: note = Severe acute respiratory syndrome coronavirus 2
SVELKHFFFAQDGN

SEQ ID NO: 15872 - protein, 12 aa, Severe acute respiratory syndrome-related coronavirus
  REGION 1..12: note = Table B: HLA-DRB1*01:03L HLA-DQA1*01:02-B1*06:02L HLA-DRB1*01:02L HLA-DRB1*12:01L HLA-DPA1*02:01-B1*13:01L HLA-DQA1*03:01-B1*03:02L HLA-DRB1*16:01L HLA-DRB1*04:08L HLA-DQA1*02:01-B1*03:03L HLA-DRB1*15:03L
  source 1..12: note = Severe acute respiratory syndrome coronavirus 2
RYNLPTMCDIRQ

SEQ ID NO: 15873 - protein, 11 aa, Severe acute respiratory syndrome-related coronavirus
  REGION 1..11: note = Table B: HLA-DRB1*01:03L HLA-DRB1*14:02L HLA-DPA1*02:01-B1*13:01L HLA-DQA1*01:03-B1*06:01L
  source 1..11: note = Severe acute respiratory syndrome coronavirus 2
SYEDQDALFAY

SEQ ID NO: 15874 - protein, 13 aa, Severe acute respiratory syndrome-related coronavirus
  REGION 1..13: note = Table B: HLA-DRB1*01:03L HLA-DRB1*01:02L HLA-DRB1*08:01L HLA-DQA1*05:05-B1*03:01L HLA-DRB1*04:08L
  source 1..13: note = Severe acute respiratory syndrome coronavirus 2
YEDQDALFAYTKR

SEQ ID NO: 15875 - protein, 12 aa, Severe acute respiratory syndrome-related coronavirus
  REGION 1..12: note = Table B: HLA-DRB1*01:03L HLA-DRB1*01:02L HLA-DRB1*08:04L HLA-DRB1*08:01L HLA-DRB1*11:01L HLA-DRB1*12:01L HLA-DRB1*04:08L HLA-DRB1*15:03L
  source 1..12: note = Severe acute respiratory syndrome coronavirus 2
ALFAYTKRNVIP

SEQ ID NO: 15876 - protein, 13 aa, Severe acute respiratory syndrome-related coronavirus
  REGION 1..13: note = Table B: HLA-DRB1*01:03L HLA-DRB1*04:04L HLA-DPA1*01:03-B1*03:01L HLA-DRB1*11:04L HLA-DRB1*10:01L HLA-DRB1*04:08L
  source 1..13: note = Severe acute respiratory syndrome coronavirus 2
RNVIPTITQMNLK

SEQ ID NO: 15877 - protein, 10 aa, Severe acute respiratory syndrome-related coronavirus
  REGION 1..10: note = Table B: HLA-DRB1*01:03L HLA-DRB1*08:01L HLA-DQA1*03:01-B1*03:02L HLA-DRB1*14:17L HLA-DRB1*16:01L HLA-DQA1*02:01-B1*03:03L
  source 1..10: note = Severe acute respiratory syndrome coronavirus 2
LKYAISAKNR

SEQ ID NO: 15878 - protein, 10 aa, Severe acute respiratory syndrome-related coronavirus
  REGION 1..10: note = Table B: HLA-DRB1*01:03L
  source 1..10: note = Severe acute respiratory syndrome coronavirus 2
AISAKNRART

SEQ ID NO: 15879 - protein, 12 aa, Severe acute respiratory syndrome-related coronavirus
  REGION 1..12: note = Table B: HLA-DRB1*01:03L HLA-DRB1*14:01L HLA-DRB1*08:01L
  source 1..12: note = Severe acute respiratory syndrome coronavirus 2
ISAKNRARTVAG

SEQ ID NO: 15880 - protein, 14 aa, Severe acute respiratory syndrome-related coronavirus
  REGION 1..14: note = Table B: HLA-DRB1*01:03L HLA-DRB1*04:04L HLA-DRB1*01:02L HLA-DRB1*08:04L HLA-DPA1*01:03-B1*03:01L HLA-DRB1*14:01L HLA-DRB1*11:04L HLA-DRB1*12:01L HLA-DRB1*10:01L HLA-DRB1*16:01L HLA-DRB1*04:08L HLA-DRB1*15:03L
  source 1..14: note = Severe acute respiratory syndrome coronavirus 2
VAGVSICSTMTNRQ

SEQ ID NO: 15881 - protein, 13 aa, Severe acute respiratory syndrome-related coronavirus
  REGION 1..13: note = Table B: HLA-DRB1*01:03L HLA-DRB1*04:04L HLA-DRB1*04:05L HLA-DRB1*16:01L HLA-DRB1*04:08L
  source 1..13: note = Severe acute respiratory syndrome coronavirus 2
VSICSTMTNRQFH

SEQ ID NO: 15882 - protein, 12 aa, Severe acute respiratory syndrome-related coronavirus
  REGION 1..12: note = Table B: HLA-DRB1*01:03L HLA-DPA1*01:02-B1*04:01L HLA-DRB1*16:01L HLA-DRB1*04:08L
  source 1..12: note = Severe acute respiratory syndrome coronavirus 2
RQFHQKLLKSIA

SEQ ID NO: 15883 - protein, 14 aa, Severe acute respiratory syndrome-related coronavirus
  REGION 1..14: note = Table B: HLA-DRB1*01:03L HLA-DRB1*04:08L
  source 1..14: note = Severe acute respiratory syndrome coronavirus 2
QFHQKLLKSIAATR

SEQ ID NO: 15884 - protein, 12 aa, Severe acute respiratory syndrome-related coronavirus
  REGION 1..12: note = Table B: HLA-DRB1*01:03L HLA-DRB1*04:02L HLA-DRB1*04:04L HLA-DRB1*04:05L HLA-DQA1*01:02-B1*06:02L HLA-DRB1*01:02L HLA-DRB1*14:01L HLA-DRB1*08:01L HLA-DRB1*04:10L HLA-DRB1*12:01L HLA-DRB1*16:01L HLA-DRB1*04:08L HLA-DQA1*02:01-B1*03:03L
  REGION 1..12: note = CONT. FROM ABOVE: HLA-DRB1*15:03L
  source 1..12: note = Severe acute respiratory syndrome coronavirus 2
QKLLKSIAATRG

SEQ ID NO: 15885 - protein, 12 aa, Severe acute respiratory syndrome-related coronavirus
  REGION 1..12: note = Table B: HLA-DRB1*01:03L HLA-DRB1*04:02L HLA-DRB1*04:05L HLA-DRB1*01:02L HLA-DPA1*01:03-B1*03:01L HLA-DRB1*12:01L HLA-DPA1*03:01-B1*105:01L HLA-DPA1*01:03-B1*104:01L HLA-DRB1*04:08L
  source 1..12: note = Severe acute respiratory syndrome coronavirus 2
ATRGATVVIGTS

SEQ ID NO: 15886 - protein, 13 aa, Severe acute respiratory syndrome-related coronavirus
  REGION 1..13: note = Table B: HLA-DRB1*01:03L HLA-DRB1*04:05L HLA-DRB1*08:04L HLA-DRB1*08:01L HLA-DPA1*01:03-B1*04:02L HLA-DPA1*01:03-B1*02:01L
  source 1..13: note = Severe acute respiratory syndrome coronavirus 2
VVIGTSKFYGGWH

SEQ ID NO: 15887 - protein, 12 aa, Severe acute respiratory syndrome-related coronavirus
  REGION 1..12: note = Table B: HLA-DRB1*01:03L HLA-DRB1*01:02L HLA-DRB1*08:01L HLA-DRB1*16:01L HLA-DRB1*04:08L
  source 1..12: note = Severe acute respiratory syndrome coronavirus 2
SKFYGGWHNMLK

SEQ ID NO: 15888 - protein, 14 aa, Severe acute respiratory syndrome-related coronavirus
  REGION 1..14: note = Table B: HLA-DRB1*01:03L HLA-DRB1*04:05L HLA-DQA1*01:02-B1*06:02L HLA-DRB1*01:02L HLA-DRB1*08:01L HLA-DRB1*12:01L HLA-DPA1*02:01-B1*13:01L HLA-DPA1*01:02-B1*04:01L HLA-DRB1*16:01L HLA-DRB1*04:08L
  source 1..14: note = Severe acute respiratory syndrome coronavirus 2
NPHLMGWDYPKCDR

SEQ ID NO: 15889 - protein, 11 aa, Severe acute respiratory syndrome-related coronavirus
  REGION 1..11: note = Table B: HLA-DRB1*01:03L HLA-DRB1*01:02L HLA-DRB1*16:01L HLA-DRB1*15:03L
  source 1..11: note = Severe acute respiratory syndrome coronavirus 2
LRIMASLVLAR

SEQ ID NO: 15890 - protein, 12 aa, Severe acute respiratory syndrome-related coronavirus
  REGION 1..12: note = Table B: HLA-DRB1*01:03L HLA-DRB1*01:02L HLA-DRB1*16:01L HLA-DRB1*04:08L HLA-DRB1*15:03L
  source 1..12: note = Severe acute respiratory syndrome coronavirus 2
RIMASLVLARKH

SEQ ID NO: 15891 - protein, 12 aa, Severe acute respiratory syndrome-related coronavirus
  REGION 1..12: note = Table B: HLA-DRB1*01:03L HLA-DRB1*04:02L HLA-DQA1*01:02-B1*06:02L HLA-DRB1*01:02L HLA-DRB1*08:01L HLA-DRB1*12:01L HLA-DRB1*16:01L HLA-DQA1*01:03-B1*06:01L
  source 1..12: note = Severe acute respiratory syndrome coronavirus 2
MASLVLARKHTT

SEQ ID NO: 15892 - protein, 14 aa, Severe acute respiratory syndrome-related coronavirus
  REGION 1..14: note = Table B: HLA-DRB1*01:03L HLA-DRB1*11:01L
  source 1..14: note = Severe acute respiratory syndrome coronavirus 2
ASLVLARKHTTCCS

SEQ ID NO: 15893 - protein, 16 aa, Severe acute respiratory syndrome-related coronavirus
  REGION 1..16: note = Table B: HLA-DRB1*01:03L HLA-DRB1*15:03L
  source 1..16: note = Severe acute respiratory syndrome coronavirus 2
SLVLARKHTTCCSLSH

SEQ ID NO: 15894 - protein, 15 aa, Severe acute respiratory syndrome-related coronavirus
  REGION 1..15: note = Table B: HLA-DRB1*01:03L HLA-DRB1*03:01L HLA-DRB3*01:01L HLA-DQA1*03:01-B1*03:02L HLA-DPA1*01:03-B1*104:01L HLA-DQA1*01:03-B1*06:01L HLA-DRB1*15:03L
  source 1..15: note = Severe acute respiratory syndrome coronavirus 2
VLARKHTTCCSLSHR

SEQ ID NO: 15895 - protein, 16 aa, Severe acute respiratory syndrome-related coronavirus
  REGION 1..16: note = Table B: HLA-DRB1*01:03L HLA-DRB1*16:01L
  source 1..16: note = Severe acute respiratory syndrome coronavirus 2
ARKHTTCCSLSHRFYR

SEQ ID NO: 15896 - protein, 12 aa, Severe acute respiratory syndrome-related coronavirus
  REGION 1..12: note = Table B: HLA-DRB1*01:03L HLA-DRB1*04:05L HLA-DRB1*01:02L HLA-DRB1*08:01L HLA-DRB1*12:01L HLA-DPA1*02:01-B1*13:01L HLA-DRB1*16:01L
  source 1..12: note = Severe acute respiratory syndrome coronavirus 2
HRFYRLANECAQ

SEQ ID NO: 15897 - protein, 13 aa, Severe acute respiratory syndrome-related coronavirus
  REGION 1..13: note = Table B: HLA-DRB1*01:03L HLA-DRB1*04:04L HLA-DRB1*04:05L HLA-DPA1*01:03-B1*104:01L
  source 1..13: note = Severe acute respiratory syndrome coronavirus 2
RFYRLANECAQVL

SEQ ID NO: 15898 - protein, 12 aa, Severe acute respiratory syndrome-related coronavirus
  REGION 1..12: note = Table B: HLA-DRB1*01:03L HLA-DRB1*04:05L HLA-DQA1*01:02-B1*06:02L HLA-DRB1*14:01L HLA-DQA1*01:01-B1*05:01L HLA-DRB1*08:01L HLA-DQA1*01-B1*05L HLA-DQA1*05:05-B1*03:19L HLA-DQA1*05:01-B1*02:01L
  REGION 1..12: note = CONT. FROM ABOVE: HLA-DRB1*12:01L HLA-DPA1*03:01-B1*105:01L HLA- DRB1*14:54L HLA-DQA1*05:05-B1*03:01L HLA-DRB1*16:01L HLA-DQA1*01 :03-B1*06:01L HLA-DRB1*04:08L
  source 1..12: note = Severe acute respiratory syndrome coronavirus 2
GGSLYVKPGGTS

SEQ ID NO: 15899 - protein, 14 aa, Severe acute respiratory syndrome-related coronavirus
  REGION 1..14: note = Table B: HLA-DRB1*01:03L HLA-DRB1*04:02L HLA-DQA1*01:02-B1*06:02L HLA-DPA1*01:03-B1*03:01L HLA-DQA1*01:03-B1*06:01L HLA-DRB1*04:08L
  source 1..14: note = Severe acute respiratory syndrome coronavirus 2
LYVKPGGTSSGDAT

SEQ ID NO: 15900 - protein, 14 aa, Severe acute respiratory syndrome-related coronavirus
  REGION 1..14: note = Table B: HLA-DRB1*01:03L HLA-DQA1*01:02-B1*06:02L HLA-DQA1*01:03-B1*06:01L HLA-DRB1*04:08L
  source 1..14: note = Severe acute respiratory syndrome coronavirus 2
YVKPGGTSSGDATT

SEQ ID NO: 15901 - protein, 12 aa, Severe acute respiratory syndrome-related coronavirus
  REGION 1..12: note = Table B: HLA-DRB1*01:03L HLA-DRB1*04:02L HLA-DRB1*04:05L HLA-DRB1*01:02L HLA-DRB4*03:01NL HLA-DPA1*01:03-B1*03:01L HLA-DQA1*01:01-B1*05:01L HLA-DRB1*08:01L HLA-DQA1*01-B1*05L HLA-DQA1*05:05-B1*03:116L HLA-DPA1*01:03-B1*04:02L
  REGION 1..12: note = CONT. FROM ABOVE: HLA-DRB1*12:01L HLA-DRB1*16:01L HLA-DRB1*04:08 L
  source 1..12: note = Severe acute respiratory syndrome coronavirus 2
DATTAYANSVFN

SEQ ID NO: 15902 - protein, 12 aa, Severe acute respiratory syndrome-related coronavirus
  REGION 1..12: note = Table B: HLA-DRB1*01:03L HLA-DPA1*01:03-B1*03:01L HLA-DQA1*01-B1*05L HLA-DRB1*12:01L HLA-DPA1*01:03-B1*02:01L HLA-DRB1*16:01L HLA-DRB1*04:08L
  source 1..12: note = Severe acute respiratory syndrome coronavirus 2
TAYANSVFNICQ

SEQ ID NO: 15903 - protein, 14 aa, Severe acute respiratory syndrome-related coronavirus
  REGION 1..14: note = Table B: HLA-DRB1*01:03L HLA-DRB1*01:02L HLA-DRB1*08:04L HLA-DPA1*01:03-B1*03:01L HLA-DRB1*16:01L HLA-DRB1*15:03L
  source 1..14: note = Severe acute respiratory syndrome coronavirus 2
AYANSVFNICQAVT

SEQ ID NO: 15904 - protein, 13 aa, Severe acute respiratory syndrome-related coronavirus
  REGION 1..13: note = Table B: HLA-DRB1*01:03L HLA-DRB1*04:04L HLA-DRB1*04:05L HLA-DRB1*01:01L HLA-DRB3*02:01L HLA-DRB1*14:01L HLA-DRB1*14:02L HLA-DQA1*05:01-B1*02:01L HLA-DPA1*01:03-B1*04:02L HLA-DPA1*01:03-B1*104:01L HLA-DRB1*10:01L
  source 1..13: note = Severe acute respiratory syndrome coronavirus 2
VFNICQAVTANVN

SEQ ID NO: 15905 - protein, 14 aa, Severe acute respiratory syndrome-related coronavirus
  REGION 1..14: note = Table B: HLA-DRB1*01:03L HLA-DRB1*04:04L HLA-DQA1*01:02-B1*06:02L HLA-DRB1*14:01L HLA-DRB1*08:01L HLA-DRB3*01:01L HLA-DPA1*01:03-B1*104:01L HLA-DRB1*07:01L HLA-DQA1*01:03-B1*06:01L HLA-DRB1*04:08L HLA-DRB1*15:03L
  source 1..14: note = Severe acute respiratory syndrome coronavirus 2
DGNKIADKYVRNLQ

SEQ ID NO: 15906 - protein, 14 aa, Severe acute respiratory syndrome-related coronavirus
  REGION 1..14: note = Table B: HLA-DRB1*01:03L HLA-DRB1*04:04L HLA-DQA1*01:02-B1*06:02L HLA-DRB1*14:01L HLA-DRB1*08:01L HLA-DRB3*01:01L HLA-DRB1*07:01L HLA-DRB1*04:08L HLA-DRB1*15:03L
  source 1..14: note = Severe acute respiratory syndrome coronavirus 2
GNKIADKYVRNLQH

SEQ ID NO: 15907 - protein, 10 aa, Severe acute respiratory syndrome-related coronavirus
  REGION 1..10: note = Table B: HLA-DRB1*01:03L HLA-DRB1*08:01L HLA-DQA1*03:01-B1*03:02L
  source 1..10: note = Severe acute respiratory syndrome coronavirus 2
DKYVRNLQHR

SEQ ID NO: 15908 - protein, 10 aa, Severe acute respiratory syndrome-related coronavirus
  REGION 1..10: note = Table B: HLA-DRB1*01:03L HLA-DRB1*01:02L HLA-DRB1*12:01L HLA-DQA1*03:01-B1*03:02L HLA-DPA1*01:02-B1*04:01L HLA-DRB1*16:01L HLA-DQA1*02:01-B1*03:03L
  source 1..10: note = Severe acute respiratory syndrome coronavirus 2
KYVRNLQHRL

SEQ ID NO: 15909 - protein, 10 aa, Severe acute respiratory syndrome-related coronavirus
  REGION 1..10: note = Table B: HLA-DRB1*01:03L HLA-DRB1*01:02L HLA-DRB1*14:01L HLA-DRB1*12:01L HLA-DPA1*01:02-B1*04:01L HLA-DRB1*16:01L
  source 1..10: note = Severe acute respiratory syndrome coronavirus 2
VRNLQHRLYE

SEQ ID NO: 15910 - protein, 14 aa, Severe acute respiratory syndrome-related coronavirus
  REGION 1..14: note = Table B: HLA-DRB1*01:03L HLA-DRB1*16:01L
  source 1..14: note = Severe acute respiratory syndrome coronavirus 2
NLQHRLYECLYRNR

SEQ ID NO: 15911 - protein, 12 aa, Severe acute respiratory syndrome-related coronavirus
  REGION 1..12: note = Table B: HLA-DRB1*01:03L HLA-DRB1*01:02L HLA-DRB1*11:01L HLA-DRB1*16:01L HLA-DRB1*04:08L
  source 1..12: note = Severe acute respiratory syndrome coronavirus 2
HRLYECLYRNRD

SEQ ID NO: 15912 - protein, 13 aa, Severe acute respiratory syndrome-related coronavirus
  REGION 1..13: note = Table B: HLA-DRB1*01:03L HLA-DRB1*16:01L
  source 1..13: note = Severe acute respiratory syndrome coronavirus 2
RLYECLYRNRDVD

SEQ ID NO: 15913 - protein, 14 aa, Severe acute respiratory syndrome-related coronavirus
  REGION 1..14: note = Table B: HLA-DRB1*01:03L HLA-DRB1*01:02L
  source 1..14: note = Severe acute respiratory syndrome coronavirus 2
LYRNRDVDTDFVNE

SEQ ID NO: 15914 - protein, 13 aa, Severe acute respiratory syndrome-related coronavirus
  REGION 1..13: note = Table B: HLA-DRB1*01:03L HLA-DRB1*04:08L
  source 1..13: note = Severe acute respiratory syndrome coronavirus 2
VDTDFVNEFYAYL

SEQ ID NO: 15915 - protein, 10 aa, Severe acute respiratory syndrome-related coronavirus
  REGION 1..10: note = Table B: HLA-DRB1*01:03L HLA-DPA1*03:01-B1*04:02L HLA-DPA1*01:03-B1*04:01L HLA-DPA1*01:03-B1*04:02L HLA-DPA1*03:01-B1*105:01L HLA-DPA1*01:03-B1*02:01L HLA-DPA1*01:02-B1*04:01M HLA-DRB1*16:01L
  REGION 1..10: note = CONT. FROM ABOVE: HLA-DQA1*01:03-B1*06:01L HLA-DRB1*04:08L
  source 1..10: note = Severe acute respiratory syndrome coronavirus 2
FVNEFYAYLR

SEQ ID NO: 15916 - protein, 11 aa, Severe acute respiratory syndrome-related coronavirus
  REGION 1..11: note = Table B: HLA-DRB1*01:03L HLA-DRB1*01:02L HLA-DRB1*08:01L HLA-DQA1*03:01-B1*03:02L HLA-DRB1*16:01L HLA-DRB1*04:08L HLA-DQA1*02:01-B1*03:03L
  source 1..11: note = Severe acute respiratory syndrome coronavirus 2
VNEFYAYLRKH

SEQ ID NO: 15917 - protein, 10 aa, Severe acute respiratory syndrome-related coronavirus
  REGION 1..10: note = Table B: HLA-DRB1*01:03L HLA-DRB1*04:05L HLA-DQA1*01:02-B1*06:02L HLA-DQA1*05:05-B1*03:19L HLA-DPA1*02:01-B1*13:01L HLA-DPA1*03:01-B1*105:01L HLA-DPA1*01:02-B1*04:01L HLA-DRB1*16:01L
  REGION 1..10: note = CONT. FROM ABOVE: HLA-DQA1*01:03-B1*06:01L HLA-DQA1*02:01-B1*03: 03L HLA-DRB1*15:03L
  source 1..10: note = Severe acute respiratory syndrome coronavirus 2
EFYAYLRKHF

SEQ ID NO: 15918 - protein, 10 aa, Severe acute respiratory syndrome-related coronavirus
  REGION 1..10: note = Table B: HLA-DRB1*01:03L HLA-DQA1*01:02-B1*06:02L HLA-DRB1*14:01L HLA-DRB1*08:01L HLA-DRB1*11:01L HLA-DPA1*01:02-B1*04:01L HLA-DRB1*16:01L HLA-DRB1*04:08L
  source 1..10: note = Severe acute respiratory syndrome coronavirus 2
YAYLRKHFSM

SEQ ID NO: 15919 - protein, 15 aa, Severe acute respiratory syndrome-related coronavirus
  REGION 1..15: note = Table B: HLA-DRB1*01:03L HLA-DPA1*03:01-B1*04:02L HLA-DRB1*04:08L
  source 1..15: note = Severe acute respiratory syndrome coronavirus 2
AYLRKHFSMMILSDD

SEQ ID NO: 15920 - protein, 14 aa, Severe acute respiratory syndrome-related coronavirus
  REGION 1..14: note = Table B: HLA-DRB1*01:03L HLA-DRB1*15:03L
  source 1..14: note = Severe acute respiratory syndrome coronavirus 2
RKHFSMMILSDDAV

SEQ ID NO: 15921 - protein, 14 aa, Severe acute respiratory syndrome-related coronavirus
  REGION 1..14: note = Table B: HLA-DRB1*01:03L HLA-DPA1*03:01-B1*04:02L HLA-DRB1*11:02L HLA-DQA1*05:05-B1*03:19L HLA-DRB3*01:01L HLA-DQA1*05:05-B1*03:01L HLA-DRB1*04:08L
  source 1..14: note = Severe acute respiratory syndrome coronavirus 2
SMMILSDDAVVCFN

SEQ ID NO: 15922 - protein, 14 aa, Severe acute respiratory syndrome-related coronavirus
  REGION 1..14: note = Table B: HLA-DRB1*01:03L HLA-DRB1*04:04L HLA-DRB1*04:05L HLA-DRB1*14:01L HLA-DRB1*04:10L HLA-DPA1*03:01-B1*105:01L HLA-DQA1*05:05-B1*03:01L HLA-DRB1*04:08L HLA-DQA1*02:01-B1*03:03L HLA-DRB1*15:01L
  source 1..14: note = Severe acute respiratory syndrome coronavirus 2
DDAVVCFNSTYASQ

SEQ ID NO: 15923 - protein, 12 aa, Severe acute respiratory syndrome-related coronavirus
  REGION 1..12: note = Table B: HLA-DRB1*01:03L HLA-DRB1*04:04L HLA-DRB1*04:05L HLA-DQA1*01:02-B1*06:02L HLA-DRB1*01:02L HLA-DRB4*03:01NL HLA-DRB1*04:10L HLA-DRB1*12:01L HLA-DRB1*14:54L HLA-DRB1*16:01L HLA-DRB1*04:08L HLA-DRB1*15:03L
  source 1..12: note = Severe acute respiratory syndrome coronavirus 2
QGLVASIKNFKS

SEQ ID NO: 15924 - protein, 12 aa, Severe acute respiratory syndrome-related coronavirus
  REGION 1..12: note = Table B: HLA-DRB1*01:03L HLA-DRB1*04:04L HLA-DRB1*04:05L HLA-DQA1*01:02-B1*06:02L HLA-DRB1*01:02L HLA-DRB1*08:04L HLA-DRB1*12:01L HLA-DPA1*03:01-B1*105:01L HLA-DRB1*16:01L HLA-DRB1*04:08L HLA-DRB1*15:03L
  source 1..12: note = Severe acute respiratory syndrome coronavirus 2
GLVASIKNFKSV

SEQ ID NO: 15925 - protein, 12 aa, Severe acute respiratory syndrome-related coronavirus
  REGION 1..12: note = Table B: HLA-DRB1*01:03L HLA-DRB1*04:05L HLA-DRB1*01:02L HLA-DRB1*08:04L HLA-DRB1*08:01L HLA-DQA1*01-B1*05L HLA-DPA1*01:03-B1*04:01L HLA-DPA1*01:03-B1*04:02L HLA-DRB1*12:01L HLA-DPA1*02:01-B1*13:01L
  REGION 1..12: note = CONT. FROM ABOVE: HLA-DQA1*03:01-B1*03:02L HLA-DPA1*01:03-B1*02: 01L HLA-DRB1*16:01L HLA-DRB1*04:08L HLA-DRB1*15:03L
  source 1..12: note = Severe acute respiratory syndrome coronavirus 2
KNFKSVLYYQNN

SEQ ID NO: 15926 - protein, 14 aa, Severe acute respiratory syndrome-related coronavirus
  REGION 1..14: note = Table B: HLA-DRB1*01:03L HLA-DRB1*01:02L HLA-DRB1*04:08L
  source 1..14: note = Severe acute respiratory syndrome coronavirus 2
PHEFCSQHTMLVKQ

SEQ ID NO: 15927 - protein, 14 aa, Severe acute respiratory syndrome-related coronavirus
  REGION 1..14: note = Table B: HLA-DRB1*01:03L HLA-DRB1*01:02L HLA-DRB1*04:08L
  source 1..14: note = Severe acute respiratory syndrome coronavirus 2
HEFCSQHTMLVKQG

SEQ ID NO: 15928 - protein, 11 aa, Severe acute respiratory syndrome-related coronavirus
  REGION 1..11: note = Table B: HLA-DRB1*01:03L HLA-DQA1*05:05-B1*03:116L HLA-DPA1*02:01-B1*13:01L
  source 1..11: note = Severe acute respiratory syndrome coronavirus 2
KTDGTLMIERF

SEQ ID NO: 15929 - protein, 10 aa, Severe acute respiratory syndrome-related coronavirus
  REGION 1..10: note = Table B: HLA-DRB1*01:03L HLA-DPA1*01:03-B1*03:01L HLA-DPA1*03:01-B1*04:02L HLA-DPA1*01:03-B1*04:01L HLA-DPA1*01:03-B1*04:02L HLA-DRB1*12:01L HLA-DPA1*03:01-B1*105:01L HLA-DPA1*01:02-B1*04:01M
  REGION 1..10: note = CONT. FROM ABOVE: HLA-DRB1*16:01L HLA-DQA1*01:03-B1*06:01L HLA-D RB1*04:08L
  source 1..10: note = Severe acute respiratory syndrome coronavirus 2
LMIERFVSLA

SEQ ID NO: 15930 - protein, 12 aa, Severe acute respiratory syndrome-related coronavirus
  REGION 1..12: note = Table B: HLA-DRB1*01:03L HLA-DQA1*01:02-B1*06:02L HLA-DRB1*01:02L HLA-DRB1*08:01L HLA-DQA1*01-B1*05L HLA-DPA1*03:01-B1*105:01L HLA-DRB1*14:17L HLA-DPA1*01:02-B1*04:01L HLA-DRB1*16:01L HLA-DRB1*15:03L
  source 1..12: note = Severe acute respiratory syndrome coronavirus 2
AIDAYPLTKHPN

SEQ ID NO: 15931 - protein, 11 aa, Severe acute respiratory syndrome-related coronavirus
  REGION 1..11: note = Table B: HLA-DRB1*01:03L HLA-DRB1*01:02L HLA-DRB1*16:01L HLA-DRB1*04:08L HLA-DRB1*15:03L
  source 1..11: note = Severe acute respiratory syndrome coronavirus 2
VFHLYLQYIRK

SEQ ID NO: 15932 - protein, 12 aa, Severe acute respiratory syndrome-related coronavirus
  REGION 1..12: note = Table B: HLA-DRB1*01:03L HLA-DQA1*01:02-B1*06:02L HLA-DRB1*01:02L HLA-DRB1*14:01L HLA-DRB1*11:04L HLA-DRB1*08:01L HLA-DRB1*11:01L HLA-DRB1*16:01L HLA-DRB1*04:08L
  source 1..12: note = Severe acute respiratory syndrome coronavirus 2
HLYLQYIRKLHD

SEQ ID NO: 15933 - protein, 12 aa, Severe acute respiratory syndrome-related coronavirus
  REGION 1..12: note = Table B: HLA-DRB1*01:03L HLA-DRB1*01:02L HLA-DRB1*08:01L HLA-DRB1*04:08L HLA-DRB1*15:03L
  source 1..12: note = Severe acute respiratory syndrome coronavirus 2
QYIRKLHDELTG

SEQ ID NO: 15934 - protein, 12 aa, Severe acute respiratory syndrome-related coronavirus
  REGION 1..12: note = Table B: HLA-DRB1*01:03L HLA-DRB1*01:02L HLA-DRB1*04:08L HLA-DRB1*15:03L
  source 1..12: note = Severe acute respiratory syndrome coronavirus 2
YIRKLHDELTGH

SEQ ID NO: 15935 - protein, 12 aa, Severe acute respiratory syndrome-related coronavirus
  REGION 1..12: note = Table B: HLA-DRB1*01:03L HLA-DRB1*04:05L HLA-DRB1*01:02L HLA-DRB1*12:01L HLA-DRB1*04:08L HLA-DRB1*15:03L
  source 1..12: note = Severe acute respiratory syndrome coronavirus 2
IRKLHDELTGHM

SEQ ID NO: 15936 - protein, 14 aa, Severe acute respiratory syndrome-related coronavirus
  REGION 1..14: note = Table B: HLA-DRB1*01:03L HLA-DRB1*04:04L HLA-DQA1*01:02-B1*06:02L HLA-DRB1*14:01L HLA-DPA1*03:01-B1*105:01L HLA-DRB1*14:17L HLA-DRB1*04:08L
  source 1..14: note = Severe acute respiratory syndrome coronavirus 2
TGHMLDMYSVMLTN

SEQ ID NO: 15937 - protein, 13 aa, Severe acute respiratory syndrome-related coronavirus
  REGION 1..13: note = Table B: HLA-DRB1*01:03L HLA-DRB1*10:01L
  source 1..13: note = Severe acute respiratory syndrome coronavirus 2
LDMYSVMLTNDNT

SEQ ID NO: 15938 - protein, 13 aa, Severe acute respiratory syndrome-related coronavirus
  REGION 1..13: note = Table B: HLA-DRB1*01:03L HLA-DRB1*04:02L HLA-DQA1*01:02-B1*06:02L HLA-DRB1*01:02L HLA-DRB1*08:01L HLA-DPA1*01:03-B1*04:02L HLA-DRB1*12:01L HLA-DPA1*02:01-B1*13:01L HLA-DPA1*01:03-B1*02:01L
  REGION 1..13: note = CONT. FROM ABOVE: HLA-DQA1*05:05-B1*03:01L HLA-DRB1*04:08L HLA-D RB1*15:03L
  source 1..13: note = Severe acute respiratory syndrome coronavirus 2
WEPEFYEAMYTPH

SEQ ID NO: 15939 - protein, 13 aa, Severe acute respiratory syndrome-related coronavirus
  REGION 1..13: note = Table B: HLA-DRB1*01:03L HLA-DRB1*04:05L HLA-DQA1*01:02-B1*06:02L HLA-DRB1*11:03L HLA-DRB1*11:01L HLA-DRB1*04:08L
  source 1..13: note = Severe acute respiratory syndrome coronavirus 2
DHVISTSHKLVLS

SEQ ID NO: 15940 - protein, 12 aa, Severe acute respiratory syndrome-related coronavirus
  REGION 1..12: note = Table B: HLA-DRB1*01:03L HLA-DRB1*04:05L HLA-DQA1*01:02-B1*06:02L HLA-DRB1*01:02L HLA-DRB1*14:01L HLA-DRB1*11:04L HLA-DRB1*11:01L HLA-DQA1*03:01-B1*03:02L HLA-DPA1*01:02-B1*04:01L HLA-DRB1*16:01L HLA-DRB1*04:08L
  REGION 1..12: note = CONT. FROM ABOVE: HLA-DQA1*02:01-B1*03:03L
  source 1..12: note = Severe acute respiratory syndrome coronavirus 2
GMSYYCKSHKPP

SEQ ID NO: 15941 - protein, 14 aa, Severe acute respiratory syndrome-related coronavirus
  REGION 1..14: note = Table B: HLA-DRB1*01:03L HLA-DRB1*04:08L
  source 1..14: note = Severe acute respiratory syndrome coronavirus 2
QVFGLYKNTCVGSD

SEQ ID NO: 15942 - protein, 12 aa, Severe acute respiratory syndrome-related coronavirus
  REGION 1..12: note = Table B: HLA-DRB1*01:03L HLA-DRB1*04:08L
  source 1..12: note = Severe acute respiratory syndrome coronavirus 2
RLKLFAAETLKA

SEQ ID NO: 15943 - protein, 12 aa, Severe acute respiratory syndrome-related coronavirus
  REGION 1..12: note = Table B: HLA-DRB1*01:03L HLA-DRB1*12:01L HLA-DRB1*04:08L
  source 1..12: note = Severe acute respiratory syndrome coronavirus 2
LKLFAAETLKAT

SEQ ID NO: 15944 - protein, 11 aa, Severe acute respiratory syndrome-related coronavirus
  REGION 1..11: note = Table B: HLA-DRB1*01:03L HLA-DRB1*04:04L HLA-DRB1*04:05L HLA-DRB1*01:02L HLA-DPA1*03:01-B1*04:02L HLA-DQA1*05:05-B1*03:19L HLA-DPA1*01:03-B1*04:02L HLA-DRB1*12:01L HLA-DRB1*14:54L HLA-DRB1*04:08L HLA-DRB1*15:03L
  source 1..11: note = Severe acute respiratory syndrome coronavirus 2
LFAAETLKATE

SEQ ID NO: 15945 - protein, 11 aa, Severe acute respiratory syndrome-related coronavirus
  REGION 1..11: note = Table B: HLA-DRB1*01:03L HLA-DQA1*05:05-B1*03:19L HLA-DPA1*01:03-B1*04:02L HLA-DRB1*12:01L HLA-DRB1*14:54L HLA-DRB1*04:08L
  source 1..11: note = Severe acute respiratory syndrome coronavirus 2
FAAETLKATEE

SEQ ID NO: 15946 - protein, 12 aa, Severe acute respiratory syndrome-related coronavirus
  REGION 1..12: note = Table B: HLA-DRB1*01:03L HLA-DQA1*01:02-B1*06:02L HLA-DRB1*01:02L HLA-DPA1*03:01-B1*105:01L HLA-DRB1*16:01L HLA-DRB1*04:08L HLA-DRB1*15:03L
  source 1..12: note = Severe acute respiratory syndrome coronavirus 2
FKLSYGIATVRE

SEQ ID NO: 15947 - protein, 14 aa, Severe acute respiratory syndrome-related coronavirus
  REGION 1..14: note = Table B: HLA-DRB1*01:03L HLA-DRB1*08:01L
  source 1..14: note = Severe acute respiratory syndrome coronavirus 2
KLSYGIATVREVLS

SEQ ID NO: 15948 - protein, 14 aa, Severe acute respiratory syndrome-related coronavirus
  REGION 1..14: note = Table B: HLA-DRB1*01:03L
  source 1..14: note = Severe acute respiratory syndrome coronavirus 2
LSYGIATVREVLSD

SEQ ID NO: 15949 - protein, 14 aa, Severe acute respiratory syndrome-related coronavirus
  REGION 1..14: note = Table B: HLA-DRB1*01:03L
  source 1..14: note = Severe acute respiratory syndrome coronavirus 2
SYGIATVREVLSDR

SEQ ID NO: 15950 - protein, 12 aa, Severe acute respiratory syndrome-related coronavirus
  REGION 1..12: note = Table B: HLA-DRB1*01:03L HLA-DRB1*04:05L HLA-DQA1*01:02-B1*06:02L HLA-DRB1*01:02L HLA-DQA1*01:01-B1*05:01L HLA-DRB1*08:01L HLA-DRB1*04:08L
  source 1..12: note = Severe acute respiratory syndrome coronavirus 2
TVREVLSDRELH

SEQ ID NO: 15951 - protein, 14 aa, Severe acute respiratory syndrome-related coronavirus
  REGION 1..14: note = Table B: HLA-DRB1*01:03L HLA-DRB1*01:02L HLA-DRB1*04:08L
  source 1..14: note = Severe acute respiratory syndrome coronavirus 2
RPPLNRNYVFTGYR

SEQ ID NO: 15952 - protein, 11 aa, Severe acute respiratory syndrome-related coronavirus
  REGION 1..11: note = Table B: HLA-DRB1*01:03L HLA-DPA1*01:03-B1*04:01L HLA-DRB1*12:01L HLA-DRB1*04:08L
  source 1..11: note = Severe acute respiratory syndrome coronavirus 2
RNYVFTGYRVT

SEQ ID NO: 15953 - protein, 12 aa, Severe acute respiratory syndrome-related coronavirus
  REGION 1..12: note = Table B: HLA-DRB1*01:03L HLA-DRB1*04:08L HLA-DQA1*02:01-B1*03:03L
  source 1..12: note = Severe acute respiratory syndrome coronavirus 2
VFTGYRVTKNSK

SEQ ID NO: 15954 - protein, 11 aa, Severe acute respiratory syndrome-related coronavirus
  REGION 1..11: note = Table B: HLA-DRB1*01:03L HLA-DRB1*01:02L HLA-DRB1*14:01L HLA-DRB1*12:01L HLA-DPA1*01:02-B1*04:01L HLA-DRB1*04:08L HLA-DQA1*02:01-B1*03:03L HLA-DRB1*15:03L
  source 1..11: note = Severe acute respiratory syndrome coronavirus 2
TGYRVTKNSKV

SEQ ID NO: 15955 - protein, 10 aa, Severe acute respiratory syndrome-related coronavirus
  REGION 1..10: note = Table B: HLA-DRB1*01:03L HLA-DQA1*01:02-B1*06:02L HLA-DRB1*03:01L HLA-DRB1*14:02L HLA-DQA1*05:05-B1*03:19L HLA-DQA1*05:01-B1*02:01L HLA-DQA1*02:01-B1*03:03L
  source 1..10: note = Severe acute respiratory syndrome coronavirus 2
KNSKVQIGEY

SEQ ID NO: 15956 - protein, 14 aa, Severe acute respiratory syndrome-related coronavirus
  REGION 1..14: note = Table B: HLA-DRB1*01:03L HLA-DRB1*01:02L HLA-DPA1*02:01-B1*13:01L HLA-DRB1*04:08L HLA-DRB1*15:03L
  source 1..14: note = Severe acute respiratory syndrome coronavirus 2
EKGDYGDAVVYRGT

SEQ ID NO: 15957 - protein, 14 aa, Severe acute respiratory syndrome-related coronavirus
  REGION 1..14: note = Table B: HLA-DRB1*01:03L HLA-DRB1*01:02L HLA-DPA1*01:03-B1*02:01L HLA-DRB1*16:01L HLA-DRB1*04:08L
  source 1..14: note = Severe acute respiratory syndrome coronavirus 2
YKLNVGDYFVLTSH

SEQ ID NO: 15958 - protein, 14 aa, Severe acute respiratory syndrome-related coronavirus
  REGION 1..14: note = Table B: HLA-DRB1*01:03L HLA-DQA1*01-B1*05L HLA-DRB1*12:01L HLA-DRB1*04:08L
  source 1..14: note = Severe acute respiratory syndrome coronavirus 2
VRITGLYPTLNISD

SEQ ID NO: 15959 - protein, 12 aa, Severe acute respiratory syndrome-related coronavirus
  REGION 1..12: note = Table B: HLA-DRB1*01:03L HLA-DRB1*01:02L HLA-DPA1*03:01-B1*04:02L HLA-DQA1*01-B1*05L HLA-DQA1*05:05-B1*03:19L HLA-DPA1*01:03-B1*04:02L HLA-DQA1*05:05-B1*03:01L HLA-DRB1*16:01L HLA-DRB1*04:08L
  source 1..12: note = Severe acute respiratory syndrome coronavirus 2
AIGLALYYPSAR

SEQ ID NO: 15960 - protein, 13 aa, Severe acute respiratory syndrome-related coronavirus
  REGION 1..13: note = Table B: HLA-DRB1*01:03L HLA-DRB1*04:05L HLA-DRB3*02:01L HLA-DPA1*03:01-B1*04:02L HLA-DRB1*14:01L HLA-DPA1*02:01-B1*13:01L HLA-DQA1*05:05-B1*03:01L HLA-DRB1*04:08L HLA-DRB1*15:01L
  source 1..13: note = Severe acute respiratory syndrome coronavirus 2
IGLALYYPSARIV

SEQ ID NO: 15961 - protein, 15 aa, Severe acute respiratory syndrome-related coronavirus
  REGION 1..15: note = Table B: HLA-DRB1*01:03L HLA-DRB1*01:01L HLA-DPA1*03:01-B1*04:02L HLA-DRB1*14:01L HLA-DRB1*08:01L HLA-DRB1*11:01L HLA-DRB1*04:10L HLA-DRB3*01:01L HLA-DPA1*03:01-B1*105:01L HLA-DQA1*05:05-B1*03:01L
  REGION 1..15: note = CONT. FROM ABOVE: HLA-DRB1*07:01L HLA-DQA1*01:03-B1*06:01L
  source 1..15: note = Severe acute respiratory syndrome coronavirus 2
YPSARIVYTACSHAA

SEQ ID NO: 15962 - protein, 13 aa, Severe acute respiratory syndrome-related coronavirus
  REGION 1..13: note = Table B: HLA-DRB1*01:03L HLA-DRB1*01:02L HLA-DRB1*14:01L HLA-DRB1*12:01L HLA-DRB1*04:08L HLA-DRB1*15:03L
  source 1..13: note = Severe acute respiratory syndrome coronavirus 2
ARIVYTACSHAAV

SEQ ID NO: 15963 - protein, 11 aa, Severe acute respiratory syndrome-related coronavirus
  REGION 1..11: note = Table B: HLA-DRB1*01:03L HLA-DPA1*01:02-B1*04:01L HLA-DRB1*16:01L HLA-DRB1*04:08L
  source 1..11: note = Severe acute respiratory syndrome coronavirus 2
LKYLPIDKCSR

SEQ ID NO: 15964 - protein, 14 aa, Severe acute respiratory syndrome-related coronavirus
  REGION 1..14: note = Table B: HLA-DRB1*01:03L HLA-DRB1*01:02L HLA-DRB3*01:01L HLA-DRB1*16:01L HLA-DRB1*04:08L
  source 1..14: note = Severe acute respiratory syndrome coronavirus 2
KYLPIDKCSRIIPA

SEQ ID NO: 15965 - protein, 14 aa, Severe acute respiratory syndrome-related coronavirus
  REGION 1..14: note = Table B: HLA-DRB1*01:03L HLA-DRB1*11:04L HLA-DRB1*11:01L HLA-DRB1*12:01L HLA-DRB1*15:03L
  source 1..14: note = Severe acute respiratory syndrome coronavirus 2
RARVECFDKFKVNS

SEQ ID NO: 15966 - protein, 15 aa, Severe acute respiratory syndrome-related coronavirus
  REGION 1..15: note = Table B: HLA-DRB1*01:03L HLA-DRB1*04:04L HLA-DPA1*01:03-B1*03:01L HLA-DRB1*14:02L HLA-DRB1*09:01L HLA-DPA1*01:03-B1*04:02L HLA-DPA1*02:01-B1*13:01L HLA-DRB1*07:01L HLA-DRB1*04:08L HLA-DRB1*15:01L
  source 1..15: note = Severe acute respiratory syndrome coronavirus 2
DEISMATNYDLSVVN

SEQ ID NO: 15967 - protein, 10 aa, Severe acute respiratory syndrome-related coronavirus
  REGION 1..10: note = Table B: HLA-DRB1*01:03L HLA-DRB1*12:01L HLA-DQA1*03:01-B1*03:02L
  source 1..10: note = Severe acute respiratory syndrome coronavirus 2
SVVNARLRAK

SEQ ID NO: 15968 - protein, 10 aa, Severe acute respiratory syndrome-related coronavirus
  REGION 1..10: note = Table B: HLA-DRB1*01:03L
  source 1..10: note = Severe acute respiratory syndrome coronavirus 2
VVNARLRAKH

SEQ ID NO: 15969 - protein, 12 aa, Severe acute respiratory syndrome-related coronavirus
  REGION 1..12: note = Table B: HLA-DRB1*01:03L HLA-DRB1*16:01L HLA-DRB1*04:08L
  source 1..12: note = Severe acute respiratory syndrome coronavirus 2
ARLRAKHYVYIG

SEQ ID NO: 15970 - protein, 14 aa, Severe acute respiratory syndrome-related coronavirus
  REGION 1..14: note = Table B: HLA-DRB1*01:03L HLA-DRB1*01:02L HLA-DRB1*08:01L HLA-DRB1*16:01L HLA-DRB1*04:08L
  source 1..14: note = Severe acute respiratory syndrome coronavirus 2
RLRAKHYVYIGDPA

SEQ ID NO: 15971 - protein, 11 aa, Severe acute respiratory syndrome-related coronavirus
  REGION 1..11: note = Table B: HLA-DRB1*01:03L HLA-DPA1*03:01-B1*04:02L HLA-DPA1*01:03-B1*04:01L HLA-DPA1*01:03-B1*04:02L HLA-DPA1*03:01-B1*105:01L HLA-DPA1*01:02-B1*04:01L HLA-DRB1*04:08L
  source 1..11: note = Severe acute respiratory syndrome coronavirus 2
LEPEYFNSVCR

SEQ ID NO: 15972 - protein, 14 aa, Severe acute respiratory syndrome-related coronavirus
  REGION 1..14: note = Table B: HLA-DRB1*01:03L HLA-DRB1*01:02L HLA-DRB1*16:01L HLA-DRB1*04:08L
  source 1..14: note = Severe acute respiratory syndrome coronavirus 2
KTIGPDMFLGTCRR

SEQ ID NO: 15973 - protein, 12 aa, Severe acute respiratory syndrome-related coronavirus
  REGION 1..12: note = Table B: HLA-DRB1*01:03L HLA-DRB1*04:05L HLA-DRB1*01:02L HLA-DPA1*01:03-B1*03:01L HLA-DQA1*01-B1*05L HLA-DRB1*04:10L HLA-DRB1*16:01L HLA-DRB1*04:08L HLA-DRB1*15:03L
  source 1..12: note = Severe acute respiratory syndrome coronavirus 2
VDTVSALVYDNK

SEQ ID NO: 15974 - protein, 15 aa, Severe acute respiratory syndrome-related coronavirus
  REGION 1..15: note = Table B: HLA-DRB1*01:03L HLA-DRB1*16:01L HLA-DRB1*04:08L
  source 1..15: note = Severe acute respiratory syndrome coronavirus 2
NKLKAHKDKSAQCFK

SEQ ID NO: 15975 - protein, 10 aa, Severe acute respiratory syndrome-related coronavirus
  REGION 1..10: note = Table B: HLA-DRB1*01:03L HLA-DRB1*14:01L HLA-DRB1*16:01L
  source 1..10: note = Severe acute respiratory syndrome coronavirus 2
LTRNPAWRKA

SEQ ID NO: 15976 - protein, 12 aa, Severe acute respiratory syndrome-related coronavirus
  REGION 1..12: note = Table B: HLA-DRB1*01:03L HLA-DRB1*04:04L HLA-DRB1*04:05L HLA-DQA1*01:02-B1*06:02L HLA-DRB1*14:01L HLA-DRB1*04:10L HLA-DQA1*05:05-B1*03:01L HLA-DRB1*04:08L HLA-DRB1*15:01L
  source 1..12: note = Severe acute respiratory syndrome coronavirus 2
VFISPYNSQNAV

SEQ ID NO: 15977 - protein, 11 aa, Severe acute respiratory syndrome-related coronavirus
  REGION 1..11: note = Table B: HLA-DRB1*01:03L HLA-DRB1*04:02L HLA-DRB1*04:04L HLA-DRB1*04:05L HLA-DRB1*01:02L HLA-DRB4*03:01NL HLA-DPA1*03:01-B1*04:02L HLA-DRB1*14:01L HLA-DRB1*11:03L HLA-DRB1*11:04L HLA-DQA1*05:01-B1*02:01L HLA-DRB1*04:10L
  REGION 1..11: note = CONT. FROM ABOVE: HLA-DRB1*12:01L HLA-DQA1*03:01-B1*03:02L HLA-D RB1*14:54L HLA-DRB1*14:17L HLA-DQA1*01:03-B1*06:01L HLA-DRB1*04: 08L HLA-DQA1*02:01-B1*03:03L HLA-DRB1*15:01L HLA-DRB1*15:03L
  source 1..11: note = Severe acute respiratory syndrome coronavirus 2
ISPYNSQNAVA

SEQ ID NO: 15978 - protein, 12 aa, Severe acute respiratory syndrome-related coronavirus
  REGION 1..12: note = Table B: HLA-DRB1*01:03L HLA-DRB1*04:05L HLA-DRB4*03:01NL HLA-DPA1*01:03-B1*03:01L HLA-DQA1*01:01-B1*05:01L HLA-DRB1*08:01L HLA-DQA1*05:01-B1*02:01L HLA-DRB1*12:01L HLA-DRB1*14:17L HLA-DRB1*04:08L
  source 1..12: note = Severe acute respiratory syndrome coronavirus 2
NSQNAVASKILG

SEQ ID NO: 15979 - protein, 14 aa, Severe acute respiratory syndrome-related coronavirus
  REGION 1..14: note = Table B: HLA-DRB1*01:03L HLA-DRB1*01:02L HLA-DRB1*08:01L HLA-DRB1*12:01L HLA-DRB1*04:08L
  source 1..14: note = Severe acute respiratory syndrome coronavirus 2
SQNAVASKILGLPT

SEQ ID NO: 15980 - protein, 13 aa, Severe acute respiratory syndrome-related coronavirus
  REGION 1..13: note = Table B: HLA-DRB1*01:03L
  source 1..13: note = Severe acute respiratory syndrome coronavirus 2
LGLPTQTVDSSQG

SEQ ID NO: 15981 - protein, 12 aa, Severe acute respiratory syndrome-related coronavirus
  REGION 1..12: note = Table B: HLA-DRB1*01:03L HLA-DPA1*01:03-B1*03:01L HLA-DQA1*01-B1*05L HLA-DQA1*05:01-B1*02:01L HLA-DPA1*01:03-B1*04:01L HLA-DPA1*01:03-B1*04:02L HLA-DRB1*12:01L HLA-DPA1*02:01-B1*13:01L
  REGION 1..12: note = CONT. FROM ABOVE: HLA-DPA1*03:01-B1*105:01L HLA-DRB1*16:01L HLA- DQA1*01:03-B1*06:01L HLA-DRB1*04:08L HLA-DRB1*15:03L
  source 1..12: note = Severe acute respiratory syndrome coronavirus 2
GSEYDYVIFTQT

SEQ ID NO: 15982 - protein, 13 aa, Severe acute respiratory syndrome-related coronavirus
  REGION 1..13: note = Table B: HLA-DRB1*01:03L HLA-DQA1*01:02-B1*06:02L HLA-DPA1*01:03-B1*02:01L HLA-DRB1*16:01L HLA-DQA1*01:03-B1*06:01L HLA-DRB1*04:08L
  source 1..13: note = Severe acute respiratory syndrome coronavirus 2
SEYDYVIFTQTTE

SEQ ID NO: 15983 - protein, 12 aa, Severe acute respiratory syndrome-related coronavirus
  REGION 1..12: note = Table B: HLA-DRB1*01:03L HLA-DRB1*01:02L HLA-DRB1*04:08L
  source 1..12: note = Severe acute respiratory syndrome coronavirus 2
TTETAHSCNVNR

SEQ ID NO: 15984 - protein, 10 aa, Severe acute respiratory syndrome-related coronavirus
  REGION 1..10: note = Table B: HLA-DRB1*01:03L HLA-DRB1*01:02L HLA-DQA1*03:01-B1*03:02L HLA-DRB1*16:01L HLA-DQA1*02:01-B1*03:03L
  source 1..10: note = Severe acute respiratory syndrome coronavirus 2
RFNVAITRAK

SEQ ID NO: 15985 - protein, 16 aa, Severe acute respiratory syndrome-related coronavirus
  REGION 1..16: note = Table B: HLA-DRB1*01:03L HLA-DRB1*04:04L
  source 1..16: note = Severe acute respiratory syndrome coronavirus 2
AKVGILCIMSDRDLYD

SEQ ID NO: 15986 - protein, 13 aa, Severe acute respiratory syndrome-related coronavirus
  REGION 1..13: note = Table B: HLA-DRB1*01:03L HLA-DRB1*08:01L HLA-DRB1*12:01L HLA-DRB1*04:08L
  source 1..13: note = Severe acute respiratory syndrome coronavirus 2
RDLYDKLQFTSLE

SEQ ID NO: 15987 - protein, 12 aa, Severe acute respiratory syndrome-related coronavirus
  REGION 1..12: note = Table B: HLA-DRB1*01:03L HLA-DRB1*04:05L HLA-DQA1*01:02-B1*06:02L HLA-DRB1*08:01L HLA-DRB1*12:01L HLA-DRB1*16:01L HLA-DRB1*04:08L
  source 1..12: note = Severe acute respiratory syndrome coronavirus 2
DKLQFTSLEIPR

SEQ ID NO: 15988 - protein, 12 aa, Severe acute respiratory syndrome-related coronavirus
  REGION 1..12: note = Table B: HLA-DRB1*01:03L HLA-DRB1*04:05L HLA-DQA1*01:02-B1*06:02L HLA-DRB1*01:02L HLA-DRB1*08:01L HLA-DRB1*12:01L HLA-DRB1*16:01L HLA-DRB1*04:08L HLA-DRB1*15:03L
  source 1..12: note = Severe acute respiratory syndrome coronavirus 2
KLQFTSLEIPRR

SEQ ID NO: 15989 - protein, 14 aa, Severe acute respiratory syndrome-related coronavirus
  REGION 1..14: note = Table B: HLA-DRB1*01:03L HLA-DRB1*04:08L HLA-DRB1*15:03L
  source 1..14: note = Severe acute respiratory syndrome coronavirus 2
QFTSLEIPRRNVAT

SEQ ID NO: 15990 - protein, 13 aa, Severe acute respiratory syndrome-related coronavirus
  REGION 1..13: note = Table B: HLA-DRB1*01:03L HLA-DRB1*04:02L HLA-DRB1*01:01L HLA-DRB1*04:08L
  source 1..13: note = Severe acute respiratory syndrome coronavirus 2
ATLQAENVTGLFK

SEQ ID NO: 15991 - protein, 13 aa, Severe acute respiratory syndrome-related coronavirus
  REGION 1..13: note = Table B: HLA-DRB1*01:03L HLA-DRB1*16:01L HLA-DRB1*04:08L
  source 1..13: note = Severe acute respiratory syndrome coronavirus 2
AENVTGLFKDCSK

SEQ ID NO: 15992 - protein, 13 aa, Severe acute respiratory syndrome-related coronavirus
  REGION 1..13: note = Table B: HLA-DRB1*01:03L HLA-DRB1*04:02L HLA-DRB1*04:04L HLA-DRB1*04:05L HLA-DRB1*14:01L HLA-DRB1*04:10L HLA-DPA1*03:01-B1*105:01L HLA-DRB1*14:54L HLA-DQA1*05:05-B1*03:01L HLA-DRB1*04:08L
  source 1..13: note = Severe acute respiratory syndrome coronavirus 2
SKVITGLHPTQAP

SEQ ID NO: 15993 - protein, 15 aa, Severe acute respiratory syndrome-related coronavirus
  REGION 1..15: note = Table B: HLA-DRB1*01:03L HLA-DRB1*04:08L
  source 1..15: note = Severe acute respiratory syndrome coronavirus 2
LHPTQAPTHLSVDTK

SEQ ID NO: 15994 - protein, 16 aa, Severe acute respiratory syndrome-related coronavirus
  REGION 1..16: note = Table B: HLA-DRB1*01:03L HLA-DRB1*04:05L HLA-DRB1*12:01L HLA-DPA1*02:01-B1*13:01L HLA-DRB1*16:01L HLA-DRB1*04:08L
  source 1..16: note = Severe acute respiratory syndrome coronavirus 2
HPTQAPTHLSVDTKFK

SEQ ID NO: 15995 - protein, 14 aa, Severe acute respiratory syndrome-related coronavirus
  REGION 1..14: note = Table B: HLA-DRB1*01:03L HLA-DRB1*04:05L HLA-DRB1*01:02L HLA-DPA1*01:03-B1*03:01L HLA-DRB1*11:04L HLA-DRB1*08:01L HLA-DRB1*11:01L HLA-DPA1*01:03-B1*04:01L HLA-DRB1*12:01L HLA-DRB3*01:01L HLA-DPA1*02:01-B1*13:01L
  REGION 1..14: note = CONT. FROM ABOVE: HLA-DPA1*01:03-B1*02:01L HLA-DQA1*02:01-B1*03: 03L HLA-DRB1*15:03L
  source 1..14: note = Severe acute respiratory syndrome coronavirus 2
TKFKTEGLCVDIPG

SEQ ID NO: 15996 - protein, 13 aa, Severe acute respiratory syndrome-related coronavirus
  REGION 1..13: note = Table B: HLA-DRB1*01:03L HLA-DRB1*01:02L HLA-DRB1*16:01L
  source 1..13: note = Severe acute respiratory syndrome coronavirus 2
IPGIPKDMTYRRL

SEQ ID NO: 15997 - protein, 15 aa, Severe acute respiratory syndrome-related coronavirus
  REGION 1..15: note = Table B: HLA-DRB1*01:03L HLA-DRB1*04:05L HLA-DRB1*01:02L HLA-DRB1*08:04L HLA-DRB1*12:01L HLA-DPA1*02:01-B1*13:01L HLA-DPA1*03:01-B1*105:01L HLA-DRB1*16:01L HLA-DRB1*15:03L
  source 1..15: note = Severe acute respiratory syndrome coronavirus 2
IPKDMTYRRLISMMG

SEQ ID NO: 15998 - protein, 11 aa, Severe acute respiratory syndrome-related coronavirus
  REGION 1..11: note = Table B: HLA-DRB1*01:03L HLA-DRB1*01:02L HLA-DRB1*16:01L HLA-DRB1*04:08L
  source 1..11: note = Severe acute respiratory syndrome coronavirus 2
YRRLISMMGFK

SEQ ID NO: 15999 - protein, 12 aa, Severe acute respiratory syndrome-related coronavirus
  REGION 1..12: note = Table B: HLA-DRB1*01:03L HLA-DRB1*16:01L HLA-DRB1*04:08L HLA-DQA1*02:01-B1*03:03L
  source 1..12: note = Severe acute respiratory syndrome coronavirus 2
RRLISMMGFKMN

SEQ ID NO: 16000 - protein, 13 aa, Severe acute respiratory syndrome-related coronavirus
  REGION 1..13: note = Table B: HLA-DRB1*01:03L HLA-DRB1*04:08L
  source 1..13: note = Severe acute respiratory syndrome coronavirus 2
RLISMMGFKMNYQ

SEQ ID NO: 16001 - protein, 12 aa, Severe acute respiratory syndrome-related coronavirus
  REGION 1..12: note = Table B: HLA-DRB1*01:03L HLA-DRB1*04:05L HLA-DRB4*03:01NL HLA-DRB1*08:04L HLA-DRB1*08:77L HLA-DRB1*11:03L HLA-DRB1*08:01L HLA-DRB1*09:01L HLA-DRB1*12:02L HLA-DRB1*14:54L HLA-DPA1*01:03-B1*104:01L HLA-DQA1*05:05-B1*03:01L
  REGION 1..12: note = CONT. FROM ABOVE: HLA-DRB1*07:01L HLA-DRB1*04:08L
  source 1..12: note = Severe acute respiratory syndrome coronavirus 2
KMNYQVNGYPNM

SEQ ID NO: 16002 - protein, 11 aa, Severe acute respiratory syndrome-related coronavirus
  REGION 1..11: note = Table B: HLA-DRB1*01:03L HLA-DRB1*01:02L HLA-DRB1*08:01L HLA-DRB1*12:01L HLA-DQA1*02:01-B1*03:03L
  source 1..11: note = Severe acute respiratory syndrome coronavirus 2
ITREEAIRHVR

SEQ ID NO: 16003 - protein, 11 aa, Severe acute respiratory syndrome-related coronavirus
  REGION 1..11: note = Table B: HLA-DRB1*01:03L HLA-DQA1*01:03-B1*06:01L
  source 1..11: note = Severe acute respiratory syndrome coronavirus 2
REEAIRHVRAW

SEQ ID NO: 16004 - protein, 13 aa, Severe acute respiratory syndrome-related coronavirus
  REGION 1..13: note = Table B: HLA-DRB1*01:03L HLA-DRB1*04:02L HLA-DRB1*04:04L HLA-DPA1*01:03-B1*03:01L HLA-DPA1*03:01-B1*04:02L HLA-DRB1*14:01L HLA-DRB1*08:01L HLA-DPA1*03:01-B1*105:01L HLA-DQA1*03:01-B1*03:02L HLA-DQA1*01:03-B1*06:01L
  REGION 1..13: note = CONT. FROM ABOVE: HLA-DQA1*02:01-B1*03:03L HLA-DRB1*15:01L
  source 1..13: note = Severe acute respiratory syndrome coronavirus 2
IRHVRAWIGFDVE

SEQ ID NO: 16005 - protein, 14 aa, Severe acute respiratory syndrome-related coronavirus
  REGION 1..14: note = Table B: HLA-DRB1*01:03L HLA-DRB1*12:01L
  source 1..14: note = Severe acute respiratory syndrome coronavirus 2
VRAWIGFDVEGCHA

SEQ ID NO: 16006 - protein, 14 aa, Severe acute respiratory syndrome-related coronavirus
  REGION 1..14: note = Table B: HLA-DRB1*01:03L HLA-DRB1*01:02L HLA-DRB1*16:01L HLA-DRB1*04:08L HLA-DRB1*15:03L
  source 1..14: note = Severe acute respiratory syndrome coronavirus 2
RAWIGFDVEGCHAT

SEQ ID NO: 16007 - protein, 14 aa, Severe acute respiratory syndrome-related coronavirus
  REGION 1..14: note = Table B: HLA-DRB1*01:03L HLA-DRB1*04:05L HLA-DPA1*01:03-B1*03:01L HLA-DRB1*08:01L HLA-DPA1*01:03-B1*04:02L HLA-DRB1*12:01L HLA-DPA1*02:01-B1*13:01L HLA-DRB1*16:01L HLA-DRB1*15:03L
  source 1..14: note = Severe acute respiratory syndrome coronavirus 2
IGFDVEGCHATREA

SEQ ID NO: 16008 - protein, 13 aa, Severe acute respiratory syndrome-related coronavirus
  REGION 1..13: note = Table B: HLA-DRB1*01:03L HLA-DRB1*04:05L HLA-DRB1*01:02L HLA-DRB4*03:01NL HLA-DRB3*02:01L HLA-DPA1*03:01-B1*04:02L HLA-DRB1*14:02L HLA-DRB1*12:02L HLA-DPA1*02:01-B1*13:01L HLA-DRB1*14:54L
  source 1..13: note = Severe acute respiratory syndrome coronavirus 2
REAVGTNLPLQLG

SEQ ID NO: 16009 - protein, 18 aa, Severe acute respiratory syndrome-related coronavirus
  REGION 1..18: note = Table B: HLA-DRB1*01:03L HLA-DRB1*01:01L HLA-DRB1*14:02L HLA-DPA1*01:03-B1*104:01L
  source 1..18: note = Severe acute respiratory syndrome coronavirus 2
LPLQLGFSTGVNLVAVPT

SEQ ID NO: 16010 - protein, 10 aa, Severe acute respiratory syndrome-related coronavirus
  REGION 1..10: note = Table B: HLA-DRB1*01:03L
  source 1..10: note = Severe acute respiratory syndrome coronavirus 2
FSRVSAKPPP

SEQ ID NO: 16011 - protein, 10 aa, Severe acute respiratory syndrome-related coronavirus
  REGION 1..10: note = Table B: HLA-DRB1*01:03L HLA-DQA1*03:01-B1*03:02L
  source 1..10: note = Severe acute respiratory syndrome coronavirus 2
SRVSAKPPPG

SEQ ID NO: 16012 - protein, 10 aa, Severe acute respiratory syndrome-related coronavirus
  REGION 1..10: note = Table B: HLA-DRB1*01:03L HLA-DRB1*04:05L HLA-DQA1*01:02-B1*06:02L HLA-DPA1*01:03-B1*03:01L HLA-DRB1*03:01L HLA-DRB1*14:02L HLA-DQA1*05:05-B1*03:19L HLA-DQA1*05:01-B1*02:01L HLA-DRB4*01:01L
  REGION 1..10: note = CONT. FROM ABOVE: HLA-DPA1*01:03-B1*04:01L HLA-DPA1*01:03-B1*04: 02L HLA-DPA1*02:01-B1*13:01L HLA-DPA1*03:01-B1*105:01L HLA-DRB1* 16:01L HLA-DQA1*01:03-B1*06:01L HLA-DQA1*02:01-B1*03:03L HLA-DRB 1*15:03L
  source 1..10: note = Severe acute respiratory syndrome coronavirus 2
QFKHLIPLMY

SEQ ID NO: 16013 - protein, 13 aa, Severe acute respiratory syndrome-related coronavirus
  REGION 1..13: note = Table B: HLA-DRB1*01:03L HLA-DRB1*14:01L HLA-DPA1*02:01-B1*13:01L HLA-DRB1*04:08L
  source 1..13: note = Severe acute respiratory syndrome coronavirus 2
HLIPLMYKGLPWN

SEQ ID NO: 16014 - protein, 13 aa, Severe acute respiratory syndrome-related coronavirus
  REGION 1..13: note = Table B: HLA-DRB1*01:03L HLA-DRB1*01:02L HLA-DRB1*08:04L HLA-DPA1*01:03-B1*03:01L HLA-DPA1*03:01-B1*04:02L HLA-DRB1*14:01L HLA-DQA1*05:05-B1*03:19L HLA-DPA1*01:03-B1*04:01L HLA-DPA1*01:03-B1*04:02L
  REGION 1..13: note = CONT. FROM ABOVE: HLA-DPA1*02:01-B1*13:01L HLA-DPA1*03:01-B1*105 :01L HLA-DQA1*05:05-B1*03:01L HLA-DRB1*04:08L
  source 1..13: note = Severe acute respiratory syndrome coronavirus 2
IPLMYKGLPWNVV

SEQ ID NO: 16015 - protein, 14 aa, Severe acute respiratory syndrome-related coronavirus
  REGION 1..14: note = Table B: HLA-DRB1*01:03L HLA-DRB1*04:02L HLA-DRB1*04:04L HLA-DRB1*04:05L HLA-DRB1*01:02L HLA-DRB1*14:01L HLA-DRB1*08:01L HLA-DRB1*12:01L HLA-DRB3*01:01L HLA-DRB1*16:01L HLA-DRB1*04:08L
  source 1..14: note = Severe acute respiratory syndrome coronavirus 2
VQMLSDTLKNLSDR

SEQ ID NO: 16016 - protein, 12 aa, Severe acute respiratory syndrome-related coronavirus
  REGION 1..12: note = Table B: HLA-DRB1*01:03L HLA-DPA1*01:03-B1*04:01L HLA-DPA1*01:03-B1*02:01L HLA-DRB1*04:08L
  source 1..12: note = Severe acute respiratory syndrome coronavirus 2
LWAHGFELTSMK

SEQ ID NO: 16017 - protein, 12 aa, Severe acute respiratory syndrome-related coronavirus
  REGION 1..12: note = Table B: HLA-DRB1*01:03L HLA-DQA1*01:02-B1*06:02L HLA-DRB1*16:01L HLA-DRB1*04:08L
  source 1..12: note = Severe acute respiratory syndrome coronavirus 2
SMKYFVKIGPER

SEQ ID NO: 16018 - protein, 13 aa, Severe acute respiratory syndrome-related coronavirus
  REGION 1..13: note = Table B: HLA-DRB1*01:03L HLA-DRB1*04:05L HLA-DRB1*01:02L HLA-DPA1*01:03-B1*03:01L HLA-DRB1*14:01L HLA-DQA1*05:05-B1*03:01L HLA-DRB1*04:08L
  source 1..13: note = Severe acute respiratory syndrome coronavirus 2
IGFDYVYNPFMID

SEQ ID NO: 16019 - protein, 12 aa, Severe acute respiratory syndrome-related coronavirus
  REGION 1..12: note = Table B: HLA-DRB1*01:03L HLA-DRB1*04:08L
  source 1..12: note = Severe acute respiratory syndrome coronavirus 2
AHVASCDAIMTR

SEQ ID NO: 16020 - protein, 12 aa, Severe acute respiratory syndrome-related coronavirus
  REGION 1..12: note = Table B: HLA-DRB1*01:03L HLA-DQA1*01:02-B1*06:02L HLA-DRB1*01:02L HLA-DRB1*14:01L HLA-DRB1*11:04L HLA-DRB1*11:01L HLA-DRB3*01:01L HLA-DRB1*16:01L HLA-DRB1*04:08L
  source 1..12: note = Severe acute respiratory syndrome coronavirus 2
LKINAACRKVQH

SEQ ID NO: 16021 - protein, 14 aa, Severe acute respiratory syndrome-related coronavirus
  REGION 1..14: note = Table B: HLA-DRB1*01:03L HLA-DQA1*01:02-B1*06:02L HLA-DRB1*01:02L HLA-DRB1*08:01L
  source 1..14: note = Severe acute respiratory syndrome coronavirus 2
INAACRKVQHMVVK

SEQ ID NO: 16022 - protein, 11 aa, Severe acute respiratory syndrome-related coronavirus
  REGION 1..11: note = Table B: HLA-DRB1*01:03L HLA-DRB1*01:02L HLA-DRB3*02:01L HLA-DQA1*01-B1*05L HLA-DRB1*12:01L
  source 1..11: note = Severe acute respiratory syndrome coronavirus 2
AALLADKFPVL

SEQ ID NO: 16023 - protein, 10 aa, Severe acute respiratory syndrome-related coronavirus
  REGION 1..10: note = Table B: HLA-DRB1*01:03L HLA-DPA1*03:01-B1*04:02L HLA-DPA1*03:01-B1*105:01L HLA-DPA1*01:02-B1*04:01L HLA-DRB1*16:01L HLA-DQA1*01:03-B1*06:01L HLA-DRB1*04:08L
  source 1..10: note = Severe acute respiratory syndrome coronavirus 2
LLADKFPVLH

SEQ ID NO: 16024 - protein, 11 aa, Severe acute respiratory syndrome-related coronavirus
  REGION 1..11: note = Table B: HLA-DRB1*01:03L HLA-DRB1*04:04L HLA-DRB1*04:05L HLA-DRB1*01:02L HLA-DRB4*03:01NL HLA-DRB1*04:08L
  source 1..11: note = Severe acute respiratory syndrome coronavirus 2
LHDIGNPKAIK

SEQ ID NO: 16025 - protein, 14 aa, Severe acute respiratory syndrome-related coronavirus
  REGION 1..14: note = Table B: HLA-DRB1*01:03L HLA-DRB1*01:02L
  source 1..14: note = Severe acute respiratory syndrome coronavirus 2
HDIGNPKAIKCVPQ

SEQ ID NO: 16026 - protein, 14 aa, Severe acute respiratory syndrome-related coronavirus
  REGION 1..14: note = Table B: HLA-DRB1*01:03L HLA-DRB1*04:05L HLA-DPA1*01:03-B1*03:01L HLA-DRB1*08:01L HLA-DRB1*12:01L HLA-DPA1*02:01-B1*13:01L HLA-DRB1*16:01L
  source 1..14: note = Severe acute respiratory syndrome coronavirus 2
IGNPKAIKCVPQAD

SEQ ID NO: 16027 - protein, 12 aa, Severe acute respiratory syndrome-related coronavirus
  REGION 1..12: note = Table B: HLA-DRB1*01:03L HLA-DRB1*12:01L HLA-DQA1*01:03-B1*06:01L HLA-DRB1*04:08L HLA-DQA1*02:01-B1*03:03L
  source 1..12: note = Severe acute respiratory syndrome coronavirus 2
EWKFYDAQPCSD

SEQ ID NO: 16028 - protein, 11 aa, Severe acute respiratory syndrome-related coronavirus
  REGION 1..11: note = Table B: HLA-DRB1*01:03L HLA-DRB1*04:05L HLA-DRB1*16:01L HLA-DQA1*02:01-B1*03:03L
  source 1..11: note = Severe acute respiratory syndrome coronavirus 2
RYPANSIVCRF

SEQ ID NO: 16029 - protein, 16 aa, Severe acute respiratory syndrome-related coronavirus
  REGION 1..16: note = Table B: HLA-DRB1*01:03L HLA-DRB1*04:08L
  source 1..16: note = Severe acute respiratory syndrome coronavirus 2
YPANSIVCRFDTRVLS

SEQ ID NO: 16030 - protein, 14 aa, Severe acute respiratory syndrome-related coronavirus
  REGION 1..14: note = Table B: HLA-DRB1*01:03L
  source 1..14: note = Severe acute respiratory syndrome coronavirus 2
NSIVCRFDTRVLSN

SEQ ID NO: 16031 - protein, 10 aa, Severe acute respiratory syndrome-related coronavirus
  REGION 1..10: note = Table B: HLA-DRB1*01:03L HLA-DRB1*01:02L HLA-DRB1*16:01L HLA-DRB1*15:03L
  source 1..10: note = Severe acute respiratory syndrome coronavirus 2
SLYVNKHAFH

SEQ ID NO: 16032 - protein, 13 aa, Severe acute respiratory syndrome-related coronavirus
  REGION 1..13: note = Table B: HLA-DRB1*01:03L HLA-DPA1*01:02-B1*04:01L HLA-DRB1*04:08L HLA-DRB1*15:03L
  source 1..13: note = Severe acute respiratory syndrome coronavirus 2
NKHAFHTPAFDKS

SEQ ID NO: 16033 - protein, 13 aa, Severe acute respiratory syndrome-related coronavirus
  REGION 1..13: note = Table B: HLA-DRB1*01:03L HLA-DRB1*04:05L HLA-DQA1*01:02-B1*06:02L HLA-DRB1*12:01L HLA-DPA1*02:01-B1*13:01L HLA-DPA1*03:01-B1*105:01L HLA-DPA1*01:02-B1*04:01L HLA-DRB1*04:08L HLA-DRB1*15:03L
  source 1..13: note = Severe acute respiratory syndrome coronavirus 2
KHAFHTPAFDKSA

SEQ ID NO: 16034 - protein, 10 aa, Severe acute respiratory syndrome-related coronavirus
  REGION 1..10: note = Table B: HLA-DRB1*01:03L HLA-DPA1*03:01-B1*04:02L HLA-DPA1*03:01-B1*105:01L HLA-DPA1*01:02-B1*04:01L HLA-DRB1*16:01L HLA-DQA1*01:03-B1*06:01L
  source 1..10: note = Severe acute respiratory syndrome coronavirus 2
FDKSAFVNLK

SEQ ID NO: 16035 - protein, 13 aa, Severe acute respiratory syndrome-related coronavirus
  REGION 1..13: note = Table B: HLA-DRB1*01:03L HLA-DRB1*04:04L HLA-DRB1*04:05L HLA-DQA1*01:02-B1*06:02L HLA-DRB1*01:02L HLA-DPA1*03:01-B1*04:02L HLA-DRB1*14:01L HLA-DRB1*12:01L HLA-DPA1*03:01-B1*105:01L HLA-DQA1*01:03-B1*06:01L
  REGION 1..13: note = CONT. FROM ABOVE: HLA-DRB1*04:08L HLA-DRB1*15:01L
  source 1..13: note = Severe acute respiratory syndrome coronavirus 2
LPFFYYSDSPCES

SEQ ID NO: 16036 - protein, 13 aa, Severe acute respiratory syndrome-related coronavirus
  REGION 1..13: note = Table B: HLA-DRB1*01:03L HLA-DRB1*04:05L HLA-DPA1*02:01-B1*13:01L
  source 1..13: note = Severe acute respiratory syndrome coronavirus 2
SDIDYVPLKSATC

SEQ ID NO: 16037 - protein, 12 aa, Severe acute respiratory syndrome-related coronavirus
  REGION 1..12: note = Table B: HLA-DRB1*01:03L HLA-DQA1*01:02-B1*06:02L HLA-DPA1*03:01-B1*105:01L HLA-DRB1*04:08L
  source 1..12: note = Severe acute respiratory syndrome coronavirus 2
IDYVPLKSATCI

SEQ ID NO: 16038 - protein, 11 aa, Severe acute respiratory syndrome-related coronavirus
  REGION 1..11: note = Table B: HLA-DRB1*01:03L HLA-DRB1*01:02L HLA-DQA1*03:01-B1*03:02L HLA-DQA1*02:01-B1*03:03L
  source 1..11: note = Severe acute respiratory syndrome coronavirus 2
VPLKSATCITR

SEQ ID NO: 16039 - protein, 12 aa, Severe acute respiratory syndrome-related coronavirus
  REGION 1..12: note = Table B: HLA-DRB1*01:03L HLA-DRB1*01:02L HLA-DRB1*14:01L HLA-DRB1*08:01L HLA-DRB1*12:01L HLA-DRB1*16:01L HLA-DRB1*04:08L HLA-DRB1*15:03L
  source 1..12: note = Severe acute respiratory syndrome coronavirus 2
GAVCRHHANEYR

SEQ ID NO: 16040 - protein, 13 aa, Severe acute respiratory syndrome-related coronavirus
  REGION 1..13: note = Table B: HLA-DRB1*01:03L HLA-DRB1*04:02L HLA-DRB1*04:04L HLA-DRB4*03:01NL HLA-DRB1*08:77L HLA-DRB3*02:01L HLA-DPA1*01:03-B1*03:01L HLA-DRB1*11:03L HLA-DRB1*14:02L HLA-DQA1*01-B1*05L HLA-DRB4*01:01L HLA-DRB1*04:10L
  REGION 1..13: note = CONT. FROM ABOVE: HLA-DRB1*09:01L HLA-DRB1*12:02L HLA-DQA1*03:01 -B1*03:02L HLA-DRB1*14:54L HLA-DPA1*01:03-B1*104:01L HLA-DPA1*01 :02-B1*04:01L HLA-DRB1*07:01L HLA-DRB1*10:01L HLA-DRB1*04:08L
  source 1..13: note = Severe acute respiratory syndrome coronavirus 2
LDAYNMMISAGFS

SEQ ID NO: 16041 - protein, 12 aa, Severe acute respiratory syndrome-related coronavirus
  REGION 1..12: note = Table B: HLA-DRB1*01:03L HLA-DQA1*01:02-B1*06:02L HLA-DRB1*01:02L HLA-DRB1*14:01L HLA-DQA1*05:05-B1*03:19L HLA-DPA1*03:01-B1*105:01L HLA-DRB1*16:01L HLA-DRB1*04:08L
  source 1..12: note = Severe acute respiratory syndrome coronavirus 2
ENVAFNVVNKGH

SEQ ID NO: 16042 - protein, 11 aa, Severe acute respiratory syndrome-related coronavirus
  REGION 1..11: note = Table B: HLA-DRB1*01:03L HLA-DRB1*14:17L HLA-DRB1*16:01L
  source 1..11: note = Severe acute respiratory syndrome coronavirus 2
FNVVNKGHFDG

SEQ ID NO: 16043 - protein, 13 aa, Severe acute respiratory syndrome-related coronavirus
  REGION 1..13: note = Table B: HLA-DRB1*01:03L HLA-DRB1*04:02L HLA-DQA1*01:02-B1*06:02L HLA-DRB1*01:02L HLA-DPA1*03:01-B1*105:01L HLA-DRB1*14:17L HLA-DRB1*16:01L HLA-DQA1*01:03-B1*06:01L HLA-DRB1*04:08L
  source 1..13: note = Severe acute respiratory syndrome coronavirus 2
GHFDGQQGEVPVS

SEQ ID NO: 16044 - protein, 13 aa, Severe acute respiratory syndrome-related coronavirus
  REGION 1..13: note = Table B: HLA-DRB1*01:03L HLA-DPA1*01:03-B1*03:01L HLA-DQA1*01-B1*05L HLA-DRB1*12:01L HLA-DRB1*04:08L
  source 1..13: note = Severe acute respiratory syndrome coronavirus 2
DGQQGEVPVSIIN

SEQ ID NO: 16045 - protein, 13 aa, Severe acute respiratory syndrome-related coronavirus
  REGION 1..13: note = Table B: HLA-DRB1*01:03L HLA-DRB1*04:05L HLA-DRB1*12:01L HLA-DRB1*04:08L HLA-DRB1*15:03L
  source 1..13: note = Severe acute respiratory syndrome coronavirus 2
DGVDVELFENKTT

SEQ ID NO: 16046 - protein, 14 aa, Severe acute respiratory syndrome-related coronavirus
  REGION 1..14: note = Table B: HLA-DRB1*01:03L HLA-DRB1*01:02L HLA-DRB3*01:01L
  source 1..14: note = Severe acute respiratory syndrome coronavirus 2
AFELWAKRNIKPVP

SEQ ID NO: 16047 - protein, 11 aa, Severe acute respiratory syndrome-related coronavirus
  REGION 1..11: note = Table B: HLA-DRB1*01:03L HLA-DRB1*04:05L HLA-DRB1*01:02L HLA-DRB1*08:01L HLA-DRB1*12:01L HLA-DPA1*02:01-B1*13:01L HLA-DPA1*01:02-B1*04:01L HLA-DRB1*16:01L HLA-DQA1*02:01-B1*03:03L
  source 1..11: note = Severe acute respiratory syndrome coronavirus 2
WAKRNIKPVPE

SEQ ID NO: 16048 - protein, 10 aa, Severe acute respiratory syndrome-related coronavirus
  REGION 1..10: note = Table B: HLA-DRB1*01:03L HLA-DRB1*08:01L HLA-DRB1*12:01L HLA-DQA1*03:01-B1*03:02L HLA-DRB1*16:01L HLA-DQA1*02:01-B1*03:03L
  source 1..10: note = Severe acute respiratory syndrome coronavirus 2
RNIKPVPEVK

SEQ ID NO: 16049 - protein, 11 aa, Severe acute respiratory syndrome-related coronavirus
  REGION 1..11: note = Table B: HLA-DRB1*01:03L HLA-DRB1*04:05L HLA-DRB1*04:08L
  source 1..11: note = Severe acute respiratory syndrome coronavirus 2
IWDYKRDAPAH

SEQ ID NO: 16050 - protein, 14 aa, Severe acute respiratory syndrome-related coronavirus
  REGION 1..14: note = Table B: HLA-DRB1*01:03L HLA-DRB1*04:08L
  source 1..14: note = Severe acute respiratory syndrome coronavirus 2
DLFRNARNGVLITE

SEQ ID NO: 16051 - protein, 12 aa, Severe acute respiratory syndrome-related coronavirus
  REGION 1..12: note = Table B: HLA-DRB1*01:03L HLA-DRB1*04:02L HLA-DRB1*04:05L HLA-DQA1*01:02-B1*06:02L HLA-DRB1*01:02L HLA-DRB4*03:01NL HLA-DQA1*05:05-B1*03:19L HLA-DPA1*03:01-B1*105:01L HLA-DQA1*05:05-B1*03:01L HLA-DRB1*16:01L HLA-DRB1*04:08L
  source 1..12: note = Severe acute respiratory syndrome coronavirus 2
LITEGSVKGLQP

SEQ ID NO: 16052 - protein, 13 aa, Severe acute respiratory syndrome-related coronavirus
  REGION 1..13: note = Table B: HLA-DRB1*01:03L HLA-DRB1*04:04L HLA-DRB4*03:01NL HLA-DPA1*01:03-B1*03:01L HLA-DQA1*05:01-B1*02:01L HLA-DPA1*03:01-B1*105:01L HLA-DRB1*14:54L HLA-DRB1*16:01L HLA-DQA1*01:03-B1*06:01L HLA-DRB1*04:08L HLA-DRB1*15:03L
  source 1..13: note = Severe acute respiratory syndrome coronavirus 2
EGSVKGLQPSVGP

SEQ ID NO: 16053 - protein, 15 aa, Severe acute respiratory syndrome-related coronavirus
  REGION 1..15: note = Table B: HLA-DRB1*01:03L HLA-DRB1*01:02L HLA-DRB1*04:08L
  source 1..15: note = Severe acute respiratory syndrome coronavirus 2
QPSVGPKQASLNGVT

SEQ ID NO: 16054 - protein, 18 aa, Severe acute respiratory syndrome-related coronavirus
  REGION 1..18: note = Table B: HLA-DRB1*01:03L HLA-DRB1*04:05L HLA-DRB1*14:02L HLA-DPA1*01:03-B1*04:02L HLA-DRB1*16:01L
  source 1..18: note = Severe acute respiratory syndrome coronavirus 2
GPKQASLNGVTLIGEAVK

SEQ ID NO: 16055 - protein, 12 aa, Severe acute respiratory syndrome-related coronavirus
  REGION 1..12: note = Table B: HLA-DRB1*01:03L HLA-DRB4*03:01NL HLA-DRB1*08:04L HLA-DRB1*14:01L HLA-DRB1*04:10L HLA-DRB1*14:54L HLA-DRB1*08:03L
  source 1..12: note = Severe acute respiratory syndrome coronavirus 2
ETYFTQSRNLQE

SEQ ID NO: 16056 - protein, 12 aa, Severe acute respiratory syndrome-related coronavirus
  REGION 1..12: note = Table B: HLA-DRB1*01:03L HLA-DRB1*04:05L HLA-DRB1*01:02L HLA-DPA1*03:01-B1*04:02L HLA-DRB1*14:01L HLA-DRB1*08:01L HLA-DQA1*01-B1*05L HLA-DRB1*12:01L HLA-DPA1*02:01-B1*13:01L HLA-DPA1*03:01-B1*105:01L HLA-DQA1*03:01-B1*03:02L
  REGION 1..12: note = CONT. FROM ABOVE: HLA-DPA1*01:02-B1*04:01L HLA-DRB1*16:01L HLA-D RB1*04:08L HLA-DRB1*15:03L
  source 1..12: note = Severe acute respiratory syndrome coronavirus 2
IERYKLEGYAFE

SEQ ID NO: 16057 - protein, 12 aa, Severe acute respiratory syndrome-related coronavirus
  REGION 1..12: note = Table B: HLA-DRB1*01:03L HLA-DQA1*01:02-B1*06:02L HLA-DRB1*01:02L HLA-DPA1*01:03-B1*03:01L HLA-DRB1*08:01L HLA-DPA1*01:03-B1*04:01L HLA-DPA1*01:03-B1*04:02L HLA-DRB1*12:01L HLA-DPA1*02:01-B1*13:01L
  REGION 1..12: note = CONT. FROM ABOVE: HLA-DPA1*03:01-B1*105:01L HLA-DRB1*16:01L HLA- DQA1*01:03-B1*06:01L HLA-DRB1*04:08L HLA-DQA1*02:01-B1*03:03L HL A-DRB1*15:03L
  source 1..12: note = Severe acute respiratory syndrome coronavirus 2
YKLEGYAFEHIV

SEQ ID NO: 16058 - protein, 12 aa, Severe acute respiratory syndrome-related coronavirus
  REGION 1..12: note = Table B: HLA-DRB1*01:03L HLA-DPA1*03:01-B1*04:02L HLA-DPA1*01:03-B1*04:02L HLA-DQA1*03:01-B1*03:02L HLA-DRB1*04:08L
  source 1..12: note = Severe acute respiratory syndrome coronavirus 2
LEGYAFEHIVYG

SEQ ID NO: 16059 - protein, 12 aa, Severe acute respiratory syndrome-related coronavirus
  REGION 1..12: note = Table B: HLA-DRB1*01:03L HLA-DRB1*04:08L
  source 1..12: note = Severe acute respiratory syndrome coronavirus 2
YAFEHIVYGDFS

SEQ ID NO: 16060 - protein, 12 aa, Severe acute respiratory syndrome-related coronavirus
  REGION 1..12: note = Table B: HLA-DRB1*01:03L HLA-DRB1*01:02L HLA-DRB1*12:01L HLA-DRB1*16:01L HLA-DRB1*04:08L HLA-DQA1*02:01-B1*03:03L HLA-DRB1*15:03L
  source 1..12: note = Severe acute respiratory syndrome coronavirus 2
GGLHLLIGLAKR

SEQ ID NO: 16061 - protein, 14 aa, Severe acute respiratory syndrome-related coronavirus
  REGION 1..14: note = Table B: HLA-DRB1*01:03L HLA-DRB1*04:05L HLA-DRB1*04:08L
  source 1..14: note = Severe acute respiratory syndrome coronavirus 2
GLHLLIGLAKRFKE

SEQ ID NO: 16062 - protein, 15 aa, Severe acute respiratory syndrome-related coronavirus
  REGION 1..15: note = Table B: HLA-DRB1*01:03L HLA-DRB3*01:01L HLA-DRB1*04:08L
  source 1..15: note = Severe acute respiratory syndrome coronavirus 2
LHLLIGLAKRFKESP

SEQ ID NO: 16063 - protein, 13 aa, Severe acute respiratory syndrome-related coronavirus
  REGION 1..13: note = Table B: HLA-DRB1*01:03L HLA-DRB1*04:05L HLA-DQA1*01:02-B1*06:02L HLA-DRB1*14:01L HLA-DRB1*08:01L HLA-DQA1*01-B1*05L HLA-DPA1*02:01-B1*13:01L HLA-DQA1*03:01-B1*03:02L HLA-DPA1*01:02-B1*04:01L
  REGION 1..13: note = CONT. FROM ABOVE: HLA-DRB1*16:01L HLA-DRB1*04:08L HLA-DQA1*02:01 -B1*03:03L
  source 1..13: note = Severe acute respiratory syndrome coronavirus 2
IGLAKRFKESPFE

SEQ ID NO: 16064 - protein, 12 aa, Severe acute respiratory syndrome-related coronavirus
  REGION 1..12: note = Table B: HLA-DRB1*01:03L HLA-DRB1*01:02L HLA-DPA1*03:01-B1*04:02L HLA-DRB1*08:01L HLA-DPA1*01:03-B1*04:01L HLA-DRB1*12:01L HLA-DPA1*02:01-B1*13:01L HLA-DPA1*03:01-B1*105:01L
  REGION 1..12: note = CONT. FROM ABOVE: HLA-DRB1*04:08L HLA-DRB1*15:03L
  source 1..12: note = Severe acute respiratory syndrome coronavirus 2
AKRFKESPFELE

SEQ ID NO: 16065 - protein, 12 aa, Severe acute respiratory syndrome-related coronavirus
  REGION 1..12: note = Table B: HLA-DRB1*01:03L HLA-DPA1*03:01-B1*04:02L HLA-DRB1*08:01L HLA-DRB1*04:08L
  source 1..12: note = Severe acute respiratory syndrome coronavirus 2
KRFKESPFELED

SEQ ID NO: 16066 - protein, 11 aa, Severe acute respiratory syndrome-related coronavirus
  REGION 1..11: note = Table B: HLA-DRB1*01:03L HLA-DRB1*01:02L HLA-DPA1*01:03-B1*03:01L HLA-DRB1*08:01L HLA-DQA1*01-B1*05L HLA-DQA1*05:01-B1*02:01L HLA-DPA1*01:03-B1*04:01L HLA-DPA1*01:03-B1*04:02L HLA-DRB1*12:01L
  REGION 1..11: note = CONT. FROM ABOVE: HLA-DPA1*03:01-B1*105:01L HLA-DRB1*16:01L HLA- DQA1*01:03-B1*06:01L HLA-DRB1*04:08L HLA-DRB1*15:03L
  source 1..11: note = Severe acute respiratory syndrome coronavirus 2
SPFELEDFIPM

SEQ ID NO: 16067 - protein, 12 aa, Severe acute respiratory syndrome-related coronavirus
  REGION 1..12: note = Table B: HLA-DRB1*01:03L HLA-DPA1*01:03-B1*02:01L
  source 1..12: note = Severe acute respiratory syndrome coronavirus 2
PFELEDFIPMDS

SEQ ID NO: 16068 - protein, 12 aa, Severe acute respiratory syndrome-related coronavirus
  REGION 1..12: note = Table B: HLA-DRB1*01:03L HLA-DRB1*16:01L HLA-DQA1*01:03-B1*06:01L HLA-DRB1*04:08L
  source 1..12: note = Severe acute respiratory syndrome coronavirus 2
FELEDFIPMDST

SEQ ID NO: 16069 - protein, 11 aa, Severe acute respiratory syndrome-related coronavirus
  REGION 1..11: note = Table B: HLA-DRB1*01:03L HLA-DQA1*01:02-B1*06:02L HLA-DPA1*01:03-B1*03:01L HLA-DRB1*12:01L HLA-DPA1*01:03-B1*02:01L HLA-DRB1*04:08L HLA-DRB1*15:03L
  source 1..11: note = Severe acute respiratory syndrome coronavirus 2
LLLDDFVEIIK

SEQ ID NO: 16070 - protein, 11 aa, Severe acute respiratory syndrome-related coronavirus
  REGION 1..11: note = Table B: HLA-DRB1*01:03L HLA-DRB1*04:04L HLA-DRB1*08:04L HLA-DPA1*01:03-B1*03:01L HLA-DQA1*05:05-B1*03:19L HLA-DPA1*02:01-B1*13:01L HLA-DQA1*05:05-B1*03:01L HLA-DRB1*04:08L HLA-DRB1*08:03L
  source 1..11: note = Severe acute respiratory syndrome coronavirus 2
FVEIIKSQDLS

SEQ ID NO: 16071 - protein, 14 aa, Severe acute respiratory syndrome-related coronavirus
  REGION 1..14: note = Table B: HLA-DRB1*01:03L HLA-DRB1*16:01L
  source 1..14: note = Severe acute respiratory syndrome coronavirus 2
YTEISFMLWCKDGH

SEQ ID NO: 16072 - protein, 13 aa, Severe acute respiratory syndrome-related coronavirus
  REGION 1..13: note = Table B: HLA-DRB1*01:03L HLA-DRB1*04:05L HLA-DRB1*01:02L HLA-DRB1*08:04L HLA-DRB1*14:01L HLA-DRB1*08:01L HLA-DQA1*01-B1*05L HLA-DQA1*05:01-B1*02:01L HLA-DPA1*01:03-B1*04:01L HLA-DPA1*01:03-B1*04:02L
  REGION 1..13: note = CONT. FROM ABOVE: HLA-DRB1*12:01L HLA-DPA1*02:01-B1*13:01L HLA-D RB1*16:01L HLA-DQA1*01:03-B1*06:01L HLA-DRB1*04:08L HLA-DQA1*02: 01-B1*03:03L
  source 1..13: note = Severe acute respiratory syndrome coronavirus 2
ISFMLWCKDGHVE

SEQ ID NO: 16073 - protein, 13 aa, Severe acute respiratory syndrome-related coronavirus
  REGION 1..13: note = Table B: HLA-DRB1*01:03L HLA-DRB1*04:08L
  source 1..13: note = Severe acute respiratory syndrome coronavirus 2
SQAWQPGVAMPNL

SEQ ID NO: 16074 - protein, 12 aa, Severe acute respiratory syndrome-related coronavirus
  REGION 1..12: note = Table B: HLA-DRB1*01:03L HLA-DRB1*04:02L HLA-DRB1*01:02L HLA-DRB1*08:01L HLA-DRB1*11:01L HLA-DQA1*05:05-B1*03:116L HLA-DPA1*01:03-B1*04:02L HLA-DRB1*12:01L HLA-DRB1*04:08L
  source 1..12: note = Severe acute respiratory syndrome coronavirus 2
WQPGVAMPNLYK

SEQ ID NO: 16075 - protein, 11 aa, Severe acute respiratory syndrome-related coronavirus
  REGION 1..11: note = Table B: HLA-DRB1*01:03L HLA-DRB1*08:01L HLA-DRB1*16:01L HLA-DRB1*04:08L
  source 1..11: note = Severe acute respiratory syndrome coronavirus 2
LYKMQRMLLEK

SEQ ID NO: 16076 - protein, 14 aa, Severe acute respiratory syndrome-related coronavirus
  REGION 1..14: note = Table B: HLA-DRB1*01:03L HLA-DRB1*01:02L HLA-DRB1*08:01L HLA-DRB1*04:08L
  source 1..14: note = Severe acute respiratory syndrome coronavirus 2
QRMLLEKCDLQNYG

SEQ ID NO: 16077 - protein, 11 aa, Severe acute respiratory syndrome-related coronavirus
  REGION 1..11: note = Table B: HLA-DRB1*01:03L HLA-DRB1*04:05L HLA-DRB3*02:01L HLA-DPA1*01:03-B1*03:01L HLA-DRB1*08:01L HLA-DQA1*05:05-B1*03:116L HLA-DRB1*09:01L HLA-DPA1*02:01-B1*13:01L HLA-DPA1*01:03-B1*104:01L
  REGION 1..11: note = CONT. FROM ABOVE: HLA-DQA1*05:05-B1*03:01L HLA-DRB1*04:08L HLA-D RB1*08:03L
  source 1..11: note = Severe acute respiratory syndrome coronavirus 2
IMMNVAKYTQL

SEQ ID NO: 16078 - protein, 13 aa, Severe acute respiratory syndrome-related coronavirus
  REGION 1..13: note = Table B: HLA-DRB1*01:03L HLA-DRB1*04:05L HLA-DRB1*01:02L HLA-DRB1*08:04L HLA-DPA1*01:03-B1*04:01L HLA-DPA1*01:03-B1*04:02L HLA-DRB1*12:01L HLA-DPA1*02:01-B1*13:01L HLA-DPA1*01:03-B1*104:01L
  REGION 1..13: note = CONT. FROM ABOVE: HLA-DRB1*16:01L HLA-DRB1*04:08L HLA-DRB1*15:03 L
  source 1..13: note = Severe acute respiratory syndrome coronavirus 2
NVAKYTQLCQYLN

SEQ ID NO: 16079 - protein, 15 aa, Severe acute respiratory syndrome-related coronavirus
  REGION 1..15: note = Table B: HLA-DRB1*01:03L HLA-DRB1*04:05L HLA-DRB1*04:08L
  source 1..15: note = Severe acute respiratory syndrome coronavirus 2
NTLTLAVPYNMRVIH

SEQ ID NO: 16080 - protein, 13 aa, Severe acute respiratory syndrome-related coronavirus
  REGION 1..13: note = Table B: HLA-DRB1*01:03L HLA-DRB4*03:01NL
  source 1..13: note = Severe acute respiratory syndrome coronavirus 2
TGTLLVDSDLNDF

SEQ ID NO: 16081 - protein, 14 aa, Severe acute respiratory syndrome-related coronavirus
  REGION 1..14: note = Table B: HLA-DRB1*01:03L HLA-DRB1*04:05L HLA-DRB1*01:02L HLA-DPA1*01:03-B1*03:01L HLA-DRB1*12:01L HLA-DRB1*15:03L
  source 1..14: note = Severe acute respiratory syndrome coronavirus 2
ADSTLIGDCATVHT

SEQ ID NO: 16082 - protein, 14 aa, Severe acute respiratory syndrome-related coronavirus
  REGION 1..14: note = Table B: HLA-DRB1*01:03L HLA-DRB1*04:04L HLA-DRB1*04:05L HLA-DRB1*01:02L HLA-DRB1*08:04L HLA-DPA1*01:03-B1*03:01L HLA-DRB1*14:01L HLA-DQA1*05:01-B1*02:01L HLA-DRB1*04:10L HLA-DRB1*12:01L HLA-DRB1*14:17L HLA-DRB1*16:01L HLA-DRB1*04:08L
  REGION 1..14: note = CONT. FROM ABOVE: HLA-DRB1*15:03L
  source 1..14: note = Severe acute respiratory syndrome coronavirus 2
STLIGDCATVHTAN

SEQ ID NO: 16083 - protein, 14 aa, Severe acute respiratory syndrome-related coronavirus
  REGION 1..14: note = Table B: HLA-DRB1*01:03L HLA-DRB1*01:02L HLA-DQA1*01:01-B1*05:01L HLA-DRB1*12:01L HLA-DPA1*02:01-B1*13:01L HLA-DRB1*16:01L HLA-DQA1*01:03-B1*06:01L HLA-DRB1*04:08L
  source 1..14: note = Severe acute respiratory syndrome coronavirus 2
DPKTKNVTKENDSK

SEQ ID NO: 16084 - protein, 13 aa, Severe acute respiratory syndrome-related coronavirus
  REGION 1..13: note = Table B: HLA-DRB1*01:03L HLA-DPA1*01:03-B1*04:02L HLA-DRB1*12:01L HLA-DRB1*16:01L HLA-DRB1*04:08L
  source 1..13: note = Severe acute respiratory syndrome coronavirus 2
GFFTYICGFIQQK

SEQ ID NO: 16085 - protein, 11 aa, Severe acute respiratory syndrome-related coronavirus
  REGION 1..11: note = Table B: HLA-DRB1*01:03L HLA-DRB1*04:02L HLA-DRB1*14:17L HLA-DRB1*16:01L
  source 1..11: note = Severe acute respiratory syndrome coronavirus 2
FIQQKLALGGS

SEQ ID NO: 16086 - protein, 12 aa, Severe acute respiratory syndrome-related coronavirus
  REGION 1..12: note = Table B: HLA-DRB1*01:03L HLA-DRB1*01:02L HLA-DRB1*08:01L HLA-DRB1*04:08L
  source 1..12: note = Severe acute respiratory syndrome coronavirus 2
LGGSVAIKITEH

SEQ ID NO: 16087 - protein, 10 aa, Severe acute respiratory syndrome-related coronavirus
  REGION 1..10: note = Table B: HLA-DRB1*01:03L HLA-DQA1*01:02-B1*06:02L HLA-DRB1*14:02L HLA-DQA1*05:05-B1*03:19L HLA-DQA1*05:01-B1*02:01L HLA-DPA1*01:03-B1*04:01L HLA-DPA1*02:01-B1*13:01L HLA-DPA1*03:01-B1*105:01L
  REGION 1..10: note = CONT. FROM ABOVE: HLA-DQA1*01:03-B1*06:01L HLA-DQA1*02:01-B1*03: 03L HLA-DRB1*15:03L
  source 1..10: note = Severe acute respiratory syndrome coronavirus 2
VAIKITEHSW

SEQ ID NO: 16088 - protein, 12 aa, Severe acute respiratory syndrome-related coronavirus
  REGION 1..12: note = Table B: HLA-DRB1*01:03L HLA-DRB1*01:02L HLA-DPA1*01:03-B1*03:01L HLA-DRB1*14:02L HLA-DPA1*02:01-B1*13:01L HLA-DRB1*04:08L
  source 1..12: note = Severe acute respiratory syndrome coronavirus 2
EHSWNADLYKLM

SEQ ID NO: 16089 - protein, 13 aa, Severe acute respiratory syndrome-related coronavirus
  REGION 1..13: note = Table B: HLA-DRB1*01:03L HLA-DPA1*01:03-B1*02:01L
  source 1..13: note = Severe acute respiratory syndrome coronavirus 2
HSWNADLYKLMGH

SEQ ID NO: 16090 - protein, 13 aa, Severe acute respiratory syndrome-related coronavirus
  REGION 1..13: note = Table B: HLA-DRB1*01:03L HLA-DRB1*04:05L HLA-DRB1*01:02L HLA-DRB1*11:03L HLA-DQA1*01:01-B1*05:01L HLA-DRB1*04:10L HLA-DRB1*09:01L HLA-DPA1*01:02-B1*04:01L
  source 1..13: note = Severe acute respiratory syndrome coronavirus 2
VTNVNASSSEAFL

SEQ ID NO: 16091 - protein, 14 aa, Severe acute respiratory syndrome-related coronavirus
  REGION 1..14: note = Table B: HLA-DRB1*01:03L HLA-DRB1*04:04L HLA-DRB1*08:04L HLA-DRB1*12:01L HLA-DQA1*05:05-B1*03:01L
  source 1..14: note = Severe acute respiratory syndrome coronavirus 2
SEAFLIGCNYLGKP

SEQ ID NO: 16092 - protein, 12 aa, Severe acute respiratory syndrome-related coronavirus
  REGION 1..12: note = Table B: HLA-DRB1*01:03L HLA-DRB1*01:02L HLA-DPA1*03:01-B1*105:01L HLA-DRB1*16:01L HLA-DRB1*04:08L
  source 1..12: note = Severe acute respiratory syndrome coronavirus 2
FLIGCNYLGKPR

SEQ ID NO: 16093 - protein, 13 aa, Severe acute respiratory syndrome-related coronavirus
  REGION 1..13: note = Table B: HLA-DRB1*01:03L HLA-DRB1*04:05L HLA-DQA1*01:02-B1*06:02L HLA-DRB1*01:02L HLA-DRB1*14:01L HLA-DRB1*08:01L HLA-DRB1*12:01L HLA-DRB1*14:17L HLA-DRB1*04:08L
  source 1..13: note = Severe acute respiratory syndrome coronavirus 2
HANYIFWRNTNPI

SEQ ID NO: 16094 - protein, 14 aa, Severe acute respiratory syndrome-related coronavirus
  REGION 1..14: note = Table B: HLA-DRB1*01:03L HLA-DRB1*04:08L
  source 1..14: note = Severe acute respiratory syndrome coronavirus 2
LKLRGTAVMSLKEG

SEQ ID NO: 16095 - protein, 14 aa, Severe acute respiratory syndrome-related coronavirus
  REGION 1..14: note = Table B: HLA-DRB1*01:03L HLA-DRB1*12:01L HLA-DRB1*04:08L
  source 1..14: note = Severe acute respiratory syndrome coronavirus 2
KLRGTAVMSLKEGQ

SEQ ID NO: 16096 - protein, 12 aa, Severe acute respiratory syndrome-related coronavirus
  REGION 1..12: note = Table B: HLA-DRB1*01:03L HLA-DRB1*08:04L HLA-DPA1*01:03-B1*03:01L HLA-DRB1*11:03L HLA-DRB1*14:02L HLA-DRB1*09:01L HLA-DPA1*02:01-B1*13:01L
  source 1..12: note = Severe acute respiratory syndrome coronavirus 2
TAVMSLKEGQIN

SEQ ID NO: 16097 - protein, 11 aa, Severe acute respiratory syndrome-related coronavirus
  REGION 1..11: note = Table B: HLA-DRB1*01:03L HLA-DRB1*01:02L HLA-DRB4*03:01NL
  source 1..11: note = Severe acute respiratory syndrome coronavirus 2
VMSLKEGQIND

SEQ ID NO: 16098 - protein, 10 aa, Severe acute respiratory syndrome-related coronavirus
  REGION 1..10: note = Table B: HLA-DRB1*01:03L HLA-DRB1*14:01L HLA-DRB1*16:01L
  source 1..10: note = Severe acute respiratory syndrome coronavirus 2
LLSKGRLIIR

SEQ ID NO: 16099 - protein, 12 aa, Severe acute respiratory syndrome-related coronavirus
  REGION 1..12: note = Table B: HLA-DRB1*01:03L HLA-DRB1*01:02L HLA-DRB1*12:01L HLA-DRB1*16:01L HLA-DRB1*04:08L
  source 1..12: note = Severe acute respiratory syndrome coronavirus 2
KGRLIIRENNRV

SEQ ID NO: 16100 - protein, 11 aa, Severe acute respiratory syndrome-related coronavirus
  REGION 1..11: note = Table B: HLA-DRB1*01:03L HLA-DPA1*01:02-B1*04:01L
  source 1..11: note = Severe acute respiratory syndrome coronavirus 2
RGVYYPDKVFR

SEQ ID NO: 16101 - protein, 13 aa, Severe acute respiratory syndrome-related coronavirus
  REGION 1..13: note = Table B: HLA-DRB1*01:03L HLA-DPA1*01:03-B1*04:01L HLA-DPA1*01:03-B1*04:02L HLA-DPA1*01:03-B1*02:01L HLA-DRB1*16:01L HLA-DRB1*04:08L
  source 1..13: note = Severe acute respiratory syndrome coronavirus 2
PFFSNVTWFHAIH

SEQ ID NO: 16102 - protein, 11 aa, Severe acute respiratory syndrome-related coronavirus
  REGION 1..11: note = Table B: HLA-DRB1*01:03L HLA-DQA1*01:02-B1*06:02L
  source 1..11: note = Severe acute respiratory syndrome coronavirus 2
HVSGTNGTKRF

SEQ ID NO: 16103 - protein, 14 aa, Severe acute respiratory syndrome-related coronavirus
  REGION 1..14: note = Table B: HLA-DRB1*01:03L HLA-DRB1*04:04L
  source 1..14: note = Severe acute respiratory syndrome coronavirus 2
NGTKRFDNPVLPFN

SEQ ID NO: 16104 - protein, 11 aa, Severe acute respiratory syndrome-related coronavirus
  REGION 1..11: note = Table B: HLA-DRB1*01:03L HLA-DRB1*04:02L HLA-DRB4*03:01NL HLA-DRB1*14:01L HLA-DQA1*05:05-B1*03:116L HLA-DQA1*05:05-B1*03:01L HLA-DPA1*01:02-B1*04:01L HLA-DRB1*10:01L
  source 1..11: note = Severe acute respiratory syndrome coronavirus 2
NPVLPFNDGVY

SEQ ID NO: 16105 - protein, 13 aa, Severe acute respiratory syndrome-related coronavirus
  REGION 1..13: note = Table B: HLA-DRB1*01:03L HLA-DRB1*08:04L HLA-DRB1*14:02L HLA-DPA1*02:01-B1*13:01L
  source 1..13: note = Severe acute respiratory syndrome coronavirus 2
SNIIRGWIFGTTL

SEQ ID NO: 16106 - protein, 11 aa, Severe acute respiratory syndrome-related coronavirus
  REGION 1..11: note = Table B: HLA-DRB1*01:03L HLA-DRB1*04:05L HLA-DQA1*01-B1*05L HLA-DRB1*04:10L HLA-DRB1*12:02L HLA-DRB1*14:54L
  source 1..11: note = Severe acute respiratory syndrome coronavirus 2
LLIVNNATNVV

SEQ ID NO: 16107 - protein, 11 aa, Severe acute respiratory syndrome-related coronavirus
  REGION 1..11: note = Table B: HLA-DRB1*01:03L HLA-DQA1*01:02-B1*06:02L HLA-DPA1*01:03-B1*03:01L HLA-DRB1*11:03L HLA-DQA1*01-B1*05L HLA-DRB1*14:54L
  source 1..11: note = Severe acute respiratory syndrome coronavirus 2
LIVNNATNVVI

SEQ ID NO: 16108 - protein, 14 aa, Severe acute respiratory syndrome-related coronavirus
  REGION 1..14: note = Table B: HLA-DRB1*01:03L HLA-DRB1*01:02L HLA-DRB1*08:04L HLA-DPA1*01:03-B1*04:01L HLA-DPA1*01:03-B1*02:01L HLA-DRB1*16:01L HLA-DRB1*04:08L
  source 1..14: note = Severe acute respiratory syndrome coronavirus 2
VVIKVCEFQFCNDP

SEQ ID NO: 16109 - protein, 14 aa, Severe acute respiratory syndrome-related coronavirus
  REGION 1..14: note = Table B: HLA-DRB1*01:03L HLA-DPA1*01:03-B1*04:01L HLA-DPA1*01:03-B1*02:01L HLA-DRB1*16:01L HLA-DRB1*04:08L HLA-DRB1*15:03L
  source 1..14: note = Severe acute respiratory syndrome coronavirus 2
VIKVCEFQFCNDPF

SEQ ID NO: 16110 - protein, 14 aa, Severe acute respiratory syndrome-related coronavirus
  REGION 1..14: note = Table B: HLA-DRB1*01:03L HLA-DRB1*01:02L HLA-DRB1*12:01L HLA-DPA1*01:03-B1*02:01L
  source 1..14: note = Severe acute respiratory syndrome coronavirus 2
FQFCNDPFLGVYYH

SEQ ID NO: 16111 - protein, 11 aa, Severe acute respiratory syndrome-related coronavirus
  REGION 1..11: note = Table B: HLA-DRB1*01:03L HLA-DPA1*03:01-B1*04:02L HLA-DRB1*08:01L HLA-DPA1*01:03-B1*04:01L HLA-DPA1*01:03-B1*04:02L HLA-DPA1*03:01-B1*105:01L HLA-DRB1*16:01L HLA-DQA1*01:03-B1*06:01L HLA-DRB1*04:08L
  source 1..11: note = Severe acute respiratory syndrome coronavirus 2
DPFLGVYYHKN

SEQ ID NO: 16112 - protein, 12 aa, Severe acute respiratory syndrome-related coronavirus
  REGION 1..12: note = Table B: HLA-DRB1*01:03L HLA-DQA1*01:02-B1*06:02L HLA-DRB1*01:02L HLA-DRB1*11:04L HLA-DRB1*08:01L HLA-DRB1*11:01L HLA-DRB1*12:01L HLA-DPA1*01:03-B1*02:01L
  source 1..12: note = Severe acute respiratory syndrome coronavirus 2
PFLGVYYHKNNK

SEQ ID NO: 16113 - protein, 12 aa, Severe acute respiratory syndrome-related coronavirus
  REGION 1..12: note = Table B: HLA-DRB1*01:03L HLA-DRB1*16:01L HLA-DRB1*04:08L
  source 1..12: note = Severe acute respiratory syndrome coronavirus 2
FLGVYYHKNNKS

SEQ ID NO: 16114 - protein, 14 aa, Severe acute respiratory syndrome-related coronavirus
  REGION 1..14: note = Table B: HLA-DRB1*01:03L HLA-DRB1*04:05L HLA-DRB1*08:01L HLA-DRB1*12:01L HLA-DPA1*03:01-B1*105:01L HLA-DPA1*01:02-B1*04:01L HLA-DRB1*15:03L
  source 1..14: note = Severe acute respiratory syndrome coronavirus 2
YHKNNKSWMESEFR

SEQ ID NO: 16115 - protein, 12 aa, Severe acute respiratory syndrome-related coronavirus
  REGION 1..12: note = Table B: HLA-DRB1*01:03L HLA-DRB1*04:05L HLA-DRB1*01:02L HLA-DPA1*01:03-B1*03:01L HLA-DRB1*12:01L HLA-DPA1*02:01-B1*13:01L HLA-DPA1*03:01-B1*105:01L HLA-DRB1*16:01L HLA-DRB1*04:08L HLA-DQA1*02:01-B1*03:03L
  REGION 1..12: note = CONT. FROM ABOVE: HLA-DRB1*15:03L
  source 1..12: note = Severe acute respiratory syndrome coronavirus 2
EFRVYSSANNCT

SEQ ID NO: 16116 - protein, 12 aa, Severe acute respiratory syndrome-related coronavirus
  REGION 1..12: note = Table B: HLA-DRB1*01:03L HLA-DPA1*01:03-B1*03:01L
  source 1..12: note = Severe acute respiratory syndrome coronavirus 2
FEYVSQPFLMDL

SEQ ID NO: 16117 - protein, 11 aa, Severe acute respiratory syndrome-related coronavirus
  REGION 1..11: note = Table B: HLA-DRB1*01:03L HLA-DPA1*01:03-B1*03:01L HLA-DRB1*12:01L
  source 1..11: note = Severe acute respiratory syndrome coronavirus 2
YVSQPFLMDLE

SEQ ID NO: 16118 - protein, 12 aa, Severe acute respiratory syndrome-related coronavirus
  REGION 1..12: note = Table B: HLA-DRB1*01:03L HLA-DRB1*01:02L HLA-DQA1*05:01-B1*02:01L HLA-DRB1*16:01L HLA-DRB1*04:08L HLA-DQA1*02:01-B1*03:03L
  source 1..12: note = Severe acute respiratory syndrome coronavirus 2
PFLMDLEGKQGN

SEQ ID NO: 16119 - protein, 13 aa, Severe acute respiratory syndrome-related coronavirus
  REGION 1..13: note = Table B: HLA-DRB1*01:03L HLA-DRB1*04:05L HLA-DRB1*01:02L HLA-DRB1*12:01L HLA-DPA1*02:01-B1*13:01L HLA-DPA1*03:01-B1*105:01L HLA-DRB1*15:03L
  source 1..13: note = Severe acute respiratory syndrome coronavirus 2
KNLREFVFKNIDG

SEQ ID NO: 16120 - protein, 10 aa, Severe acute respiratory syndrome-related coronavirus
  REGION 1..10: note = Table B: HLA-DRB1*01:03L HLA-DQA1*01:02-B1*06:02L HLA-DPA1*01:03-B1*03:01L HLA-DRB1*03:01L HLA-DRB1*14:02L HLA-DQA1*05:05-B1*03:19L HLA-DQA1*05:01-B1*02:01L HLA-DPA1*01:03-B1*104:01L HLA-DRB1*16:01L
  REGION 1..10: note = CONT. FROM ABOVE: HLA-DQA1*02:01-B1*03:03L
  source 1..10: note = Severe acute respiratory syndrome coronavirus 2
KNIDGYFKIY

SEQ ID NO: 16121 - protein, 10 aa, Severe acute respiratory syndrome-related coronavirus
  REGION 1..10: note = Table B: HLA-DRB1*01:03L HLA-DRB1*14:01L HLA-DRB1*08:01L HLA-DQA1*03:01-B1*03:02L HLA-DRB1*16:01L HLA-DQA1*02:01-B1*03:03L
  source 1..10: note = Severe acute respiratory syndrome coronavirus 2
KIYSKHTPIN

SEQ ID NO: 16122 - protein, 10 aa, Severe acute respiratory syndrome-related coronavirus
  REGION 1..10: note = Table B: HLA-DRB1*01:03L HLA-DQA1*01:02-B1*06:02L HLA-DRB1*14:02L HLA-DPA1*02:01-B1*13:01L HLA-DPA1*03:01-B1*105:01L HLA-DQA1*01:03-B1*06:01L HLA-DQA1*02:01-B1*03:03L HLA-DRB1*15:03L
  source 1..10: note = Severe acute respiratory syndrome coronavirus 2
NLVRDLPQGF

SEQ ID NO: 16123 - protein, 10 aa, Severe acute respiratory syndrome-related coronavirus
  REGION 1..10: note = Table B: HLA-DRB1*01:03L HLA-DQA1*01:02-B1*06:02L HLA-DPA1*03:01-B1*04:02L HLA-DQA1*01-B1*05L HLA-DPA1*01:03-B1*04:01L HLA-DPA1*01:03-B1*04:02L HLA-DRB1*12:01L HLA-DPA1*03:01-B1*105:01L
  REGION 1..10: note = CONT. FROM ABOVE: HLA-DPA1*01:02-B1*04:01L HLA-DRB1*16:01L HLA-D QA1*01:03-B1*06:01L HLA-DRB1*04:08L HLA-DQA1*02:01-B1*03:03L HLA -DRB1*15:03L
  source 1..10: note = Severe acute respiratory syndrome coronavirus 2
INITRFQTLL

SEQ ID NO: 16124 - protein, 11 aa, Severe acute respiratory syndrome-related coronavirus
  REGION 1..11: note = Table B: HLA-DRB1*01:03L HLA-DRB1*04:05L HLA-DRB1*01:02L HLA-DRB1*08:01L HLA-DRB1*04:08L
  source 1..11: note = Severe acute respiratory syndrome coronavirus 2
TRFQTLLALHR

SEQ ID NO: 16125 - protein, 12 aa, Severe acute respiratory syndrome-related coronavirus
  REGION 1..12: note = Table B: HLA-DRB1*01:03L HLA-DPA1*03:01-B1*105:01L HLA-DRB1*04:08L HLA-DRB1*15:03L
  source 1..12: note = Severe acute respiratory syndrome coronavirus 2
RFQTLLALHRSY

SEQ ID NO: 16126 - protein, 12 aa, Severe acute respiratory syndrome-related coronavirus
  REGION 1..12: note = Table B: HLA-DRB1*01:03L HLA-DRB1*01:02L HLA-DRB1*14:01L HLA-DRB1*12:01L HLA-DRB1*16:01L HLA-DRB1*15:03L
  source 1..12: note = Severe acute respiratory syndrome coronavirus 2
LLALHRSYLTPG

SEQ ID NO: 16127 - protein, 14 aa, Severe acute respiratory syndrome-related coronavirus
  REGION 1..14: note = Table B: HLA-DRB1*01:03L HLA-DRB1*01:02L HLA-DQA1*01:01-B1*05:01L HLA-DQA1*05:05-B1*03:116L HLA-DRB1*04:08L
  source 1..14: note = Severe acute respiratory syndrome coronavirus 2
DSSSGWTAGAAAYY

SEQ ID NO: 16128 - protein, 12 aa, Severe acute respiratory syndrome-related coronavirus
  REGION 1..12: note = Table B: HLA-DRB1*01:03L HLA-DRB1*04:05L HLA-DRB1*08:01L HLA-DRB1*04:08L
  source 1..12: note = Severe acute respiratory syndrome coronavirus 2
VGYLQPRTFLLK

SEQ ID NO: 16129 - protein, 10 aa, Severe acute respiratory syndrome-related coronavirus
  REGION 1..10: note = Table B: HLA-DRB1*01:03L HLA-DQA1*01:02-B1*06:02L HLA-DRB1*03:01L HLA-DQA1*05:05-B1*03:19L HLA-DQA1*05:01-B1*02:01L HLA-DQA1*02:01-B1*03:03L
  source 1..10: note = Severe acute respiratory syndrome coronavirus 2
LQPRTFLLKY

SEQ ID NO: 16130 - protein, 10 aa, Severe acute respiratory syndrome-related coronavirus
  REGION 1..10: note = Table B: HLA-DRB1*01:03L HLA-DQA1*01:02-B1*06:02L HLA-DRB1*03:01L HLA-DRB1*14:02L HLA-DQA1*05:05-B1*03:19L HLA-DQA1*05:01-B1*02:01L HLA-DQA1*01:03-B1*06:01L HLA-DQA1*02:01-B1*03:03L
  source 1..10: note = Severe acute respiratory syndrome coronavirus 2
KSFTVEKGIY

SEQ ID NO: 16131 - protein, 12 aa, Severe acute respiratory syndrome-related coronavirus
  REGION 1..12: note = Table B: HLA-DRB1*01:03L HLA-DRB1*01:01L HLA-DRB1*01:02L HLA-DPA1*03:01-B1*105:01L HLA-DRB1*10:01L HLA-DRB1*04:08L HLA-DRB1*15:03L
  source 1..12: note = Severe acute respiratory syndrome coronavirus 2
SFTVEKGIYQTS

SEQ ID NO: 16132 - protein, 10 aa, Severe acute respiratory syndrome-related coronavirus
  REGION 1..10: note = Table B: HLA-DRB1*01:03L HLA-DQA1*01:02-B1*06:02L HLA-DRB1*14:02L HLA-DPA1*02:01-B1*13:01L HLA-DPA1*03:01-B1*105:01L HLA-DQA1*01:03-B1*06:01L HLA-DQA1*02:01-B1*03:03L HLA-DRB1*15:03L
  source 1..10: note = Severe acute respiratory syndrome coronavirus 2
VQPTESIVRF

SEQ ID NO: 16133 - protein, 11 aa, Severe acute respiratory syndrome-related coronavirus
  REGION 1..11: note = Table B: HLA-DRB1*01:03L HLA-DRB1*01:02L HLA-DRB1*16:01L HLA-DRB1*04:08L HLA-DQA1*02:01-B1*03:03L HLA-DRB1*15:03L
  source 1..11: note = Severe acute respiratory syndrome coronavirus 2
RFASVYAWNRK

SEQ ID NO: 16134 - protein, 10 aa, Severe acute respiratory syndrome-related coronavirus
  REGION 1..10: note = Table B: HLA-DRB1*01:03L HLA-DQA1*03:01-B1*03:02L
  source 1..10: note = Severe acute respiratory syndrome coronavirus 2
ASVYAWNRKR

SEQ ID NO: 16135 - protein, 10 aa, Severe acute respiratory syndrome-related coronavirus
  REGION 1..10: note = Table B: HLA-DRB1*01:03L HLA-DRB1*08:01L
  source 1..10: note = Severe acute respiratory syndrome coronavirus 2
YAWNRKRISN

SEQ ID NO: 16136 - protein, 12 aa, Severe acute respiratory syndrome-related coronavirus
  REGION 1..12: note = Table B: HLA-DRB1*01:03L HLA-DRB1*01:02L HLA-DRB1*14:01L HLA-DQA1*01-B1*05L HLA-DQA1*05:01-B1*02:01L HLA-DRB1*12:01L HLA-DQA1*03:01-B1*03:02L HLA-DRB1*14:54L HLA-DQA1*05:05-B1*03:01L HLA-DRB1*10:01L HLA-DRB1*15:03L
  source 1..12: note = Severe acute respiratory syndrome coronavirus 2
YSVLYNSASFST

SEQ ID NO: 16137 - protein, 12 aa, Severe acute respiratory syndrome-related coronavirus
  REGION 1..12: note = Table B: HLA-DRB1*01:03L HLA-DRB1*04:05L HLA-DQA1*01:02-B1*06:02L HLA-DRB1*01:02L HLA-DRB1*08:01L HLA-DRB1*12:01L HLA-DPA1*03:01-B1*105:01L HLA-DPA1*01:02-B1*04:01L HLA-DRB1*16:01L HLA-DRB1*04:08L
  REGION 1..12: note = CONT. FROM ABOVE: HLA-DQA1*02:01-B1*03:03L HLA-DRB1*15:03L
  source 1..12: note = Severe acute respiratory syndrome coronavirus 2
FSTFKCYGVSPT

SEQ ID NO: 16138 - protein, 10 aa, Severe acute respiratory syndrome-related coronavirus
  REGION 1..10: note = Table B: HLA-DRB1*01:03L HLA-DQA1*03:01-B1*03:02L
  source 1..10: note = Severe acute respiratory syndrome coronavirus 2
FKCYGVSPTK

SEQ ID NO: 16139 - protein, 12 aa, Severe acute respiratory syndrome-related coronavirus
  REGION 1..12: note = Table B: HLA-DRB1*01:03L HLA-DRB1*04:04L HLA-DRB1*04:05L HLA-DQA1*01:02-B1*06:02L HLA-DRB1*01:02L HLA-DPA1*01:03-B1*03:01L HLA-DRB1*04:10L HLA-DPA1*02:01-B1*13:01L HLA-DRB1*14:54L HLA-DRB1*04:08L
  REGION 1..12: note = CONT. FROM ABOVE: HLA-DRB1*15:03L
  source 1..12: note = Severe acute respiratory syndrome coronavirus 2
TNVYADSFVIRG

SEQ ID NO: 16140 - protein, 11 aa, Severe acute respiratory syndrome-related coronavirus
  REGION 1..11: note = Table B: HLA-DRB1*01:03L HLA-DRB4*03:01NL HLA-DRB1*14:54L HLA-DRB1*14:17L
  source 1..11: note = Severe acute respiratory syndrome coronavirus 2
QIAPGQTGKIA

SEQ ID NO: 16141 - protein, 11 aa, Severe acute respiratory syndrome-related coronavirus
  REGION 1..11: note = Table B: HLA-DRB1*01:03L HLA-DQA1*01:02-B1*06:02L HLA-DRB4*03:01NL HLA-DRB1*14:17L
  source 1..11: note = Severe acute respiratory syndrome coronavirus 2
IAPGQTGKIAD

SEQ ID NO: 16142 - protein, 13 aa, Severe acute respiratory syndrome-related coronavirus
  REGION 1..13: note = Table B: HLA-DRB1*01:03L HLA-DRB1*04:05L HLA-DQA1*01:02-B1*06:02L HLA-DPA1*01:03-B1*03:01L HLA-DRB1*14:01L HLA-DQA1*01:01-B1*05:01L HLA-DQA1*01-B1*05L HLA-DQA1*05:05-B1*03:19L HLA-DRB1*12:01L
  REGION 1..13: note = CONT. FROM ABOVE: HLA-DPA1*03:01-B1*105:01L HLA-DRB1*14:54L HLA- DQA1*05:05-B1*03:01L HLA-DRB1*16:01L
  source 1..13: note = Severe acute respiratory syndrome coronavirus 2
WNSNNLDSKVGGN

SEQ ID NO: 16143 - protein, 12 aa, Severe acute respiratory syndrome-related coronavirus
  REGION 1..12: note = Table B: HLA-DRB1*01:03L HLA-DRB1*01:02L HLA-DRB1*08:01L HLA-DRB1*16:01L HLA-DRB1*04:08L
  source 1..12: note = Severe acute respiratory syndrome coronavirus 2
NYNYLYRLFRKS

SEQ ID NO: 16144 - protein, 11 aa, Severe acute respiratory syndrome-related coronavirus
  REGION 1..11: note = Table B: HLA-DRB1*01:03L HLA-DRB1*08:01L
  source 1..11: note = Severe acute respiratory syndrome coronavirus 2
NYLYRLFRKSN

SEQ ID NO: 16145 - protein, 12 aa, Severe acute respiratory syndrome-related coronavirus
  REGION 1..12: note = Table B: HLA-DRB1*01:03L HLA-DRB1*01:02L HLA-DRB1*08:01L HLA-DRB1*16:01L HLA-DRB1*04:08L
  source 1..12: note = Severe acute respiratory syndrome coronavirus 2
LYRLFRKSNLKP

SEQ ID NO: 16146 - protein, 11 aa, Severe acute respiratory syndrome-related coronavirus
  REGION 1..11: note = Table B: HLA-DRB1*01:03L
  source 1..11: note = Severe acute respiratory syndrome coronavirus 2
RLFRKSNLKPF

SEQ ID NO: 16147 - protein, 13 aa, Severe acute respiratory syndrome-related coronavirus
  REGION 1..13: note = Table B: HLA-DRB1*01:03L HLA-DQA1*01:02-B1*06:02L HLA-DRB1*01:02L HLA-DRB1*12:01L HLA-DQA1*03:01-B1*03:02L HLA-DPA1*01:02-B1*04:01L HLA-DRB1*16:01L HLA-DRB1*04:08L HLA-DQA1*02:01-B1*03:03L
  source 1..13: note = Severe acute respiratory syndrome coronavirus 2
LFRKSNLKPFERD

SEQ ID NO: 16148 - protein, 13 aa, Severe acute respiratory syndrome-related coronavirus
  REGION 1..13: note = Table B: HLA-DRB1*01:03L HLA-DRB1*04:05L HLA-DRB1*01:02L HLA-DRB1*08:04L HLA-DRB1*11:04L HLA-DRB1*11:01L HLA-DRB1*04:08L
  source 1..13: note = Severe acute respiratory syndrome coronavirus 2
KSNLKPFERDIST

SEQ ID NO: 16149 - protein, 14 aa, Severe acute respiratory syndrome-related coronavirus
  REGION 1..14: note = Table B: HLA-DRB1*01:03L HLA-DRB1*04:02L HLA-DRB1*04:05L HLA-DRB1*01:02L HLA-DPA1*01:03-B1*03:01L HLA-DPA1*03:01-B1*04:02L HLA-DPA1*01:03-B1*04:02L HLA-DRB1*12:01L HLA-DPA1*01:03-B1*02:01L HLA-DRB1*14:17L
  REGION 1..14: note = CONT. FROM ABOVE: HLA-DPA1*01:02-B1*04:01L HLA-DRB1*16:01L HLA-D RB1*04:08L HLA-DRB1*15:03L
  source 1..14: note = Severe acute respiratory syndrome coronavirus 2
RDISTEIYQAGSTP

SEQ ID NO: 16150 - protein, 13 aa, Severe acute respiratory syndrome-related coronavirus
  REGION 1..13: note = Table B: HLA-DRB1*01:03L HLA-DPA1*01:03-B1*04:02L HLA-DPA1*03:01-B1*105:01L HLA-DQA1*03:01-B1*03:02L HLA-DRB1*04:08L
  source 1..13: note = Severe acute respiratory syndrome coronavirus 2
IYQAGSTPCNGVE

SEQ ID NO: 16151 - protein, 12 aa, Severe acute respiratory syndrome-related coronavirus
  REGION 1..12: note = Table B: HLA-DRB1*01:03L HLA-DRB1*08:01L HLA-DRB1*07:01L HLA-DRB1*04:08L
  source 1..12: note = Severe acute respiratory syndrome coronavirus 2
GVGYQPYRVVVL

SEQ ID NO: 16152 - protein, 12 aa, Severe acute respiratory syndrome-related coronavirus
  REGION 1..12: note = Table B: HLA-DRB1*01:03L HLA-DRB1*04:08L
  source 1..12: note = Severe acute respiratory syndrome coronavirus 2
VGYQPYRVVVLS

SEQ ID NO: 16153 - protein, 12 aa, Severe acute respiratory syndrome-related coronavirus
  REGION 1..12: note = Table B: HLA-DRB1*01:03L HLA-DQA1*01:02-B1*06:02L HLA-DRB1*01:02L HLA-DRB1*04:08L HLA-DQA1*02:01-B1*03:03L
  source 1..12: note = Severe acute respiratory syndrome coronavirus 2
LLHAPATVCGPK

SEQ ID NO: 16154 - protein, 16 aa, Severe acute respiratory syndrome-related coronavirus
  REGION 1..16: note = Table B: HLA-DRB1*01:03L HLA-DPA1*01:03-B1*03:01L HLA-DRB1*04:08L
  source 1..16: note = Severe acute respiratory syndrome coronavirus 2
STNLVKNKCVNFNFNG

SEQ ID NO: 16155 - protein, 12 aa, Severe acute respiratory syndrome-related coronavirus
  REGION 1..12: note = Table B: HLA-DRB1*01:03L HLA-DRB1*01:01L HLA-DRB1*11:03L HLA-DRB1*10:01L HLA-DRB1*16:01L HLA-DRB1*04:08L HLA-DRB1*15:03L
  source 1..12: note = Severe acute respiratory syndrome coronavirus 2
NFNGLTGTGVLT

SEQ ID NO: 16156 - protein, 14 aa, Severe acute respiratory syndrome-related coronavirus
  REGION 1..14: note = Table B: HLA-DRB1*01:03L HLA-DRB1*04:02L HLA-DRB1*04:05L HLA-DPA1*01:03-B1*03:01L HLA-DRB1*08:01L HLA-DQA1*05:01-B1*02:01L HLA-DPA1*01:03-B1*04:02L HLA-DRB1*12:01L HLA-DPA1*01:03-B1*104:01L HLA-DRB1*04:08L
  source 1..14: note = Severe acute respiratory syndrome coronavirus 2
FNGLTGTGVLTESN

SEQ ID NO: 16157 - protein, 13 aa, Severe acute respiratory syndrome-related coronavirus
  REGION 1..13: note = Table B: HLA-DRB1*01:03L HLA-DRB1*04:05L HLA-DRB1*01:02L HLA-DRB1*08:01L HLA-DRB1*12:01L HLA-DRB1*04:08L
  source 1..13: note = Severe acute respiratory syndrome coronavirus 2
SNKKFLPFQQFGR

SEQ ID NO: 16158 - protein, 14 aa, Severe acute respiratory syndrome-related coronavirus
  REGION 1..14: note = Table B: HLA-DRB1*01:03L HLA-DRB1*04:05L HLA-DRB1*14:01L HLA-DPA1*03:01-B1*105:01L HLA-DRB1*04:08L
  source 1..14: note = Severe acute respiratory syndrome coronavirus 2
GSNVFQTRAGCLIG

SEQ ID NO: 16159 - protein, 15 aa, Severe acute respiratory syndrome-related coronavirus
  REGION 1..15: note = Table B: HLA-DRB1*01:03L HLA-DRB1*04:08L
  source 1..15: note = Severe acute respiratory syndrome coronavirus 2
SNVFQTRAGCLIGAE

SEQ ID NO: 16160 - protein, 14 aa, Severe acute respiratory syndrome-related coronavirus
  REGION 1..14: note = Table B: HLA-DRB1*01:03L HLA-DPA1*01:03-B1*04:02L HLA-DRB1*04:08L
  source 1..14: note = Severe acute respiratory syndrome coronavirus 2
IPIGAGICASYQTQ

SEQ ID NO: 16161 - protein, 12 aa, Severe acute respiratory syndrome-related coronavirus
  REGION 1..12: note = Table B: HLA-DRB1*01:03L HLA-DRB1*04:05L HLA-DRB1*12:01L
  source 1..12: note = Severe acute respiratory syndrome coronavirus 2
SPRRARSVASQS

SEQ ID NO: 16162 - protein, 14 aa, Severe acute respiratory syndrome-related coronavirus
  REGION 1..14: note = Table B: HLA-DRB1*01:03L HLA-DRB1*04:04L HLA-DQA1*01:02-B1*06:02L HLA-DRB1*01:02L HLA-DRB1*08:04L HLA-DRB1*11:04L HLA-DQA1*05:05-B1*03:01L HLA-DRB1*04:08L HLA-DRB1*15:03L
  source 1..14: note = Severe acute respiratory syndrome coronavirus 2
ENSVAYSNNSIAIP

SEQ ID NO: 16163 - protein, 11 aa, Severe acute respiratory syndrome-related coronavirus
  REGION 1..11: note = Table B: HLA-DRB1*01:03L HLA-DRB1*04:05L HLA-DQA1*01:02-B1*06:02L HLA-DRB1*14:01L HLA-DQA1*01:01-B1*05:01L HLA-DQA1*05:05-B1*03:19L HLA-DRB1*04:10L HLA-DRB1*12:01L HLA-DRB1*14:54L
  REGION 1..11: note = CONT. FROM ABOVE: HLA-DQA1*05:05-B1*03:01L HLA-DPA1*01:02-B1*04: 01L
  source 1..11: note = Severe acute respiratory syndrome coronavirus 2
LPVSMTKTSVD

SEQ ID NO: 16164 - protein, 14 aa, Severe acute respiratory syndrome-related coronavirus
  REGION 1..14: note = Table B: HLA-DRB1*01:03L HLA-DQA1*05:05-B1*03:19L HLA-DRB1*12:01L HLA-DRB1*16:01L HLA-DRB1*04:08L HLA-DRB1*15:03L
  source 1..14: note = Severe acute respiratory syndrome coronavirus 2
YGSFCTQLNRALTG

SEQ ID NO: 16165 - protein, 13 aa, Severe acute respiratory syndrome-related coronavirus
  REGION 1..13: note = Table B: HLA-DRB1*01:03L HLA-DRB1*04:04L HLA-DRB1*01:02L HLA-DRB1*04:08L HLA-DRB1*15:03L
  source 1..13: note = Severe acute respiratory syndrome coronavirus 2
LTGIAVEQDKNTQ

SEQ ID NO: 16166 - protein, 14 aa, Severe acute respiratory syndrome-related coronavirus
  REGION 1..14: note = Table B: HLA-DRB1*01:03L HLA-DRB1*04:05L HLA-DRB1*04:08L
  source 1..14: note = Severe acute respiratory syndrome coronavirus 2
QDKNTQEVFAQVKQ

SEQ ID NO: 16167 - protein, 13 aa, Severe acute respiratory syndrome-related coronavirus
  REGION 1..13: note = Table B: HLA-DRB1*01:03L HLA-DRB1*08:01L HLA-DPA1*01:02-B1*04:01L
  source 1..13: note = Severe acute respiratory syndrome coronavirus 2
VFAQVKQIYKTPP

SEQ ID NO: 16168 - protein, 13 aa, Severe acute respiratory syndrome-related coronavirus
  REGION 1..13: note = Table B: HLA-DRB1*01:03L HLA-DRB1*04:05L HLA-DRB1*01:02L HLA-DRB3*02:01L HLA-DPA1*03:01-B1*04:02L HLA-DPA1*02:01-B1*13:01L HLA-DQA1*01:03-B1*06:01L HLA-DRB1*04:08L HLA-DRB1*15:01L
  source 1..13: note = Severe acute respiratory syndrome coronavirus 2
TPPIKDFGGFNFS

SEQ ID NO: 16169 - protein, 15 aa, Severe acute respiratory syndrome-related coronavirus
  REGION 1..15: note = Table B: HLA-DRB1*01:03L HLA-DRB1*04:05L HLA-DRB1*08:01L HLA-DRB1*04:08L
  source 1..15: note = Severe acute respiratory syndrome coronavirus 2
KPSKRSFIEDLLFNK

SEQ ID NO: 16170 - protein, 12 aa, Severe acute respiratory syndrome-related coronavirus
  REGION 1..12: note = Table B: HLA-DRB1*01:03L HLA-DPA1*01:03-B1*03:01L HLA-DRB1*04:08L
  source 1..12: note = Severe acute respiratory syndrome coronavirus 2
RSFIEDLLFNKV

SEQ ID NO: 16171 - protein, 14 aa, Severe acute respiratory syndrome-related coronavirus
  REGION 1..14: note = Table B: HLA-DRB1*01:03L HLA-DRB1*16:01L HLA-DRB1*15:03L
  source 1..14: note = Severe acute respiratory syndrome coronavirus 2
KQYGDCLGDIAARD

SEQ ID NO: 16172 - protein, 15 aa, Severe acute respiratory syndrome-related coronavirus
  REGION 1..15: note = Table B: HLA-DRB1*01:03L
  source 1..15: note = Severe acute respiratory syndrome coronavirus 2
DIAARDLICAQKFNG

SEQ ID NO: 16173 - protein, 13 aa, Severe acute respiratory syndrome-related coronavirus
  REGION 1..13: note = Table B: HLA-DRB1*01:03L HLA-DRB1*08:04L HLA-DRB1*11:04L HLA-DRB1*11:01L HLA-DRB1*15:03L
  source 1..13: note = Severe acute respiratory syndrome coronavirus 2
ARDLICAQKFNGL

SEQ ID NO: 16174 - protein, 12 aa, Severe acute respiratory syndrome-related coronavirus
  REGION 1..12: note = Table B: HLA-DRB1*01:03L HLA-DQA1*01:02-B1*06:02L HLA-DRB1*08:04L HLA-DRB1*14:01L HLA-DRB1*08:01L HLA-DPA1*01:03-B1*04:01L HLA-DPA1*01:03-B1*04:02L HLA-DRB1*12:01L HLA-DPA1*01:03-B1*02:01L HLA-DRB1*16:01L
  REGION 1..12: note = CONT. FROM ABOVE: HLA-DQA1*01:03-B1*06:01L HLA-DRB1*04:08L HLA-D RB1*15:03L
  source 1..12: note = Severe acute respiratory syndrome coronavirus 2
DLICAQKFNGLT

SEQ ID NO: 16175 - protein, 13 aa, Severe acute respiratory syndrome-related coronavirus
  REGION 1..13: note = Table B: HLA-DRB1*01:03L HLA-DRB1*04:04L HLA-DRB3*02:01L HLA-DQA1*05:05-B1*03:01L
  source 1..13: note = Severe acute respiratory syndrome coronavirus 2
EMIAQYTSALLAG

SEQ ID NO: 16176 - protein, 14 aa, Severe acute respiratory syndrome-related coronavirus
  REGION 1..14: note = Table B: HLA-DRB1*01:03L HLA-DRB1*01:02L HLA-DPA1*01:03-B1*03:01L HLA-DQA1*01:01-B1*05:01L HLA-DRB1*08:01L HLA-DQA1*05:01-B1*02:01L HLA-DPA1*01:03-B1*04:02L HLA-DRB1*16:01L HLA-DRB1*04:08L
  source 1..14: note = Severe acute respiratory syndrome coronavirus 2
GTITSGWTFGAGAA

SEQ ID NO: 16177 - protein, 12 aa, Severe acute respiratory syndrome-related coronavirus
  REGION 1..12: note = Table B: HLA-DRB1*01:03L HLA-DRB1*04:05L HLA-DQA1*01:02-B1*06:02L HLA-DRB1*01:02L HLA-DPA1*01:03-B1*03:01L HLA-DPA1*01:03-B1*04:02L HLA-DRB1*12:01L HLA-DPA1*02:01-B1*13:01L
  REGION 1..12: note = CONT. FROM ABOVE: HLA-DPA1*03:01-B1*105:01L HLA-DRB1*10:01L HLA- DRB1*16:01L HLA-DRB1*04:08L HLA-DRB1*15:03L
  source 1..12: note = Severe acute respiratory syndrome coronavirus 2
RFNGIGVTQNVL

SEQ ID NO: 16178 - protein, 13 aa, Severe acute respiratory syndrome-related coronavirus
  REGION 1..13: note = Table B: HLA-DRB1*01:03L HLA-DRB1*04:05L HLA-DRB1*01:02L HLA-DQA1*05:05-B1*03:19L HLA-DRB1*04:10L HLA-DPA1*01:02-B1*04:01L HLA-DRB1*16:01L HLA-DRB1*04:08L HLA-DRB1*15:03L
  source 1..13: note = Severe acute respiratory syndrome coronavirus 2
IGVTQNVLYENQK

SEQ ID NO: 16179 - protein, 11 aa, Severe acute respiratory syndrome-related coronavirus
  REGION 1..11: note = Table B: HLA-DRB1*01:03L HLA-DRB1*04:04L HLA-DRB1*04:05L HLA-DRB4*03:01NL HLA-DQA1*01-B1*05L HLA-DRB1*04:10L HLA-DRB1*14:54L HLA-DRB1*16:01L HLA-DRB1*04:08L HLA-DQA1*02:01-B1*03:03L
  source 1..11: note = Severe acute respiratory syndrome coronavirus 2
IGKIQDSLSST

SEQ ID NO: 16180 - protein, 15 aa, Severe acute respiratory syndrome-related coronavirus
  REGION 1..15: note = Table B: HLA-DRB1*01:03L HLA-DRB1*01:02L HLA-DPA1*01:03-B1*03:01L HLA-DPA1*03:01-B1*105:01L
  source 1..15: note = Severe acute respiratory syndrome coronavirus 2
GKIQDSLSSTASALG

SEQ ID NO: 16181 - protein, 11 aa, Severe acute respiratory syndrome-related coronavirus
  REGION 1..11: note = Table B: HLA-DRB1*01:03L HLA-DQA1*01:01-B1*05:01L
  source 1..11: note = Severe acute respiratory syndrome coronavirus 2
SSTASALGKLQ

SEQ ID NO: 16182 - protein, 11 aa, Severe acute respiratory syndrome-related coronavirus
  REGION 1..11: note = Table B: HLA-DRB1*01:03L HLA-DQA1*01:01-B1*05:01L
  source 1..11: note = Severe acute respiratory syndrome coronavirus 2
STASALGKLQD

SEQ ID NO: 16183 - protein, 13 aa, Severe acute respiratory syndrome-related coronavirus
  REGION 1..13: note = Table B: HLA-DRB1*01:03L HLA-DRB1*04:04L HLA-DRB1*10:01L HLA-DRB1*04:08L HLA-DRB1*15:03L
  source 1..13: note = Severe acute respiratory syndrome coronavirus 2
SALGKLQDVVNQN

SEQ ID NO: 16184 - protein, 13 aa, Severe acute respiratory syndrome-related coronavirus
  REGION 1..13: note = Table B: HLA-DRB1*01:03L HLA-DRB1*04:05L HLA-DRB1*01:02L HLA-DQA1*01:01-B1*05:01L HLA-DRB1*12:01L HLA-DRB1*14:17L HLA-DRB1*16:01L HLA-DRB1*04:08L
  source 1..13: note = Severe acute respiratory syndrome coronavirus 2
VNQNAQALNTLVK

SEQ ID NO: 16185 - protein, 14 aa, Severe acute respiratory syndrome-related coronavirus
  REGION 1..14: note = Table B: HLA-DRB1*01:03L HLA-DRB1*01:02L HLA-DRB1*12:01L HLA-DRB1*16:01L HLA-DRB1*04:08L
  source 1..14: note = Severe acute respiratory syndrome coronavirus 2
NAQALNTLVKQLSS

SEQ ID NO: 16186 - protein, 13 aa, Severe acute respiratory syndrome-related coronavirus
  REGION 1..13: note = Table B: HLA-DRB1*01:03L HLA-DRB1*11:03L HLA-DRB1*04:08L
  source 1..13: note = Severe acute respiratory syndrome coronavirus 2
QALNTLVKQLSSN

SEQ ID NO: 16187 - protein, 13 aa, Severe acute respiratory syndrome-related coronavirus
  REGION 1..13: note = Table B: HLA-DRB1*01:03L HLA-DRB1*04:04L HLA-DPA1*03:01-B1*105:01L HLA-DRB1*04:08L
  source 1..13: note = Severe acute respiratory syndrome coronavirus 2
TLVKQLSSNFGAI

SEQ ID NO: 16188 - protein, 12 aa, Severe acute respiratory syndrome-related coronavirus
  REGION 1..12: note = Table B: HLA-DRB1*01:03L HLA-DRB1*04:05L HLA-DRB1*01:02L HLA-DQA1*01:01-B1*05:01L HLA-DQA1*05:05-B1*03:19L HLA-DPA1*01:02-B1*04:01L HLA-DRB1*04:08L HLA-DRB1*15:03L
  source 1..12: note = Severe acute respiratory syndrome coronavirus 2
AISSVLNDILSR

SEQ ID NO: 16189 - protein, 12 aa, Severe acute respiratory syndrome-related coronavirus
  REGION 1..12: note = Table B: HLA-DRB1*01:03L HLA-DRB1*04:02L HLA-DRB1*04:04L HLA-DRB1*04:05L HLA-DQA1*01:02-B1*06:02L HLA-DRB1*01:02L HLA-DRB4*03:01NL HLA-DRB1*14:01L HLA-DRB1*04:10L HLA-DRB1*12:01L HLA-DQA1*03:01-B1*03:02L HLA-DRB1*14:54L HLA-DRB1*16:01L
  REGION 1..12: note = CONT. FROM ABOVE: HLA-DRB1*04:08L HLA-DQA1*02:01-B1*03:03L HLA-D RB1*15:03L
  source 1..12: note = Severe acute respiratory syndrome coronavirus 2
GRLQSLQTYVTQ

SEQ ID NO: 16190 - protein, 12 aa, Severe acute respiratory syndrome-related coronavirus
  REGION 1..12: note = Table B: HLA-DRB1*01:03L HLA-DRB1*04:05L HLA-DRB1*04:08L HLA-DRB1*15:01L
  source 1..12: note = Severe acute respiratory syndrome coronavirus 2
SLQTYVTQQLIR

SEQ ID NO: 16191 - protein, 13 aa, Severe acute respiratory syndrome-related coronavirus
  REGION 1..13: note = Table B: HLA-DRB1*01:03L HLA-DRB1*04:02L HLA-DRB1*04:05L HLA-DRB1*01:02L HLA-DRB1*14:01L HLA-DQA1*05:01-B1*02:01L HLA-DRB1*12:01L HLA-DPA1*03:01-B1*105:01L HLA-DRB1*14:54L HLA-DQA1*05:05-B1*03:01L HLA-DRB1*14:17L HLA-DRB1*16:01L
  REGION 1..13: note = CONT. FROM ABOVE: HLA-DRB1*04:08L HLA-DRB1*15:03L
  source 1..13: note = Severe acute respiratory syndrome coronavirus 2
TQQLIRAAEIRAS

SEQ ID NO: 16192 - protein, 13 aa, Severe acute respiratory syndrome-related coronavirus
  REGION 1..13: note = Table B: HLA-DRB1*01:03L HLA-DRB1*04:02L HLA-DRB1*14:17L HLA-DRB1*16:01L HLA-DRB1*15:03L
  source 1..13: note = Severe acute respiratory syndrome coronavirus 2
QQLIRAAEIRASA

SEQ ID NO: 16193 - protein, 12 aa, Severe acute respiratory syndrome-related coronavirus
  REGION 1..12: note = Table B: HLA-DRB1*01:03L HLA-DRB1*04:04L HLA-DRB4*03:01NL HLA-DRB1*14:01L HLA-DRB1*11:04L HLA-DRB1*12:01L HLA-DRB1*12:02L HLA-DRB1*04:08L
  source 1..12: note = Severe acute respiratory syndrome coronavirus 2
AAEIRASANLAA

SEQ ID NO: 16194 - protein, 12 aa, Severe acute respiratory syndrome-related coronavirus
  REGION 1..12: note = Table B: HLA-DRB1*01:03L HLA-DRB1*04:04L HLA-DQA1*01:02-B1*06:02L HLA-DRB1*01:02L HLA-DRB4*03:01NL HLA-DRB1*14:01L HLA-DRB1*11:04L HLA-DRB1*12:01L HLA-DQA1*05:05-B1*03:01L HLA-DRB1*10:01L HLA-DRB1*04:08L
  REGION 1..12: note = CONT. FROM ABOVE: HLA-DRB1*08:03L HLA-DQA1*02:01-B1*03:03L
  source 1..12: note = Severe acute respiratory syndrome coronavirus 2
AEIRASANLAAT

SEQ ID NO: 16195 - protein, 14 aa, Severe acute respiratory syndrome-related coronavirus
  REGION 1..14: note = Table B: HLA-DRB1*01:03L HLA-DRB1*04:05L HLA-DRB1*08:01L HLA-DRB1*12:01L
  source 1..14: note = Severe acute respiratory syndrome coronavirus 2
ATKMSECVLGQSKR

SEQ ID NO: 16196 - protein, 14 aa, Severe acute respiratory syndrome-related coronavirus
  REGION 1..14: note = Table B: HLA-DRB1*01:03L HLA-DRB1*04:04L HLA-DRB1*04:05L HLA-DQA1*01:02-B1*06:02L HLA-DRB1*01:02L HLA-DRB1*12:01L HLA-DPA1*02:01-B1*13:01L HLA-DRB1*07:01L HLA-DRB1*16:01L HLA-DRB1*04:08L
  source 1..14: note = Severe acute respiratory syndrome coronavirus 2
GQSKRVDFCGKGYH

SEQ ID NO: 16197 - protein, 16 aa, Severe acute respiratory syndrome-related coronavirus
  REGION 1..16: note = Table B: HLA-DRB1*01:03L HLA-DPA1*03:01-B1*105:01L HLA-DPA1*01:02-B1*04:01L HLA-DRB1*16:01L HLA-DRB1*04:08L
  source 1..16: note = Severe acute respiratory syndrome coronavirus 2
RVDFCGKGYHLMSFPQ

SEQ ID NO: 16198 - protein, 14 aa, Severe acute respiratory syndrome-related coronavirus
  REGION 1..14: note = Table B: HLA-DRB1*01:03L HLA-DRB1*08:04L HLA-DRB1*08:01L HLA-DRB1*11:01L HLA-DPA1*01:03-B1*04:02L HLA-DRB1*12:01L HLA-DPA1*02:01-B1*13:01L HLA-DPA1*01:02-B1*04:01L HLA-DQA1*02:01-B1*03:03L HLA-DRB1*15:03L
  source 1..14: note = Severe acute respiratory syndrome coronavirus 2
GKGYHLMSFPQSAP

SEQ ID NO: 16199 - protein, 12 aa, Severe acute respiratory syndrome-related coronavirus
  REGION 1..12: note = Table B: HLA-DRB1*01:03L HLA-DPA1*01:03-B1*04:01L HLA-DPA1*01:03-B1*04:02L HLA-DRB1*16:01L HLA-DRB1*04:08L
  source 1..12: note = Severe acute respiratory syndrome coronavirus 2
VFLHVTYVPAQE

SEQ ID NO: 16200 - protein, 12 aa, Severe acute respiratory syndrome-related coronavirus
  REGION 1..12: note = Table B: HLA-DRB1*01:03L HLA-DRB1*04:02L HLA-DRB1*01:02L HLA-DPA1*01:03-B1*03:01L HLA-DQA1*01:01-B1*05:01L HLA-DRB1*08:01L HLA-DQA1*05:01-B1*02:01L HLA-DPA1*01:03-B1*04:02L HLA-DRB1*12:01L HLA-DRB1*16:01L
  REGION 1..12: note = CONT. FROM ABOVE: HLA-DRB1*04:08L HLA-DRB1*15:03L
  source 1..12: note = Severe acute respiratory syndrome coronavirus 2
NFTTAPAICHDG

SEQ ID NO: 16201 - protein, 11 aa, Severe acute respiratory syndrome-related coronavirus
  REGION 1..11: note = Table B: HLA-DRB1*01:03L HLA-DRB1*16:01L
  source 1..11: note = Severe acute respiratory syndrome coronavirus 2
ICHDGKAHFPR

SEQ ID NO: 16202 - protein, 14 aa, Severe acute respiratory syndrome-related coronavirus
  REGION 1..14: note = Table B: HLA-DRB1*01:03L HLA-DRB1*04:04L HLA-DRB1*01:02L HLA-DPA1*01:03-B1*03:01L HLA-DRB1*08:01L HLA-DRB1*12:01L HLA-DPA1*02:01-B1*13:01L HLA-DRB1*07:01L HLA-DRB1*04:08L
  source 1..14: note = Severe acute respiratory syndrome coronavirus 2
HFPREGVFVSNGTH

SEQ ID NO: 16203 - protein, 12 aa, Severe acute respiratory syndrome-related coronavirus
  REGION 1..12: note = Table B: HLA-DRB1*01:03L HLA-DRB1*08:04L HLA-DRB1*12:02L HLA-DRB1*04:08L HLA-DRB1*15:03L
  source 1..12: note = Severe acute respiratory syndrome coronavirus 2
NASVVNIQKEID

SEQ ID NO: 16204 - protein, 13 aa, Severe acute respiratory syndrome-related coronavirus
  REGION 1..13: note = Table B: HLA-DRB1*01:03L HLA-DRB1*04:02L HLA-DRB1*08:04L HLA-DRB3*02:01L HLA-DPA1*03:01-B1*04:02L HLA-DQA1*01:01-B1*05:01L HLA-DQA1*05:05-B1*03:19L HLA-DRB1*12:02L HLA-DPA1*01:03-B1*104:01L
  REGION 1..13: note = CONT. FROM ABOVE: HLA-DQA1*05:05-B1*03:01L HLA-DRB1*04:08L
  source 1..13: note = Severe acute respiratory syndrome coronavirus 2
EIDRLNEVAKNLN

SEQ ID NO: 16205 - protein, 13 aa, Severe acute respiratory syndrome-related coronavirus
  REGION 1..13: note = Table B: HLA-DRB1*01:03L HLA-DRB1*12:01L HLA-DRB1*14:17L HLA-DRB1*04:08L HLA-DRB1*15:03L
  source 1..13: note = Severe acute respiratory syndrome coronavirus 2
AKNLNESLIDLQE

SEQ ID NO: 16206 - protein, 14 aa, Severe acute respiratory syndrome-related coronavirus
  REGION 1..14: note = Table B: HLA-DRB1*01:03L HLA-DRB1*01:02L HLA-DPA1*01:03-B1*03:01L HLA-DPA1*03:01-B1*04:02L HLA-DRB1*12:01L HLA-DQA1*05:05-B1*03:01L HLA-DRB1*04:08L HLA-DRB1*15:03L
  source 1..14: note = Severe acute respiratory syndrome coronavirus 2
KNLNESLIDLQELG

SEQ ID NO: 16207 - protein, 10 aa, Severe acute respiratory syndrome-related coronavirus
  REGION 1..10: note = Table B: HLA-DRB1*01:03L HLA-DQA1*01:02-B1*06:02L HLA-DQA1*05:05-B1*03:19L HLA-DQA1*02:01-B1*03:03L
  source 1..10: note = Severe acute respiratory syndrome coronavirus 2
PVLKGVKLHY

SEQ ID NO: 16208 - protein, 15 aa, Severe acute respiratory syndrome-related coronavirus
  REGION 1..15: note = Table B: HLA-DRB1*01:03L HLA-DRB1*10:01L
  source 1..15: note = Severe acute respiratory syndrome coronavirus 2
IVGVALLAVFQSASK

SEQ ID NO: 16209 - protein, 11 aa, Severe acute respiratory syndrome-related coronavirus
  REGION 1..11: note = Table B: HLA-DRB1*01:03L
  source 1..11: note = Severe acute respiratory syndrome coronavirus 2
SASKIITLKKR

SEQ ID NO: 16210 - protein, 14 aa, Severe acute respiratory syndrome-related coronavirus
  REGION 1..14: note = Table B: HLA-DRB1*01:03L HLA-DRB1*01:02L HLA-DRB1*08:04L HLA-DPA1*01:03-B1*03:01L HLA-DPA1*01:03-B1*04:01L HLA-DRB1*12:01L HLA-DPA1*01:03-B1*02:01L HLA-DRB1*04:08L
  source 1..14: note = Severe acute respiratory syndrome coronavirus 2
NPLLYDANYFLCWH

SEQ ID NO: 16211 - protein, 14 aa, Severe acute respiratory syndrome-related coronavirus
  REGION 1..14: note = Table B: HLA-DRB1*01:03L HLA-DRB1*04:05L HLA-DQA1*01:02-B1*06:02L HLA-DRB1*01:02L HLA-DPA1*01:03-B1*03:01L HLA-DQA1*01:01-B1*05:01L HLA-DRB1*08:01L HLA-DRB1*11:01L HLA-DQA1*05:05-B1*03:116L
  REGION 1..14: note = CONT. FROM ABOVE: HLA-DPA1*01:03-B1*04:02L HLA-DRB1*12:01L HLA-D PA1*03:01-B1*105:01L HLA-DRB1*16:01L HLA-DQA1*01:03-B1*06:01L HL A-DRB1*04:08L
  source 1..14: note = Severe acute respiratory syndrome coronavirus 2
IVITSGDGTTSPIS

SEQ ID NO: 16212 - protein, 11 aa, Severe acute respiratory syndrome-related coronavirus
  REGION 1..11: note = Table B: HLA-DRB1*01:03L HLA-DQA1*01:02-B1*06:02L HLA-DQA1*01-B1*05L
  source 1..11: note = Severe acute respiratory syndrome coronavirus 2
GDGTTSPISEH

SEQ ID NO: 16213 - protein, 11 aa, Severe acute respiratory syndrome-related coronavirus
  REGION 1..11: note = Table B: HLA-DRB1*01:03L HLA-DRB1*04:02L HLA-DRB1*04:05L HLA-DQA1*01:02-B1*06:02L HLA-DRB4*03:01NL HLA-DQA1*01-B1*05L HLA-DRB1*12:01L HLA-DRB1*04:08L
  source 1..11: note = Severe acute respiratory syndrome coronavirus 2
DGTTSPISEHD

SEQ ID NO: 16214 - protein, 13 aa, Severe acute respiratory syndrome-related coronavirus
  REGION 1..13: note = Table B: HLA-DRB1*01:03L HLA-DRB1*04:08L
  source 1..13: note = Severe acute respiratory syndrome coronavirus 2
GGYTEKWESGVKD

SEQ ID NO: 16215 - protein, 12 aa, Severe acute respiratory syndrome-related coronavirus
  REGION 1..12: note = Table B: HLA-DRB1*01:03L HLA-DQA1*01:02-B1*06:02L HLA-DPA1*03:01-B1*04:02L HLA-DQA1*01-B1*05L HLA-DQA1*05:01-B1*02:01L HLA-DPA1*01:03-B1*04:01L HLA-DPA1*01:03-B1*04:02L HLA-DPA1*03:01-B1*105:01M
  REGION 1..12: note = CONT. FROM ABOVE: HLA-DPA1*01:03-B1*02:01L HLA-DPA1*01:02-B1*04: 01L HLA-DRB1*16:01L HLA-DQA1*01:03-B1*06:01L HLA-DRB1*04:08L
  source 1..12: note = Severe acute respiratory syndrome coronavirus 2
FTSDYYQLYSTQ

SEQ ID NO: 16216 - protein, 13 aa, Severe acute respiratory syndrome-related coronavirus
  REGION 1..13: note = Table B: HLA-DRB1*01:03L HLA-DRB1*04:02L HLA-DRB1*04:05L HLA-DRB4*03:01NL HLA-DRB1*14:17L HLA-DRB1*07:01L HLA-DRB1*04:08L
  source 1..13: note = Severe acute respiratory syndrome coronavirus 2
TSDYYQLYSTQLS

SEQ ID NO: 16217 - protein, 12 aa, Severe acute respiratory syndrome-related coronavirus
  REGION 1..12: note = Table B: HLA-DRB1*01:03L HLA-DRB1*01:01L HLA-DQA1*05:05-B1*03:19L HLA-DRB1*12:01L HLA-DPA1*03:01-B1*105:01L HLA-DQA1*05:05-B1*03:01L HLA-DRB1*10:01L HLA-DRB1*04:08L HLA-DQA1*02:01-B1*03:03L
  REGION 1..12: note = CONT. FROM ABOVE: HLA-DRB1*15:03L
  source 1..12: note = Severe acute respiratory syndrome coronavirus 2
YYQLYSTQLSTD

SEQ ID NO: 16218 - protein, 12 aa, Severe acute respiratory syndrome-related coronavirus
  REGION 1..12: note = Table B: HLA-DRB1*01:03L HLA-DRB1*04:04L HLA-DRB1*04:05L HLA-DQA1*01:02-B1*06:02L HLA-DRB1*01:02L HLA-DRB4*03:01NL HLA-DRB1*14:01L HLA-DRB1*11:03L HLA-DQA1*05:01-B1*02:01L HLA-DRB1*04:10L HLA-DRB1*12:01L HLA-DPA1*03:01-B1*105:01L
  REGION 1..12: note = CONT. FROM ABOVE: HLA-DQA1*03:01-B1*03:02L HLA-DRB1*14:54L HLA-D RB1*10:01L HLA-DRB1*04:08L HLA-DQA1*02:01-B1*03:03L HLA-DRB1*15: 03L
  source 1..12: note = Severe acute respiratory syndrome coronavirus 2
YQLYSTQLSTDT

SEQ ID NO: 16219 - protein, 11 aa, Severe acute respiratory syndrome-related coronavirus
  REGION 1..11: note = Table B: HLA-DRB1*01:03L HLA-DQA1*01:02-B1*06:02L HLA-DQA1*01:01-B1*05:01L HLA-DRB1*08:01L HLA-DRB1*12:01L HLA-DPA1*02:01-B1*13:01L HLA-DRB1*14:54L
  source 1..11: note = Severe acute respiratory syndrome coronavirus 2
IYNKIVDEPEE

SEQ ID NO: 16220 - protein, 14 aa, Severe acute respiratory syndrome-related coronavirus
  REGION 1..14: note = Table B: HLA-DRB1*01:03L HLA-DRB1*08:01L HLA-DPA1*01:03-B1*04:02L HLA-DRB1*12:01L
  source 1..14: note = Severe acute respiratory syndrome coronavirus 2
DGSSGVVNPVMEPI

SEQ ID NO: 16221 - protein, 10 aa, Severe acute respiratory syndrome-related coronavirus
  REGION 1..10: note = Table B: HLA-DRB1*01:03L HLA-DQA1*01:02-B1*06:02L HLA-DRB1*14:01L HLA-DPA1*02:01-B1*13:01L HLA-DPA1*01:02-B1*04:01L HLA-DRB1*16:01L HLA-DQA1*01:03-B1*06:01L HLA-DQA1*02:01-B1*03:03L
  REGION 1..10: note = CONT. FROM ABOVE: HLA-DRB1*15:03L
  source 1..10: note = Severe acute respiratory syndrome coronavirus 2
QFAYANRNRF

SEQ ID NO: 16222 - protein, 10 aa, Severe acute respiratory syndrome-related coronavirus
  REGION 1..10: note = Table B: HLA-DRB1*01:03L HLA-DRB1*04:05L HLA-DQA1*01:02-B1*06:02L HLA-DRB1*03:01L HLA-DQA1*05:05-B1*03:19L HLA-DQA1*05:01-B1*02:01L HLA-DRB4*01:01L HLA-DPA1*01:03-B1*04:01L
  REGION 1..10: note = CONT. FROM ABOVE: HLA-DPA1*02:01-B1*13:01L HLA-DPA1*01:03-B1*104 :01L HLA-DRB1*16:01L HLA-DQA1*01:03-B1*06:01L HLA-DQA1*02:01-B1* 03:03L
  source 1..10: note = Severe acute respiratory syndrome coronavirus 2
AYANRNRFLY

SEQ ID NO: 16223 - protein, 10 aa, Severe acute respiratory syndrome-related coronavirus
  REGION 1..10: note = Table B: HLA-DRB1*01:03L HLA-DRB1*11:04L HLA-DRB1*08:01L HLA-DRB1*11:01L
  source 1..10: note = Severe acute respiratory syndrome coronavirus 2
FIASFRLFAR

SEQ ID NO: 16224 - protein, 11 aa, Severe acute respiratory syndrome-related coronavirus
  REGION 1..11: note = Table B: HLA-DRB1*01:03L HLA-DRB1*08:01L HLA-DPA1*01:02-B1*04:01L
  source 1..11: note = Severe acute respiratory syndrome coronavirus 2
IASFRLFARTR

SEQ ID NO: 16225 - protein, 10 aa, Severe acute respiratory syndrome-related coronavirus
  REGION 1..10: note = Table B: HLA-DRB1*01:03L HLA-DQA1*01:02-B1*06:02L HLA-DRB1*03:01L HLA-DPA1*02:01-B1*13:01L HLA-DQA1*01:03-B1*06:01L HLA-DQA1*02:01-B1*03:03L
  source 1..10: note = Severe acute respiratory syndrome coronavirus 2
RLFARTRSMW

SEQ ID NO: 16226 - protein, 14 aa, Severe acute respiratory syndrome-related coronavirus
  REGION 1..14: note = Table B: HLA-DRB1*01:03L HLA-DRB1*12:01L HLA-DPA1*03:01-B1*105:01L HLA-DRB1*04:08L
  source 1..14: note = Severe acute respiratory syndrome coronavirus 2
LFARTRSMWSFNPE
